United States Patent Application Publication US 2004/0214272 A1 - sequence listing, part 49

SEQ ID NO: 234715 - protein, 47 aa, Zea mays
  Clone ID: MRT4577_145644C.1.pep
LRLKGKFWHTRATVVARIGNYLKNRIPKILEVEIEDEKQLDDSPAAF

SEQ ID NO: 234716 - protein, 70 aa, Zea mays
  Clone ID: MRT4577_145645C.1.pep
EKRKNRLTAADPYPAVAVTAAASQSSTKPSALKEEGPPWVRVNFALTLTSTISLDGNLPTYRYREKLSIF

SEQ ID NO: 234717 - protein, 156 aa, Zea mays
  Clone ID: MRT4577_145646C.1.pep
MAFAAVLRARLLPVPTPLSSSSPPPFFAPSAYVRVPRLTAAAARTVRYRRRGGRPHRAAAAITASLDLTEDNVRVALDEAKSELGQLFDTSVGITGQVDLAELDGPFVKLRLKGKFWHTRATVVARIGNYLKNRIPEILEVEIEDEKQLDDSPAAF

SEQ ID NO: 234718 - protein, 150 aa, Zea mays
  unsure (1)..(150): unsure at all Xaa locations
  Clone ID: MRT4577_145647C.1.pep
SDRRLPFAFARSLASHRRQRPDAHQNQHDIITPLQQNPPTIETLLDELKAADGLQTELEETPLRTRDQXCNAANWIGVHQALMGIKNEGRIGPSLDTKDHNVLMXKYLYKGLSTGDKTTCDNXLDTDEKMTDDDRRRCIMQSLDDTDDTE

SEQ ID NO: 234719 - protein, 223 aa, Zea mays
  Clone ID: MRT4577_145648C.1.pep
MSEADSARHIKIEKSCPPPPTTLGRKTCIHRTQYSSSLQSLHQHAAAAAARGGAGSGNGVKQPASAAGKRVMVVVDESSGANHAMMWALTHVADKGDFLTLLHVLPRSGSGRGEEASSLANSLGTLCKASRPEVEVEALVIQGPKLGTVLSQVKKLEASVLVLSQCRPSPCWLSCFLRSSGEEFVEQCINQAECLTLAVRKQSKGVGGYLISTRWQKNFWLLA

SEQ ID NO: 234720 - protein, 73 aa, Zea mays
  Clone ID: MRT4577_145649C.1.pep
GRDVRVLDRQLLIWWLVSESRRSVGQQKGVWGSKWSSLLPDQPKAVQCVQRLVRTVASLHESPPLAYGHCPWK

SEQ ID NO: 234721 - protein, 50 aa, Zea mays
  Clone ID: MRT4577_14564C.1.pep
NLFRLTVFLLCGTGTCFKKNLTRNPLLVSKLQGMFLNSRKISNFKKQPVF

SEQ ID NO: 234722 - protein, 65 aa, Zea mays
  Clone ID: MRT4577_145650C.1.pep
LLFKWLMIMIVILIVSITTTTITWYVVVPVAIARGICEAVIVIGVEEHNDKHIIPPFVGSIAIKA

SEQ ID NO: 234723 - protein, 97 aa, Zea mays
  unsure (1)..(97): unsure at all Xaa locations
  Clone ID: MRT4577_145651C.1.pep
PLYTFYLGRPNSNSPPVFLKRRCXKNRAITNLNALTKLPPLPRCVITKKAPTDRLSKKLRSLNGQWHPPCNGSLTAGGLCVTPILTVTFASALIPAP

SEQ ID NO: 234724 - protein, 64 aa, Zea mays
  Clone ID: MRT4577_145652C.1.pep
SCPCRLKPSHLKKRMQSRPWTVSVLWEKCNIFLPRLTRCCKRSVHLLQIIMQSTTDQSVWLGCI

SEQ ID NO: 234725 - protein, 151 aa, Zea mays
  Clone ID: MRT4577_145653C.1.pep
MGLHLGKTGCPPPPPSRTSDVVTHNLARTYVPNQTMSARALLLTTATLLLLVAAARAGQPLAGGWSPIRNVSDPHIQELGGWAVTEHVRRANDGLRFGEVTGGEEQVVSGMNYKLVLDATDADGKVAAYGAFVYEQSWTNTRELVSFAPAS

SEQ ID NO: 234726 - protein, 77 aa, Zea mays
  Clone ID: MRT4577_145654C.1.pep
GGVCWALLGCASPSDIPWPLVAHGFALGKSPHLTERGAPVATPKGPYLYLELHFSQLSASCLRRFLTSTEPRLARFL

SEQ ID NO: 234727 - protein, 148 aa, Zea mays
  unsure (1)..(148): unsure at all Xaa locations
  Clone ID: MRT4577_145655C.1.pep
FTRPGNLQLRGSTTSQVVNSGYLFDIRPDLVKGDSVVLPLEFASAVEGRVLLTTWWPQDAALQHEAVGXFLTHSNWNFSQESLCAGVPMPSVRAPAGVVQCSSTGPPVFTLINRATGLAIKHSLGQFIHAGPLHPEYLDGPCIKVIHM

SEQ ID NO: 234728 - protein, 227 aa, Zea mays
  unsure (1)..(227): unsure at all Xaa locations
  Clone ID: MRT4577_145656C.1.pep
MEPSIGNHMAEDQPTPAASTAEEAAMDADTSGERRSAAALVGLLRGFLAVQQRRAEAYSTLRRGFSEYMAYGGELAYQQLCGNITAEFNDCSKQNLXRSDLADLLKGVQAHEKEKLHLTAKIQVLKKAGRPSERLVNHADCRSRSMAQHVCVHVKEITEAAGTEDAEADAEYDAALKEAIQGVQVAVSSINEHMEEVRYEIDGLEAETIGSKWSEVEEAPGTLSINR

SEQ ID NO: 234729 - protein, 241 aa, Zea mays
  Clone ID: MRT4577_145657C.1.pep
MAEMEPSIGNHMAEDQPTPAASTVEEAAMDADTSGERRSAAALVGLLRGFLAVQQRRAEAYSTLRRGFSEYMAYGGELAYQQLCGNITAEFNDCSKQVLEIISLLSMPEFSRSDLADLLKGVQAHEKEKLHLTAKIQVLKKAGRPSERLVNHADCRSRSMAQHVCVHVKEITEAAGTEDAEADAEYDAALKEAIQGVQVAVSSINEHMEEVRYEIDGLEAETIGSKWSEVEEAFPGTLSIK

SEQ ID NO: 234730 - protein, 79 aa, Zea mays
  Clone ID: MRT4577_145658C.1.pep
MEHLSSCKMLNGWNIQFRHQSATLGCAMTFSIYLPPYTASNLSELHWLWCLTCTDQNHIIKSGAQRNCAGHGMGLVATD

SEQ ID NO: 234731 - protein, 69 aa, Zea mays
  Clone ID: MRT4577_145659C.1.pep
SNLSIVSVVHQFTVNLQAASTAGAAAIGSVALWGNQRVVRRLPSLPPLLRQGRRLPRARLRRPRRRLQP

SEQ ID NO: 234732 - protein, 60 aa, Zea mays
  Clone ID: MRT4577_14565C.1.pep
TGMLVTQHRLTHPFPLLLKHHGRQRAQDSEKTSSSKTDSKPRQPRHCRGNQELLSERNTL

SEQ ID NO: 234733 - protein, 88 aa, Zea mays
  Clone ID: MRT4577_145660C.1.pep
SCSSASGGGPSTSVSSVSSASRPSDTLYIGIWLTNRRASATYGLLCVIDCQLGWLVSRVLKYWWCRRSCMHVNTGVHARIFLASQLWP

SEQ ID NO: 234734 - protein, 141 aa, Zea mays
  Clone ID: MRT4577_145661C.1.pep
QKNPKILSSHILPITLLFILSQTIFLSLFSPIVNFIEVPPIPPALNTPSYPFPFHTHATPSAKANPPLPQLLRFASYTHSVVLFPVPPPGKPLRSPPSSFSPPHDPVFTQDFPPPYFAFLTPPPPLCWYTCWFVCLLVHVA

SEQ ID NO: 234735 - protein, 102 aa, Zea mays
  Clone ID: MRT4577_145662C.1.pep
YLQLLPAAAPWDSGCADVIMVVEWSHARPSPHMVSMCRSNTEAITTVTCQWLTDSCYRKLIFIVALRTPSGTEPDLLWSQCAVSRREGACQLPSVKRDIIYL

SEQ ID NO: 234736 - protein, 113 aa, Zea mays
  Clone ID: MRT4577_145663C.1.pep
ERRPKTQDPRAKPKQAHPKTTAAAAFREGHARGRRTQGRAPAEQTNPAHKRTPPPHRSREGKEPPPPAPSQHPARRAITPTPRTPPPGGSEPPPTSSTSTRAAHALRGREDGG

SEQ ID NO: 234737 - protein, 274 aa, Zea mays
  unsure (1)..(274): unsure at all Xaa locations
  Clone ID: MRT4577_145664C.1.pep
GYEPDRVTYCTLIDIHAKSGYLEVAMDLYGRMQEVGLSPDTFTYSAMVNCLGKGGQLAAAYKLFCEMIENGCTPNLVTYNIIIALQAKARNYDNVVKLYRDMQIAGFRPDKITYSIVMEVLGHCGHLDEAEAVFLEMRRDWAPDEPVYGLLVDLWGKAGNVDKALGWYHAMLQDGLQPNVPTCNSLLSAFLKLNRFQDAYSVLQNMLAQGLVPSLQTYTLLLSCCTDAHAQMGLCCQLMAITGHPAHMXLLYLPDAEPGGENVRDHARYFLDMM

SEQ ID NO: 234738 - protein, 58 aa, Zea mays
  Clone ID: MRT4577_145665C.1.pep
KLVIRLEEKSSCQFSNLHVTDDHKTMLSARCALLPMRASTTQAAMPWECRKPYRGIPH

SEQ ID NO: 234739 - protein, 176 aa, Zea mays
  Clone ID: MRT4577_145666C.1.pep
MGCSFSGLNALYDTVGGRGGDVWVNDYHFRVLRRLGDAGPAGSSVFLVKEVVAAATASDGTAGSEPGASGIAGKKGIDPSHISADGTYALKKVLVQSDQHLELVQQEIRVSSQFSHPNLLPLLEHAIVAVKRKQSHLAILMDFESAGPARKTIRSQAEALQLQEWASEHCSSHYRA

SEQ ID NO: 234740 - protein, 203 aa, Zea mays
  unsure (1)..(203): unsure at all Xaa locations
  Clone ID: MRT4577_145667C.1.pep
LGTSRPAGFKKKKKKKKKKKKKKKKKKKKKKKKKKKKKKNPPENPPPPGWKXEMFKQIKKQGVFGKGKTILFALEGLFNPNLKKIPWKKVKDALEKGGKFDPKIPPFGPPQGGGPPSAXERMFATLQGVKAPRALLEAPPETPPPVFWGQKKKIFPQFFLEAVGKKKEVFFAFEKKDFGGEMEFPENEFPKKNQAHPFTPGGK

SEQ ID NO: 234741 - protein, 98 aa, Zea mays
  Clone ID: MRT4577_145668C.1.pep
PPPTARLGQSPAPQGSPGRKASTHHTSQVSLSHINTINKGIEIRLLFLAATCEWVWIWGLSGLLDSGMTFVHGWMDYFTIHGEDHFRPPCSVCRSCSV

SEQ ID NO: 234742 - protein, 135 aa, Zea mays
  Clone ID: MRT4577_145669C.1.pep
PRDRVYDAGYGTRSTALSTALFNDGAMCGACFAIACDAGRSQWCKPGAASVTVTATNLCPPNWALPGDAGGWCNPPRRHFDMSQPAWEAIAVYRAGIVPVNYRRVPCRRAGGVRFTVQGRSYFELVTVANVGGSG

SEQ ID NO: 234743 - protein, 71 aa, Zea mays
  Clone ID: MRT4577_14566C.1.pep
RARCVSLMEFNVPCRSLILASSLRESYFASSASASPGSVLYSFLAYVFRSGTMGRPRPILETLGVAVECRI

SEQ ID NO: 234744 - protein, 124 aa, Zea mays
  unsure (1)..(124): unsure at all Xaa locations
  Clone ID: MRT4577_145670C.1.pep
LFLSTCLILLQCNFTWIHREKAGRVKKKKKKKKKKKKKKKKKKKKKKNYLFGQYPFDMALDGSSGXLEKGLXNVQIKWPEKAGSTYPDSLRQFITWMLQPHPAVRPHIEDIIIHVDKLFMKSSN

SEQ ID NO: 234745 - protein, 357 aa, Zea mays
  Clone ID: MRT4577_145671C.1.pep
MGCSFSGLNALYDTVGGRGGDVWVNDYHFRVLRRLGDAGPAGSSVFLVKEVVAAATASDGTAGSEPGASGIAGKKGIDPSHISADGTYALKKVLVQSDQHLELVQQEIRVSSQFSHPNLLPLLEHAIVAVKGVQDGSQNYEAYLLFPVHLEGTLHDITKTMLEKKEFFPTITVLQIFRQLCSGLKHMHSFDPPYAHNGVKPDNVLITQRKQSHLAILMDFESAGPARKTIRSQAEALQLQEWASEHCSSHYRAPELWECPSHADIDERTDIWSLGCTLYAMMYGKSPFDYELDESSGESLHSVIKNVQIKWPEEAGSTYPDSLRQFITWMLQPHPAVRPHIDDIIIHVDKLVMKYSN

SEQ ID NO: 234746 - protein, 103 aa, Zea mays
  Clone ID: MRT4577_145672C.1.pep
KMSSIICAIISSLCLSFPGKSSLPNNSNQKGSPHGPSHVKGIFKDENHVVCVLAIATKSWSLRSPLRHVPFSYSNFCPTLPLFPHPFVLNSLRPPYENFFFPF

SEQ ID NO: 234747 - protein, 56 aa, Zea mays
  Clone ID: MRT4577_145673C.1.pep
RCLMMGKDAGNRMVYGKDKCLQPVLSNLNGMLAQWDQESYHRSSSSPLKQPRESPR

SEQ ID NO: 234748 - protein, 229 aa, Zea mays
  unsure (1)..(229): unsure at all Xaa locations
  Clone ID: MRT4577_145674C.1.pep
MAATSGDAPVPPAMPDLVRDHLYFGGINDAIAALTASLPDGTDITHVLSVPLRDTEEENLLDHLEPCLDFIDEGRKAGSVLVHCFAGVSRSATIITAYLMRTEQKSLDEALESLKEINESVCPNDGFLDQLKLFEEMGFKIDTSSPLYRRFRLKLLGQSYKVGEKIGNHVFEDDPGVARQPNPNQELSGKEKTLXTAYRCKKCRRIVAAQDNVIGHTPGEGHSSFAWHD

SEQ ID NO: 234749 - protein, 52 aa, Zea mays
  Clone ID: MRT4577_145675C.1.pep
RFHQESSLFRVIFVRPALSQTLSNRHCSHVNVPCPHSRRSQCWVASTFQMTL

SEQ ID NO: 234750 - protein, 66 aa, Zea mays
  Clone ID: MRT4577_145676C.1.pep
LTDKLNSHIAWSRRGAWSNKRRTYARKRSVQEGAHMLWDTFQPLQEAAADVLIGAAEEALSICLSL

SEQ ID NO: 234751 - protein, 73 aa, Zea mays
  Clone ID: MRT4577_145677C.1.pep
DHFFGKRFTKNPAGFTIRGVGPFIRGGYFHEPFELHLLKFCYKYLFHGDPAVEPGPWFTKNKGRVKGSDIHGG

SEQ ID NO: 234752 - protein, 56 aa, Zea mays
  Clone ID: MRT4577_145678C.1.pep
GQRHILRISRWLVRVARAVIGGIVAMADVPMMLFAMGVTAAVIASSSIARMMMSVA

SEQ ID NO: 234753 - protein, 40 aa, Zea mays
  unsure (1)..(40): unsure at all Xaa locations
  Clone ID: MRT4577_145679C.1.pep
XXRLFTSQTPGPLXYAXPXYAXYEASHXIXFPPNRYRSXS

SEQ ID NO: 234754 - protein, 62 aa, Zea mays
  Clone ID: MRT4577_14567C.1.pep
LLLYPRIYRKVFGLKLCMKIQISSSHYFYVHAHLSSRNPTQLSNRSKYCSAFSHFIFRKTSC

SEQ ID NO: 234755 - protein, 105 aa, Zea mays
  Clone ID: MRT4577_145680C.1.pep
MAPLNHQQHVLLKKALAKKPKAKRMSRFGLKPSAAALLKSRPQQPAPAPAQPRRRVRVLFEDPDATDSDSDDEEAGAPTSPAEAKRFSFEAFVGKVPAKPVLPAA

SEQ ID NO: 234756 - protein, 62 aa, Zea mays
  Clone ID: MRT4577_145681C.1.pep
GYSSIIYVFVQLSRHAPTTVRAGEVAGPRLRHSCGDASEAGNGVGERRPDQRRQHLGELLIL

SEQ ID NO: 234757 - protein, 197 aa, Zea mays
  Clone ID: MRT4577_145682C.1.pep
RKKQKKLWAQKYNGDERKSVESVSLLYRNGTALRTNPSVSSTETARPYVEESGILDPEPVPATTRADFFLSKPMEGAATNSPDLDEQGHKTRSKTSQIGENTEEKESGGHGPEHRRGFVPSVEPLAHRSAGAGEGAEEEEEEAGDDGGDERYDDQIGDGARRHIRELATCSFFSSDAGTVRRRRLRPGLPEHSLVPN

SEQ ID NO: 234758 - protein, 59 aa, Zea mays
  Clone ID: MRT4577_145683C.1.pep
LIVSLRGHCALNGGVYKIQTNLLPYTRIHFMLSLYTLHISVVKAYHKHISVGVITNTAF

SEQ ID NO: 234759 - protein, 141 aa, Zea mays
  Clone ID: MRT4577_145684C.1.pep
LLQDLVPGCNKITGKAMMLDEIINYVQSLQRQVEFLSMKLSAIRPGFNRDLELQDILCTQDASSGFLGYSLRASDVHLNLYIASEECFSHRIIPNPANVHVTRNGQQSAFPQRGVIWNEELRSIAPNAFASDTVAGSMEVE

SEQ ID NO: 234760 - protein, 78 aa, Zea mays
  Clone ID: MRT4577_145685C.1.pep
PHGKQCKPLEDLVSSVDQMRARHALPHPKYLLEVVGSIGISCAFRLSSSRVEAWRHINRSPHDGAVSWKKNLVSTSSR

SEQ ID NO: 234761 - protein, 73 aa, Zea mays
  Clone ID: MRT4577_145686C.1.pep
SASNCQMFKGEWVGGLGKRGNYQISPLYLNVCGGKKPKHVQLIPPFCCPSPSSDLYYAPSSHCCTPLKEKCYL

SEQ ID NO: 234762 - protein, 109 aa, Zea mays
  unsure (1)..(109): unsure at all Xaa locations
  Clone ID: MRT4577_145687C.1.pep
HASADAWVYLAPAFLTRLKEEAEQGARRDEAHSNAWNSHXRDYRPGSRDWRLRATPHGLIRKYRLMCCRQRLRRNTEDIGLIKYRWRGHCASVENCLHHRNGSLNTRPN

SEQ ID NO: 234763 - protein, 123 aa, Zea mays
  Clone ID: MRT4577_145688C.1.pep
KSFPCQTGGREGVFARETQECARGDKFFFSMGVETPRLFEGGGRLFFVFGPGESSNFIWVRFTPRRAPLWGPSGAILAVNFSPPLLRRKFGFCVVGSFFATEFGNASGKSYSSEGGTHREEKR

SEQ ID NO: 234764 - protein, 47 aa, Zea mays
  Clone ID: MRT4577_145689C.1.pep
VTLPTMNMRHKYWITSTCYEQLYNLCEPIEDWMIEGIMAGGNRRDIP

SEQ ID NO: 234765 - protein, 92 aa, Zea mays
  Clone ID: MRT4577_14568C.1.pep
HAHARAMLASSSFGYAPQISCICYKLPTSYQSGTGTSNCSSRARACSVTWRAQYACRRSERPWRSESFIRESGMQSLTTAGAGLLACVFHRD

SEQ ID NO: 234766 - protein, 71 aa, Zea mays
  Clone ID: MRT4577_145690C.1.pep
HVQDHTAKEHLRQAHLHGESRRLGLYRRLQQRRAVVAVNRHHATAIGRHCMVGGFDRLHYISIYLSNLSAR

SEQ ID NO: 234767 - protein, 138 aa, Zea mays
  unsure (1)..(138): unsure at all Xaa locations
  Clone ID: MRT4577_145691C.1.pep
MASKQIGVLTCFIAITALAFRPCASAVPMDGGNACPAACDGDGGGNHEADTNPDHXXTXHTDTGXXKPTTKRATGGNQGSAGPNAGTNPAHADCTAGITGDHNNPAETXGLDLARKRALTRAELYLIVQRLGAICGEA

SEQ ID NO: 234768 - protein, 338 aa, Zea mays
  Clone ID: MRT4577_145692C.1.pep
MGSSVSQAGAPPPHPPTYASTPPFAPAAADAADAAAAPPPKPHEEEATEEKVDYLNLPCPVPYEEIQREAFMALKPDLFEGMRFDLTKMITPYFALTHSVAMGSIEIPAQGSEVIKVPTSNYEFGANFINQRTMLMGRVSHEGRENIRVKHDITDNLSLKINAQLTSEPHYSQGMLNFDYKGKDFRSQVQFGNNGFYGANYIQSVSKNLSLGTEAFWLGQQRKSGVGVVARYDTKKMVATAQIATTGMVALSYVQKVSEKVSLASDFMYNQMTKDVTASFGYDYMLRQCRLRGKLDTNGVISSLLEERLTPGVTFQLSAELDHWKKDYKFGFGMALGE

SEQ ID NO: 234769 - protein, 100 aa, Zea mays
  unsure (1)..(100): unsure at all Xaa locations
  Clone ID: MRT4577_145693C.1.pep
LGGDIPPSQTMYLNDLSEKVXNDHLNTSLYGLSSQDGRILDVVALITQILRGEAWVPFTEITAATDAFRGLQDFDFYEEKMRVQYANTSSDCIAIEYGTY

SEQ ID NO: 234770 - protein, 178 aa, Zea mays
  unsure (1)..(178): unsure at all Xaa locations
  Clone ID: MRT4577_145694C.1.pep
MTRCAQCDAPPPIRXTYSLLXLYLTFRTTADDLFPVFHKXAQIVDIDIPRDRRXTGHSGGXLYVRHEHQDQAQKADDRLDGRLRHGRQIMLHPAKSRVPNAERXTTCTITEPAPSPRGRSRRRRPSRRYXMIYRDDYHDMDYXTRSRMQSIYGYARDRDLHRDYHHRNLSRRYSPDDY

SEQ ID NO: 234771 - protein, 52 aa, Zea mays
  Clone ID: MRT4577_145695C.1.pep
AIVCITGFLLALTSFIYMCFCTECCLITKFSDPYVCFTRYPFFTVVLLSICF

SEQ ID NO: 234772 - protein, 100 aa, Zea mays
  Clone ID: MRT4577_145696C.1.pep
CGLAGSVGAPAFPSLVPPSSPVFLWPGPGFRRASTPAPGGSPRAGRASSPGLIYPPGGRHPRPFVPAWGPYVCLGLPGCAGSWYLAFVRARPQLLFGFRP

SEQ ID NO: 234773 - protein, 67 aa, Zea mays
  Clone ID: MRT4577_145697C.1.pep
PPENILKKQLCMVQLLCNLVKSREKRSNVASSVISFFRVALVPFVFTRWRVEDRQILFKDQLLTICA

SEQ ID NO: 234774 - protein, 53 aa, Zea mays
  Clone ID: MRT4577_145698C.1.pep
WKQMAQKKRALNGCAQCEKTTGVFSNNENIIMFYASQGPVFDKIPNQITGNME

SEQ ID NO: 234775 - protein, 122 aa, Zea mays
  Clone ID: MRT4577_145699C.1.pep
LATIPAARLSASFAGRGRLGHQQCVLRCAAPLPATHSRSNRPSCKGDKRIDQLLVASSHMFPVEVSALAAGGAGAGRQAAGDAAGTMLPPFFMGSIWPATAGAAGSEEDEAATSSRKPCGLW

SEQ ID NO: 234776 - protein, 101 aa, Zea mays
  Clone ID: MRT4577_14569C.1.pep
MITHAKKEKQKKKRSKEKKKKNKKKNQKKIEKKNGEKIKQEEKTKKKTKRVTRNTEKRKMITSYRKKADKHSTEIQAQKEQPKIPGPNTRTKRHTRSPRSR

SEQ ID NO: 234777 - protein, 53 aa, Zea mays
  Clone ID: MRT4577_1456C.1.pep
QNPPEASIHPTIFTDPSYLVHHPCIKYNTCALHIRYAIAPTTTASRKKREAAP

SEQ ID NO: 234778 - protein, 79 aa, Zea mays
  Clone ID: MRT4577_145700C.1.pep
KGARGQGGKKCTTQGPLKKKATLKQLKRGRANSGSSPKSRSLFIKMDNETSQGKGATVLKKGKFKSPACYPGRKGNCGG

SEQ ID NO: 234779 - protein, 54 aa, Zea mays
  Clone ID: MRT4577_145701C.1.pep
MLLLLQLNAAKVVAVGPGERDKAGNLIPVALKEGDTVLLPEYGGTEVKLAADKE

SEQ ID NO: 234780 - protein, 65 aa, Zea mays
  unsure (1)..(65): unsure at all Xaa locations
  Clone ID: MRT4577_145702C.1.pep
NAELFRCLTVMFKCSKSHQXIKXFALEAGGVRLVCLMYLRVFKQXIVIITLSSSPACKLGLGLYH

SEQ ID NO: 234781 - protein, 45 aa, Zea mays
  Clone ID: MRT4577_145703C.1.pep
AIFRRKGELFSISPSSSLLLMSEHTVLLKQKPSITIDNNITLTFY

SEQ ID NO: 234782 - protein, 91 aa, Zea mays
  unsure (1)..(91): unsure at all Xaa locations
  Clone ID: MRT4577_145704C.1.pep
PEPSAPDRDDQTRGEAQKYYYLRTTTDXSPEKLPEPMTVSESSDDITEXVESTRAQGPKCXFNRVTKLSGRTIPDELKDARELPDKVSDQQ

SEQ ID NO: 234783 - protein, 81 aa, Zea mays
  Clone ID: MRT4577_145705C.1.pep
LFVFFFKQLKCPMDRWYVSIRCRIGYVCILFMTSYSHVAICSYARSGIAANVEVSMAYFLHPILLFMYLQMLVASIRDCTA

SEQ ID NO: 234784 - protein, 93 aa, Zea mays
  Clone ID: MRT4577_145706C.1.pep
KKTARLFISYCTRCQSLSTFSPIHTSHFQLTVSFTLNTFTFPATYQGLNSMVTMMNGHPSVLALLQFKPTNSSTMSMFTQMYQRGTRNSLETV

SEQ ID NO: 234785 - protein, 60 aa, Zea mays
  Clone ID: MRT4577_145707C.1.pep
LPSSLINFKVSTFIPNIGYVSDKSKHHYLPNNYKTLLGPQRILPLIAHTSQHHLLPSNFS

SEQ ID NO: 234786 - protein, 101 aa, Zea mays
  unsure (1)..(101): unsure at all Xaa locations
  Clone ID: MRT4577_145708C.1.pep
RQAKRSRDTGRDSTGTGAGGKGKKGAAGRKARGPRKKPETRAEKACPQRGGSRNGRYXKKGRHAQGGSTGAPVHPAXADHEYHAAEGQDLAGNAGGDNKKT

SEQ ID NO: 234787 - protein, 73 aa, Zea mays
  Clone ID: MRT4577_145709C.1.pep
HSSLEGSMRMNLDSVNLEKLLEIIPSVRCVASKAQTHLTFCLHFHGRKPGLDSGTPFKRDCGLGKQCSFQLSK

SEQ ID NO: 234788 - protein, 127 aa, Zea mays
  unsure (1)..(127): unsure at all Xaa locations
  Clone ID: MRT4577_14570C.1.pep
VLVELISSKPAVNVTRHRNEINLAGMAISKIQKCQLEELVDIDLGSEADPATKKTMTAVAELAFRCLQQNGEMRPPIKEVLKXXLRSIQGESQTGKAGDKIKDGPLSPTTVHAPWESRATTPNTSRD

SEQ ID NO: 234789 - protein, 38 aa, Zea mays
  Clone ID: MRT4577_145710C.1.pep
KKKKKKKKKKKKKKFKKKIKKKKKKKKKKKKKKKKKKK

SEQ ID NO: 234790 - protein, 46 aa, Zea mays
  Clone ID: MRT4577_145711C.1.pep
NNQQQPSAQQQQPQQLSLFAAIGHWVVASALIKYYFRALSYGILVH

SEQ ID NO: 234791 - protein, 80 aa, Zea mays
  Clone ID: MRT4577_145712C.1.pep
LERRLRRHHRVRGRRGSHQGHRRCSRSGAKEVNGYVALLAEGAREQVARPRAQPVASRHPCCSCLLRAAAAEVDLWEALP

SEQ ID NO: 234792 - protein, 254 aa, Zea mays
  Clone ID: MRT4577_145713C.1.pep
LRDMPTAFVQMFCRIAAHKFFFFCDPHKRGKACMKKVLLSNCLQELMELHQESEEEVTDVEQAENWFSLTSAQRICDMFLALDKDTNGTLSKQELKEYADGTLTEIFIERVFDEHVRRSKVGGGNSREMDFESFLDFVLALENKDTPEGLTYLFRCLDLNGRGFLTTADIHTLFRDVHQKWIEGGNYELCIEDVRDEIWDMVKPADPLRISLSDLLSCKQGGTIASMLVDVRGFWAHDNRENLLQEEEEQVEET

SEQ ID NO: 234793 - protein, 100 aa, Zea mays
  unsure (1)..(100): unsure at all Xaa locations
  Clone ID: MRT4577_145714C.1.pep
GEHAIRRYESGQEPPAAGELCEAICPSNAITIEAPQREDRSRHTTRDDIDXTKCIYWGFCQEAXPFPAYSEXGPNFXCATETHEELLYDKNKLFQNGDPM

SEQ ID NO: 234794 - protein, 74 aa, Zea mays
  Clone ID: MRT4577_145715C.1.pep
RRRINVRIHEVVVVRVAVLKGDIALDRTLYAYNVHHVVRHGELLRVSRDELRAHPGAHVCNHEVSPDEEPIRDR

SEQ ID NO: 234795 - protein, 93 aa, Zea mays
  Clone ID: MRT4577_145716C.1.pep
TEALLFFNRRGANWPNPRLHTMAIKRGATPPNCGLCKDLPGVIPLDYLAPDWPKAQPYGSILPVNPIVTITEVSIIPCKDGLVHKSNKRLHGP

SEQ ID NO: 234796 - protein, 77 aa, Zea mays
  Clone ID: MRT4577_145717C.1.pep
IKVNNNILLGPIQNHYSLFILHQQADIDRSFPSYMYGVDRLVVEFINTKFFRQIKKTACCFLSGLLLLGFVFHTSST

SEQ ID NO: 234797 - protein, 66 aa, Zea mays
  Clone ID: MRT4577_145718C.1.pep
GWSYPPAGFLKKGCQVYTPLSHDVNPVSCHHGVRFAPSSQNGMVEMPVTSVGFVSHSISDAYFSNT

SEQ ID NO: 234798 - protein, 256 aa, Zea mays
  Clone ID: MRT4577_145719C.1.pep
MLGDAGTKFFHANATIKHRYNHILSLVGVNGTVVTSHVDKEEMLFQSFKDRLGTSQPTSMVFNLSSLIQPVSNLSTLEMPFSRSEIDQIIKNLPSNKSPGPDGFNTDFVRKCWPVIATNFYELCDKFYDGSICMDSINGSYVTLIPKHSSPASVGDYRPISLLNTSMKVLTKLLANRLQLVMTKLVHQNQYGFLKARTIHDYLAWAFEYISICHKSGKEMVILKLDFEKTFDKLEHAAIIDILRHKGFGDKWIHWI

SEQ ID NO: 234799 - protein, 127 aa, Zea mays
  unsure (1)..(127): unsure at all Xaa locations
  Clone ID: MRT4577_14571C.1.pep
IGYLEAGRDHHSQAFNSSTTLXLPSNQTNQPPQHSKCLLPTPTTPTRASSARPSTLSRTPPTTSPRPSRASPLRPPRRATSSRPRATSPARTPSPTVPPVLSTLLVTRSTRRSTRAPPRPTSAPSKY

SEQ ID NO: 234800 - protein, 69 aa, Zea mays
  unsure (1)..(69): unsure at all Xaa locations
  Clone ID: MRT4577_145720C.1.pep
MKMVIAGVVCLALSAAIASAMQMPCPCATLKXMYXASSILTTMMGACRLYPYAEYPKQXELHPVAAAPY

SEQ ID NO: 234801 - protein, 135 aa, Zea mays
  Clone ID: MRT4577_145721C.1.pep
LLACPTFIWTYRNSVCVLSSRVRGLPSPFLRAYALNAGTCTFKTILERPFLLSWHACPPHLRVAWLYRGSFDLWRISLALSFATRPSSSSSSSLRMISYTLVFLLPVEDPSSLEVLVSLLCIAPGTQARLWPSSS

SEQ ID NO: 234802 - protein, 63 aa, Zea mays
  Clone ID: MRT4577_145722C.1.pep
LQLCLKKPLFNGENSLFILDTITFTYHDNSCCNNTVSFSFPAIPGTCHKRRPFFCFANLGSQP

SEQ ID NO: 234803 - protein, 54 aa, Zea mays
  unsure (1)..(54): unsure at all Xaa locations
  Clone ID: MRT4577_145723C.1.pep
PVCDKPENPNPQKMFTCPSYXYDIXIYAPSLECTRVGDGHRRPLSLLLLGQVLE

SEQ ID NO: 234804 - protein, 59 aa, Zea mays
  unsure (1)..(59): unsure at all Xaa locations
  Clone ID: MRT4577_145724C.1.pep
QYTIHAXRQAIHNYLNVKLNETGHNTSDLCKLITYSYIENEAMDDEGFIPELALITIGG

SEQ ID NO: 234805 - protein, 489 aa, Zea mays
  Clone ID: MRT4577_145725C.1.pep
MTAAFGTCPKRRLNRVMDALNFEYPDYERLDRGTEGQKRKRVASVLNKEDAKLVKDDEENLIKRKLRPEPKTDASKKRKVAAPKQKATDIEEETVATPSATNVEEILKVMTESLPIKLSPLGPHLTKLFQKEKEPSITKKAAGPKKRRIVTVTEVIEGTPPPASASKALAVESATATEAAPTKAAAAEAATTEDVHLESTISNIDKILLDMATEEAAVAAEEAMATVPEKKKEIAQEASEEENFNFQNLIGQELSEAKKKELREYAISCGYQPGALLFSGVDDEKLGCVRDQIGAKVIGTLSTSIGFPKLETDISRYRRQHLVGSLFYSNFKGLESKLKDQAAALEKKDFELQTTEGLLAEAKAKIAKLNTELLSKSESFEQEKQKLNAKFKTEVEKSSNLQKSLTELQNKCLEFSSRPSTEDLPGAFEHIEGEIDDLDEIIAGHGDFCALVASRGTTVAFLKSGCTHGKDDEAEEQVDEAEEHKAEAQ

SEQ ID NO: 234806 - protein, 653 aa, Zea mays
  Clone ID: MRT4577_145726C.1.pep
MARVRSTARVTRDGEEAEGAETAPISEVMQRSGLVVSEDAPAAEAEQVDAEEIESEDDYSAVPSKPSHLEFGKSTITEGDMSKLMKLGYFSEAKKELVRFGGEQITPKPEKDEVVVFKSFCKAGLRFPLNGMIADVLKKFGIYLHQLIPNAIVRLSVYIWVLQSQGDLVQEFLAFRVFPTLKEWDMPKLKGEKKKGELVWLPYYYKFKKHFKVHCQEWLDTIEVMCNDILGNYSKKEDQLMTAAFGTRPKRRLNRVMDALNFEYPDYERLDRGAEGQKRKRVASVLNKEAAKLVKDDEEKLKKRKLRPEPKTDASKKIKVVAPKQKATDIEEETAATPSATDVEEILKVMTESLPIKLSSLGPYLTKLFQKEKEPSITKKAAGPKKRRIITVTEVIEGTPPSASALKAPAVESATATEAALTEAAAAEAATAEDVHLESTLSNIDKILLDMATEEAAAAAEEAMASVPEKEKEMAEDASEEEIFNFQNLVGQELTKAEKEELKEYAISCGYQPGALLFGGVDDEKLGCVRDQTGAKVIGTLSKSIGFPKLETDIRRYRRQHIVGSLFYSNFKVACAQSMLLSKALRMQQDLKDKKHEVIIEGLESKIKDQAAALEKKDFELQTTEGLLAEAEAKIAKLNTELLSKSESFEQEK

SEQ ID NO: 234807 - protein, 287 aa, Zea mays
  Clone ID: MRT4577_145727C.1.pep
LDFDTDPEDIMISGAPNPEEIRNSVKRANENHLANRLRYSLRVYASVLYLQLPDYFRIILRGQEVKRHRIAADLIYPECISYKPHSCGIKEATVLTTIGFLKGAPTISVHGFNIYHKNRLILPFHRVLNTSSSKGRSVSGVLEVDFIKPTHDKQDFEKSQLFQKLINRLKEMTNEYWELYSDKIGYMKKPRVSAAPLPPPVMLPIANGTAEPSDRSAPAPTQPLRSHSNYLNAVPIASAPPGFHSAPVKAESVAPGAHMGYSPSSLNVQTMQVNGIKSPSMVPGTDS

SEQ ID NO: 234808 - protein, 130 aa, Zea mays
  unsure (1)..(130): unsure at all Xaa locations
  Clone ID: MRT4577_145728C.1.pep
ALQRHSLRPQWRSSPPAGPAPPTPRRSPGMGSTRRTXLGGMTLLRQAEAARPYHVVRATADPNRPICFPGSTLSAWIDCRLTGDFELYPCGTGSDPESLXRRYVHAELVHCQLPMLISAGMFIPEFLTKI

SEQ ID NO: 234809 - protein, 122 aa, Zea mays
  Clone ID: MRT4577_145729C.1.pep
GSASSGGLTGDHCCMIASWIGLDSVSSGKHLQWYAMSMRADMDIPSRCCALCAHHACMRERCDGAGTCRPTAAVFLQYLPRACSGSVRRGTSSCSHAMVIVCIVDSRSLCALIEQSSKVHTL

SEQ ID NO: 234810 - protein, 88 aa, Zea mays
  Clone ID: MRT4577_14572C.1.pep
KCLIKTTKTTLSFLILAKIKDLCMILQSFNVCMFTKFVCIPSWGSLYASLGHMLLSHHFKCMFPKYVCIPLLDALPPSLEKKKKKKIN

SEQ ID NO: 234811 - protein, 50 aa, Zea mays
  unsure (1)..(50): unsure at all Xaa locations
  Clone ID: MRT4577_145730C.1.pep
LQDKPYIYIYIAIVLGGEPSQWFSGYSIQGAETGAELCCAKTPLVQLNXQ

SEQ ID NO: 234812 - protein, 58 aa, Zea mays
  Clone ID: MRT4577_145731C.1.pep
MSPNVEIVLSSSMKTTVLGAPTTKARAAGFEAATEGGACACNTCNCGIRSGCSCFSCN

SEQ ID NO: 234813 - protein, 326 aa, Zea mays
  Clone ID: MRT4577_145732C.1.pep
MAATAAVPSWRRAFAALLLVLQLRGARSATFTIANNCGYTVWPGLLSSAGSAPLPTTGFALAPSESRAVAAPAGWSGRLWGRTLCAADAATGRFACATGDCGSGDVQCSGGGAAPPATLAEFTLDGSGGLDFYDVSLVDGYNLPMIVAPSSASTTAAGGKCAPTGCAAELNSACPAGLRVEAAADGPVACRSACDAFGDAQYCCSGAYGTPTACRPSAYSEFFKTACPRAYSYAYDDATSTFTCAAGSTDYTITFCPAVPTSVKSTGQNPQAAGLPQQLNNGTTMVFFGGNTQTSSAAASSANSLFAVTVTVTAAVALALSRSTRL

SEQ ID NO: 234814 - protein, 63 aa, Zea mays
  Clone ID: MRT4577_145733C.1.pep
VESQFLKMPFFNIAPPPILLFGGKGMPFPQCRASWKHPIPLPMDGLGCNLDPLFFFPLIWRPP

SEQ ID NO: 234815 - protein, 60 aa, Zea mays
  Clone ID: MRT4577_145734C.1.pep
AWPWVFIDERRRLCRARLGASPPATRPPLRRGCGGLKFSGSPPTASLHVVADQALSRGFI

SEQ ID NO: 234816 - protein, 119 aa, Zea mays
  Clone ID: MRT4577_145735C.1.pep
LTCRCCSAACVPAGGTDELYSRLTEEDETRVADTPSPLPGLNSKRSGLVPSAAASSRCKQKQEQEQDWTTGGETGKQGCRGQGDMALGTTKAKAWVSHSVKFMYMYVKEERRWPGHEPE

SEQ ID NO: 234817 - protein, 96 aa, Zea mays
  unsure (1)..(96): unsure at all Xaa locations
  Clone ID: MRT4577_145736C.1.pep
LXXFPFRCGXGVACXAXLPFRPPLGSWLCRPASGFSXRGRVLSXSCRGLGSCSLSVLALSSLGVSPLLSRCXSXGLXLCVVAPGPRIXMPPPVSPG

SEQ ID NO: 234818 - protein, 76 aa, Zea mays
  Clone ID: MRT4577_145737C.1.pep
VYSSRYDLIISHKEELALLMTLEQGKPMKEALGEVNYGASFIEYFAEEAKRIYGDIIPPTLSDRRLLVLKAPVGVV

SEQ ID NO: 234819 - protein, 198 aa, Zea mays
  unsure (1)..(198): unsure at all Xaa locations
  Clone ID: MRT4577_145738C.1.pep
MDPDFSPASGGPSFEFAFNSVNFSDRVLQIEIVAGXTPSGPRAXGEGCSSLADWACHRKRRREELRRDKDPANCKVEAEECDAYEEGNEPVAMIEESPPDIEADGEDGKSSDSYCSMECTQVLRVKSMYISSAILAAKSPFFYKLFSNGMKESDQRHATLRITASEENALMELLSFMYSGKLTTNQPTVLLDIVMIAD

SEQ ID NO: 234820 - protein, 45 aa, Zea mays
  Clone ID: MRT4577_145739C.1.pep
VSRNSLNKRYIPAVSCISSNVLAWTSHLTRKPSNDQDQHQSPTFS

SEQ ID NO: 234821 - protein, 178 aa, Zea mays
  Clone ID: MRT4577_14573C.1.pep
DLLLSLSRLFLLKILIPSTRTFLIILILIIVLISVLIFHFLVVTIGLVPVAPHCQNSTGSRRTSFEFTESPRGPETPRSAAVAEIRLERPVVATRLDQKSLGRKEGGGRCGPGGCYARGRVGTGRRRPQPASWSLRETAGVAAGPAWGARLLPLVGWKTGNGEHRSQGEGAVPGRPRG

SEQ ID NO: 234822 - protein, 469 aa, Zea mays
  Clone ID: MRT4577_145740C.1.pep
MDPESRKYMPDPANCKVEAEECDAYEEGNEPVAMIEESPPDIEADGEDGKSSDSYCSMECTQVLRVKSIYISSAILAAKSPFFYKLFSNGMKESDQRHATLRITASEENALMELLSFMYSGKLTTNQPTVLLDILMIADKFEVGSCMRHCSQLLRNLPMTTESALLYLDLPSSISMAAAVQPLTDTAKEFLANKYKDLTKFQDEAMNIPLAGIEAILWSNDLQVASEDAIYDFMIKWARAQYPKLEERREILGTRLLPLVRFCHMTCRKLRKVIACSDLDHEQATKCVTEALLYKADAPHRQRALAADVMTCRKYAERAYKYRPLKVVEFDRPYRQCIAYLDLKREECSRLFPSGRIYSQAFHLAGQGFFLSAHCNVDQQSAFYCFGLFLGMQEKGSTSVTVDYEFAARTRPSGEFVSKYKGYYTFTGGKAVGYRNLFAIPWPLFMADDSLFFIDGVLHLRAELTIKQP

SEQ ID NO: 234823 - protein, 76 aa, Zea mays
  Clone ID: MRT4577_145741C.1.pep
PCLHYLPKLKKSLSEQKSSEKEDLRPALALKGCSNKIDTATAASMKTPRDLCHPLGETRTYCCHTYYWVYESLMLN

SEQ ID NO: 234824 - protein, 84 aa, Zea mays
  Clone ID: MRT4577_145742C.1.pep
HASAAARRPRRLLLDKRCDVPNGCAEASNGVPSYLLAFALCSSMELRPPDWNYPVGLSRCYFTSAAVPVQLVWASFVARSWFCS

SEQ ID NO: 234825 - protein, 98 aa, Zea mays
  Clone ID: MRT4577_145743C.1.pep
FQKSPLNIGNNPKNPGWFQKNQNFFGPKKKEHPLIQTGNLPSGLPQTLWKKIGLLVPYYPKRIKKMPPENPPPISLILKIKLGPPMNFKKKNFYAKIP

SEQ ID NO: 234826 - protein, 43 aa, Zea mays
  Clone ID: MRT4577_145744C.1.pep
GINFTLGTCFYTTHNNNNNGGGAIYSEFNYTGPLGGPLGGPLG

SEQ ID NO: 234827 - protein, 73 aa, Zea mays
  Clone ID: MRT4577_145745C.1.pep
SVSRQHVPTHTVLYRCPFYHPALHQEEGLHFRESQAIMCDGLLLWSKEILNFFFCSRTGTVYLHVSPSSCCIL

SEQ ID NO: 234828 - protein, 76 aa, Zea mays
  Clone ID: MRT4577_145746C.1.pep
LVTTPSRRREVGSGDRASGAASSPSTPPASIRPRHGMVRAAICFSSDFFVLCLGSSVLGTASLDEGAEMQARFGVF

SEQ ID NO: 234829 - protein, 51 aa, Zea mays
  Clone ID: MRT4577_145747C.1.pep
FPIEYRALVNLCHPSTSFIAPVLLLGGLRQDPTRFNCIPSSVYRRANEPSR

SEQ ID NO: 234830 - protein, 71 aa, Zea mays
  Clone ID: MRT4577_145748C.1.pep
PGKHAPSTGGGKYPSLDRKRTRRARDFSSASICSGDRFSSTSRGRVMYEVAPIFRGRMSSQRVLCTCSIKE

SEQ ID NO: 234831 - protein, 100 aa, Zea mays
  Clone ID: MRT4577_145749C.1.pep
GLRGMLIRASDGKGVIYQARNTKEVALDMINMHEKQEFMDGEKNVAIISEAGSAGVFLHADRRAKNQRRRVHITLELSWSADRAIQQFGRTHRSNQTSAP

SEQ ID NO: 234832 - protein, 90 aa, Zea mays
  unsure (1)..(90): unsure at all Xaa locations
  Clone ID: MRT4577_14574C.1.pep
RYTKEREVHIHNLLLGEGDAITXGAFELYENPRPKMTPXHTHRHKITEEVAAAAATGAGGYVFHYHHEEXQDHKDAYEASGXNKHHHLFV

SEQ ID NO: 234833 - protein, 190 aa, Zea mays
  Clone ID: MRT4577_145750C.1.pep
AHTPTQPPPGAESFVTSSPAKNPQSPTRPPVKPRRRETAVSSANLNSEAGPKKPDEHPLTRSHITGHQAPKDDLAVYTSFSAAPSSKYINAARRVNHIDALARPSGITAEGQGAKGESSAAPSAPTPDVAEAQAPGAEEDDDDDADPPGEETEDEKKAAEERAAAAKASGKKKESGIASAPPDAKPRDDE

SEQ ID NO: 234834 - protein, 68 aa, Zea mays
  Clone ID: MRT4577_145751C.1.pep
VYYTLTTSHYVRSCPGGLYLTPAESMSRFKAHSQTPFLGSHGAGIRDRDVILILTLGERLTQGRLGRL

SEQ ID NO: 234835 - protein, 68 aa, Zea mays
  Clone ID: MRT4577_145752C.1.pep
LTKKLPGTTTVGKLKSLCESFFHLKDIKVNLFVQKKGCPLPHPVEEAPAPLMELGIGSGATIFLGQKS

SEQ ID NO: 234836 - protein, 68 aa, Zea mays
  Clone ID: MRT4577_145753C.1.pep
GASWNEESVVFMSNSANGLGIVHSTVKIDVMIELVDVFKKGSEVNVVLNYVHRIVFRDCVARVRIPSL

SEQ ID NO: 234837 - protein, 75 aa, Zea mays
  Clone ID: MRT4577_145754C.1.pep
AGQSWPDGASVALTGLLALVLAASYWSKLTTYFLGAVFPKNFAARGVLITGASSGLGSTWPISTRSGEPTWRWWR

SEQ ID NO: 234838 - protein, 58 aa, Zea mays
  Clone ID: MRT4577_145755C.1.pep
HEYAPLISSLSRDGFNPSSIQEATGISGVEQNCLVVASQVRDSLLDDRAAAFPPEEAG

SEQ ID NO: 234839 - protein, 94 aa, Zea mays
  unsure (1)..(94): unsure at all Xaa locations
  Clone ID: MRT4577_145756C.1.pep
ILRQYSLTLRSPWTATVVAVEAAATAVAGADRFRRREANQDVSRLAPAAPEQGGCLQAAXVGHHHHGLLRRRECGHPLHSAIRSPATATFRNSS

SEQ ID NO: 234840 - protein, 92 aa, Zea mays
  Clone ID: MRT4577_145757C.1.pep
DSVSFYYSMRSRLCSQKVHSLALAFTCSKRMKVLRLQQRVHQWRCHRREKSERFSKGRVAPLRCCFSVVKESETSLRHYCIFVSHVSLVRPG

SEQ ID NO: 234841 - protein, 66 aa, Zea mays
  Clone ID: MRT4577_145758C.1.pep
KKKKKKKKKRKVKNTKKVPTLKRPSLPCYFFSIVSPNLISLPSSFTSVTPVLSLALPHLIRFASHP

SEQ ID NO: 234842 - protein, 148 aa, Zea mays
  Clone ID: MRT4577_145759C.1.pep
MPHPPMALLLSPTVSFLVSPCAPRPRALSAAANVSYPASRLQCKNLSSQQSPLNVTATCASFAEKRLVLVHATAEGSEAGAEQPEEPKPATKIEEMPLESKQKMIMEQRARMKLAKKLRQRRKRLLRKRKLRKKGRWPPSKMKKLKNV

SEQ ID NO: 234843 - protein, 105 aa, Zea mays
  unsure (1)..(105): unsure at all Xaa locations
  Clone ID: MRT4577_14575C.1.pep
KEAXEELLGALADVCVRAAFFKKALEIVACMEEKGIAPNKTKYKKMYIEMHSRMFTSKHASQARQDRRRERKRAAEAFKFWLGLPNSYYGSEWQIEPLLDGDDLS

SEQ ID NO: 234844 - protein, 97 aa, Zea mays
  Clone ID: MRT4577_145760C.1.pep
VGVFFFFLFFFFFFFFFFLPEAKSTFPNKIGNIPVTWGNKFIGGDKKTLVYQETPTRTETFPLNYPKKSFLSPFQHKTKFKPKHDSHFSFLCFPDLK

SEQ ID NO: 234845 - protein, 50 aa, Zea mays
  Clone ID: MRT4577_145761C.1.pep
LGVVMAVSCPFLEPAGAEFRRKLTCSLCRSRPGGGRRPEVVVPLCVWSSV

SEQ ID NO: 234846 - protein, 192 aa, Zea mays
  unsure (1)..(192): unsure at all Xaa locations
  Clone ID: MRT4577_145762C.1.pep
MADGSGESESTALEFTPTWIVAAVCSLIVVISLAAERCLHYLGKXPIFLACLPEHRNASLLVSLLNLMPHLGGVHCPLATAXTFKGKNQKALFEALLKVKEELMLLGFISLLLTVFQGVMQRTCIPPGWTIYMLPCRSAKEQAELSPTEAHGHAAGILGLTRRRLLAEGGARTQRCQKKGEVPLLSVEALHQ

SEQ ID NO: 234847 - protein, 70 aa, Zea mays
  Clone ID: MRT4577_145763C.1.pep
SKGCELQSPKLGRKFGAGSSPDQSRFNNLAGSCSPLPPSVQKVLGNLNKEGKPSGPPSSHNFRFLVRPVW

SEQ ID NO: 234848 - protein, 98 aa, Zea mays
  Clone ID: MRT4577_145764C.1.pep
LSVWHDRTQGILLYPEVLCESSYSFTIPDFWQYSSTVPVPVSSGRHQLLALALGAVVLLLRLSWIIVAILCWDLSSEVFRFIRSVQVIIWQSKLLRSG

SEQ ID NO: 234849 - protein, 84 aa, Zea mays
  unsure (1)..(84): unsure at all Xaa locations
  Clone ID: MRT4577_145765C.1.pep
TKLRGDVNVEEVKKVFRIPCWGTPDPEFDRPPMVXVGQFPQRVFEPEIPPMPRVPPAIAGGGPNQMAGVGVLVVTFPANSPIGY

SEQ ID NO: 234850 - protein, 64 aa, Zea mays
  Clone ID: MRT4577_145766C.1.pep
VFIFPSLFAFSSPLAFAVIADVFMWMELFVCACSCACASPGSCRCYPSSLGDLFCEGALPLSIW

SEQ ID NO: 234851 - protein, 119 aa, Zea mays
  Clone ID: MRT4577_145767C.1.pep
RTGPAVRAGAPTRTQTRGRTRGRTRGRTRGRTRGLRSRKTVQLEHPGVQPQCPRDCGAQRDSRLVHEDAHRAREGTIWNHERTSLCLWFARPVEPLSKSTSSLSSSRARSDPRDRLPKV

SEQ ID NO: 234852 - protein, 48 aa, Zea mays
  Clone ID: MRT4577_145768C.1.pep
RASRLPAAALLPDRLNLWHGPLNRVRANFTYVSTANTIALPYLFTWLK

SEQ ID NO: 234853 - protein, 71 aa, Zea mays
  Clone ID: MRT4577_145769C.1.pep
DPFQKATGQSSDCHGLGQKKNNFPRSASQFSALYHNKDSVKGLAVLVKAFKMNMTRHLPFGLCPKKKKKKK

SEQ ID NO: 234854 - protein, 38 aa, Zea mays
  Clone ID: MRT4577_14576C.1.pep
TDDQYRKNSGGNCTFRQCHLYLYRERLNLNNHRVINIR

SEQ ID NO: 234855 - protein, 107 aa, Zea mays
  Clone ID: MRT4577_145770C.1.pep
MAGWNAYIDSLMADGTCQDAAIVGYKDSPSVWAAVPGKTFVSITPAEVAVLVGKDRSSFYVNGLTLGGQKCSVIRDSLLQDGEFSMDLRTKSTGGAPTFNVTVTKTD

SEQ ID NO: 234856 - protein, 270 aa, Zea mays
  Clone ID: MRT4577_145771C.1.pep
PLFKRSVTFTERDDDDLAEQVAKFGYQHEFADISWFPGHGRAVYRIDDRLPLAASGEGAMDFIGFRATPTVVIQASRLAEDLFERAGNGSGKCLTSWVTHAALSVAGYGLQRRSGGLFTGYPVVGPQHRMQASGGCVTGPENALLTACPWDPRVPAGTFFHQTTFSLPLRRAAAFVTEVRRLRDLEPRALCGVELYDGILMRYVKASTAHLGKPAPRGEPSRDMVDFDITYYRSRDPGRARLFEDVLEEIEQMGIFKYGGLPHWGKNRNL

SEQ ID NO: 234857 - protein, 151 aa, Zea mays
  unsure (1)..(151): unsure at all Xaa locations
  Clone ID: MRT4577_145772C.1.pep
PPQAHPKSTTAQPTEPDARKAAQRPQQPPRPAASASKNSRKGPAEAARAGTKHPSHGPAAPPQHTNPANGPKPRFRXNPPTGAPELPPHSGQHRNPLTTTKNHPQRKKGKKKKKKKKKKKNKRKRNKLKKKKRCNLINKKKKKLVPPPHPR

SEQ ID NO: 234858 - protein, 103 aa, Zea mays
  Clone ID: MRT4577_145773C.1.pep
HDFLMTSVVSFSLQTPSTFHTYSSLKNPFKIPNITYHKYSIPPLKSNPHKSKLSDKLPSSYKIPYPNTLLIIVHFNIYHYDQYKITYHINVLQFQHHNLTYTI

SEQ ID NO: 234859 - protein, 57 aa, Zea mays
  Clone ID: MRT4577_145774C.1.pep
MRSGSQQSDNKTAILNLNMNSTALNTPAQSADPQICAQIRHLHATIKEQKLIQILDK

SEQ ID NO: 234860 - protein, 270 aa, Zea mays
  Clone ID: MRT4577_145775C.1.pep
MAARRSRGWARGAAAFAAVALAVGAGRRYGWDGASAVAAFREAQGALGHWAAPAYVAAHALTLALCPPYAIFFEGGAALIFGFLPGVACVFSAKVLGASLSFWIGRAIFRYFTSAMEWLQRNKYFHVVVKGVERDGWKFVLLARFSPLPSYIINYALSATDVGFFRDFLFPTVIGCLPMILQNVSIVSLAGAAVASTTGSNKSHIYSYLFPAIGIVSSVLISWRIKQYSSALAVPEELQSSPTNGDHNGDAKLASAPSKNTGSGKTRKRR

SEQ ID NO: 234861 - protein, 285 aa, Zea mays
  Clone ID: MRT4577_145776C.1.pep
MAARRSRGWARGAAAFAAVALAVGAGRRYGWDGASAVAAFREAQGALGHWAAPAYVAAHALTLALCPPYAIFFEGGAALIFGFLPGVACVFSAKVLGASLSFWIGSNWKPFKLTYKMQNLRAIFRYFTSAMEWLQRNKYFHVVVKGVERDGWKFVLLARFSPLPSYIINYALSATDVGFFRDFLFPTVIGCLPMILQNVSIVSLAGAAVASTTGSNKSHIYSYLFPAIGIVSSVLISWRIKQYSSALAVPEELQSSPTNGDHNGDAKLASAPSKNTGSGKTRKRR

SEQ ID NO: 234862 - protein, 56 aa, Zea mays
  Clone ID: MRT4577_145777C.1.pep
SCRRRSCWSRRPITFAASSAKRLTGIALPRSCVTIEDTSCAIYIHDSMDLSGADGL

SEQ ID NO: 234863 - protein, 93 aa, Zea mays
  Clone ID: MRT4577_145778C.1.pep
PPRPMVALVRVPPGVVPVLGGEFLGHRAMSPSHSVSATSVFFSGGASAEGNAFFHYPGGVGDDALRPAAVLAERPGDVRGLPSVPRLLWCSAA

SEQ ID NO: 234864 - protein, 111 aa, Zea mays
  Clone ID: MRT4577_145779C.1.pep
TWYPPYIFLEAARFVSFPFHFTRGPRPFFRVLARCQCPLRGRPPMFPLSRGETCLPAVWVLCPSPGFCTKVPFTISPPRPVFSPLCARLPSAWACILGSGVNNPPSNKTTT

SEQ ID NO: 234865 - protein, 76 aa, Zea mays
  unsure (1)..(76): unsure at all Xaa locations
  Clone ID: MRT4577_14577C.1.pep
LNNKQQLMRAREAAIWELEERHLXQSKHELLTQQLKDQYFMQRHQLLKRHEKETEQMQRYNQRLIEELKNRQTQDR

SEQ ID NO: 234866 - protein, 48 aa, Zea mays
  Clone ID: MRT4577_145780C.1.pep
HITLARAIDCCRRSAGGDDIAGLEEYLYYLDLDHVAKRLHCGAGKERV

SEQ ID NO: 234867 - protein, 188 aa, Zea mays
  unsure (1)..(188): unsure at all Xaa locations
  Clone ID: MRT4577_145781C.1.pep
PTRSLEGLKAICPMPTLVACRIILRVRLFEAGLQMLLPGKRXNGPYGXGGNLPCYRAYGLQAYAGTLITYLGWRRLEICNPAIVYDDWWEIYXALIVEAENSXTILYMQGHVFISXSDSGSSGNVIIDFYCGMVLYPXIGRYCDIKVLTMXRASMMTWAVLADAYCIIQYEDTGCVADSMLVNTALML

SEQ ID NO: 234868 - protein, 97 aa, Zea mays
  Clone ID: MRT4577_145782C.1.pep
MAARNFLVRSPKEEESSAAVREAVLLGGKNAAIAGTVVAVPTLVACRVLPWAKHNLNYTAQALIISAVCIAGFFITADKTILRNARQNTIGRIDKST

SEQ ID NO: 234869 - protein, 142 aa, Zea mays
  unsure (1)..(142): unsure at all Xaa locations
  Clone ID: MRT4577_145783C.1.pep
ESNVKLRKNTPVMIPETDLPSTDSTSGIPSWDQKPPTLLPTIEESKPDQKPHHHRCQCAYVPPASRANHAISTSTTVYRTCGETISLNHLIINDLGDQAPPSSIALKIPQERIIFITFSAQRPCDAIPSPRDRAPGPPHXLN

SEQ ID NO: 234870 - protein, 81 aa, Zea mays
  unsure (1)..(81): unsure at all Xaa locations
  Clone ID: MRT4577_145784C.1.pep
MXRARAVXPCWPXFFXVPTHAEQCWSQSSRSLCPNCLFFSQFWXCISTSYYCGNWCQNQCNCSFCITPNPSNNRGISFIIP

SEQ ID NO: 234871 - protein, 67 aa, Zea mays
  Clone ID: MRT4577_145785C.1.pep
AMTILYTCVSSDAVEYTNLSMRLGDISCLLEASDAHGISNFRRPLVLHSTPLCCRAGYACAYTTVYA

SEQ ID NO: 234872 - protein, 65 aa, Zea mays
  Clone ID: MRT4577_145786C.1.pep
QKKGLVFLFNLLEIRALMGCYSSCHGGSSMLLRCGSRSILADCWGLSEKVHWCGIRTTKACHHRN

SEQ ID NO: 234873 - protein, 119 aa, Zea mays
  Clone ID: MRT4577_145787C.1.pep
GYLEAGREPPVELLAPASAPIIPTSTTAAKYSTKQTQQELDTERERARAGEQGDTAREKNQTTLHKLIFIVVFPELGKKAAAGRPARSGRAYPTGWASTPVLVVPSTPWKSAYIEEMVP

SEQ ID NO: 234874 - protein, 116 aa, Zea mays
  unsure (1)..(116): unsure at all Xaa locations
  Clone ID: MRT4577_145788C.1.pep
MHIYGMVAKSEGQMHEKLPPGITLVQADDFQTWVMDIKVMDSNPIYEGETYRVEVQFXPQYPIEAPEVVFVRDETHPIPWNPYIYSNGIICLDLLDRSGWSPVQTXRSVCVSLQSM

SEQ ID NO: 234875 - protein, 41 aa, Zea mays
  Clone ID: MRT4577_145789C.1.pep
NHDNMTCTFPIKRRLGKITSYHHRFMGRSRPKSHLDTQHLQ

SEQ ID NO: 234876 - protein, 82 aa, Zea mays
  Clone ID: MRT4577_14578C.1.pep
HCSVARAPRFNCWYKVEMWKLYMYRSGLYDRFQGLRRRIQPFVKSFADHPLPAYYPPHAHRHDAPHCRFRMSSSMTWSWLPL

SEQ ID NO: 234877 - protein, 69 aa, Zea mays
  unsure (1)..(69): unsure at all Xaa locations
  Clone ID: MRT4577_145790C.1.pep
CCMDMIIKDVNLSVPDDSLDADGIHMVGSYGITMTNTVIGSXDYCIPIGPKTSMVNITVLTCGPGTQHH

SEQ ID NO: 234878 - protein, 94 aa, Zea mays
  Clone ID: MRT4577_145791C.1.pep
SFSSYEKGKPGWFLNMGIKAPLLGTCYLGPPFFLVSNRTGFNKFKIVFVPRGPPPPRLKNFFLSQRTSPNIFFFLIPKGFFGGLLKKKRNRNFY

SEQ ID NO: 234879 - protein, 67 aa, Zea mays
  unsure (1)..(67): unsure at all Xaa locations
  Clone ID: MRT4577_145792C.1.pep
SHFNVYIIIMYFVYMFGVMLIXSLYXLCMFILMRVDEQATVDPEVQQIEVAEQELVEGKLCPGSLPF

SEQ ID NO: 234880 - protein, 56 aa, Zea mays
  unsure (1)..(56): unsure at all Xaa locations
  Clone ID: MRT4577_145793C.1.pep
KKKKKKKKKKKKKKKKKKNKKKKKKKKKKKKKKKKKGRGRXXXCXKQYKEGGLIKP

SEQ ID NO: 234881 - protein, 242 aa, Zea mays
  Clone ID: MRT4577_145794C.1.pep
AGYVTVNEAHGRALFYWFFEATAGAAKKPLVLWLNGGPGCSSIGYGEAEELGPFLVQKGKPELKWNPYSWNKEANLMFLESPVGVGFSYTNTSSDLGKLGDKITAADAYVFLLNWFKRFPQYKHHEFYIAGESYAGHYVPQLSEKIFDGNKHGPKENRINFKGIMIGNALMDDETDQAGMVQYAWDHAVISDRVYADVKAHCDFAMANTTAACDQALEEYFAVYRLIDMYSLYTPVCTDGSS

SEQ ID NO: 234882 - protein, 73 aa, Zea mays
  unsure (1)..(73): unsure at all Xaa locations
  Clone ID: MRT4577_145795C.1.pep
TYRAKHVGITTSACSVLRQGPFILSPPGKWLCFVTEGSVFPKFLMHQGQXXERCQCSFILLSFQKYVNAVLYV

SEQ ID NO: 234883 - protein, 87 aa, Zea mays
  Clone ID: MRT4577_145796C.1.pep
MLRNRIWGGGGFFFGFPPPPPGVFFLRKKGKKKKKKKKKKKKKKKKKKKKKKKKKNKKKKKKKKKLAPRPAARSKGELKISITWGGG

SEQ ID NO: 234884 - protein, 80 aa, Zea mays
  Clone ID: MRT4577_145797C.1.pep
FTNDNICRIFVPYLSGSSSKTIISYSASNGFSGQNMAGGLRTYERIMFSCKMAGPIRKDVTLHSRAKSQLVSCFCIYHLW

SEQ ID NO: 234885 - protein, 101 aa, Zea mays
  unsure (1)..(101): unsure at all Xaa locations
  Clone ID: MRT4577_145798C.1.pep
SSSPRTTCSEAADAGXTVPSAVGDQLAIGKETTRRLGMSTXMYPSSSLLXEQNKDESLASLPIDELSEKADGLSGAFPDLCCINYHPYYAWFYASCTDIEV

SEQ ID NO: 234886 - protein, 88 aa, Zea mays
  Clone ID: MRT4577_145799C.1.pep
PVRRRVHRLRRRRPVLVVVVVLHPALRVRVHWVPLGRRRGRILGGARRRRGRAAMAVGIVVAHRPRKSAAGIGIGIAGKMVVFAGGVR

SEQ ID NO: 234887 - protein, 103 aa, Zea mays
  Clone ID: MRT4577_14579C.1.pep
RSVCVNVLPSLSLFVSSSCCVCFVLLQRWSTRRRDGRMRGLAARWCGSLLFLSALSLILGTCSAVYIHHRRPTSVHRCAPMMRRRRRAGGAASHRSPWWHCLL

SEQ ID NO: 234888 - protein, 114 aa, Zea mays
  Clone ID: MRT4577_1457C.1.pep
PATRPGFARSNFILGYAAAAASGLNFTNPFLKQLDECDTYGESVENTNLEANGPWERKRQKKLKAVVREAREKFSNPSSDALTIARALQFFELSENPVEFCRANSLHLKTMEEM

SEQ ID NO: 234889 - protein, 120 aa, Zea mays
  unsure (1)..(120): unsure at all Xaa locations
  Clone ID: MRT4577_145800C.1.pep
KPCFGESFWGFLXIPHPNKKVALFRVKLTPXSFLGGFFFDFXKPTQKGFSVFPKNGEILGGKTKRWLPVXVFGSKKFDAFPKKRQEGGATLLGGGFRETPLNFRGVSQIPKRRAGALFFF

SEQ ID NO: 234890 - protein, 49 aa, Zea mays
  unsure (1)..(49): unsure at all Xaa locations
  Clone ID: MRT4577_145801C.1.pep
LFYVSXTPKAGLLADSRTSKAWWEAIVARPAFQKTVASIPLPLQPSSWE

SEQ ID NO: 234891 - protein, 78 aa, Zea mays
  unsure (1)..(78): unsure at all Xaa locations
  Clone ID: MRT4577_145802C.1.pep
MFRYQFHTYVTTWSPQGRLFQVEYAMEAVKQGSACVGLRSSTHAVLGGVNKPCSELSSYQGKGFRVSDHSGVXLCGLT

SEQ ID NO: 234892 - protein, 153 aa, Zea mays
  Clone ID: MRT4577_145803C.1.pep
MAEQVEKSFQKQPLFHNAKVSTTSRKVAGKDRRWFKEVGLGFKTPREAIEGTYIDKKCPFTGLVSIRGRILTGKVVSTKMTRTIVIRREYLHFVPKYSRYEKRHKNVAVHCSPAFRVEVGDVVTVGQCRPLSKTVRFNVLRVQKAKAKNFIKF

SEQ ID NO: 234893 - protein, 54 aa, Zea mays
  Clone ID: MRT4577_145804C.1.pep
LNSIHSPTYTHIDKYILAQSPPTEPAYSIIIPPQPLIQHLLPHQLQLLPLHPLL

SEQ ID NO: 234894 - protein, 130 aa, Zea mays
  unsure (1)..(130): unsure at all Xaa locations
  Clone ID: MRT4577_145805C.1.pep
KRMIWNNVYEKGLFDVMHDHKDNPKFKGQNGWNRDGWNSITTKFNGKFPLAHFSKQQPQEKERELKGYYKAIRDSRKXSGAGWNDTLCMVLAKPEVWPWLIXAHPKVSKFRNRXFPLFYSLEGLYEGACV

SEQ ID NO: 234895 - protein, 98 aa, Zea mays
  Clone ID: MRT4577_145806C.1.pep
SLVTRCPKCPLAIPLKKECLLGNAIQSFHTYGSSILFAFSSLGCSVKLNPLSPPGALCREPVLIVVHGMPDATTTSSSFFASFFSMLFIIACKPPLFL

SEQ ID NO: 234896 - protein, 77 aa, Zea mays
  unsure (1)..(77): unsure at all Xaa locations
  Clone ID: MRT4577_145807C.1.pep
AHPRGEVDKAHVVCDVVVRSAINKGLSEDTQVQMQEKXLVLVNNKGELIGNRVFGPVPHKLIHXKRHKILALAEHIV

SEQ ID NO: 234897 - protein, 83 aa, Zea mays
  Clone ID: MRT4577_145808C.1.pep
GENKQLALLPGYRTLYLFKQTHWVGNFLVWWTRDSHSRATKLEGPSFLVGEHLHFPKNGQPCLQNGGDSRVRIPRTFSLGNPS

SEQ ID NO: 234898 - protein, 83 aa, Zea mays
  Clone ID: MRT4577_145809C.1.pep
FIRPANRPPLPNGMWAGSTWPRIVRGENNKAPRFLLVVSPACVYLKIQIATTRNSVKLRARFIFFFEGGPVQSWFWGSQKKEL

SEQ ID NO: 234899 - protein, 81 aa, Zea mays
  Clone ID: MRT4577_14580C.1.pep
VKLGVRVNYPGGIEGGNQPVLGILKRKWGFCFFGFPHKKTVLVVVVEGLSPPGAPLISIWVKETPCFPCCVNLEGFGCFGP

SEQ ID NO: 234900 - protein, 137 aa, Zea mays
  Clone ID: MRT4577_145810C.1.pep
GARGEPGRRRGPGDHTGGGTRQKTRTRATGPTNGGGRGTRRQRGRTGGTRDGGDTGGTGDPGPNGSGAARGGAAHGPGPKATPHQSGSTKRGTAGSRLGGGPAGTPTTPRPQRGGKARQGRSRAGAERGEAPPDGTG

SEQ ID NO: 234901 - protein, 148 aa, Zea mays
  unsure (1)..(148): unsure at all Xaa locations
  Clone ID: MRT4577_145811C.1.pep
SCSDSDGGDIATASQMDKASIIKDAIEYIEHLQAEERRALQALEAWRGGALRRRRPRARRXEARVLLQQTAAAACPEPVEVLELRVSEVGDRVLVVNVTCSKGRDALARVCRALEELRLRVITGSGTSVAGWLMATIFFEVRRRQGDS

SEQ ID NO: 234902 - protein, 134 aa, Zea mays
  Clone ID: MRT4577_145812C.1.pep
PLAIFAGITTSFAFSILILGVFGGYRDIALSLASQSIAHLIWGSSITSHVRPPRTPSSALCINSRANSVRPTGSCTLLKRHRRRRPSSSGYCRTVTPGSDIGLGLIPSVRAERDFEGVGGWRLGDDDDNDAWTT

SEQ ID NO: 234903 - protein, 55 aa, Zea mays
  Clone ID: MRT4577_145813C.1.pep
IISLQGTLPLLYNPLKLDSLCHPSFYFLAARRKKCTVTNSKQSIRICMAHGVIVF

SEQ ID NO: 234904 - protein, 109 aa, Zea mays
  Clone ID: MRT4577_145814C.1.pep
RGPRRHRVVNGHHRAEAGVLGVELRPVLIGTNIWPRDGGHVDAVTFMSMKTPSSQPAAQQALPGVRPQSRNVVCPSHSPHMSAVMDMMQPKVAVCRGTSNEFPQSPRAE

SEQ ID NO: 234905 - protein, 82 aa, Zea mays
  Clone ID: MRT4577_145815C.1.pep
QYMQRAIRLVTISYPDPCNMDTRFGSGIVTGSSTCRYLLTYSRALSDVQQAVGKHLTIWAHNGCALIPATVPGRNLELLRNK

SEQ ID NO: 234906 - protein, 92 aa, Zea mays
  Clone ID: MRT4577_145817C.1.pep
QPLWSKKLCQPYRPYGTTPLTSATATTMTPRIPSSCAPFAIAASISYRFHVDAVCPGLSQASIGPYMHAQSLPAGLGMEELSFVFFIQKCSL

SEQ ID NO: 234907 - protein, 130 aa, Zea mays
  unsure (1)..(130): unsure at all Xaa locations
  Clone ID: MRT4577_145818C.1.pep
PCLHRPPPPCVACCRRPPGPDHHHATVPPPPPPFLAPPXPSPPPAAARPPALLYNPRXVSSRQPRQSNHPPNQPPLHAQPRSRPLPFLGPSTSNXPRXPTPRTRRPRTSPPTVPSRSRATPRSVTRACSR

SEQ ID NO: 234908 - protein, 83 aa, Zea mays
  Clone ID: MRT4577_145819C.1.pep
AHPRRGERSSTAPETDIKQVLAVNHALAHRSWFINLASLIAVNHALAHRSWFINLASLIIKGATVRSYRTDPGRVGGRVGYAC

SEQ ID NO: 234909 - protein, 82 aa, Zea mays
  unsure (1)..(82): unsure at all Xaa locations
  Clone ID: MRT4577_14581C.1.pep
XXXXSXXXVXXXFXPPSPXRCCXYXXXXXXXXRGFXGXXXXXLLAFXAASXXWXFPALXPWYSLCFSPSFCVLFXPXAGSAR

SEQ ID NO: 234910 - protein, 161 aa, Zea mays
  Clone ID: MRT4577_145820C.1.pep
LSSEFPGGRSARRAGRPKTEPCGGSARERDRTPNSQILPARPPVPVDSSFLPAAPHLRPLLLQGDRSSTGCARVLLLLGYGSLIWDTRRACMLLPGPGQNPLTASCPGLTAVVNSTWVAHRGRLALNPRHNTMRTSPMGLVLEVIAGKDSLYYGAVCWELS

SEQ ID NO: 234911 - protein, 137 aa, Zea mays
  Clone ID: MRT4577_145821C.1.pep
TVHFAIKNPADSSLGGFHSGSQQREQQGHQHLIQRVSGPQHGDGNQRAHEALDGSEDSDAPKMGPHISSSSHRQRRRSRHHHPRADRRSRDRLRSRSHDPSADRRKTERRQNRQQRTRQKTSRRQHAAPNDRPHRQR

SEQ ID NO: 234912 - protein, 74 aa, Zea mays
  Clone ID: MRT4577_145822C.1.pep
MTIFLSELMQDVRHMKTSPLTDEEKECIQEGLRIFKNDWTSVWRFVVPHRDPSLLQRQWRVASGIQKSYTKSDA

SEQ ID NO: 234913 - protein, 108 aa, Zea mays
  unsure (1)..(108): unsure at all Xaa locations
  Clone ID: MRT4577_145823C.1.pep
RVTTPRPRGPVGTRRPTXPRPKGRCTRRTPGSGPTPRRGGPGPFFPLPGGWPAPVWACCDRPTGRIEAPKSRTYGTVGYQQPAPVVVVVVKSPPDCMLGLVPRAPCWC

SEQ ID NO: 234914 - protein, 77 aa, Zea mays
  unsure (1)..(77): unsure at all Xaa locations
  Clone ID: MRT4577_145824C.1.pep
GRTHAFCQTNNDINELFLNDINNXHIAMLYILGYFIQVLLTCLNPFQNLLDHLDDPIHNNVLTSLKFHYNLVHQHTC

SEQ ID NO: 234915 - protein, 61 aa, Zea mays
  Clone ID: MRT4577_145825C.1.pep
AVVDYELNDRQTSSTAEEISKCTGDAVFYGSFPKRWKCTTPGCMSTMHVSATAPMFVPLLN

SEQ ID NO: 234916 - protein, 378 aa, Zea mays
  Clone ID: MRT4577_145826C.1.pep
MTVMMPQRHRATAKKPMWIIVLLCMVCIVLIGAYVFPPRRFSNCYLSASSVCAPFKDWLPSMGRRERTDEEIISSVVIRDILSMPMPMPKNPKIALMFLTPGSLPFEKLWEKFLQGHEGRYSIYVHASREKPVHTSSLFAGRDIHSDAVVWGLISMVDAEKRLLANALEDVDNQVFILLSDSCVPLHSFDYVYNYLMGTNVSFIDCFKDPGPHGSGRYSIEMYPEIDERDFRKGAQWFAVTRRHALMILADSLYYKKFKLYCKPAEGRNCIADEHYLPTLFNMVDPGGISNWSVTHVDWSEGKWHPRSYSADDVTYDLLKNITAVDENFHVTSDDKKLVMQKPCLWNGSKRPCYLFARKFNPEALDNLLKQFTSYTSV

SEQ ID NO: 234917 - protein, 261 aa, Zea mays
  unsure (1)..(261): unsure at all Xaa locations
  Clone ID: MRT4577_145827C.1.pep
MTVMMPQRHRATAKKPMWIIVLLSMVCIMLIGAYVFPPRRFSKCYLSASSVCTSFKDWLPSMGHRERADEEIISSVVIRDILSMPMPMSKNPKIALMFLTPGSLPFEKLWETFLQGHEGRYSIYVHASREKPVHTSSLFAGRDIHSDAIVWGLISMGDAEKRLLANALXDVDNQVFVLLSDSCVPLHSFDYVYNYLMGTNVSFIDCFKGSGPHGQWEVPIEMYPEDSHHQVSSATTRNKQQQPGPKSQPASQLPPLVVQPN

SEQ ID NO: 234918 - protein, 76 aa, Zea mays
  Clone ID: MRT4577_145828C.1.pep
MSCSCGSSCNCGSSCKCGKKYPDLEEKSTAAQATVVLGVAPEKTAAAEFEAAAESGAETSHGCSCGDSCKCNPCNC

SEQ ID NO: 234919 - protein, 88 aa, Zea mays
  unsure (1)..(88): unsure at all Xaa locations
  Clone ID: MRT4577_145829C.1.pep
MAGAAARRPGAKPRGGGGAGKRSAWLAADGSKLYERFTELEYLILGLVSTVPAFVIPLFLVGKADSVRNFKDRYXVKANIWIIMFSYV

SEQ ID NO: 234920 - protein, 48 aa, Zea mays
  Clone ID: MRT4577_14582C.1.pep
VSAHVLFATDRFLSRLCGAVQHIFFRQINLTSFFCSHTRCVAYQAEKA

SEQ ID NO: 234921 - protein, 299 aa, Zea mays
  Clone ID: MRT4577_145830C.1.pep
MAGAAARRPGAKPRGGGGAGKRSAWLAADGSKRWGEAFFLLYTPFWLTLCLGVVVPFKLYERFTELEYLILGLVSTVPAFVIPLFLVGKADSVRNFKDRYWVKANIWIIIFSYVGNYFWTHYFFTVLGASYTFPSWRMNNVPHTTFLLTHACFLFYHMASNMTLRRLRHSTAHLPQSICWLFEAAWILALSYFIAYLETLAIANFPYYEFVDRDIMYKVGSLFYAIYFIVSFPMFSRIDEKDEKWSLSRVAVDSLGAAMLVTIILDLWRIFLGPIVPVPESRQCGQPGLAWFQAQNGST

SEQ ID NO: 234922 - protein, 103 aa, Zea mays
  Clone ID: MRT4577_145831C.1.pep
STSLACRHHRRLCAAQIRPAGAAPLEHTCTDATRRSPRPPRRGLVPVSCAPALPVSVRGWARSIRPNPVEFTVPWCQIGEFHSVTRGGGAFGSVWPEVALGWL

SEQ ID NO: 234923 - protein, 68 aa, Zea mays
  Clone ID: MRT4577_145832C.1.pep
GFSSDQCWPPELGGFHSIPVSNQARRSCISSPSRPIYLYDFFLFLLSIGLVLSTTHKCLLVSQLLQCY

SEQ ID NO: 234924 - protein, 75 aa, Zea mays
  Clone ID: MRT4577_145833C.1.pep
RFMVTVRLKGLVLLTEHTTSSLNDSIRDDPRLAKLPISSSRRNYSIDGHTLILLVDHGSRHLGHEADTDSRRGPY

SEQ ID NO: 234925 - protein, 58 aa, Zea mays
  Clone ID: MRT4577_145834C.1.pep
LTLILPRTIIELNTNQLLSISTSIIFSLVDISLLVADVIADHPPIVRSNANMIQHEPL

SEQ ID NO: 234926 - protein, 167 aa, Zea mays
  unsure (1)..(167): unsure at all Xaa locations
  Clone ID: MRT4577_145835C.1.pep
MSSLGAVSGKPASMKGIARXSHLQRRKLDGGRARVRSIRKPREAGAVVKXGDESGXFDLDDVKDTTAQGEPDGSDATTAYNPLEMKFMETVAGPXIKRGMLLXILLLRRRXLLVYXGELVVTDLLSIKKGPDETPQTXPRGKIYGQFLHLHEILVCFVLLSTYGPLK

SEQ ID NO: 234927 - protein, 282 aa, Zea mays
  unsure (1)..(282): unsure at all Xaa locations
  Clone ID: MRT4577_145836C.1.pep
GCWTGSKSRXTLKFRGFLQGHPMLILVDSGSSHSFLHTKFQTMLTNVQLVPIQLQVRVASGEILHCQYKIQQLQWQLQGCTFQTDVTLLPIPCYDMIIGMDWLQAFSPMRVHWTQQWLSIPYQGATVTLHGQSAVIPECTVIEVLMVSPTVSDTTQSMIHPQVQSLLQQFESVFADPTGLPPTRECDHTIPLVDGAQPVVVKAYRYPPQLKDEIERQIADMLQQGVIQKSFSSFASPVLLVKKKDNTWRFCVDYRYLNALTVKSKYPVPVFDXQLMDELSHA

SEQ ID NO: 234928 - protein, 57 aa, Zea mays
  Clone ID: MRT4577_145837C.1.pep
NFFGPWKTLQKRFIKPETPFFKKKKKKKKKKKKKKKKKKKKKKKKKKKKKLEEGRRY

SEQ ID NO: 234929 - protein, 135 aa, Zea mays
  unsure (1)..(135): unsure at all Xaa locations
  Clone ID: MRT4577_145838C.1.pep
RARYDEIVKEVSSYLKKVGYNPDKIHYVPISGFEGDYMIERSTNLDWYKGPTLLEALDLINEPKRPSYKPLRLPLQDVYKIGGIATVPVARVDTGIIKSWMAVTFGPSDLTTEVKSVEMHHEALXDALPVDNVGF

SEQ ID NO: 234930 - protein, 118 aa, Zea mays
  Clone ID: MRT4577_145839C.1.pep
SSSPSLSATAGRTQHDSIYLTPWPSSYSSPSASTTNYAHLMMGELRTDRNTPSRLYHMAWLKPIPWLLQSTTDTAPSQISYSTIITWNMIGILCVLSLYATYCRCCRRPTQHFQMQLH

SEQ ID NO: 234931 - protein, 42 aa, Zea mays
  Clone ID: MRT4577_14583C.1.pep
IYLPCQDNVPSLTRGSLLVVRGPVSSLRCVGQKGTVVVVVCV

SEQ ID NO: 234932 - protein, 179 aa, Zea mays
  unsure (1)..(179): unsure at all Xaa locations
  Clone ID: MRT4577_145840C.1.pep
MTRKHALXLVSTLGVKPEICXCCNKXLDATTPKYSKARYDEIVKEVSSYLKKVGYNPDKIHFVPISGFEGDNMIERSTNLDWYKGPTLLEALDLINEPKRPSDKPLRLPLQDVYKIGGIGTVPVGRAETGIINPGMVATFGPRGRTTEDKPGEAHHEALHEALPGDNGGFKVCNGSREG

SEQ ID NO: 234933 - protein, 41 aa, Zea mays
  Clone ID: MRT4577_145841C.1.pep
RPVTETPAQPERVCPKQAGYGVEWNWENRELRSQSATNWNL

SEQ ID NO: 234934 - protein, 40 aa, Zea mays
  unsure (1)..(40): unsure at all Xaa locations
  Clone ID: MRT4577_145842C.1.pep
ILDLIDPYGILXKALGDESRKYGLXGDLSYTSRSTLQYGA

SEQ ID NO: 234935 - protein, 145 aa, Zea mays
  Clone ID: MRT4577_145843C.1.pep
DFLGLQLVKLPRSPTVDDILKKYLEHRAKKDGKINDSYAEILKGLRCYFDKALPAMLLYKKERDQYAEEVKGDVSPSTVYGAEHLLRLFVKLPELLASVNMEEDALNKLQLKLLDVLKFLQKNQITFFTSAYDGSCKGADEDKTK

SEQ ID NO: 234936 - protein, 311 aa, Zea mays
  Clone ID: MRT4577_145844C.1.pep
MGSSSNTNTSGGASDKEEKKEDKVKGKDSSGPSFKENERVLAYHGPLLYEAKVQRIENHEDEWRYFVHYLGWNKNWDEWVANDRLLELTEENVRKQQELDKNQVVDKTMKSGRSTQHKPKVSNADAKADKDDTKSLISVKGKKRKSQLGTEFPLPLKKQLVDDWEFVTQMGKLVKLPRSPTVDDILKKYLEHRAKKDGKINDSYAEILKGLRCYFDKALPAMLLYKKERDQYAEEVKGDVSPSTVYGAEHLLRLFVKLPELLASVNMEEDALNKLQLKLLDVLKFLQKNQITFFTSAYDGSCKGADEDKTK

SEQ ID NO: 234937 - protein, 181 aa, Zea mays
  Clone ID: MRT4577_145845C.1.pep
LLSLKIQDKEKRSSHSLLVLQFPLPLKKQLVDDWEFVTQMGKLVKLPRSPTVDDILKKYLEHRAKKDGKINDSYAEILKGLRCYFDKALPAMLLYKKERDQYAEEVKGDVSPSTVYGAEHLLRLFVKLPELLASVNMEEDALNKLQLKLLDVLKFLQKNQITFFTSAYDGSCKGADEDKTK

SEQ ID NO: 234938 - protein, 59 aa, Zea mays
  unsure (1)..(59): unsure at all Xaa locations
  Clone ID: MRT4577_145846C.1.pep
IQPPGGPEKSGGEQKKPPVTPXEAGGSTGHPPXKGLPLFGPPQEGGPXGPPPRGPQTRV

SEQ ID NO: 234939 - protein, 133 aa, Zea mays
  Clone ID: MRT4577_145847C.1.pep
SCFLSPIIYGANLRVCIPVCEQCNEVRLSYQETPLQLARSPGYGRPFLKNGKHGAIVSPSPACSDHLGIAHLKCFPFITGRRTAFLYAPMGMPLSFLNGRVRTSVWNLASAKEEEEGNASVVPDLFLGMESYF

SEQ ID NO: 234940 - protein, 38 aa, Zea mays
  Clone ID: MRT4577_145848C.1.pep
TLLRAWFVDIYHTISRMGCVARLQDLLLLCSNYMLVSS

SEQ ID NO: 234941 - protein, 56 aa, Zea mays
  Clone ID: MRT4577_145849C.1.pep
QALIKARGAAPTVYYGSSNQFSLDNGLAESMVKLSNVGVLTGTEGLITYKCGSVIY

SEQ ID NO: 234942 - protein, 82 aa, Zea mays
  Clone ID: MRT4577_14584C.1.pep
RPIPNSIISALISNEKILKQTCNQLFTFDYIPIHIDPVQSSLFVDSSVQVSEQKAFLTKFPTSCPGKDLPCPKKSIGMKMWY

SEQ ID NO: 234943 - protein, 42 aa, Zea mays
  Clone ID: MRT4577_145850C.1.pep
DLGSSLFAPTEWTPPEWTRLQFLSLVGWISVSSSLYCLTTPG

SEQ ID NO: 234944 - protein, 37 aa, Zea mays
  Clone ID: MRT4577_145851C.1.pep
RPCLLAVGEWIEGSVYLRVVKPSGGPSALTYRANDRS

SEQ ID NO: 234945 - protein, 53 aa, Zea mays
  Clone ID: MRT4577_145852C.1.pep
WGPPPLSSHLPRPPRDSRRLEEGKTGSRSGAVATEAYDRRCCPRSARTVRCGK

SEQ ID NO: 234946 - protein, 36 aa, Zea mays
  Clone ID: MRT4577_145853C.1.pep
PTRPPTRPVSYLVLTKYTHGEGLILPPSQAFIKTSF

SEQ ID NO: 234947 - protein, 231 aa, Zea mays
  unsure (1)..(231): unsure at all Xaa locations
  Clone ID: MRT4577_145854C.1.pep
MAAAEATRPLLVAISLAVAACCLAQLAVGDTNGVYEPCSDARIQRGDGFTFGVVFAGYNAFFSGNTQLSPCDRRLNLAASGQLAVFRPKVDEISLLTINTTTGFNPASAGGFMVAFAGRKYAARSIPIFVSNTSVTVSSFTLVLEFNKGRLQNLHWKKDGXKQTCAIRTQSCKSQGPVDCSVGIQLAFFGTDKHESVLNSWYEVSNLRQYCLYGLYSNLKDTLSGQFNKIF

SEQ ID NO: 234948 - protein, 194 aa, Zea mays
  Clone ID: MRT4577_145855C.1.pep
MGDCGPRRRPGTFGRQSTVNYTTPCRLKRTTSDKMRTYEDTFSGARIYPGKGKLYVRGDSKIFRFQNGKSESLFLQRKNPRRIAWTVLYRRQHRKGISEEVAKKRTRRTVKAQRGIVGASLDVIKEKRNIRPEARSAARAQAIKESKEKKQADAAAKKSEKAKLAAQASKGQAVRQVSKQGAKGSAPKVQAKSR

SEQ ID NO: 234949 - protein, 244 aa, Zea mays
  Clone ID: MRT4577_145856C.1.pep
MAAADATRPLLVAISLAVAACCLAQLAVGDTNGVYEPCSDARIQRGDGFTFGVVFAGYNAFFSGNTQLSPCDRRLNLAASGQLAVFRPKVDEISLLTINTTTGFNPASAGGFMVAFAGRKYAARSIPIFVSNTSVTVSSFTLVLEFNKGRLQNLHWKKDGCGACSGKSNFVCLGKQTCAIRTQSCKSQGPVDCSVGIQLAFSGTDKHESVLNSWYEVSNLRQYSLYGLYSNLKDTLSGQFNKIF

SEQ ID NO: 234950 - protein, 244 aa, Zea mays
  Clone ID: MRT4577_145857C.1.pep
MAAADASRTLLAAVSLALAACCLAQLAAGDTNGVYEPCSDARIQRGDGFTFGVVFAGYNAFFSGNTQLSPCDRRLNLAASGQLAVFRPKVDEISLLTINTTTGFNPASAGGFMVAFAGRKYAARSIPIFVSNTSVTVSSFTLVLEFNKGRLQNLHWKKDGCGACSGKSNFVCLGKQTCAIRTQSCKSQGPVDCSVGIQLAFSGTDKHESVLNSWYEVSNLRQYSLYGLYSNLKDTLSGQFNKIF

SEQ ID NO: 234951 - protein, 116 aa, Zea mays
  Clone ID: MRT4577_145858C.1.pep
APWFSDVDSQLHPSQQSRYCCCVILAPASTANKSNLHEQTDHRHEMMKLSMQRHIIGSSNPISGLSMLCKLHPCITFRNRFESHVSLTFNGSKQLINEKWGDAGIEFRSYQTTILI

SEQ ID NO: 234952 - protein, 227 aa, Zea mays
  Clone ID: MRT4577_145859C.1.pep
MAAADASRTLLAAVSLALAACCLAQLAAGDTNGVYEPCSDGRIQRGDGFTFGVVFAGYNAFFSGNTQLSPCDRRLNLAASGQLAVFRPKASAGGFMVAFAGRKYAARSIPIFVSNTSVTVSSFTLVLEFNKGRLENLHWKKDGCGACSGKSNFVCLGKQTCAIRTQSCKSQGPVDCSVGIQLAFSGTDKHESVLNSWYEVSNLRQYSLYGLYSNLKGTLSGQFNKIF

SEQ ID NO: 234953 - protein, 132 aa, Zea mays
  Clone ID: MRT4577_14585C.1.pep
MASSSENAAVPPEEEPQAPPPPDTEPTEAAPGEAEDEPQTLERAQELFDRGSKAIEDEDFVDAVDCLSRALEIRASHYGELAPECASTYFKYGCALLYKAQEESDVLGNVPKSLPNEDSVKSTATKEEMGSL

SEQ ID NO: 234954 - protein, 81 aa, Zea mays
  Clone ID: MRT4577_145860C.1.pep
EITSAASRGGGGFLAAEVLADQVLLAYESMKRGNLTSDLEVDTIQTMPLHTSFLCVSELGACLLMEIRRLASNNCAEFLES

SEQ ID NO: 234955 - protein, 244 aa, Zea mays; identical to SEQ ID NO: 234949
  Clone ID: MRT4577_145861C.1.pep

SEQ ID NO: 234956 - protein, 72 aa, Zea mays
  Clone ID: MRT4577_145862C.1.pep
KILGVNHILLLKQDTHPHCPQGKSVFFFLGTPPQQCFTRPPPPTRNYPINPPPAQADPKKRLKLPTTTPLKK

SEQ ID NO: 234957 - protein, 101 aa, Zea mays
  unsure (1)..(101): unsure at all Xaa locations
  Clone ID: MRT4577_145863C.1.pep
LAPFTAKDMWKSAFFLSLLNNXPTLNTSMRSRPGSSIRAAIAASIKXLPRQPRNFQFPLAWPRPEVKFYTGKTYHTRDTKFYGTDGDAAPALAHDAILEHA

SEQ ID NO: 234958 - protein, 76 aa, Zea mays
  Clone ID: MRT4577_145864C.1.pep
FTKADYLKTYAHVLQPVDGQANWPISDMPRPKPPAFVKMPGRPKTERTREVREAPKGTKLSRMGIKMSCRLCDKPG

SEQ ID NO: 234959 - protein, 62 aa, Zea mays
  Clone ID: MRT4577_145865C.1.pep
GLHHRRFSVPRRSGLDLGRAMGEITGYTTDEGSTIDKVTRAVKNASARVRSALWKWMCSVVT

SEQ ID NO: 234960 - protein, 82 aa, Zea mays
  Clone ID: MRT4577_145866C.1.pep
RSPDYCFGGERIHIAASDHEYRCFIGSHFWATDDNYLHNVFSTYRKVLDYKIILDRYTHRCHRSPFVTFFTEEAIKNAIDGI

SEQ ID NO: 234961 - protein, 60 aa, Zea mays
  Clone ID: MRT4577_145867C.1.pep
NGTLNRKRGGMLTFSFGLISRAWNQAKLHILKASRTKRLQMGSIFHELLNAVQSKRCRLE

SEQ ID NO: 234962 - protein, 70 aa, Zea mays
  Clone ID: MRT4577_145868C.1.pep
KERSPRASTELVKPFLNWQHFIQDTVFTARILPYQKPSECANPVSARRNSPGRLVLTNGTQTGLTARTGS

SEQ ID NO: 234963 - protein, 175 aa, Zea mays
  Clone ID: MRT4577_145869C.1.pep
MAASGPDAKRAKTRLHSDTDDDSASELLRDKVLVENTKKELSRIQAELSSTNRNLNFSNQQMEAISTKLPVDKSDLKSFFPKAWCDQHGDGVITAAKEGFKQHVEEMEKQRDITGSEGWATFEDIDLDDNFNPRAFSRHQPDSAVKGKKVNESLTSSFTNPFYNEKNPFLNTNYN

SEQ ID NO: 234964 - protein, 68 aa, Zea mays
  Clone ID: MRT4577_14586C.1.pep
KPNLGNQNIQLFFRRDSRETLLTQIWSICLQKRGEIGENRNHYFPPSLKPPERPFPSRTGPIGPRNFL

SEQ ID NO: 234965 - protein, 58 aa, Zea mays
  Clone ID: MRT4577_145870C.1.pep
VSHVPKYVTESTSIILDADIELCQFMQLVFRTSSIHVRLGKLFARADIRRLTYSVAVQ

SEQ ID NO: 234966 - protein, 98 aa, Zea mays
  Clone ID: MRT4577_145871C.1.pep
SLSAHQVNQACCRSTNIGVFLCLKCGDVHRALGPDISKVLSVTLDDWSDSDIDSMVEVGGNSYANSIYEAFLPKDHPKPKPDSTMEYRTKFIRAKYET

SEQ ID NO: 234967 - protein, 215 aa, Zea mays
  unsure (1)..(215): unsure at all Xaa locations
  Clone ID: MRT4577_145872C.1.pep
PTRPRKLKDLMIKSDNRICADCGXAPDPKWASANIGVFLCLKWGDVHRALGPDISKGLSVTLDDWSDNDIDFMVXRAKYETQDFLKPSLRHLLRTSFKSTNSVKSVDSNFSXHSKERYLLRXTREFVGELNITVVKGTXLAVRDMLTSDPYVVLTLXGQKAQSTVKKSDLYPPWNEELKISVPRNYGPLKLEVYDHDTFSADDIMGXEAEIDLHQ

SEQ ID NO: 234968 - protein, 67 aa, Zea mays
  unsure (1)..(67): unsure at all Xaa locations
  Clone ID: MRT4577_145873C.1.pep
LLPAVEGTLQFINWLLGSLPDRCKTDHAASRWPVGGKHSVQRDCHLTSLDRTPRVMLGRRDAGXXKM

SEQ ID NO: 234969 - protein, 183 aa, Zea mays
  unsure (1)..(183): unsure at all Xaa locations
  Clone ID: MRT4577_145874C.1.pep
PTPPPTRPPTRPPTRPPTRPEDTREFVGELIITLVKGTNLAVRDMLTSXAWXRLXLGGQKVQSTVKKSDLNPVWNEVLKISVPRNYGPLKLEIYDHDIFSADDIMGEAEIDLQPMITAAMAFGDTSRLGDMQIGRWFMTKDNALMKDSTVNVVAGKVKQEVHLKLQNVESGEMELELEWVPIL

SEQ ID NO: 234970 - protein, 62 aa, Zea mays
  unsure (1)..(62): unsure at all Xaa locations
  Clone ID: MRT4577_145876C.1.pep
NIQLLIPALTGLXKLLTPDGYMPDSVLIVGNRITHQALSSLIKWLKNDHMVFIKEASFSMLN

SEQ ID NO: 234971 - protein, 70 aa, Zea mays
  Clone ID: MRT4577_145877C.1.pep
GHSKNYTFFTIKFYSSPYYYITHCSKFPSFTPLLNHIDTYNSNLYTLSTILIYLLYLNINILSTFYSTFL

SEQ ID NO: 234972 - protein, 83 aa, Zea mays
  unsure (1)..(83): unsure at all Xaa locations
  Clone ID: MRT4577_145878C.1.pep
AGYVTIAKEALAKKKKKKKKKKKKKKKKKKKKKKKKSIRMKKXKKSTIKSNKKQSNKKKMSHSLKDQTTITSHTYETVFYTNH

SEQ ID NO: 234973 - protein, 92 aa, Zea mays
  Clone ID: MRT4577_145879C.1.pep
FDTLRISDDKRCAYMHCAHRPLLSVDRVLTPFQHQNRPYFIHGSQRDCRAAANDAGTGGAAMTSAAISADEHVCDTWSRTMMLPSRATTGWS

SEQ ID NO: 234974 - protein, 147 aa, Zea mays
  unsure (1)..(147): unsure at all Xaa locations
  Clone ID: MRT4577_14587C.1.pep
RVNHRGERDPHHRAGPNLQLCLLRYLPPLGAWACPHHRRRIVLYLGCAVLFDSRPCRFEEIPSNVREVFLTGPTSKLGRAIALYLCRKKIRVLMFTLSSERFLKIXREAPPEYQQYLVQVTKYQAAQNCKFCMNYWRWLSKRTERQT

SEQ ID NO: 234975 - protein, 119 aa, Zea mays
  unsure (1)..(119): unsure at all Xaa locations
  Clone ID: MRT4577_145880C.1.pep
FVHFTVVKFQSCESSTSTVEHASICFKCRNIDVNAXLHDRMGLIXKQQNXDHIAKLXAKIALHELVNXEDIKFATSMLYRESRPGIKDGIGCPHGXQMSKINAPKKNISNHDWDKTIIK

SEQ ID NO: 234976 - protein, 173 aa, Zea mays
  Clone ID: MRT4577_145881C.1.pep
MTTATAGGSVADRIMPHLLNIYGSSATARDFEIYAPNATFEDPLMRAHGVKQIKSAFYTLPKVFGESKITEYTVQENPMGPGKTEVVIQNKQHYKVLGKPVDLTSLIRLQLQDGKVVKHEDWWHGKPLKNRDTVGVPLVGRLAEASRRGAMLLTHALMGFGKDPTQPPPPPTH

SEQ ID NO: 234977 - protein, 126 aa, Zea mays
  Clone ID: MRT4577_145882C.1.pep
AEEGWRGFMRGNGTNCIRMVPYSAVQFSSYNFYKKSIFEPYLGTDLTPVARLICGGLAGITSVFLTYPLDIVRTRLSIQSASFAELGARPDKLPGMWATLVSMYKTEGGVSALYRGIVPTVAGVAP

SEQ ID NO: 234978 - protein, 174 aa, Zea mays
  Clone ID: MRT4577_145883C.1.pep
MTTATAVGSVADRIMPHLLNIYGSSATARDFEIYAPNATFEDPLMRAHGVKQIKSAFYTLPKVFGESKITEYTVQENPMGPGKTEVVIQNKQHYKVLGKPVDLTSLIRLQLQDGKVVKHEDWWHGKPLKNRDTVGVPLVGRLAEASRRGAMLLTHALMGFGKDPTQPPPPPPTH

SEQ ID NO: 234979 - protein, 501 aa, Zea mays
  Clone ID: MRT4577_145884C.1.pep
GRVGAIASEDGAYEFCEPGVIDMIFLQILSLTDGSKCVELAINLLQLLVHKLKVDTMSSEKLQGMTRMVTCLARIFAVLHTAVKFDALHMLTFLLSQKESPLHDFLRSIPASIWESHIRVGITAILQNRVVSSEKLHALLLAECMMSILGEDWLSEDCEVQDNQNVLSVDKFVLLVLESARVEVAVLLNELAYLKYESSRISQTDEAISQKQRNLAILFSLIERIIKMISNASSGEGAPIHTIRESTIMQAITGLNETINLVLDFLQDAKDHGQWKGDDLLAAARIVGSYLAEAPYACKEKTGNLLEFIFSIEGQDESSSFYSICFMLPMLSQITMEVDGCRTLASFGGHKAVIDCLVKMTEQGGMTIDNGSMFLACDTIINFMSNMKSVHIPVDYCFIRLLKALVTWAGTTDASSVTMTASCLCVMLLDMTSEEFLLSCSHFDGNILGSLSEIIIRSLQQDIPDDDSEQFKQKQIIVSGYKRWADRFPRVKDVVEQHVSV

SEQ ID NO: 234980 - protein, 229 aa, Zea mays
  unsure (1)..(229): unsure at all Xaa locations
  Clone ID: MRT4577_145885C.1.pep
MSHLGLCPNVVTFXTVISGWCSVADMESAMRVYDKMCKSGVYPNLRTFETLIWGYSEQKQPWKAEEVLQMMRETGVKPKQSTYCLIADAWKAVGLTENINNSNGSPNGPYAIDKLDHSNDNCNVRISEDNNNKLQFFYESNGRAMNGRSRSSFLQITNALGSSGIVSAKVMKAGEFPSERLKVIKNXLSTRISIVASXFCRKQLRKNGGFYSQSINSFKMGFSSRGCIY

SEQ ID NO: 234981 - protein, 98 aa, Zea mays
  unsure (1)..(98): unsure at all Xaa locations
  Clone ID: MRT4577_145886C.1.pep
REWPEPLKNRHLGSLEDIYEKQKDFIETFMAQQFLFQRQWQQIRKYAQKLGISIMGDMPIYVGYHSADVWANRRSFLLDXNGFPTFVSGRPPDAFSET

SEQ ID NO: 234982 - protein, 88 aa, Zea mays
  Clone ID: MRT4577_145887C.1.pep
VDYCSEEVRSVAPAGFCRHGGGVQQHVVKEKFVEVDTVSRAGANHHHLHHGHHGGHGFVVRETRVQEDINHLPGEVHERRESFLARVN

SEQ ID NO: 234983 - protein, 35 aa, Zea mays
  Clone ID: MRT4577_145888C.1.pep
LLSRREIYGAVSLRMEGVITLLNTHATWFDKDTNQ

SEQ ID NO: 234984 - protein, 207 aa, Zea mays
  unsure (1)..(207): unsure at all Xaa locations
  Clone ID: MRT4577_145889C.1.pep
MELKPGMSALVTGGASGIGKALCIAFARRGLFVTVVDFSEENGREVATLVQKENSKFHEDLRIPSSIFVKCDVSNADNLAACFEKHVQTYNGLDICINCAGIANKTLVYDDTSDGTRTWRHAVNVNLVAVIDGTRIASQIMRNQKKPGVIINIGSAAGLYPMFLDPVYSAAKGGGVMFTRSLSPLKRHGVRVNVLCPEXVQTNMAEQ

SEQ ID NO: 234985 - protein, 460 aa, Zea mays
  Clone ID: MRT4577_14588C.1.pep
MASSSENAAVPPEEEPQAPPPPDTEPTEAAPGEAEDEPQTLERAQELFDRGSKAIEDEDFVDAVDCLSRALEIRASHYGELAPECASTYFKYGCALLYKAQEESDVLGNVPKSLPNEDSVKSTATKDDSGTSKVSGTDAEDAASSEKVDAEEGQNSNGKNQENGNGEVEKDDDDVDDDEKMGDEEDNDLDLSWKMLDIARAIVEKSQDNTMEKVKIYSALAEVATEREDMDNSLSDYMKALSMLEHLVEPDHRRVVELNFRICLVYELVSKIGEAISYCAKAISLCKSRIQSLKSSKDALLAGIDGDASAAEAEGGSEKSAIEKELEQLTSILPDLEKKLEDLSEANPSADMDEMVKAIASRVTEVMPKAASFTSSQMATSSNGFDSSVMSTAATTGSSGSTVTDLGVVGRGVKRASIKPISSEPAAKKPALDSPSLQGDSSINSEVVPAMQTGDESVSK

SEQ ID NO: 234986 - protein, 86 aa, Zea mays
  Clone ID: MRT4577_145890C.1.pep
NSARAASCLCVMLLDMTSEKFLLSCSHFDANILGSLSEIIIRSLQQDIPDDDSEQFKQKQIIVSGYKRWADRFPRVKDVVEQHVSV

SEQ ID NO: 234987 - protein, 99 aa, Zea mays
  Clone ID: MRT4577_145891C.1.pep
VKFPRSILSRVYALLPKPQTQKTALHMEAKKKPSAPAAVGAAPPPPGNGYFSTVFSAPTAGSASDAKHADLYTMLNKQSSRGQNGRVQGGQPGWLCYQR

SEQ ID NO: 234988 - protein, 96 aa, Zea mays
  Clone ID: MRT4577_145892C.1.pep
DLYTMLNKQSSRGQNGRDGKSHSRPTYKGAMANMLIQMSHQNLLTSAHPCITVVGSSTAAFYGSNQPMNPIRITRGATRMALLPEVIGGKVHFITE

SEQ ID NO: 234989 - protein, 122 aa, Zea mays
  unsure (1)..(122): unsure at all Xaa locations
  Clone ID: MRT4577_145893C.1.pep
WELQIPLHSLLPVCAGDSLSLFVWVWISNSLPLFALVWGAGRVSLLGLLFAWYAFLCRASCFVGXVFLLSPVWPSSGPAWAIAALAAVLAVPSRPAWRLWSLLVLCACFRSFFHPYAPVADL

SEQ ID NO: 234990 - protein, 27 aa, Zea mays
  Clone ID: MRT4577_145894C.1.pep
SINLVPSCYFTFCNTKIMKNMLTFWHC

SEQ ID NO: 234991 - protein, 232 aa, Zea mays
  Clone ID: MRT4577_145895C.1.pep
MELKPGMSALVTGGASGIGKALCIAFARRGLFVTVVDFSEENGREVATLVQKENSKFHEDLRIPSSIFVKCDVSNADNLAACFEKHVQTYNGLDICINCAGIANKTLVYDDTSDGTRTWRHAVNVNLVAVIDGTRIASQIMRNQKKPGVIINIGSAAGLYPMFLDPVYSAAKGGVVMFTRSLSPLKRHGVRVNVLCPEFVQTNMAEQMSRKVIDSSGGYLEMEDVVNGTPFL

SEQ ID NO: 234992 - protein, 47 aa, Zea mays
  Clone ID: MRT4577_145896C.1.pep
VSGFVLVALCRGGVDGPLCGQIPPFPVTILRKNPATSLGRESMVGLA

SEQ ID NO: 234993 - protein, 36 aa, Zea mays
  Clone ID: MRT4577_145897C.1.pep
DPWMLNAGYSLTSDTAGVQVRCMDAPGDIIRIWMHG

SEQ ID NO: 234994 - protein, 122 aa, Zea mays
  Clone ID: MRT4577_145898C.1.pep
SENRTSKRMIPNTIQINIMRINTSLRTSTNLQHTINRRRTMLIKINSKRDLIIMTIIISLYRNRREPSMKTNRSTHKKKFQIKIRVHKHHLVMSNLRRQPGTINKHINKHINKHINQPKGPT

SEQ ID NO: 234995 - protein, 89 aa, Zea mays
  Clone ID: MRT4577_145899C.1.pep
NKQMTAALAIYRQITPSNPPENLTPSLVSGGLSTPNRLLCNTTIGFLCVLSCAMTDLGNQMVGHSWPAQLHGFQAKRGLDLGGEIGRVG

SEQ ID NO: 234996 - protein, 51 aa, Zea mays
  Clone ID: MRT4577_14589C.1.pep
AIAGYSGAVSCSMDYVNGGRAYRGGGESLSICSGIWKGVHLYYDSHRSEER

SEQ ID NO: 234997 - protein, 247 aa, Zea mays
  unsure (1)..(247): unsure at all Xaa locations
  Clone ID: MRT4577_1458C.1.pep
TRPVSMREEMYRKAKEYESKIIGFELAIRRPYFHVKPLDNPELENWHNYLDYIEKEEDINKYLDEASFVMGYXLRIERGHNVWFRXLSICLMLTFLTIYLSSRMVPPFLWRGLRNQLMXXVIKLYERCVIACASYSEFWIRYVQCMEDKRSLDLANNALARATXVFVKKQPEIHLFSARFKELNGDIFGARAEYQHLYSDLCPGFLEAIVKHSNMEHRLGDKEXSCSVMEKVIAAEKGKDXSQLLPT

SEQ ID NO: 234998 - protein, 83 aa, Zea mays
  Clone ID: MRT4577_145900C.1.pep
WSCSTTTARAAAGMRRPRLPPPLLLSAAQGEPPPRPYGRHVRSATSRRANSSPSLPSSTIRWTRDASLGLISSRLISNLPRRR

SEQ ID NO: 234999 - protein, 159 aa, Zea mays
  Clone ID: MRT4577_145901C.1.pep
MDASATGAGAKAKKGAAGRKAGGPRKKSVTRSVKAGLQFPVGRIGRYLKNGRYAKRVGTGAPVYLAAVLEYLAAELLELAGNAAKDNKKSRIVPRHLLLAVRNDQELGRLLAGVTIAHGGVLPNINPVLLPKRTAEKEPKEGKSPKKVAKSPKKADKKA

SEQ ID NO: 235000 - protein, 156 aa, Zea mays
  Clone ID: MRT4577_145902C.1.pep
MDASATGAGAKSKKGAAGRKAGGPRKKSVTRSVKAGLQFPVGRIGRYLKNGRYAKRVGTGAPVYLAVVLEYLAAELLELAGNAAKDNKESRIVPRHLLLAVRNDQELGRLLAGVTIAHGGVLPNINPVLLPKKTAEKEPKSPKKAAKSPKKAEKKA

SEQ ID NO: 235001 - protein, 46 aa, Zea mays
  Clone ID: MRT4577_145903C.1.pep
LITLYITYPIFLNTQFIIYYYLTKYLHTIINTSISPLFSNSKLTKT

SEQ ID NO: 235002 - protein, 153 aa, Zea mays
  unsure (1)..(153): unsure at all Xaa locations
  Clone ID: MRT4577_145904C.1.pep
REKPDLLKIQTLHLRLQKKIYHMLDLKWXEHFCEKNTSGTDTGILFYTQGAPLTLMQLPDVYHVFLERSITTRWPNCGSATVEHXLCVLCGKLCXTSIKLCCRTGKCHTHALQCGAGIGLLLLLRRTAILXMRSARLTFRPSLYLDANGEEDI

SEQ ID NO: 235003 - protein, 105 aa, Zea mays
  unsure (1)..(105): unsure at all Xaa locations
  Clone ID: MRT4577_145905C.1.pep
MWLQNQSKRVDRAKTPWLMAGMHSSMYNIITAHHMAGERMRAAFDKRFGKYKADSVLARHVHAYERSYRIPNAHYNITSGNRHAAPDKLGSVYXITVSDGSNQKG

SEQ ID NO: 235004 - protein, 77 aa, Zea mays
  unsure (1)..(77): unsure at all Xaa locations
  Clone ID: MRT4577_145906C.1.pep
ERKIEWRREKIGGCMSSSEADPWTLLYLLLSFRGCTPSSAKSTVPAWPISPRQELHLRTDHGAWTSARGHVSSXKQV

SEQ ID NO: 235005 - protein, 165 aa, Zea mays
  unsure (1)..(165): unsure at all Xaa locations
  Clone ID: MRT4577_145907C.1.pep
RWGFSGGGGSLGPLPLSVLPAGLFSRVVFLSRFGLPGGSWLRVGRPRWLRAGLVLWCCLVGSLRLSCPSLSVVWFGVRSVAWLLASVGFVPCRVSXXPFWLLRLCFXPSVAGFVCGLGLLLVLCCAXAXLWVAGGGAAFMLVPPGLCCALLSCFXNGKNGGGVRX

SEQ ID NO: 235006 - protein, 99 aa, Zea mays
  unsure (1)..(99): unsure at all Xaa locations
  Clone ID: MRT4577_145908C.1.pep
RRLASASSLPAFNCSSHLLWWPSSPNSLSVGGWRPISHAPSALSLLELVLSPIVPLRSVLVEVTPGCCPRRPRLLMDLQKXDANGRARHSPSDSCTHAT

SEQ ID NO: 235007 - protein, 181 aa, Zea mays
  Clone ID: MRT4577_145909C.1.pep
MYPKAADEGAQPLATGIPFSGGGGYYQAGGAMAAAFAVQAQAPVAAWSTGLCNCFDDCHNCCVTCVCPCITFGQTAEIIDRGSTSCGTSGALYALVMLLTGCQCVYSCFYRAKMRAQYGLQVSPCSDCCVHCCCQCCALCQEYRELKKRGFDMSIGWHANMERQGRAAAAVPPHMHPGMTR

SEQ ID NO: 235008 - protein, 50 aa, Zea mays
  Clone ID: MRT4577_14590C.1.pep
GQLINTNARVKSKNLPTYPYYSLTYHTIISILHLIIYFFLLLSNYIHYKY

SEQ ID NO: 235009 - protein, 56 aa, Zea mays
  Clone ID: MRT4577_145910C.1.pep
GKQPKAGGFIKKKCPRGYRTLLWDKRVFPDPSKTLIPPNNKNVLFSNLPSQNFLGG

SEQ ID NO: 235010 - protein, 41 aa, Zea mays
  Clone ID: MRT4577_145911C.1.pep
AKTHAGLRLFAYAMKSERSQSVQPLSPSFSDHFQASCQGAA

SEQ ID NO: 235011 - protein, 186 aa, Zea mays
  unsure (1)..(186): unsure at all Xaa locations
  Clone ID: MRT4577_145912C.1.pep
MIPLLAAAMNHVAAHPDLRSHLRRPNNESLXRDHLPSSSPQSSKXRCNLSFTPRSARVSSQNGDQMTRVPRKIPQRNWIPSDFTLXGATSTDQIERGSNEDGKAXSNCDHFCHNHPERILXDGSNSDIAXNSYHMYXTDVRLLKEMLMDAYRFTISXPRILPNVTXEGGINPEVIKYYRNLITLLL

SEQ ID NO: 235012 - protein, 88 aa, Zea mays
  Clone ID: MRT4577_145913C.1.pep
PQPQTVRIHLYILFCVPPEYCFPKLGFFARRRIVGIAHVEDLESIKDASKRAECERAALNCAKTILKGRHQFETVEQVVEHIQSFDQD

SEQ ID NO: 235013 - protein, 99 aa, Zea mays
  Clone ID: MRT4577_145914C.1.pep
PPGGQRFGISSIRRGSVRVYICARSAGRLQSVSLLLLYQRAIRMLRVAPRRSVDGVVGGGALVVDVHRPVSSEHCSGSQHWSGSAAISHFMRSFAGAWY

SEQ ID NO: 235014 - protein, 64 aa, Zea mays
  Clone ID: MRT4577_145915C.1.pep
HFRLHDSPLSVGFHIHISGRSPHSSNRICCHHLIGTSARHRRLRHPLDHAPRLSISCQIRILRS

SEQ ID NO: 235015 - protein, 36 aa, Zea mays
  Clone ID: MRT4577_145916C.1.pep
PITFPKETGDVHTCTIRWPALRQGAFSTPAVSIRGR

SEQ ID NO: 235016 - protein, 120 aa, Zea mays
  Clone ID: MRT4577_145917C.1.pep
PQRLPVSPEDRGVIQRPKGMGFTRTLVQEVFFACTKGKGVPPIPLWDQGPEFRGPHQKGWGGWGNPRQLQNSEGHFFALGRARHPRWFKVGCGLFFFSKKICSEGFLSHFCFKTNGSPGY

SEQ ID NO: 235017 - protein, 48 aa, Zea mays
  Clone ID: MRT4577_145918C.1.pep
YKEIVACISMYSSDLMFSINKIVEFYMTLSCNIVVPPPCSPCTSNRND

SEQ ID NO: 235018 - protein, 69 aa, Zea mays
  Clone ID: MRT4577_145919C.1.pep
ALGFFFFFFFFLVFFLIRSPVLVYIYIYRYTNHYHSVGPHIIILCYQAEPPIGINPTVVWFTGVHYHKN

SEQ ID NO: 235019 - protein, 98 aa, Zea mays
  Clone ID: MRT4577_14591C.1.pep
FCFVISLHCTHFIVDLSCCFWTVSVLSMHPAWAQSFPVAEQLPIDPCCTCLKLFPLAFSTFAPACGAFVPFFCVVGTPKFVPCGPRAPEVCTPVFILG

SEQ ID NO: 235020 - protein, 570 aa, Zea mays
  Clone ID: MRT4577_145920C.1.pep
MEEGGEHTSLLVKDDASCHDEETQSLLEANLGPQLKSKCSDWRAPALILGLECLESMAFNGIATNLVVYLRSVLHGGIASSAATVSLWYGTSFFVPILGAAIADTCLGNYKTILISLIMYLFGMVLITVATFMPSTSVLCDVSSCLSSNGTQTMIFFAGLYLTAVGCGGVRSALLPFGANQFNNENSLDIKKRRNFFSLFYICVIFGVITSGTIIVWVQENVSWAIGYGVATTCIGLALIGFLGGTPIFQEDEPCGSPVKSIFQVIVASFRNMSLEVPADSCLLYEVGSNHIQRTKLAHSDDFRFLDKAAVISDPSLVYGGCRSSWSICTVTEVEELKILIRLLPIWVTGIFFGAAISQMHTTFIQQGTVMDTKIGSLSIPPASLYSFEVICVTLWVLAVNKVLVPAIRTYFANGVELTQLQRIGIGRFLMIFAMAMAALLETKRLHIVQEGELLSIVWQLPQYFVIAGAECFGIITQLEFFHGQAPDSMKSILTAFALLTTALGNYLSSAIITLIAGVTRVWHSPGWIPDDLNKGHLDYYYWCLTTLSLVNFVVYLYFASKYKLKKVVC

SEQ ID NO: 235021 - protein, 70 aa, Zea mays
  Clone ID: MRT4577_145921C.1.pep
SITRILIKWMCTIRPSVVYHAAYPLLRLFRSRIFRCVPVGIYRILYHLKHGTVFLVLEIANHFILNLHFL

SEQ ID NO: 235022 - protein, 54 aa, Zea mays
  Clone ID: MRT4577_145922C.1.pep
MAAAAPTMLESLPWALLWVLWVKTKQKELLIRISALRGHLRVAPVGVRRLLSAP

SEQ ID NO: 235023 - protein, 84 aa, Zea mays
  Clone ID: MRT4577_145923C.1.pep
MPSPIEGMNGKELDGRNITVNEAQSRGGREGGGGEYGGGPRNGGGYGGGGGGYGGGRGGYGGGGGYGGANRGGGYGNNDGNWRN

SEQ ID NO: 235024 - protein, 304 aa, Zea mays
  unsure (1)..(304): unsure at all Xaa locations
  Clone ID: MRT4577_145924C.1.pep
MASDDAKGKGKVTGEKETINNEPKGDKPIDLGSNNKKKDMKKKKCMKKIVYYDSDASSSSPKDDDDSSSSKKKDGQTNYTRTSFNYSRIPYNANAHLLSIPHGKLPHFDGEDHSWWSHKMRSHLFSLHPSIWDIVENGMHIFDSDDENCNVIYMQEMIHKNAQVTTVLLTSLYREEYNKVSGLDNAKXDLDTLKIVHEGNDMTTITKMXLIEGEFGRFSMKRGEEPTKTYNRIKTLLNQIRNYGSTRWMDHNIVCLMLCSFTVLDPNIVNLIRENPRYTKMTPEEILENFVSGRMMVVTPEILF

SEQ ID NO: 235025 - protein, 166 aa, Zea mays
  Clone ID: MRT4577_145925C.1.pep
LRVFSEVGWLLLPHRFVFRFWFVGEREEMAASDVEYRCFVGGLAWATDDHSLNNAFSTYGEVLESKIILDRETQRSRGFGFVTFSTEDAMRSAIEGMNGKELDSRNITVYEAQSRCGRGSGGGGYGGGRRDGGGYGGGRGGYGGGGGYCGANRGDGYGNHDGNWRN

SEQ ID NO: 235026 - protein, 125 aa, Zea mays
  Clone ID: MRT4577_145927C.1.pep
CKTSVMTMERMQNHNAQKKIMELIIKHFNHLRKRLIRPMVESAVICASLASMLVIVVTKVVKKFQQHPLQYVVKDGEEQIIQCITVFIATPIGPPRGLLGIFMDVFIAVFHYVVEYGDFMVEFSE

SEQ ID NO: 235027 - protein, 111 aa, Zea mays
  Clone ID: MRT4577_145928C.1.pep
GVNNPSRGLAQRGGRGLLWGGKDPLLPGPFLRYFFFGGASIKVFLFPPGVSLLPPKGGSNGNKMFLKKKKMVITRPINTPPNKGPGAPVKNWVHKTFVWLGFFPQESPFVR

SEQ ID NO: 235028 - protein, 92 aa, Zea mays
  unsure (1)..(92): unsure at all Xaa locations
  Clone ID: MRT4577_145929C.1.pep
MPIIPQXIVTHSHQXQALRSINTIPAKLXSTTLVFTYGVDLFYTQLAPSRTYDSLTDEFSYALLLITIAVLVAAIIVTWIWSEKKELGDKWR

SEQ ID NO: 235029 - protein, 56 aa, Zea mays
  Clone ID: MRT4577_14592C.1.pep
GDKHYAWYASHLCDDCSITARQPGLEIWFPRLERPYGLAWTRGTLFASALWSIAHQ

SEQ ID NO: 235030 - protein, 101 aa, Zea mays
  Clone ID: MRT4577_145930C.1.pep
CKGRGGCHCGRRPAQPHAERPPEPPATARGGLHALILASKAKVADRVVRLVHGPPDYDCAPQDSHMQSKAQAPAPQHLTPPKTSTRSSYVLSSCTNLKHLA

SEQ ID NO: 235031 - protein, 72 aa, Zea mays
  unsure (1)..(72): unsure at all Xaa locations
  Clone ID: MRT4577_145931C.1.pep
HQALRPLFSASXXHXPRRRLYFPRLLSISLLFLQIQLQKCSLTSYCHSNPRYNYCRISSLFDCSTPFFHWVT

SEQ ID NO: 235032 - protein, 76 aa, Zea mays
  Clone ID: MRT4577_145932C.1.pep
RVVFRRPRFKCGVVIAVGPCNFQELPSPVVCNLLATTFSGVDNIKVALLPWQRSHLSFAPKAVRPGRVLTILNIPP

SEQ ID NO: 235033 - protein, 128 aa, Zea mays
  Clone ID: MRT4577_145933C.1.pep
HVLALVWHSDHRRRPRRGHAPGSRRWAVRELSDLALRADGRYLRPHAPASGPRTKPPNSYRVNAFAEVTDSSSLLSYATYGPLHKRCLPCIPGAVIRTNESGRNALLRIHTGRHGAHRTTERRELLFR

SEQ ID NO: 235034 - protein, 84 aa, Zea mays
  Clone ID: MRT4577_145934C.1.pep
VLVGFLSFVSCPLCFWVWLWCWAGFSFVCASFSVVCSSLCSCSWGSVPGLWRALRGFPFHCCFGLVSRLLCMARGSARGFRAGP

SEQ ID NO: 235035 - protein, 70 aa, Zea mays
  Clone ID: MRT4577_145935C.1.pep
HASAISSFHSLALMIPPGCVSLHTWQVQLKTHLQTALHICTTLSLTRSKSQHSLYIPAHVISNTTHILTI

SEQ ID NO: 235036 - protein, 97 aa, Zea mays
  Clone ID: MRT4577_145936C.1.pep
PERCLRATTSGCRRVCCTSALSLTRPELPNTRLVATGPHRRSTDGPSGAAGLLALRRSACLSDARARPRARARLLQLPPRLRSTKLVQFDLLASNRN

SEQ ID NO: 235037 - protein, 92 aa, Zea mays
  unsure (1)..(92): unsure at all Xaa locations
  Clone ID: MRT4577_145937C.1.pep
CVIATWYELITCITATRYCGTGNNAGAMLVDRRGXLIVPKTIHTLPPTDNSPEYCPERGDATWMQELNIQRSPTSTRRQTQAAGDRNTIAYI

SEQ ID NO: 235038 - protein, 87 aa, Zea mays
  Clone ID: MRT4577_145938C.1.pep
PPYKVFNVRIFCPGFGFREGPPLKPPLQNSGPRQKKGLGQRPHIGSRKVREGPPGTFRVPDACWPTVVFGLVHKVKNCSRAKEKWGF

SEQ ID NO: 235039 - protein, 98 aa, Zea mays
  Clone ID: MRT4577_145939C.1.pep
FPPTQLFPQGRGLKPRKFPLGPSFAQGPPCSWGGFFPWEPFLVAPNPPPQAFPPPFSGMFFFFVTPRCLFFCSQPPLPGWARKLALIFRANCGPDPPS

SEQ ID NO: 235040 - protein, 110 aa, Zea mays
  unsure (1)..(110): unsure at all Xaa locations
  Clone ID: MRT4577_14593C.1.pep
RVGAQTAGPVIALTRGSAGLGGLPVMLNVDCDHYINTAQGLRAGMXSMLGRHSDAVXLTAARGGIPGRGPNXLHANGNGMSFDGTLRVLKGMEGPIXGGTGCMPRRMTLY

SEQ ID NO: 235041 - protein, 106 aa, Zea mays
  Clone ID: MRT4577_145940C.1.pep
QTRTYHTDERSCTVQQLTNQQHPMNTARSATANNPVIHRYVRSGRGSSSESDQKHKVEERGDRRSSSPSTTTTPCSFRATQRCWPLLPRELVGLGPGHRLLVGRRR

SEQ ID NO: 235042 - protein, 86 aa, Zea mays
  unsure (1)..(86): unsure at all Xaa locations
  Clone ID: MRT4577_145941C.1.pep
ENKEGHQAREERXHQRRGXRPGQXTAERAEKQPPPEHRRPXXKQKTPPQQDXRKEKKKRAXPSRTRGTTTEXGXEGPSGRAREQGG

SEQ ID NO: 235043 - protein, 48 aa, Zea mays
  Clone ID: MRT4577_145942C.1.pep
KHFSLVGPLSKNRFSYRCIAPIQVGNPLGNKPRWPPPPRSERTPVVRP

SEQ ID NO: 235044 - protein, 44 aa, Zea mays
  Clone ID: MRT4577_145943C.1.pep
FFCFSRAKCNLTPSTMASIILLLLETEFNPIRSQTIVFQSGRMS

SEQ ID NO: 235045 - protein, 180 aa, Zea mays
  Clone ID: MRT4577_145944C.1.pep
MGGPSSPRRENDGEGSGGRSPAPATWKERPRSFDEKTRTACWRKAAVLAGRHPERWRQDAVGNVVCRRFWGCHGCLCYEYDHIVPFSKGGESTVENCQILQTRVNRSKSDKAWVAQAEMQGFSCDIMFTDKELDIIEMAVYGDVIRPGKQCRCRTVAEVLGQVKPTNRMAACELPDKGAS

SEQ ID NO: 235046 - protein, 76 aa, Zea mays
  Clone ID: MRT4577_145945C.1.pep
LEVRCRSARPLPCTSSRRQQGCAPSHHGCIADLVPCVPLHETARGVPVPHDSVIALHARSVITQLYQANYLGRWCA

SEQ ID NO: 235047 - protein, 69 aa, Zea mays
  Clone ID: MRT4577_145946C.1.pep
LAGHIVVVFAAGYKQRCSVWSIGQLATTSPTSFLKQQQLLPFYQQFVDSPAALLQLQQLMPFVQLALTY

SEQ ID NO: 235048 - protein, 44 aa, Zea mays
  Clone ID: MRT4577_145947C.1.pep
HPACFCCGEKKKKKQKKKTKKKKKKKKKKKKKKKKKRKKKKKKR

SEQ ID NO: 235049 - protein, 102 aa, Zea mays
  Clone ID: MRT4577_145948C.1.pep
EDERPHARLIKNHSLDQQRLQRTGSSEFFSALDTLHSYGTIITRLKKTNNHGPLSARKHVSCLKPLYARLGYYIDLKPQSTNAVGLQNTLGAKITYNFLPKD

SEQ ID NO: 235050 - protein, 70 aa, Zea mays
  Clone ID: MRT4577_145949C.1.pep
ANHRGIKVFNKVFFVATAKKLSEASSVVPIKSMVVGTTGLSRLKMALMGSVSTYTVNPLACPVRLVKQMV

SEQ ID NO: 235051 - protein, 235 aa, Zea mays
  Clone ID: MRT4577_14594C.1.pep
QVGESMGSEAEPLLQVVECRICQEEDSIKNLESPCACTGSLKYAHRTCVQRWCNEKGDVTCEICHEPYEHGYTAPPRGHPDETTIDISGGWTITGTAFDLRDPRILAVAQNHIMEAEYDDYSATNASTAAFCRSAALVLMALLLLRHALTLTDEDDDDTSAMFSLFLLRAAGFLLPFYIMAWAISILQRRRQRQEAAALAAAEVAFILQSGQGRGVHFTIAPDSPATPQHEPPQP

SEQ ID NO: 235052 - protein, 152 aa, Zea mays
  Clone ID: MRT4577_145950C.1.pep
KKNSATICARTAHMFNLTRHCFSITIETSYERLVTTVHGAAKHVIRISDPKIWNVCTGEKVCHLSSWCEYLHILKCEDTTFMARWGKKGDTGLGEHHSNRSSSAKLTVADEIPPRNHHVSTSPLPRRACRRSNRGRGRTPTTGSLFGDQRQS

SEQ ID NO: 235053 - protein, 77 aa, Zea mays
  unsure (1)..(77): unsure at all Xaa locations
  Clone ID: MRT4577_145951C.1.pep
HAIRFHRLRHKVYPRLLVVAGSHTRLTXLYAXSGKGNAGADDDPWMESLKKAMAGAYKPSIIQDLVQEHVAYLREQA

SEQ ID NO: 235054 - protein, 68 aa, Zea mays
  unsure (1)..(68): unsure at all Xaa locations
  Clone ID: MRT4577_145952C.1.pep
APSAMHRARVKNAWALDEIGDSARSADTMELWALKTLKERAASPLMRMXTPRDEKGGADRDLERGHAS

SEQ ID NO: 235055 - protein, 100 aa, Zea mays
  Clone ID: MRT4577_145953C.1.pep
MKTEIFTNGNVCKDDNRHHSFRQTGLEQPGGLQEFDKPSCSEENGHGRHCLVNIPIAVAEYPMMHQVREGPVSVSTCNDSICLSGSDLRHAFEVTRYVGC

SEQ ID NO: 235056 - protein, 159 aa, Zea mays
  unsure (1)..(159): unsure at all Xaa locations
  Clone ID: MRT4577_145954C.1.pep
MARRRRPLPPPLLVWLAVLFSAVAPAVAKTDKSDVAALNVMFNSMNKPSQLSGWKSSGGDPCDDDDEWKGIECSGSSVTEINLSGLELSGSLGYQLSSLKSVTKFDLSNNNLNGDLPYQLPPNVXELNLYGNSLTGGVPYSISQMGDLETLNLGKNHLS

SEQ ID NO: 235057 - protein, 90 aa, Zea mays
  Clone ID: MRT4577_145955C.1.pep
LGIFIAPEPLQISYPYDRKKSLLEGLGGVNDWEKFGGRVSNNTGSRGKNKEFEHGKKFPIGSGARRATSLFASKPLPPAGKRPLPWQGRM

SEQ ID NO: 235058 - protein, 101 aa, Zea mays
  Clone ID: MRT4577_145956C.1.pep
HWVPRGRPGSRLSRRHPHERLLRRRLRSAAFSDAVSAPPSSPTSSPSPRQECKVEATHEVDMEKENAMTVHMKLVKKELNPKVPNEETCITVLCYIVYLFV

SEQ ID NO: 235059 - protein, 162 aa, Zea mays
  Clone ID: MRT4577_145957C.1.pep
MASITVTKKSQSFVVPSSTATTTPTTDTLELSAIDRVPGLLHMVRSLHVFRGKDATARSDAAAAASSRPADVIRAALSRALVDYRPFAGRFVGSLYTGEASVECTDDGAWFVDAVTDCSLDDVNGLDYPLMISKEELLPAAEEGVDPTSIPMMMQVTEFACD

SEQ ID NO: 235060 - protein, 136 aa, Zea mays
  Clone ID: MRT4577_145958C.1.pep
FFFHKFHVDCHCIFLLHVDFMCCFHFALSHPCLASLHTASKQPCRGEGDDVGEDGGAETASENAAERRRRRRRRSWGWRRERRLGASRGWHPGGGALQENLLASRPEQQIKPLAKLIHPSRSSPFPQIDSQYTINL

SEQ ID NO: 235061 - protein, 209 aa, Zea mays
  unsure (1)..(209): unsure at all Xaa locations
  Clone ID: MRT4577_145959C.1.pep
MADNGDAKGGSGAYAINIENFSKRLKVFYDHWKEHKSDLWGSSDAIAIATPPPSDDLRYLKSSALDIWLLGYEFPETIIVFMHKQIHVLSSQKKGNLIGTLKKAANEAVGVDIVLHVKTKNSDGADLMDDIVHAARNQSKSDKPVVGHIAKEAPEGKLLETWIKKLSGSGLRLVDVTNGFSELXAVKDTTEITCVKEAAYLTSSVLKNF

SEQ ID NO: 235062 - protein, 94 aa, Zea mays
  unsure (1)..(94): unsure at all Xaa locations
  Clone ID: MRT4577_14595C.1.pep
PPDFLVCPENDGFFAWXFPTARPCXHTKISFVWPPFALAVCLFPVFGFHFKIAGLPSXAEALLKIGPMRLVGAAFSALLWGLRVLRVWFPPCVF

SEQ ID NO: 235063 - protein, 610 aa, Zea mays
  Clone ID: MRT4577_145960C.1.pep
PSSVRCAGMRRLLGGALVLCIAAVVESKPPLDSLGIPPQDEAYYIGGVIKCRDGSGRFSRDQLNDDFCDCPDGTDEPGTSACPEAKFYCKNAGHTPVTIFSSRVNDGICDCCDGSDEYDSNVTCKNTCWEAGKVAREKLKKKIATYKNGVVIRKQEVERAKEAFAKDEADLAKLKGEEKMLQGLVDKLKEQKKLIENAEEEERLRKEKEEKRTKEEAEKQAAVEKGALDASRDVDSKEIHDHLQEGENKHDGHATGHDNHVTESRASIEQHGSVRKDGISVEGGTVDELPQESAAPTIEKDSSPDNPEGLSREELGRMVASRWTGESVTEVSKDDKKGHEDQQEIPEPAEEALEDELEIPEPAEENYGGYHSEVEDDRRKYEDEEFYHESEDEYVDDYDEHVESYKSDDDQKDLTEPGHASWLDKVQQTVQNVFQKFNFFKTPVDLSEASHVRKEYDDASSKLSKIQSKISSLAEKLKHDFGNDKEFYSFYDQCFETKEGKYTYKVCAYKKASQAEGHSSTNLGRWDKFEDSYRVMHFSSGDKCWNGPDRSLKVRLRCGLSNELNDVDEPSRCEYVAVLSTPAVCVEEKLKELQNKLDAMSLKQPGHDEL

SEQ ID NO: 235064 - protein, 73 aa, Zea mays
  Clone ID: MRT4577_145961C.1.pep
LRRNPNTGVGDHGRELLIEDIIRCYLNMVVPASASPMASPLHHGADVRRGGADHHRQRHVDHHQPCKGPETPS

SEQ ID NO: 235065 - protein, 62 aa, Zea mays
  Clone ID: MRT4577_145962C.1.pep
KRCSACSNTVGHTGFNYWCGNLYCALHRYSNKPDCRFFSWTSARLAIPQANPVLKANNLTKI

SEQ ID NO: 235066 - protein, 80 aa, Zea mays
  Clone ID: MRT4577_145963C.1.pep
RFVQSDALFKGDKCWNGPDRSLKVRLRCGLSNELNDVDEPSRCEYVAVLSTPAVCVEEKLKELQNKLDAMSLKQPGHDEL

SEQ ID NO: 235067 - protein, 574 aa, Zea mays
  unsure (1)..(574): unsure at all Xaa locations
  Clone ID: MRT4577_145964C.1.pep
PSSVRCAGMRLLLVGALLLCATAAVESKPPLDTLGIPPQDEAYYRGGVIKCRDGSGRFSREQLNDDFCDCPDGTDEPGTSACPEAKFYCKNAGHTPVTIFSSRVNDGICDCCDGSDEYDSNITCKNTCWEAGKAAREKLKKKVATYKSGVVIRNQEVERAKEAYAKDEAELAKLKGEEKILQGLVDKLKEQKRLIEKAEEEERLRKEKEEKRIKEAEKQAADEKGTPDASPDVDSKETHDHVQEDENKVAEEHDVHATDHDNHATDHDNHAAESGASVEQGSVNKDDISVEAGTLDELLHKESAVPTLEKDHSSDNPEGLSREELGRMVASRWTGESVSEVSKDDKKGHEDEQEIPEPAKEALEDELEIPEPAEENYDGYHSEVEDDRHKYEDEEFDHESEDEYVDDHDEHVESYKSDDDQKDLTEPGHASWLDKIQQTVQNVFQKFNFFRTPVDLSGNLYIVVSNQSILHESXVCYNIHISTFLEASRVRKEYDDANSKLSKIQSKISNLAEKLKHDFGKDKEFYSFYDQCFETKEGKYTYKVCAYKKASQAEGHSSTNLGYASRSSFFAEIS

SEQ ID NO: 235068 - protein, 81 aa, Zea mays
  Clone ID: MRT4577_145965C.1.pep
PLWGRVGPPRGPGRISRGDPGGPGRGGLGGYSPPLGPGAPKTRANRCSGYFWPLGRGGKVLIGGGRKFFSKRGPFGGGTGR

SEQ ID NO: 235069 - protein, 63 aa, Zea mays
  unsure (1)..(63): unsure at all Xaa locations
  Clone ID: MRT4577_145966C.1.pep
HWVPRGRPGSAFPQCQPXFSKLVXXHLSPWPVWARSPPFAGRKAPRLPCXCGGFIGGSRWYPM

SEQ ID NO: 235070 - protein, 51 aa, Zea mays
  Clone ID: MRT4577_145967C.1.pep
ALHVTVCWICDSVVLILGLAFIQKLFLTSHSVWLGVPHGSMFNLLKHLLLI

SEQ ID NO: 235071 - protein, 96 aa, Zea mays
  unsure (1)..(96): unsure at all Xaa locations
  Clone ID: MRT4577_145968C.1.pep
LFMDRVARVQNFRSYEIRWLLKFRVAEAGRNLSTQVVVFGQRSLSSTQGWVVPVRRFGRRPRGREARRFLVLQRVVVLRAPIGPPALDGRPPTGXL

SEQ ID NO: 235072 - protein, 61 aa, Zea mays
  Clone ID: MRT4577_145969C.1.pep
QHSFGQGTHQKQRLKGEACSRHPFKRKRTWTPDKRRDVSTVSQGGTRPINEGLSDLDTLYS

SEQ ID NO: 235073 - protein, 184 aa, Zea mays
  unsure (1)..(184): unsure at all Xaa locations
  Clone ID: MRT4577_14596C.1.pep
EKEIVKQVYSSSIYLQLQVKKTKSFFLRVEEVEFMGTMPPNSERQDGISGSPALAEREERPAQPPRRWWANVGGGIAALRFAVTSCGDSLGGAAAGTLPQNGLQREVKAFVGAGVHGQRPAHGQEAAVSSSSSSPHATAAAATVPVRGLMRRHGLLFAGGFCGGRSRTTTNNIYGDVXRAARGS

SEQ ID NO: 235074 - protein, 246 aa, Zea mays
  unsure (1)..(246): unsure at all Xaa locations
  Clone ID: MRT4577_145970C.1.pep
VRLQVPVRNSRVDPRVRYIVQEYMETDLANVLEQGPLLEEHARLFMYQLLRGLKYIHSANVLHRDLKPANLFINTEDLVLKIGDFGLARIMDPHYSHKGHLSEGLVTKWYRSPRLLLSPNNYTKAIDMWAAGCIFAEMLTGKTLFAGAHELEQMQLILDSIPVVHEEDRQELLSVIPVYIRNDMTEPHRPLTQLLPGISREALDFLEQILTFSPMDRLTAXEALSHPYMSIYSFPTDEPISSHPFP

SEQ ID NO: 235075 - protein, 48 aa, Zea mays
  Clone ID: MRT4577_145971C.1.pep
SHIVIYMQIYRLVGISDIGMTMMHFLKEGIFFYVYTCIRVFFIYVCRN

SEQ ID NO: 235076 - protein, 220 aa, Zea mays
  Clone ID: MRT4577_145972C.1.pep
GGRVRPTVPSAKRHTSKYSKGSKHEREQTELLLSANDPAYGVYDFRPDGEGYTQDQQAELRSREFHRADDAFADSVSADFSEATSSEWSLFTSSDESSFTTESTRDSFSVVDYGDNAGLDPISSIFGPSYAPEHHPGPPGSFAACTRLSPSNPQTRYFSESTGFVSDYSSSGIVHRGRDPGRAYTCSAEPLASAAAAHQHQRYALSGRDGLVQTSGFCQM

SEQ ID NO: 235077 - protein, 43 aa, Zea mays
  Clone ID: MRT4577_145973C.1.pep
SSTHPLNLQWRVILHGGGEHDLHQMCSYGSQRLPHFFVRTSNR

SEQ ID NO: 235078 - protein, 86 aa, Zea mays
  unsure (1)..(86): unsure at all Xaa locations
  Clone ID: MRT4577_145974C.1.pep
VATDPKCSPRAHHVAGVAPLAIGVAVFMEXVASLPISAASISSLRSLGPPVIFYKVKILDDLWLFWGESQCAAYICNPSRPFLLRA

SEQ ID NO: 235079 - protein, 118 aa, Zea mays
  Clone ID: MRT4577_145975C.1.pep
NELLTIEIDLFLFVLHCSEHCRGHLCKFCKYPVDRSIASSDAMDTIIEINACTMPHPGRGRWARTPSTRRPARSTRRSPGTGAPRAPRPPRPPRGRPTPKGTGGNEGRGAPATKTGRG

SEQ ID NO: 235080 - protein, 123 aa, Zea mays
  Clone ID: MRT4577_145976C.1.pep
PCRALLSLHLRVRRLTPRLPCIALGRPLALLLIASMDAVPRYELDPVVVASPCSLAVRPCSSLFGKMNGRVLIACWEDRHRCSCRGVDCLILGRTTHTWCSVNGSNWIASSKSRLQVDLDMVR

SEQ ID NO: 235081 - protein, 75 aa, Zea mays
  Clone ID: MRT4577_145977C.1.pep
PRRPRSPPECSSGRSMWISGMPSSISDARMPVAPAARASRMARTTAARCFAIVGIMHYVRSAKELVFLPLPRPAS

SEQ ID NO: 235082 - protein, 274 aa, Zea mays
  Clone ID: MRT4577_145978C.1.pep
MAAGRETDEQLTEYEKQRLSRIRENEARLEALGLRSLAASPLLRSSSPGTAKGKQKKRSVDEDEEYVPSDSGGEEKDESSSESAQDEEVDGEGKSASMSRAKGKKKKLSKSGKSTKNTPTKGSASFAEVVDDDTALQQAIALSLAEYSEKPVTSLGAETSSTVTRASESTPQKNSKASIQDSAKNKKIKKLGKSRIQLTEDDVVQFFFSFDEVGKGYITPWDLERMATINDFIWTDSEISKMIRCFDSDGDGKINLEDFRSIVSQCNMLQEHEK

SEQ ID NO: 235083 - protein, 86 aa, Zea mays
  Clone ID: MRT4577_145979C.1.pep
LDPPNDDIDNNETPLTPLVIVGRKTCCKLQHSNRGTEPCPASSPLNRMLCRDYACCFGSTYSSSQKGLKGETTASSASKGRRSNAI

SEQ ID NO: 235084 - protein, 50 aa, Zea mays
  Clone ID: MRT4577_14597C.1.pep
ICNLNRARCKQIRRACLAYSDRVTVMEMKLEDHPRRFSKQNPHGWLFALD

SEQ ID NO: 235085 - protein, 146 aa, Zea mays
  Clone ID: MRT4577_145980C.1.pep
MVDDDTALQQAIALSMAEYSEKPVTSLGAETSSTVTRASGSTPQKNSKASIQDSAKNKKIKKLGKSRIQLTEDDVVQFFFSFDEVGKGYITPWDLERMATINDFIWTDSEISKMIRCFDSDSDGKINLEDFRSIVSQCNMLQEHEK

SEQ ID NO: 235086 - protein, 261 aa, Zea mays
  Clone ID: MRT4577_145981C.1.pep
MSAAAADWLPSASVTASGRPVLSAGEVERNLLPLVDLEPEENPRLAPLRACLLALTSHRLIFLHEPSRSARGLPLATVVHAYPPHRRHSHNPLRSLFSAPSSSSSSQHHRIRLQISMPPVRSEVIAIVVTCKADVDVFFGRLLEAIRARAWEVTPAAAPSSGTSVAEGAAPTEDIAIRMPVVGVSGILRMEQESWENAGQNLQDAFQDLNALMSKAKEMMQLAEKMRLKLLMNSSTESNSNDEEMGSKQDMQDLLLSVGIV

SEQ ID NO: 235087 - protein, 145 aa, Zea mays
  Clone ID: MRT4577_145982C.1.pep
MEEDPLIQLVHVWSNAACDNAAASSSVCHAHSPAPASAREGEGDKENLRPEPDVEAEIGHIEAEILRLSSRLHHLRTSQQLQPPKCAEVAPAPETKAAAARPTAAGGAAWGPLDIFAAVNPHLLPTDKPQPPRAAPGFEADQEGP

SEQ ID NO: 235088 - protein, 155 aa, Zea mays
  unsure (1)..(155): unsure at all Xaa locations
  Clone ID: MRT4577_145983C.1.pep
PYFMGGGSKSGKPKNYFFQPGFFYPRVLWGLGWPRNPGPKITFLGGFVFKDKIFGFGLANLGLGWAGFHCSKSGNGAPSSGKNPVVYPGPFYVNGSXPGGPFSKGLFPPGLSPRLGLWSFLALGPVNNRRAPRPRGFVFFSPGVSKGKTSPPPLR

SEQ ID NO: 235089 - protein, 81 aa, Zea mays
  unsure (1)..(81): unsure at all Xaa locations
  Clone ID: MRT4577_145984C.1.pep
FLSRGHNHRWWRSNNTLGLTLAPFYNCNKWWHSNKLVWPNQEDFNHNPIMGGAFFRILMRYRSINKVFGLKKKKIXKKKGG

SEQ ID NO: 235090 - protein, 82 aa, Zea mays
  unsure (1)..(82): unsure at all Xaa locations
  Clone ID: MRT4577_145985C.1.pep
GDEGLGISAAMFDIDVGGVQTLHTHPAGRELRLRAQGTAAGGCISSGSNXLYNGTEHAGDIMEVPQELRHYQDGGGTAQCRG

SEQ ID NO: 235091 - protein, 58 aa, Zea mays
  Clone ID: MRT4577_145986C.1.pep
NTNNTIIIQYSQPPINSIITPYLPSITAIDYENPPFQPYRLQHAISESIIQLPPFVIQ

SEQ ID NO: 235092 - protein, 110 aa, Zea mays
  unsure (1)..(110): unsure at all Xaa locations
  Clone ID: MRT4577_145987C.1.pep
LNDCNCIKADEATEIQFNFHSINGENAHYGTPTNPGAPDRVPGGSSSGSAVAVAAKLVDFALGQQXCTGSSXFLNIPAAYWGIFGLRPSHGLVSTENVIPMSQMFDTVGG

SEQ ID NO: 235093 - protein, 95 aa, Zea mays
  Clone ID: MRT4577_145988C.1.pep
APTGGFYRTTLFLASQNLLLLLTLQVAVPAVAVMDPVERETLLRVMESVSVDRDWCEAAGADPCSAPWPGLECRPGTAAVRMHVPRLVFCVAPNP

SEQ ID NO: 235094 - protein, 39 aa, Zea mays
  Clone ID: MRT4577_145989C.1.pep
LVDRGALQTWYVFRPIHQSGDGQERMKYPVPKRQGEAEK

SEQ ID NO: 235095 - protein, 93 aa, Zea mays
  Clone ID: MRT4577_14598C.1.pep
PERTRGSSPPAAITAPPLRAAPVAQLATRSPSTFVALFGRAMATAPLAFAASVVLAGGGAMAQKVLLGAGDGGLVFEHSHFTVSAGDTITFKN

SEQ ID NO: 235096 - protein, 57 aa, Zea mays
  Clone ID: MRT4577_145990C.1.pep
GVQRLSAESFWPGKVGVHNGHSLEADLTVQAFLPRAQCQVTPDVADGSVTEKAPVAS

SEQ ID NO: 235097 - protein, 108 aa, Zea mays
  Clone ID: MRT4577_145991C.1.pep
RFLSFQAMEPHDHEQSHSLEDHHRLSYGDCAGHAGVRSRARGDGLIWPFLDSLVPHSHELMYSRGEFIPRSPSLFPHDLSCLAICVCLGPLGSTVKNSPIATVAQITT

SEQ ID NO: 235098 - protein, 160 aa, Zea mays
  Clone ID: MRT4577_145992C.1.pep
QQQQQVQQFKPVVSQLTMVNPAVYLQLLLFKPLAVGNAPKDLQQQVVQPIGPALTQLTVANPAAYLQQLVPFNQLGVAKFGGDLQQRPQLLKPLAVGNPLVATFLQQQQQLVPNNQFSFINPALQQPIVGGAFFKLQIKWTWQRGPQTHMCFLKKIQKLI

SEQ ID NO: 235099 - protein, 171 aa, Zea mays
  unsure (1)..(171): unsure at all Xaa locations
  Clone ID: MRT4577_145993C.1.pep
AGASGGSLPPSSAAGWCPLLVAPSYRSPCPRRSLLLLCVPISMGAVEGAKLPGTLVVLWSEEELRRAQIFFLPFPAPSARDVRPAMESRGAPVPCVSRHRSRLSPFACVEAPCRGSAHRGACCSLCAQRRAPESACAQAICWPRAKLSVRRHGSVARQVDCVLCVXHXRAL

SEQ ID NO: 235100 - protein, 347 aa, Zea mays
  unsure (1)..(347): unsure at all Xaa locations
  Clone ID: MRT4577_145994C.1.pep
MASGGGGGLGAAGAGGRMPTWRERENNKRRERRRRAIAAKIFAGLRAHGGYKLPKHCDNNEVLKALCNEAGWVVEPDGTTYRQGSKPMERMDPIGCSVSPSPCSSYQPSPRASYNASPTSSSFPSGASSPFLPPNEMPNGIDGNPILPWLKTFSNGTXSKKHPFLPPLLIHGGSISAPVXPPLSSPSARXTPRMKTDWDEAAVQPPWHGASSPTIVNSTPPSPXGRPIAPDPAWLAGIQISSTSPNSPTFSLVSTNPFGVFKESIPVGGGDSSMRMCTPGQSGACSPAIPGMPRHSDVHMMDVVSDEFAFGSSTNGAQQAAGLVRAWEGERIHEDSGSDDLELTLKL

SEQ ID NO: 235101 - protein, 107 aa, Zea mays
  Clone ID: MRT4577_145995C.1.pep
RPRPLPLRPFRVGPIPPALAVPSCPGVRLHSLALSIPPSFPPFSPRCFIRPPPFWLLSVCVRASLVPVCPPPLLHACLASLLVLIAFSFLLFLLFSACPFGVHITNL

SEQ ID NO: 235102 - protein, 93 aa, Zea mays
  Clone ID: MRT4577_145996C.1.pep
KNGRLSMFSMLEFLVQAFSLREGPGEKPLWPQCCLRHEHGLGLRLQFCPRQVREAPPVTLRGPYACQGTLVFGLYPYVNLVSSFKAKLCSLSP

SEQ ID NO: 235103 - protein, 146 aa, Zea mays
  Clone ID: MRT4577_145997C.1.pep
PCALGERRTLHDRPRLCEVYGRGRGEVGHLMFDAGEEERLEAVNIDVRDSGRPHTFDDGESDVCQVLPQTVLGIRHTGDPSFPLQVPAHAGASASAPDVSALSWWTTPCEWPERRRRGRKRWRRRRSCCLSVFQSGDKCDWCGVFG

SEQ ID NO: 235104 - protein, 40 aa, Zea mays
  Clone ID: MRT4577_145998C.1.pep
QGHQAMKNWVMRTFAEISLGEDNHNVMLTVCRRVAKSPAY

SEQ ID NO: 235105 - protein, 63 aa, Zea mays
  Clone ID: MRT4577_145999C.1.pep
AFKNPLMKRNYHQLTTMGSQKIILFWALGLFGNPTKGVNISHRLIGSIGHISQVLSSQYTKWL

SEQ ID NO: 235106 - protein, 548 aa, Zea mays
  Clone ID: MRT4577_14599C.1.pep
ANSGDGTPPSPRELYTIPASSGWFRWDGIHETERRALPEFFGGAGGAGFGTATRNPRIYREYRDFIIAKYREDPARRLTFTEVRRALVGDVTLLRKLFAFLDSSGLINFSASSSSVPASRQQEVGVVVEAPVGLQVTPRPPASYFAEEKRVAAGGEKENEFRLPPLTSYSDVFGEWAPGKAPICGFCGEECNGADVETLQDGFKVCSKCSKSNNDNIKEEANKCPGDKKENMENHASSAWTDTETLLLLEGVLKHGDDWDLIAQHVRTKNKSECIAMLIQLPFGEHMLGTINGKFVSRLHINQTDDGKTNQHIMESSSHSTEMADGMQIDGSEDSADKSVEEYPTKRRRLFFSMDATTSLMEQLAILTTAASPDVAAAAADAAIKAFGNENPQARKAFRLNEQEYKTKAFASNHVQQIDHKVSNKDTAMHGQSGSDKQEKKFIASAYQLRAAVATAVGVAAARAKMLADQEEREMELLMASVIETQLRKMQYKIKHFEELDSLMDQEYTAIQQMKGSLMNEWIKVLEHAFRAGVSLPRDELLTKLLLN

SEQ ID NO: 235107 - protein, 66 aa, Zea mays
  Clone ID: MRT4577_1459C.1.pep
LRTSTRARRTYNHYTYQPRTHPSISHLHKEVSLPCTLPQLLVHPPTCLSNLLSTFLFSQLHTHTCK

SEQ ID NO: 235108 - protein, 84 aa, Zea mays
  Clone ID: MRT4577_145C.1.pep
MDVGTTYSCVGVWQHDRVEIIANDQGNRTTPSYVGFTDTERLIGDAAKNQVAMNPTNTVFDAKRLIGTRFSDSSVQSDMKLWPF

SEQ ID NO: 235109 - protein, 44 aa, Zea mays
  Clone ID: MRT4577_146000C.1.pep
EARKQSLGLGLVVSAFSMWSRPSSNTAPRLIGWWFRPRVRPRVR

SEQ ID NO: 235110 - protein, 69 aa, Zea mays
  Clone ID: MRT4577_146001C.1.pep
NEWRSNWPWFFCLGGSKGQRPQGTPTWEKLWHQHVQVHPRKVWGGPTGCLGNTALEAEASKGLGSSLLD

SEQ ID NO: 235111 - protein, 120 aa, Zea mays
  unsure (1)..(120): unsure at all Xaa locations
  Clone ID: MRT4577_146002C.1.pep
NHEHEDHLARGSSXSDLLLMEKDRKIRQMELEIQELRRQFINAQSXELEKLRKKKDFLQPGWNPYDSPQKARXCLTFSGSLEPSYKYHMMMSSIRHPSTATYMYKHEARKLEQLQQQLEV

SEQ ID NO: 235112 - protein, 199 aa, Zea mays
  unsure (1)..(199): unsure at all Xaa locations
  Clone ID: MRT4577_146003C.1.pep
MAPTTGEGSAXASDLCTTYSCDRVASMRTALEIIANDQGNRTTPSXYDAFTDSXRLIGDGAKNQVXLNPMQHATFESQPXLVGRRISXDAPVQSDINMRTYKDIPGPAXSTMIEMQYKGEDKQISAXEKCSSMALIKMHEMAEAYLXVTIKNAVVTGTGYCNDCQRQATKDAVAIAGLNVRSIIKXPTVAAIAYGTDKK

SEQ ID NO: 235113 - protein, 94 aa, Zea mays
  unsure (1)..(94): unsure at all Xaa locations
  Clone ID: MRT4577_146004C.1.pep
DTCYIDTYXENAHGRSQPFAVPLHLQSGESPHFLFPEGPKQANLRLMLCESKMTSSIYHETLTVINSWMRFYSSFSYMGLLSYFHQYLSFVCTD

SEQ ID NO: 235114 - protein, 70 aa, Zea mays
  Clone ID: MRT4577_146005C.1.pep
TRRARPSPFDPQEFYFSTTTNSSERGGYYIYRKFLTQNESTHCYSDPRSPTVIPINFSRSRISAHTDHSC

SEQ ID NO: 235115 - protein, 99 aa, Zea mays
  Clone ID: MRT4577_146006C.1.pep
RLFGAFVYSPRKAHMSCQQSYHYAVPLLMVISGACIYIRLSRRLQCQHSEVWHSQCHRLLDGENATTILQSSQVDMAIDLHLMHNHTAKWCGECMPSQV

SEQ ID NO: 235116 - protein, 35 aa, Zea mays
  Clone ID: MRT4577_146007C.1.pep
SLGQSSVPAPLRKFVSSSTPRLGFSLATRVALRVV

SEQ ID NO: 235117 - protein, 68 aa, Zea mays
  Clone ID: MRT4577_146008C.1.pep
KSITTAKKKKYNDLTKRKKTTARFFKGLSTTRVRHNGPNCRLLAYYLADFKSSVFSHTTMLVTEWSTL

SEQ ID NO: 235118 - protein, 46 aa, Zea mays
  Clone ID: MRT4577_146009C.1.pep
RTKNGYMFQKGLSYNVLQLAQKAPNEGGLMFWYRYSPKFNPYISSS

SEQ ID NO: 235119 - protein, 128 aa, Zea mays
  unsure (1)..(128): unsure at all Xaa locations
  Clone ID: MRT4577_14600C.1.pep
SAYSQRQQFFPFAQLAALTSASYLRQPPLPSSQLFPACPQXFLPFDQLTALNXPAYFRQHHLLPFSQLVGVSPAPFLTHPPLLPFYQPAAPNAGPLXLQLQQLLPFSPPPXPNPAAFYQQPIIGGALF

SEQ ID NO: 235120 - protein, 70 aa, Zea mays
  Clone ID: MRT4577_146010C.1.pep
PTRPLIYACFFIKKLWHQRWAWLKSRCSQGHGLYNTCLLTENMHGFFLLQWMFYYIDQQTPDCTLSQTKF

SEQ ID NO: 235121 - protein, 100 aa, Zea mays
  Clone ID: MRT4577_146011C.1.pep
MAARCSGGCDGREDSAVEALVQWQKVSDFLIGASYMSIPLELLHFATCADLAPLRWVLLQFGAFIVLCGLVHLVAIFTYARPDSRRLLLAITAAGRLHGV

SEQ ID NO: 235122 - protein, 70 aa, Zea mays
  Clone ID: MRT4577_146012C.1.pep
GKAGKQESFLAKKTIFSAPETYGHRILFRGDQGNPTGGRGAWKKKKPRPLGNQKGIPLRPNIQNRAQATN

SEQ ID NO: 235123 - protein, 111 aa, Zea mays
  Clone ID: MRT4577_146013C.1.pep
MNGGRQDGKLHGGYQRRTQSRNSPLAASPGSAKSLSQGVARDSFYSTFHTTPERRKFSKEEYEAFTREETKKAMNQLLSSPDFNRWALANADRISVAPPRGNYSSSNSNQQ

SEQ ID NO: 235124 - protein, 225 aa, Zea mays
  Clone ID: MRT4577_146014C.1.pep
MSEAAVRVIGLWPSPFVIRVLIALKLKHVEYEFVEEVVGSKSELLLASNPVHKKIPVLLHHGKPLSESLIIVQYIDEVWSSGAPAAILPADPYARAVQRFWAQYVDDKMHPAIRVLKGTYDGDKEQAAGQLSAALQLLEEAFAQLGQGKHYFGGDSVGYLDIALVSHVGWVKAVEKIAGVTLLDEAKVPNLVAWADRLCAHPAVVDAIPDADKFVEFSVTYGSFS

SEQ ID NO: 235125 - protein, 538 aa, Zea mays
  Clone ID: MRT4577_146015C.1.pep
MEWRFLLLPRHLSSVAPSSAAVVAGEISVLLSARNFLASVNCAEQFISSEAVTSSGVLELYRAVAAAAPSGKARYLVDAASALVEASARADLPDGALRLLEFLIDTPAARLPMGSSCGHLMVKLLSLGRRADARHVFEILADAGERRRKKAMNELWAAGRGADAFKVFGEMADVPVVSYRKRYDFMMYGYLKNGDLQSASEIRTRMMQGGIKLSTQQRRMLRMLAEARACPENMLRIKVEICIMAQDIDEAIRLLRHMSHGDKSPPNAHSYNLVIAGLWKAGRGDEAVKLFGEMTDISLAPNHFTYTVMINGHLKRLGNGLTPRKNGNGDLEAALQLKAQMEQAGFKSDEPTYHLLMAELCSAERLGDVTALFDEMMTQETTLHKIVHSSMLQFLCRINEGQLLRIIEESAKNGVSAADNGCITLLLKELCRIDKVSSAEKALQTFAKTGLVPTTEMYNILIDGYSKIRELQAAFLLYRQMKSHDQLVPNEATHEALLLAVRNNTSIVYWEDVEELFEKNGVGIDAMNNAFSDIYGFK

SEQ ID NO: 235126 - protein, 180 aa, Zea mays
  unsure (1)..(180): unsure at all Xaa locations
  Clone ID: MRT4577_146016C.1.pep
MSEAAVRVIGLWPSPFVIRVLIALKLKGVEFEFVEEVVGRKSELLLTSNPVHKKIPVLLHHGKPISESLIIVQYIDEVWSSGAPAFLPVDAHARAVQRFWAQYVDDKVEQELASXRPRPLPLTHTHAXLPWAIRILKGTDDDGGKEQAAGQLSAALQLLEEAFAQLSQGKRYFGGDSVGY

SEQ ID NO: 235127 - protein, 40 aa, Zea mays
  unsure (1)..(40): unsure at all Xaa locations
  Clone ID: MRT4577_146017C.1.pep
VIEKHISSPRQXSIXYLVSRHQNNNRHLFLILYTYKFKFS

SEQ ID NO: 235128 - protein, 82 aa, Zea mays
  Clone ID: MRT4577_146018C.1.pep
DPHVRQYAIAWSYGLTSLISSVRDGWTWSRRLSSTEYNDQIYPKVNALLARHTTSLMTVGPVASALLHTTSKMGYIGPSFRC

SEQ ID NO: 235129 - protein, 86 aa, Zea mays
  Clone ID: MRT4577_146019C.1.pep
RLIKSFKGRSGGVFPEIKPTNQREMFLKRFKLGGSGVFQSQKICPPQSGELLKNPPQGGLGPKKKFFIFLKFFIYFFYFFFFFFFF

SEQ ID NO: 235130 - protein, 70 aa, Zea mays
  Clone ID: MRT4577_14601C.1.pep
SGSVSNHIFVSLPCFVCLIVCSTLFKEMIMSIILWSSTCNHLASGVVKVVFGSRVRWAEAVSLLIYCCLD

SEQ ID NO: 235131 - protein, 66 aa, Zea mays
  unsure (1)..(66): unsure at all Xaa locations
  Clone ID: MRT4577_146020C.1.pep
SLVLSTVTFVKGMVGVIGGRSGMNFETSIFKIENAFQLVLVTTLLVGVFIICSLIWCFKXKRLMPL

SEQ ID NO: 235132 - protein, 188 aa, Zea mays
  Clone ID: MRT4577_146021C.1.pep
MRFITGGGGGGVGGGVGGGGSSAARSYEPMATADTTSLHYWLHWRVGLCGLWVLACMAVAGYLIWRHEGPSADRRPGGAGAGLSSPGAAADGGKERCHGVLYDDEAWRPCLRDIHPAWLLAYRLISFFVLLSLLVVIVISDGGSIFYYYTQWTFILVTIYFGLGTALSIYGCSRFAEENVAAAAAAAD

SEQ ID NO: 235133 - protein, 86 aa, Zea mays
  Clone ID: MRT4577_146022C.1.pep
NRGKRPPPGKGGPPKTGVRPPPLGFLNGQTKVGKSPPTRGGPGAPLKILVPGGPRTPFWGVGPRGKNFKGPYLGGEKPDRVKKGVI

SEQ ID NO: 235134 - protein, 140 aa, Zea mays
  unsure (1)..(140): unsure at all Xaa locations
  Clone ID: MRT4577_146024C.1.pep
MVKPELLEERIFNSITWAPRIWGPWDNLFDCRDRYAEYDWGFSYGYWSGSKQIKEDELSETAIYSNYLWYIYHKKGEVQETDSDFLQSGTMQYQTRDISFKEEGFFRISQLIWDXFGSILFPIQRXGLCLCVFTSRILCR

SEQ ID NO: 235135 - protein, 59 aa, Zea mays
  Clone ID: MRT4577_146025C.1.pep
SIHRLVRARCNLIAAGRQVLAVYVVNLHRRGGAQIGHIRRLRARIFRCRHVAAGQLRPG

SEQ ID NO: 235136 - protein, 33 aa, Zea mays
  Clone ID: MRT4577_146026C.1.pep
GSISVLNATWCSQNRYGYPEPVSGGFWFLCELM

SEQ ID NO: 235137 - protein, 50 aa, Zea mays
  Clone ID: MRT4577_146027C.1.pep
SFSNSSIIHLVSLSTTDHFHSFLLHHKPCFPRPKTAQLASSDKQAQVQQL

SEQ ID NO: 235138 - protein, 59 aa, Zea mays
  Clone ID: MRT4577_146028C.1.pep
KIQVCKPIICTVRPLHKGSCLLPIQLPPPWTQDRAWVIQPTVNVLHFHNKSPLASVQRE

SEQ ID NO: 235139 - protein, 86 aa, Zea mays
  unsure (1)..(86): unsure at all Xaa locations
  Clone ID: MRT4577_146029C.1.pep
SQSVPGPCSPSTSPXRSPPPRGPAAXGLAGPGPACGGGGLPRPPPPXPSPFGLARSGGGXGPPAGPPSRFXRPPPPPAPGGGPPPP

SEQ ID NO: 235140 - protein, 40 aa, Zea mays
  Clone ID: MRT4577_14602C.1.pep
RAGRPQVAFIFFICRSHRTIQLSVHMSFFESLVYFSERVV

SEQ ID NO: 235141 - protein, 90 aa, Zea mays
  unsure (1)..(90): unsure at all Xaa locations
  Clone ID: MRT4577_146030C.1.pep
SVAGPGTNDYVHVRIQHLIGRKSLTTVQGLKKEFSYNMILMDLKKVFCCYGSSISXDHELGQVILLHXDQRMYGVSFLVHCWYFYCIRTL

SEQ ID NO: 235142 - protein, 111 aa, Zea mays
  Clone ID: MRT4577_146031C.1.pep
ARAQLGQAQQSRGPSLSTPIRRTTTMDTSLCTHRRTRLCSHTAAGVGTTATADMRAVTWCALSVCRQGSWYSTRRRWSTSNRRGTGCGSRRIREVGCLLASRGIDDDRRLH

SEQ ID NO: 235143 - protein, 128 aa, Zea mays
  Clone ID: MRT4577_146032C.1.pep
NSARGRKAPLCPTIFMTPSHTHWHARPFGCPCPLGFNGLGGVGGDEGVGAAQSQGRGPREGAPRGAVLGGGPSRAGAELGLVLVLSYCSRQRRLPRRRRATAILHATTYAIDNSPSVSAPLSRSPPTR

SEQ ID NO: 235144 - protein, 95 aa, Zea mays
  Clone ID: MRT4577_146033C.1.pep
HQIGRPQPCPGVEDLRGAVLARAAASPPSHSGEAGCVPSSSPAPPLTPGIAAVPAHLSLLESFVLRWGCDAARLPAFFPYGIIPPRKLRSLSPPP

SEQ ID NO: 235145 - protein, 85 aa, Zea mays
  Clone ID: MRT4577_146034C.1.pep
ALCLAKPVACDRIQPALELRRKNKGIFWGTVIASVKMVFFNEGCKTCSFTGWGSKRNGNHEMSPNFFPLVVLFALASNWLKNKLL

SEQ ID NO: 235146 - protein, 340 aa, Zea mays
  Clone ID: MRT4577_146035C.1.pep
MRTLLPVAAGRGTVACAATPVPRRSLLLSTAAAGAALQPEQVAGTRPLRLTRSVASAVAKPRTSADEAISWAKKDNRRLLHVVYRVGDLDKTIKFYTECLGMKLLRKRDIPEEKYSNAFLGYGPEESHFVVELTYNYGVDKYDIGEGFGHFGIAVEDVAKTVELIRAKAGKVIREAGPVKGGETVIAFVEDPDGYKFEIIERPGTPEPLCQVMLRVGDLDRAISFYEKACGMELLRKRDSPEYKYTVAMMGFGPEDKDAVLELTYNYGVTEYAKGNAYAQIAIGTDDVYRTAEAAKLSGGQVVREPGPLPGINTKITAILDPDGWKLVFVDNMDFAKELE

SEQ ID NO: 235147 - protein, 66 aa, Zea mays
  Clone ID: MRT4577_146036C.1.pep
RVGTLALMQADFRFTTVPTRERDGDDQEDPHRRAPRRRRLGHRIAGLHRGLRRRIPMRLRVVCVRL

SEQ ID NO: 235148 - protein, 34 aa, Zea mays
  Clone ID: MRT4577_146037C.1.pep
PFKVKDGEVKNLFQVKVWENPWENFKELREFNPF

SEQ ID NO: 235149 - protein, 54 aa, Zea mays
  Clone ID: MRT4577_146038C.1.pep
PTKEPRVAFFKVQPPRQGHKASMASLELRSSLLKNPKPGLSNGPSITGKEDPFY

SEQ ID NO: 235150 - protein, 96 aa, Zea mays
  Clone ID: MRT4577_146039C.1.pep
ISARGTREPSLFNFPVPRAIINHTPSLIPALQTYKGRPSWERTKGGSFLTTSEFWTTRRRGASSPVLCPSCLRATGSAPAIANLLRGASESCYKQW

SEQ ID NO: 235151 - protein, 134 aa, Zea mays
  Clone ID: MRT4577_14603C.1.pep
WFQQGKVVVIRGEGPKGGPGMPEMLTPTSAIMGAGLGKECALLTDGRFSGGSHGFVVGHICPEAQEGGPIGLVHSGDVITIDVSKRVIDVDLTEQQLEERRRKWTPPPYKSTCGALWKYIKLVAPASRGCVTDE

SEQ ID NO: 235152 - protein, 56 aa, Zea mays
  Clone ID: MRT4577_146040C.1.pep
GKNLPKLFKGGVKGGRGIMGVIPPKLYLKTSSSFKCKTSFAKFYEQCRGHPPPPAF

SEQ ID NO: 235153 - protein, 57 aa, Zea mays
  Clone ID: MRT4577_146041C.1.pep
GTKLNYEDTLTHSNALANMHCEGMDQTIRFTISLVKKHKRHGVSYVRATSISTIIYG

SEQ ID NO: 235154 - protein, 49 aa, Zea mays
  Clone ID: MRT4577_146042C.1.pep
LSGCYTGNLFFPKNFSGCSVKCRRFFVLSPATASSIQSGSMLGLLKNIH

SEQ ID NO: 235155 - protein, 130 aa, Zea mays
  unsure (1)..(130): unsure at all Xaa locations
  Clone ID: MRT4577_146043C.1.pep
RHPLLRAYFGRRRYRCYTPGSPHPPPPPPPFLCRRSPPXPPRPPSPXTPPRGAAPGPPRRRRRGAPLPPRPFPPFPPRARPAAPHPRPRPXPPTPARSWHPSSPHXPPAPPLFPHLVEVYKEFSFSAASF

SEQ ID NO: 235156 - protein, 117 aa, Zea mays
  Clone ID: MRT4577_146044C.1.pep
NTCCVIFFFFFFYFLFFFFGANLLRLYFVLEQNDTPMGGKTKQVQKHPCLRINRHQKPLGPEVNGLSTPERIIYQGPERGPLFGTNKCSPRHDKIKQDLDLFAPDLANRDLPRQVLG

SEQ ID NO: 235157 - protein, 61 aa, Zea mays
  Clone ID: MRT4577_146045C.1.pep
TRPDTHRLTSLPTHLMGRDKQCYVTLGARTTALQAPPAASSSRRKKAFRELGENVIQSLQS

SEQ ID NO: 235158 - protein, 75 aa, Zea mays
  Clone ID: MRT4577_146046C.1.pep
DVGKLGWGVIKCGGFVPVEIIPPPPPKGVGFCASKVWDLLKKKKKKKKKKKKKKKKKKKKKKKPKKKKLKKKTPH

SEQ ID NO: 235159 - protein, 116 aa, Zea mays
  unsure (1)..(116): unsure at all Xaa locations
  Clone ID: MRT4577_146047C.1.pep
RTSPSEXPRGDETTTATKQXARLALLALFXSATNASIFHNAHLLLEPYTTXPPTRYFNGLGGVAAQAYKLQQALRRATTTTNNQRTTILAHLTIQTMDTTETTGSTRAEPTRCGEP

SEQ ID NO: 235160 - protein, 433 aa, Zea mays
  Clone ID: MRT4577_146048C.1.pep
MGSLGGSAGAGDGGKVGLPALDVTLAFPQATPASLFPPAVSDYYQFDDLLTDEEKALRKKVRGIMEKEIAPIMTEYWEKAEFPFHAIPSLASLGLAGGTIKGYGCPGLSLTASAISIAEVARVDASCSTFILVHSSLAMSTIALCGSEAQKQKYLPSLTQFKTIGCWALTEPDYGSDASSLRTAATKVPGGWHLDGQKRWIGNSTFADVLIILARNADTNQLNGFIVKKGAPGLKATKIENKIGLRMVQNGDIILNKVFVPEEDRLTGINSFQDINKVLAMSRIMVAWQPIGISMGVYDICHRYLKERKQFGAPLAAFQLNQEKLVRMLGNIQAMLLVGWRLCKLYESGKMTPGRSSLGKAWTSKKAREVVSLGRELLGGNGILVDFLVAKAFCDVEPIFSYEGTYDINSLVAGREITGIASFKPAVSAKSRL

SEQ ID NO: 235161 - protein, 69 aa, Zea mays
  Clone ID: MRT4577_146049C.1.pep
CSRNSAFMFSAHSVHWDVSHPTDIQTLFVRQGHHSDLRLCGRGLHTGLKLRAFRQGYRLRGGCCKSIAS

SEQ ID NO: 235162 - protein, 592 aa, Zea mays
  unsure (1)..(592): unsure at all Xaa locations
  Clone ID: MRT4577_14604C.1.pep
MQSMAPTSPSLPVAGPVPRRRLQRVRAAAVSDEPKLNKYSARITEPKSQGASQAVLYGVGLTDADLRKPQVGVSSVWYEGNTCNMHLLRLAEAVRDGVREAGMVGFRFNTVGVSDAISMGTRGMCYSLQSRDLIADSIETVMGAQHYDANISIPGCDKNMPGTIMAMGRLNRPSIMIYGGTIKPGHFQGNSYDIVSAFQCYGEYVSGSITDEQRKNVLRNSCPGAGACGGMYTANTMASAIETLGMSLPYSSSTPAEDPLKLEECRLAGKYLLELLKMDLKPKDIITEKSLRNAMVIVMALGGSTNAVLHLIAIARSVGLHLTLDDFQKVSDQVPFLADLKPSGKYVMEDLHKIGGTPAVIHYLLEQGLLDGDCMTVTAKTLAENAKIFPPLSEGQQIIRPLDNPIKPTGHIQILYGNLAPEGSVAKITGKEGLYFSGPXALVFEGEESMITAFSENPANFKGKVVVIRGEGPKGGPGMPEMLTPTSAIMGAGLGKECALLTDGRFSGGSHGFVVGHICPEAQEGGPIGLVQSGDIITIDVSKRVIDVDLTEQQLEERRRKWTPPPYKSTSGALWKYIKLVAPASRGCVTDE

SEQ ID NO: 235163 - protein, 132 aa, Zea mays
  Clone ID: MRT4577_146050C.1.pep
LEKRETPGPISPQTGPPPIQKTNGGPLAQNGGRGVHRGGSPQGFLWQGGGAPPFGIPGPPPDPHFRGPPPPWPPMGWVPPPYPRGGTAFLGNPLSAILALYNQLQAQVFSLVHPGLFSCPKTLKSTQKSRPF

SEQ ID NO: 235164 - protein, 72 aa, Zea mays
  unsure (1)..(72): unsure at all Xaa locations
  Clone ID: MRT4577_146051C.1.pep
LPLFQPSFSTPLKKPKGXALILNRPAXTSSLKITTLQIKTTHPPQIQPLPLYFLLTPPPPKFFRPLPNISSF

SEQ ID NO: 235165 - protein, 81 aa, Zea mays
  Clone ID: MRT4577_146052C.1.pep
EELEKFMARCNDAAAQKATKEAAEKAKIQADNIGHKLLSKMGWREGLSKYLIPLSLVRLFPSHMDWRRLEKFKKDFDLLWI

SEQ ID NO: 235166 - protein, 143 aa, Zea mays
  unsure (1)..(143): unsure at all Xaa locations
  Clone ID: MRT4577_146053C.1.pep
FGSRVIGTYFFIWCLSLENWSIFSICYDHRRQVFSTQMGLSNQDIVALFGGHTLXWNQGRCHKNRFGFEGAXTSNPLIFDNXFKELLSGEKEGLLQLPRDKALLSYPYFCPLIDKYVAVYISLILAICSGTGYVNLGGCNKYL

SEQ ID NO: 235167 - protein, 348 aa, Zea mays
  Clone ID: MRT4577_146054C.1.pep
LRDLRLGLPDESVEPLVPKKKAGVMSVQVTKFKCGGAVVGCTFDHRVCDAYSFNMFLVAWAAAASGSSAPPAPCFHRSFLAPREPAAAPLRTAGSLADRLFVPVSRAPALPDTATANRIYRVSAADVAALQASAGAGRTKLEAFTAHLWGLHAKAAAASRRQQPRSCCMGVVVDGRSRLRRDGAMGAYFGNVLTIPYGVMGTGALGEMALADVAGDVHRWVAEAATGEHFRELVDWVEAQRPEPTVARAYLGRGHGGEDAMACVVSSGMRLPLGEVDFGWGRPAFASYQFPWPGGAGYVMPMPSARGDGDWVVYVHAALEVVEVMEAEPTVFRALESSYVFDRSGELN

SEQ ID NO: 235168 - protein, 141 aa, Zea mays
  unsure (1)..(141): unsure at all Xaa locations
  Clone ID: MRT4577_146055C.1.pep
MASRAIIRRRNDILRHTHVPILSPSFTSTIGQGQFDCEVDHQRSVCYFSKESLADSNHAMAHCTLNKRKLCHLSSGFAWHPACEVSLPTYGSRAQNFVFPLGVRCFLQSVRTTSNTTAQGQVHIMDKKSEDEKQKQXKKEA

SEQ ID NO: 235169 - protein, 77 aa, Zea mays
  Clone ID: MRT4577_146056C.1.pep
NRIDPNSVDTSICVPGAIIRGTPNIPKRVWYPPSAQAAEIDGRDAGQGLVVPKGPISPHLSFASGGNGSSILVSSFC

SEQ ID NO: 235170 - protein, 74 aa, Zea mays
  Clone ID: MRT4577_146057C.1.pep
SSAFAPRPQLLSVRETNQPIAITYMTVSCRLPRSALSYRCRVLRLRLGDGGFRAAVCAVHPGRGAGWRSPRLSG

SEQ ID NO: 235171 - protein, 123 aa, Zea mays
  unsure (1)..(123): unsure at all Xaa locations
  Clone ID: MRT4577_146058C.1.pep
SIVDKKITRTIFIDWYRNLRVVFKXGKKKYILETPYPNESKENKSXMAEVLMSXHTNDSLDVSCLMLTTMSSELHKQYEYANAHVVXHGMFMNQARVERYEISMSLFSCKAKGPLAELVRRSE

SEQ ID NO: 235172 - protein, 108 aa, Zea mays
  Clone ID: MRT4577_146059C.1.pep
PAGLVVASLGAIVRGGSSSTPHRLLLHPRRGGASLQALVGEAANNLQEYFRTMYKKVTEADIEEFEAKYRGSDSEKTDLKELYTKYKGNMNMNNYLLYHIVKSETVLL

SEQ ID NO: 235173 - protein, 77 aa, Zea mays
  Clone ID: MRT4577_14605C.1.pep
NMYIGAPIPSIERRFTILCPFLYNVESEKTVVIPNFNRFATYPFFHMWYYRKEPHTYRFSKDLHTLYGKCTPSVAAF

SEQ ID NO: 235174 - protein, 151 aa, Zea mays
  Clone ID: MRT4577_146060C.1.pep
MKAAEDATRCPQIPRRCHHCAGPLSKDMETSSWTVPPLVRDSFSMIGSALGGIAGAFYGFNHVMPVVRRHIKGPMWMHFFVGAPPVIVFSSACAGLAGGTIPATAQLVSSSCHAVSSHSFARSSRVPTHAPSFAPAASHDDMRKTRSSSPL

SEQ ID NO: 235175 - protein, 49 aa, Zea mays
  Clone ID: MRT4577_146061C.1.pep
FYPDRRPDRFVMGCPKSVCSCVCLQPWLNLSTVSPAMIFASRHRGSPPP

SEQ ID NO: 235176 - protein, 99 aa, Zea mays
  Clone ID: MRT4577_146062C.1.pep
MEAVVECAKCECCGLVEDCTRDYILGVRAAFGGRWLCGLCSEAVRDEAARGTTARGPAAAAAGLEDALRDHMAFCGKCRRSPAFRVADGMRQMLRRCSK

SEQ ID NO: 235177 - protein, 260 aa, Zea mays
  Clone ID: MRT4577_146063C.1.pep
MAAAPPPDPTVLIEDLVEEFLLRIPPDDPASLARAALVSRHWHRVITGPVFRRRFREFHRSPPLQGYISNIHNSIHFVPISSFRPRHADLDDVIAIHSSPGRVLLCRRPGKGLDVFPGKGLDVFLSVWDPITDELRDLPALPLPVVPGPCTCNWDAAVICAVGEGCNHIHCGFKVVCVGTSQRRDFSCVYSPEAGSCWSDLIFAASGEHTNSFDMGTCVHAGSSLYFLSRFNHEIVKYDLLTDRMSTICFRVDPDAQING

SEQ ID NO: 235178 - protein, 320 aa, Zea mays
  Clone ID: MRT4577_146064C.1.pep
MEGDEKSAGGAPAYWGLGARPCDACGAEAARLYCRADAAFLCAGCDARAHGAGSRHARVWLCEVCEHAPAAVTCRADAAALCASCDADIHSANPLARRHERLHVAPFFGALADAPKPFASAAPPKATDDDGSNEDEAASWLLPEPDHGQKEGATTEVFFADSDPYLDLDFARSMDDIKTIGVQQSGSPELDLAGTKLFYSDHSVNHSVSSSEAAVVPDAASGMAPMVAVVSRGLEREARLMRYREKRKSRRFEKTIRYASRKAYAETRPRIKGRFAKRTPGAGEDTLEEHEEMYSSAAAAVAALMAPGGADADYGVVPTY

SEQ ID NO: 235179 - protein, 53 aa, Zea mays
  Clone ID: MRT4577_146065C.1.pep
STFSHRTSCEPVRCNRKIDIERKGSSNMYNIRIIRYIILILNNILTHYVNIIV

SEQ ID NO: 235180 - protein, 90 aa, Zea mays
  Clone ID: MRT4577_146066C.1.pep
PQKIYIPPKEGPSHLKGRQTQPPGGGNFSPLGGQIKFGPPQKGVSFRGDRIWGKAFNPPGRGATTIFVLIWRCEQKCFCFFGAEVLKIYF

SEQ ID NO: 235181 - protein, 196 aa, Zea mays
  Clone ID: MRT4577_146067C.1.pep
SVLMTFMVRHLAGDPATLAAMVQEHDEIAKNKAHGEALTWEDLHRMRFTWRVALETLRMIPPIFGSFRRALEDIEFDGYCIPKGWQVFWASSVTHMDPSIFTDPDKFEPSRFESQAPPYSFVAFGGGQRLCAGIEFARVETLVTMHHLVRRFRWRLCCGDKDNTFVRDPMPSPLNGLPVELERRDMAPSKSACSVP

SEQ ID NO: 235182 - protein, 78 aa, Zea mays
  Clone ID: MRT4577_146068C.1.pep
SIGEFADYENVCWRLTVYVREIQCLVAPITDTITSIPFDYSFSPCTMQKRPRRNNASFSDDMREGWIATSGRRRPWPA

SEQ ID NO: 235183 - protein, 55 aa, Zea mays
  unsure (1)..(55): unsure at all Xaa locations
  Clone ID: MRT4577_146069C.1.pep
GIPGSTHAXRNTYEHAYKILTEEAKKNHRGGNASRLSNQGCRFKGSKLSQPYLRR

SEQ ID NO: 235184 - protein, 222 aa, Zea mays
  unsure (1)..(222): unsure at all Xaa locations
  Clone ID: MRT4577_14606C.1.pep
MGRLKARAREASESNQKNEHRSICLHSFSDLSHVSAATFMYLLKDCYFYGTHKATAKFRILQQQVKRALNNAPQPGPFTYIVQCMYIIPLLGQSHAEGFSHMLISSLRHLKSVESVQKDFIDAKCLAARLVLDILASVVPHEERILVKLLETFDIELKDMAHAFCGSELGDEDLAAAREHLKQHVQYFMKSESYVSAVALMTRFSIQCCDESFLIXLIGSKQ

SEQ ID NO: 235185 - protein, 87 aa, Zea mays
  Clone ID: MRT4577_146070C.1.pep
LLLTYLNFDSLKRIALFYNLFNITFWGYCSVLTRGRVIMEHQKFYYYKKLSQCTQGAVYEKTPVRISDNDGVMPWGSCKLQALMPLS

SEQ ID NO: 235186 - protein, 39 aa, Zea mays
  Clone ID: MRT4577_146071C.1.pep
GQQGSIVGQSKHQRKRSKLVTSHYTNGYLLPTQYMDNSG

SEQ ID NO: 235187 - protein, 121 aa, Zea mays
  Clone ID: MRT4577_146072C.1.pep
ERYSRRAREGPLGEGQLPNCTGRHTTMTGPWQRMSHRSGMPPRAEAYYLPMPAYAACQHQPSMMLPWDIASIMGRNASGWFRLLAQADLNEELITPNVEGKLKEPHNLYMLLLTDEDRILL

SEQ ID NO: 235188 - protein, 58 aa, Zea mays
  Clone ID: MRT4577_146073C.1.pep
NPMRHACLSSSARMRMLHLVRYARTQSIYMLLGMRIAFAPPQMSSSAAKPRMRPPTSP

SEQ ID NO: 235189 - protein, 93 aa, Zea mays
  Clone ID: MRT4577_146074C.1.pep
YSGLPVVDDDGRCVGVISNKDKAKAPNGMESTVAEVMTSPAITLTLYKTVLEAAALMLKEKVHRIPVVNEQQHVIGIVTRSDVFQALEATNKA

SEQ ID NO: 235190 - protein, 278 aa, Zea mays
  Clone ID: MRT4577_146075C.1.pep
LGTSRPAGYAILSDFSSPLAPQDEQSVRETLESLAASAEIEGDAADRQASASVDDERNANVSELSSALEGSSLSDPRGENDDIAPGASRSRPAGQRFWEESAASSTSEEGGGGTASRDRPSPKPLAIDPFDFDDTIDGFDDPLAFLASVFPDIDVTTLESKISTAREQSSRSEPFATQDLESLIEDLLSQDLITSLIDDDSTAAQLANPPPDFEAEAHMVLSKGQKRRLKQAQKSKNSFSLTASSGSSSPAPRNVDPLVAAARGVSTLLSLRLNRPRT

SEQ ID NO: 235191 - protein, 187 aa, Zea mays
  unsure (1)..(187): unsure at all Xaa locations
  Clone ID: MRT4577_146076C.1.pep
MKAAAVHSVPPPSAVTLVSVVARRALVPAALRGNARRGAALVASAAPDGQMRRSPGPAVAKLTDVMSRPVQVATPGQRLSEVXRRLLRRAAXSGLLPVVDDDGRCVGVISNKDKAKAPNGMESTVAEVMTSPAITLTLYKTVLEAAALMLKEKVHRIPVVNEQQHVIGIVTRSDVFQALEATSKAWE

SEQ ID NO: 235192 - protein, 110 aa, Zea mays
  Clone ID: MRT4577_146077C.1.pep
SVMPVPGSGPAHLTERPCFLTSAGILCSRLLVSPNFASWEIKPGCLGFRAPGPRASSCLLKPSEEGLGVSIMVLVLFLMAFVVVSSFHLAGLWPVDPVVGFRVSFLGGWS

SEQ ID NO: 235193 - protein, 95 aa, Zea mays
  Clone ID: MRT4577_146078C.1.pep
GWHNTEGNSVQWLCIACVDRKGMMAEVTSALTACGITIWSCVAEVNKRRGMGVMLFHFEGSYENVVSACSSVDMILGVLGWSVGCSWCPLGVLEC

SEQ ID NO: 235194 - protein, 83 aa, Zea mays
  Clone ID: MRT4577_146079C.1.pep
PPLIGGGPPVWPPRVSPLSFRLLICVEFVGKNHFSQEKTFPFFTRRFFSPPYKEKWEPSRSRVGIKFRGTKIKKRGPPPGMGF

SEQ ID NO: 235195 - protein, 100 aa, Zea mays
  unsure (1)..(100): unsure at all Xaa locations
  Clone ID: MRT4577_14607C.1.pep
EEVGQALETKAHRAPVPPDHRRPREGGPAAPLRGGRRAQTGRGPSQGNPQTRRSCPPGVTGRQSGAGCALRPQPVPQAPLFHAWRLPFPXAPPPPGQMVP

SEQ ID NO: 235196 - protein, 82 aa, Zea mays
  unsure (1)..(82): unsure at all Xaa locations
  Clone ID: MRT4577_146080C.1.pep
RYVTIWLKKKKKKKKKKKKKKKKKKKKKKKKKKKKGGGVLRKKRKESSMKXKLNTFNVKRKKILHEVKKIKLGGKKNRIAVI

SEQ ID NO: 235197 - protein, 99 aa, Zea mays
  unsure (1)..(99): unsure at all Xaa locations
  Clone ID: MRT4577_146081C.1.pep
PPFRAFWAANSAGDSLKRILVLYTKPGGCLFDGLKEKVHPGSMLFGTPXSLGFFEVQERGIPPNPEWERLFQDEIPVLAKVLPHGAQEGLPQLFPRLNV

SEQ ID NO: 235198 - protein, 53 aa, Zea mays
  Clone ID: MRT4577_146082C.1.pep
CWALNPPKAIVRRPRFSWSCWALYPPKAQKKSSRKEIDAEEEKLNVCVNWMYV

SEQ ID NO: 235199 - protein, 84 aa, Zea mays
  Clone ID: MRT4577_146084C.1.pep
DVLLRILEGNHRHRAADGPGVMSRFMGTWACSRPLLRSLLAPSRSVMSKFTLSRRDSYGIHVEALASSSRAHDHGALPVVRCEY

SEQ ID NO: 235200 - protein, 102 aa, Zea mays
  unsure (1)..(102): unsure at all Xaa locations
  Clone ID: MRT4577_146085C.1.pep
MQTTISWDENAPFSSCLCASAAIVFSCMTAAYGTANSGVGVXASMGVMRPELVMKSIVPVVMAGVLGIYGLIIAVIISTGINPKAKPYYLFDGYAHLSYGLD

SEQ ID NO: 235201 - protein, 122 aa, Zea mays
  Clone ID: MRT4577_146086C.1.pep
CILRMLPIWLCTIVYSVVFTQMASLFVEQGATMDTNIGSFHFPAASMSLFDVLSVLAFIAIYRRVLVPVMARLSGNPQGLTELQRMGVGLVIGMAAMVVAGVVEVERLKRVAAPDQPSSLSV

SEQ ID NO: 235202 - protein, 64 aa, Zea mays
  Clone ID: MRT4577_146087C.1.pep
SLFLFGTMKKSCHGLKVAYDLDSWRTLPGHQKSPLGVSAQLPELAVHGGGRSSTNTAQLRKVDG

SEQ ID NO: 235203 - protein, 78 aa, Zea mays
  unsure (1)..(78): unsure at all Xaa locations
  Clone ID: MRT4577_146088C.1.pep
VSKLFFSXMRRYXFWRVSKKKGGVVTQNNGGSDIPFSNREAIYKTSWLHPKVFLFHKPQSSFCILKNLTKSFGKLTFF

SEQ ID NO: 235204 - protein, 88 aa, Zea mays
  unsure (1)..(88): unsure at all Xaa locations
  Clone ID: MRT4577_146089C.1.pep
NASEDTHVGVYTATDIVVVYEKTPVSTEVGNTELLESTVDTDVXTVKVKEEVPSRKDTSDKAERRTLVREEESRSEDHNWDDNRHNLS

SEQ ID NO: 235205 - protein, 45 aa, Zea mays
  unsure (1)..(45): unsure at all Xaa locations
  Clone ID: MRT4577_14608C.1.pep
LTPTXVFYRWVLVLKYTSYVLCQCLFFYNSISACPIVIVYPILAI

SEQ ID NO: 235206 - protein, 525 aa, Zea mays
  unsure (1)..(525): unsure at all Xaa locations
  Clone ID: MRT4577_146090C.1.pep
MALLITTLYAVSLATVIVLLLWFHKPAVVGKATAVPGDEKPRRRLPPGPWTLPVIGSIHHVVRGLGHRTMMELSRRHGPLMFLRLGEVPTLVVSSAEAAELVMKTHDLAFCSRPTTSVTIDIVGCKGKXLGFAPYGDRWRQMKKITVVELLSATQVKRIESIRAHEVGRLLQSVAAXAAARGAVNVSAEVKALAPDLVARAMFGGNCAEKADFICRYNEVSQLVSGFFLVDLFPSSRLVRWLSIGERRLLRSYGGIQRIIASIIESRKAASTSDDGDNCSLHDHPAEDLLGVLLRLQKEGSLAFPLTSEIIGAVMFDIFGGATTTLGSTMEWAMSELIKKSETMRKTQEDIRRVLGGSRRGVITNTDLVGLTYLPMVIKEVLRLHPPNPLLVPRESREDCQVMGYHIPKGTKVLVNAFAISRDSRYWNNPEDFSPERFQNNNVDYKGTDFEFTPFGAGRRRCPAIMFATSTLEIALANLLYHFDWALPDGVSPKMVEMSEQYGMGVTKKLDLHLRAIPYVYSTMA

SEQ ID NO: 235207 - protein, 76 aa, Zea mays
  Clone ID: MRT4577_146091C.1.pep
GWANFQIFCGFGLVKKEMGGSLGGILWQIFLNGFFPPGETPFKIVGGPKKVMGGKLSKIPKWGIFFKWGGWVLVAY

SEQ ID NO: 235208 - protein, 54 aa, Zea mays
  unsure (1)..(54): unsure at all Xaa locations
  Clone ID: MRT4577_146092C.1.pep
SHNYLLLPYXQSLTLQDSTTDLFYYCSFHMLSFDELTLQLDTSHLQFLMEIANP

SEQ ID NO: 235209 - protein, 204 aa, Zea mays
  unsure (1)..(204): unsure at all Xaa locations
  Clone ID: MRT4577_146093C.1.pep
AAGRAGRPSSQQSLSSDPPVVPGPVFPPPPATASRAPRRSPFRPQMEPKKSSAQRQPHAMEPNKSSLCGATAPAATAEAESPLCSLFYPPARXTAANGKDSDLYSILYKGQSGSAQAGVTDGKPQWAPXPEVVAANAKDGKHSPPYDSVDTSCFGSSVDYGGRDYFYGSSTPKKVTESSTDYKGNKKDPAADSHGDWWQGSFYY

SEQ ID NO: 235210 - protein, 62 aa, Zea mays
  Clone ID: MRT4577_146095C.1.pep
ACAGLELVSGRPFFFFFFFFFFFSAKRVNLNVKGYPCELKPETNRNCFVHLAKPKTKYAYPQ

SEQ ID NO: 235211 - protein, 106 aa, Zea mays
  unsure (1)..(106): unsure at all Xaa locations
  Clone ID: MRT4577_146096C.1.pep
DASTHPHASQKLPVLLHCAEAADLSCVRLQDKHIVPVHEELVIXREHVLSYFIKTINKLHGYLYNNEGKKMQTTLPRLKEIEMPALSTNIDDDLAKALKEVDEHRI

SEQ ID NO: 235212 - protein, 54 aa, Zea mays
  Clone ID: MRT4577_146097C.1.pep
IRLELGRLDHFYLFGLWLLCPESLWLRLYSGVILIASLHVCETQDKMRSLSKLA

SEQ ID NO: 235213 - protein, 85 aa, Zea mays
  Clone ID: MRT4577_146098C.1.pep
SPGPRRRRQCPGAVASSPSRRRSSRWATLLVRQIQQLLAYQASLAAYQSAGHFDIVRFFRAGSISFAVHLSVALCPRHCFGPWAP

SEQ ID NO: 235214 - protein, 53 aa, Zea mays
  Clone ID: MRT4577_146099C.1.pep
PICLHLGSKINESVNFVCLLLIRIALCWLSGFSHPMITSCPSAPHKRAAVQVY

SEQ ID NO: 235215 - protein, 67 aa, Zea mays
  unsure (1)..(67): unsure at all Xaa locations
  Clone ID: MRT4577_14609C.1.pep
KKKKKKKKNKKKKKKKKKKEKKKKKNXKKKKKKNRKYGGMVLRFLLIKFGALALEFYYGDWKNCGFA

SEQ ID NO: 235216 - protein, 109 aa, Zea mays
  Clone ID: MRT4577_1460C.1.pep
MRLMAPMGGMAAPVPQMMEHDHYQHQQASYATANQLLTYPFIDNSVMWQQAPYAAHGSAAYGGGADAAGAGPSNVVAVPADDVDVVQMASREFLTPSEDEVTLDLARFR

SEQ ID NO: 235217 - protein, 76 aa, Zea mays
  Clone ID: MRT4577_146100C.1.pep
DDRGHSPYTPLDGGDCYSEQINLIGASAACSIMTKQAPAREHRNVARLETPVTLQTVLLMYNPYIEVDNENSMLKH

SEQ ID NO: 235218 - protein, 81 aa, Zea mays
  Clone ID: MRT4577_146101C.1.pep
DRAKRERLAGEQERYYLRRRLRVTSARVRSALSGGSVSLDLVARWWLTVAWLLAAAPTRSFPTHVCLGHSTAVSAHASCTV

SEQ ID NO: 235219 - protein, 84 aa, Zea mays
  unsure (1)..(84): unsure at all Xaa locations
  Clone ID: MRT4577_146102C.1.pep
ALKCDRWLDSSFRFFEVEAXKSGPRDYYSECTATCXVKPEQAEHIGDDRTNDSXGARDPCCKAWLWSIDRHSFKEITDRIAFEV

SEQ ID NO: 235220 - protein, 60 aa, Zea mays
  Clone ID: MRT4577_146103C.1.pep
GKGGYIFLGQKFLLVGQSLEILTGGIRSLQKGNKVGIIFWGDFFKKKNFLKKKTETFYGT

SEQ ID NO: 235221 - protein, 77 aa, Zea mays
  Clone ID: MRT4577_146104C.1.pep
IHLSSFFYNIFTFITLTLPNLIFFLYIFLLSVFIISNNFVLISLSNIFSYFNFHINSLSLSFQLILIFFFLYSYIYF

SEQ ID NO: 235222 - protein, 205 aa, Zea mays
  unsure (1)..(205): unsure at all Xaa locations
  Clone ID: MRT4577_146105C.1.pep
MAAALKDAFVRKPVLATIRLVLPAGAARTGPXPVSPALGPYRVNLMALCKEINARTQRYKPDTPIRVTVTVYRDSTFQLVVKPPSVSWLLKKAAGIQTASRFPGHVTAASLTVRHVYEIARLKLGDDPSCKYASLGAMCKSVVATARSMGIAIVRDLCSIEQRVCLVGAVAANSVSVSSLKKPAMAGAGAVAFIATVWRRWETIV

SEQ ID NO: 235223 - protein, 54 aa, Zea mays
  Clone ID: MRT4577_146106C.1.pep
SVSLPLLVDRSAVGGSCHHSRRRLERIMCGPILAMAELSYPSIVSRARSRLSLC

SEQ ID NO: 235224 - protein, 326 aa, Zea mays
  Clone ID: MRT4577_146107C.1.pep
MFESTGARLPACSLAAALLPIYCLRTWRCCDTHPTDTVDDACDRAFRSRARGGIYYLERERLVSACGGARSAAAMAAWKDGYLDMVLIPLAVLFPAVYHLWLYRAVRRSPLSSTVGISAAARRIWVFSMMKNNEKQAIIVVQSIRNVLMASTLVGTTSILFCTGVAAVLSSTYAVKKPLSDAVFGAHGAHMMALKYLLILAVFLLAFLCHSLAICTLNTASFLVNALSPSPHLHLPGVTAEYVADVMERGFLLSLAGNRLFFAGAPLLLWISGPVFPCVCSMAMISVLYNMDVVDDADDGRSSSGGGANAAVVMDGDSDDQSMEVV

SEQ ID NO: 235225 - protein, 186 aa, Zea mays
  unsure (1)..(186): unsure at all Xaa locations
  Clone ID: MRT4577_146108C.1.pep
KKKKKGGNLFKPGDHRPTGKPRXGPXPPKGYHSQQISQTPKPKXPPKREGTTPSGPRXMGVFLXPEKKPLAEPPTLWPKGPGRKPPFFLGKFNRPPPHPEKGGXTKTKTTRAPPLFPPPPNMGKPKKPNWRRAXXPPKKNXKTLGPPGXGRPGGNLPPPEENTRPRTRRGGLGSPRGDLPGGGARP

SEQ ID NO: 235226 - protein, 137 aa, Zea mays
  Clone ID: MRT4577_146109C.1.pep
MGACATKPKTLEGKAPAEATISTPKVAPETTTIHIEVAAKHAVVEKVEEDKEEALTVAAKQEPAATIEPQQIASEVTTSEVAVVVVEPENKEEEEVVEKTVIEKEKPSAVHAEENIATNKVAAEPTTELKKDTEEEI

SEQ ID NO: 235227 - protein, 52 aa, Zea mays
  Clone ID: MRT4577_14610C.1.pep
SLHLAFVTAFHFLSDCNGCNLRAGSTPLTESVKSGELGQDLRSSRMDLATSF

SEQ ID NO: 235228 - protein, 117 aa, Zea mays
  Clone ID: MRT4577_146110C.1.pep
KKTTDKNRGIETPFFTLYSLKEVCKNEIVTLVSVDREMFCPHLICRWDNRCNTGPVKVLKPGKYFESSQGCCPTFWRRRQGPLPAGPPLWGRLLRRRRYRRWGNPSPSPDSATATHG

SEQ ID NO: 235229 - protein, 53 aa, Zea mays
  Clone ID: MRT4577_146111C.1.pep
PLLYFFFFCSCVPKHFSACMFSTQEFTEYTNLDECISYLCDYMVKNGPFDGLL

SEQ ID NO: 235230 - protein, 281 aa, Zea mays
  unsure (1)..(281): unsure at all Xaa locations
  Clone ID: MRT4577_146112C.1.pep
LGPSEPAATXLGGGMQLEPGKSWVLQVPGNTQSGLVWARTGCSFDGHGNMSCETGDCGGVLACASSGQPPFTRAEFSLGGLNNTDFFDMNLIGGFNVPMDFLPVPSNGSSGCSRGPRCPADITSQCPGELKVPGGCRGACQHCNGSTVNSNTVFYVRMCPDAYSYSLDQGPIMYVCPSGTDYQIIFCPPVDLVSLSPPPITPLSPPPTPTSPTANGTSSITSSSKSKNRSLFGFVLGGSLAGFIFIASLALFFILHRRRLQRRQEMQEREEAEFWEATRDA

SEQ ID NO: 235231 - protein, 172 aa, Zea mays
  unsure (1)..(172): unsure at all Xaa locations
  Clone ID: MRT4577_146113C.1.pep
GGVHDGTVIVLWKWCKGDNQSWKILPWXRDDRYXAACHAESPYAGRVLCKTERRTTDLSVRIGTVYLWLTNTGNQCQDWVKAMLHMIALRNEEDXLNIALCNKATVXGLNHYMLYVHXTRLCXYIPYYQYXCMLWTYSRNIKNKFRCLRIVKNIYFKCYSFHCDKAHCSLHY

SEQ ID NO: 235232 - protein, 79 aa, Zea mays
  Clone ID: MRT4577_146114C.1.pep
SSGPWPWRRPCSPLPPCHSSRGACPSRPVSSQQWRPLMGSRRAPAFFVSSASLRAAPAPTAVALLPAKVGIMGPSAISK

SEQ ID NO: 235233 - protein, 103 aa, Zea mays
  Clone ID: MRT4577_146115C.1.pep
SLNALRTLDISGNAVTGDLPIGISRMFNLRELNLRGNRLTGSLPDDIGDCPLLRSVDLGSNSLSGNLPESLRRLSTCTYLDLSSNEFTGSVPTWFGEMTSLEM

SEQ ID NO: 235234 - protein, 124 aa, Zea mays
  Clone ID: MRT4577_146116C.1.pep
SVNEEETNHKGGWPEYNNSGATMGVPSADARPRTTLDGDRRRRLGCHLVMKPAERRRQRCIHDSGGLLPHPALPLDHRVLPAPLRMLQGNQRQERRRIINTHIAESAVCFDQCHIHCSLLCSST

SEQ ID NO: 235235 - protein, 74 aa, Zea mays
  Clone ID: MRT4577_146117C.1.pep
YTGLDARSLCVKRRHSRARAPDPVPISPVSRVHPHQTEQAPESGKEGRLSTVVLGRCFGPDTYQGERDERVEFC

SEQ ID NO: 235236 - protein, 80 aa, Zea mays
  unsure (1)..(80): unsure at all Xaa locations
  Clone ID: MRT4577_146118C.1.pep
WXKKKKKGGKRGKKKIKDGGSLYIPKLTYPFFRLTKFYITAPKFTTLALVKQRRNPKGARGTKFNFLQLHSSLTSSHHTQ

SEQ ID NO: 235237 - protein, 66 aa, Zea mays
  Clone ID: MRT4577_146119C.1.pep
VPSGVFSPCTCCSHQVSSSSPFPSHQIYRTRQSHQQPPVCFYCPKCFILSVKPVIRRLHASTVCIH

SEQ ID NO: 235238 - protein, 142 aa, Zea mays
  unsure (1)..(142): unsure at all Xaa locations
  Clone ID: MRT4577_14611C.1.pep
HRQLLDSHHHLRSSSSAWSIRXXXSXXXXXXXXGVEELAAEYXXXXXXXXXXXEDSDDDCYDDLCEEMSRMXXXXXXXXXXXVLPQFEGKHTRFIYNSDDEIERVEEADAAEATAELRALMLRGLLVPEGRHLRFHDEDADE

SEQ ID NO: 235239 - protein, 299 aa, Zea mays
  Clone ID: MRT4577_146120C.1.pep
MHNLVVNFSIAWSSSPDLVQYRPFFSTPELVEFPTSKSGQKAYAYFYPPSNPNFQGLPDEKPPLLVKTHGGPTAETRAILDLSVQYWTSRGWAYVDVNYGGSTGYGREYRERLLNKWGIVDVDDCCGCARFLVESGKVDGQRLCITGRSAGGYTTLASLAFRDTFKAGASLYGVGDLTLLRAETHKFESHYMDNLVGNERAYYERSPINFVNQFTCPVILFQGLEDKVVPPDQARKIYSALKEKGLPVALVEYEGEQHGFRKAENIKFTLEQQMLFFARLVGKFEVADDITPIKIENFD

SEQ ID NO: 235240 - protein, 599 aa, Zea mays
  unsure (1)..(599): unsure at all Xaa locations
  Clone ID: MRT4577_146121C.1.pep
MGSMTIGAKYKTTIKDPGTPGILRMNGDRFTFTPNDPRSAMKFNVDFRTIKGHKFNKVEGNKAALLNLSKEDKAGGYIFEFDNVGNRDQCRDFVARVLGKHQGIVPPRPTVAPENSVASAALEQLSAAEVERRVKLLREDSELQKLHKKFVLGNILQESEFWATRKNLLDDEANKRSKQKPGFKSALVDIRPTTDGRTNKVTFQITPEMIHQIFAEKPAVRRAYLDFVPKKMSETRFWEKYCRAEYLVRTKNTAAATAEAAGDEELAIFLKNDDILAKEAKLKIKRVDPTLDMEADTGDDYIHLPDHGIHRDGSKETVDADSELARRTLSQDLNRHAAVVLEGRSLDVESTDPKTLAEALARSKKEPPSTSNVDDDNHERLMKVARMTEIEDLQAPRSLLYAPLCIKDPREYFDSQQANALRSLGGSNGGRKAXCSLSTEEVFHHLMDQMSSVKVNRLNCPIVQSDMALKVLNELNEGISRSRRLNLKNPQEGLLGQLPQHTRDELMDHWTAIQELLRHFWSSYPITSAVLYNKVQRVKEAMTQIYQKLQLIKELAQPDVRHEISRLVKPMTQALDAAFNHDLEQQQKSSKAGNRHNGF

SEQ ID NO: 235241 - protein, 93 aa, Zea mays
  Clone ID: MRT4577_146122C.1.pep
YAGTGVHVHSGGRSRALRAASCTHRVEVEMSRAVRVALSRSVRLTIWAELLAPTYGHVTCTSLRCELRVVQDDTQLLLWHCPMAYYMGIILKS

SEQ ID NO: 235242 - protein, 48 aa, Zea mays
  Clone ID: MRT4577_146123C.1.pep
LGVVQPKCPYWLAWASSIIESPGLLIYKLYILNWQFCAQLRFNSYTYN

SEQ ID NO: 235243 - protein, 168 aa, Zea mays
  Clone ID: MRT4577_146124C.1.pep
MAAASSATSVHDFTVKDASGKDVDLSVYKGKVLLIVNVASQCGLTNSNYTELSQLYPKYKDQGFEILAFPCNQFGGQEPGTNDEIVQFACTRFKAEYPIFDKVDVNGSNVSPLYKFLKSSKGGLFGDSIKWNFSKFLVDKEGRVVDRYAPTTSPLSIEKDIKKLLGSS

SEQ ID NO: 235244 - protein, 131 aa, Zea mays
  Clone ID: MRT4577_146125C.1.pep
VRLVLAEGVCRSRRGVAGRLGGGAWWAESHGEAVRPVRSRSRAWRACCLVGLLGCAAPDLCWSCSALAHWTVAYAIDNTVLGMREGCVLASVATGCTPPAGGGRRRVSGSRSSPSQPPGQPWSMASKPRPL

SEQ ID NO: 235245 - protein, 82 aa, Zea mays
  Clone ID: MRT4577_146126C.1.pep
PRPHPPKKRDNPGGGGPGEFFNGGGNGPLGHGPLPGLVLLQAANENQALRVLRLKSPPLASCFRGGKRDKHVAPFFFSFCLD

SEQ ID NO: 235246 - protein, 53 aa, Zea mays
  Clone ID: MRT4577_146127C.1.pep
WPSRSCSPYGSCGAYGYCDNTLAVATCRCLDGFEPASPAGPGGGPALVLRVVP

SEQ ID NO: 235247 - protein, 72 aa, Zea mays
  Clone ID: MRT4577_146128C.1.pep
TKNRGYSEKSWRETGFFNQMRICIRGAPNSCTPNTKVVLTNQGGGKLQSHVKKGSQRRTVGTKNRRSGSNDK

SEQ ID NO: 235248 - protein, 50 aa, Zea mays
  Clone ID: MRT4577_146129C.1.pep
IRRRSKDLMWHQKYVKNITASHQVWHRPPLKTPRPHWEGSSNHHGNGFII

SEQ ID NO: 235249 - protein, 49 aa, Zea mays
  Clone ID: MRT4577_14612C.1.pep
APISLALAWIPLGALYSCSPCRIRPADLPTRQTPLRATAWLIIPLPLGY

SEQ ID NO: 235250 - protein, 47 aa, Zea mays
  Clone ID: MRT4577_146130C.1.pep
RAPPLFLGAGVPVVPMAPLSASLSPINARRRPLAKSKPKVFFLVRVS

SEQ ID NO: 235251 - protein, 188 aa, Zea mays
  Clone ID: MRT4577_146131C.1.pep
TKFIKSFLVFINLYCIKYGALALQEIFDGIQPKMFGMVLEKIIIPEIQKVSGNVEKKICAVGITKLLTECPPMMDTEYTKLWTPLLQSLIGLFELPEDDTIPDEEHFIDIEDTPGYQTAFSQLAFAGKKEHDPVGQMVNNPKIHLAQSLHKLSTACPGRVPSMVSTSLNAEALQYLQGYLHAASVTLL

SEQ ID NO: 235252 - protein, 68 aa, Zea mays
  Clone ID: MRT4577_146132C.1.pep
SPHTVTMHVMSLQTVCATIKVQPLSVRNPARRPCLRLVRPLRFINKSCSLRARKSTPTSFDWLTSMNC

SEQ ID NO: 235253 - protein, 155 aa, Zea mays
  unsure (1)..(155): unsure at all Xaa locations
  Clone ID: MRT4577_146133C.1.pep
MAGKGDAPAIDIDLGTTYSCVXLWQHHRVEIVANDQGNRTTPSHVAFTDSELLIGHARKNQGAMNPINTVFDAQRLIGRRLSDFSVHSDIKLXAFKVISVPAEKPMIVVQHHGEXKQFEAEEISSMVLIKIXEIAEAYLGSTIKNAGVKAPCLLP

SEQ ID NO: 235254 - protein, 89 aa, Zea mays
  Clone ID: MRT4577_146134C.1.pep
AEEDEEEEYKQQRIRIMESQYSPFRAVARLRLCAHCLLRLPWTLLSFFFRTASFMISIFYFGLVTSLFLFFFFITFSSFLLMSSCFFFY

SEQ ID NO: 235255 - protein, 74 aa, Zea mays
  Clone ID: MRT4577_146135C.1.pep
LTQGGTENQPKPIHYLKALLLAADRANTALAHNGHNMPEARYHSSSFAATSIKQANSRRNPLTKPLYLNYQSPQ

SEQ ID NO: 235256 - protein, 112 aa, Zea mays
  Clone ID: MRT4577_146136C.1.pep
GGDPPLHHRGPFSPGVTSRPPSNGINFLKQRKNPPSCPGDKIKTGPLRPGNEMRGRKLDFPFPFSRPWGQPFAGGGRKHPNLLDTKGVFLGGRLKGGPSGGDGTPGTTGTPD

SEQ ID NO: 235257 - protein, 66 aa, Zea mays
  Clone ID: MRT4577_146137C.1.pep
MAYVTFARLVPCNHLAYQESWGLIFTKTKCIISPLETQSQFPFEARSCDSALAARITSLFKLIFGK

SEQ ID NO: 235258 - protein, 62 aa, Zea mays
  Clone ID: MRT4577_146138C.1.pep
LIFCLFKKLLKKKKKKKKKKKKKKKKKKKKKKKKKKKKKKKKKKKKKKKKKKGGANLGGPLL

SEQ ID NO: 235259 - protein, 53 aa, Zea mays
  Clone ID: MRT4577_146139C.1.pep
SIQYTITQSSLLPACFLPSPPFYLLECSSYRFNHNTCIVRVCYGIAAKLGVKP

SEQ ID NO: 235260 - protein, 142 aa, Zea mays
  unsure (1)..(142): unsure at all Xaa locations
  Clone ID: MRT4577_14613C.1.pep
ENXHTXPIIXXNARGIFHXGIIYXYFQSSGXQRKGNKAASLXILLKPMWGGSGRRNVDEDADXRLRAXNPRSTTEADGQPTTMSAXXACPLEDPPFLASPPRXQARPPLRATTVLAPXAAXXPPLRGAXMVFATPAGPQLTI

SEQ ID NO: 235261 - protein, 114 aa, Zea mays
  Clone ID: MRT4577_146140C.1.pep
NAKVCPYIGYRRDLVAVIANCLHRRKKVQDEIRQLDGIMLLLQQCVIDEDNPYLREWGLLAVKNLLEENEENQKEVSELEMQKPVITPEIANIGLKVEIDKETGRPKLVNTSDT

SEQ ID NO: 235262 - protein, 186 aa, Zea mays
  unsure (1)..(186): unsure at all Xaa locations
  Clone ID: MRT4577_146141C.1.pep
NKRPLNFASNIMXKPWHFKGHFLHHDSWEEPLSIIHLGQLICEDLCLYELRIKESGQIFSVNMYSSVLRVAKPYLARIGAPVHGHYGTILCKADRVGFAYXEKWRCSDIKQGVPKVKQIFXARAIDSLSPNLQRRTEDGNXRITRIPEGSGEFIQKNEXTLVQCXISAVSKMRKVHRSQGVRRAGR

SEQ ID NO: 235263 - protein, 165 aa, Zea mays
  Clone ID: MRT4577_146142C.1.pep
YACLTDRACREDSPSCGACTRVGAYSHVGHHRLSPAESRWACGEVVDLGRRGHQVTCLRWVSPPSSSFMRLPLGARVVCQQSRGIGLRWVRQCVRAPLGVTPLLIAFVSAAAVGEVRLCSPFSIGRWRVGPFGHFSYLCVRFDGAPRSGGGSGSGSSNGKAQPGR

SEQ ID NO: 235264 - protein, 695 aa, Zea mays
  Clone ID: MRT4577_146143C.1.pep
MGSPWPASSRRSEAGLLLTSASANSRRTSIPPGAPATMPPRTVSDGGDDNGTDVASRTSSHRRTEHGHGYKVGVPPEKNLLAEISDAVKETFFADDPLRQYKDQPRSKKIWLGLQHIFPVLEWSRHYSLGKFKGDFIAGLTIASLCIPQDIGYSKLANLPAEVGLYSSFVPPLIYAVMGSSRDIAIGPVAVVSLLLGTLLQNEIDPKTHPLEYRRLAFTATFFAGVTQAALGFFRLGFIIEFLSHAAIVGFMAGAAITIALQQLKGFLGIANFTKKSDIVSVMKSVWGNVHHGWNWQTILIGATFLAFLLVAKYIGKRNKKLFWVSAIAPLTSVIISTFFVYITRADKHGVAIVKNIRKGINPPSASLIYFTGPYLATGFKIGIVAGMIGLTEAIAIGRTFAALKDYRIDGNKEMMALGTMNIVGSLTSCYVATGSFSRSAVNYMAGCKTAVSNVVMSIVVMLTLLLITPLFKYTPNAILSSIIISAVLGLIDYESAYLIWKVDKLDFLACMGAFFGVIFSSVEYGLLIAVAISLAKILLQVTRPRTVLLGNLPRTTIYRNVEQYPDATKVPGVLIVRVDSAIYFTNSNYVKERILRWLRDEEEQQQDQKLTKTEFLIVDLSPVIDIDTSGIHALEELAKALEKRKIQLVLTNPGPAVIQKLRSAKFTDMIGEDNIFLTVGDAVKKFAPKMVDNV

SEQ ID NO: 235265 - protein, 85 aa, Zea mays
  unsure (1)..(85): unsure at all Xaa locations
  Clone ID: MRT4577_146144C.1.pep
MIFKSFLLXSLXSLSFSMRIINSVVVVGLYYGFLTTFSIGPSXIFFLQSWVREEGDXATTSGFIMGQLMIFISIYYPPLHLFFLS

SEQ ID NO: 235266 - protein, 83 aa, Zea mays
  Clone ID: MRT4577_146145C.1.pep
MEAKSVVMSALGIGIGVGVGLGLASAPWAAGASASSRAAGVTVDRVEQDLRRLLVDGADTKVTFDEFPYYLSEQTRVVLTSAA

SEQ ID NO: 235267 - protein, 93 aa, Zea mays
  Clone ID: MRT4577_146146C.1.pep
KTGPTHASARKYSQLTTHPNAFLPPTRYCANGKSWTGFMFSPPLIWRYSNVCCNSSSYMSCSPPKSHISEEELKTHQHSKTTCCSTVYLTRTT

SEQ ID NO: 235268 - protein, 48 aa, Zea mays
  Clone ID: MRT4577_146147C.1.pep
EWRLVSNPRPSRAPCLTFYCGLNCEAPMTFRFRKEWFFTNFLCFVFTG

SEQ ID NO: 235269 - protein, 61 aa, Zea mays
  unsure (1)..(61): unsure at all Xaa locations
  Clone ID: MRT4577_146148C.1.pep
MAANLKWAPVLALVVVVAAMVGTTSAGNIAXYFFXNGKXXXXXYSXNYXLYXYXNXXXPHN

SEQ ID NO: 235270 - protein, 63 aa, Zea mays
  unsure (1)..(63): unsure at all Xaa locations
  Clone ID: MRT4577_146149C.1.pep
LFSETGDDKHVPRAVFVDLEPTVIDEVRTGTYRQLLHTEXIGTXKEDAANNYARGHYTIGKEI

SEQ ID NO: 235271 - protein, 149 aa, Zea mays; identical to SEQ ID NO: 215200
  Clone ID: MRT4577_14614C.1.pep

SEQ ID NO: 235272 - protein, 48 aa, Zea mays
  Clone ID: MRT4577_146150C.1.pep
PDDKYIMLSSIHRPYSYIVPCGRFPKKVELWTVDGKFIRELCDLPLAE

SEQ ID NO: 235273 - protein, 66 aa, Zea mays
  Clone ID: MRT4577_146151C.1.pep
SQNAWPGSKVRWVAGGHVSSFFLPNDAFRKAIVDARDRLCPEKVRDRPSLWGHFMLCGVSGPGVLA

SEQ ID NO: 235274 - protein, 59 aa, Zea mays
  Clone ID: MRT4577_146152C.1.pep
ARWRALPRPLPGRSLQVLLLGGRLDYAALGWTLAITPLLRPSLIWRLATYLPTTTQAPW

SEQ ID NO: 235275 - protein, 123 aa, Zea mays
  unsure (1)..(123): unsure at all Xaa locations
  Clone ID: MRT4577_146153C.1.pep
YIXFHVELLSTTNNFTKKRKVGYLWYQEAQNQDFDSRIPISPTRGKHNPGPPCTRCPTRSQYARRPRCCGRYGKTAINDRLERNLSFHICEPINDIQNTIMSDTMMVRMLKRSIIHVAHINQE

SEQ ID NO: 235276 - protein, 57 aa, Zea mays
  unsure (1)..(57): unsure at all Xaa locations
  Clone ID: MRT4577_146154C.1.pep
HLQVSGPILPRDEFRVWLKKSSQCAPSARSWXSXSCAPPFSWAVAEWTVDRPVGXGI

SEQ ID NO: 235277 - protein, 63 aa, Zea mays
  unsure (1)..(63): unsure at all Xaa locations
  Clone ID: MRT4577_146155C.1.pep
LDFTTNCGIIWFYCWDTAGQDKFFGLKHXYYIXGQCAIIMFDVTSRLTYKNFXTLHKDLFRFF

SEQ ID NO: 235278 - protein, 95 aa, Zea mays
  Clone ID: MRT4577_146156C.1.pep
KFFLCFFVVLLCSLYIVPPYAFMIPYRMKGHPNLHHVPDQHSPHPNLAFRRCISSTPRAASNTGSSTPALREELSPKCLIHPSSPQLCFDIVFSY

SEQ ID NO: 235279 - protein, 266 aa, Zea mays
  Clone ID: MRT4577_146157C.1.pep
MAVQGGEERESGKAAAPAAVSGGEAGPPGRRTARGHPLLRGGWRRDRYTHGMRPAQMEALRAMCGALIPSLPADADAGRGDPPGGKDLERFYLASAADSTIPDEVAELMVTRCSREAVALAWVVLWALSTRAGTLLLCGRLSLGAGFPYVRRFADMAPERREAALRRWNRVRWLFPLRIAFAIVKILCHYVFYAMVNENSENPYWKAIIQRGRARGGSGASDGTTVAVPPRRPSWRPGCWTTTAAQIAPGGGAHGKAGVVGRDHHT

SEQ ID NO: 235280 - protein, 54 aa, Zea mays
  Clone ID: MRT4577_146158C.1.pep
LSLAARPCSAQRRKNQSIAAQNSVSRLFFFPPTSRRCPLYLPSPCIISSLSKFI

SEQ ID NO: 235281 - protein, 185 aa, Zea mays
  unsure (1)..(185): unsure at all Xaa locations
  Clone ID: MRT4577_146159C.1.pep
SPVQINSARGSSPFPSPLPSLPLMASPSGNPNPNPNTPXSRSESSSXPPNPMTTATPNPXSPASPEARRARRRRPVPTPXPSGXPRPSTADPTSTTSRIPTPWPVPLSPSPXPNPNLNPNPNPNANPNAASPGPNPGARLMQLLGNSGPTQLETGVCMPPATWGVGATAAATSDAIRAGGQDAEQ

SEQ ID NO: 235282 - protein, 76 aa, Zea mays
  Clone ID: MRT4577_14615C.1.pep
PKDRVGNSGGHPGFPEGGGSFGRKKANRGPFLKNPGFKPGKKNFCKHLNFGGKKGWVLVPPQKLGGKQERLKNKGA

SEQ ID NO: 235283 - protein, 107 aa, Zea mays
  Clone ID: MRT4577_146160C.1.pep
RSQQRNKTPPPPPPPPNKTNAWSPSPVIKSCNNRKFQCWSSRSWRNSINCKSLTLRPRRQQHQDTVLAAPNTKPAPAASRRPTKGGGCDCNTCNCGNSCRCSCCSCN

SEQ ID NO: 235284 - protein, 74 aa, Zea mays
  Clone ID: MRT4577_146161C.1.pep
GVFLRELLETDLIIMLCSIWLLIYVISPSLADSVFLKEAAKGLPLQCIRREMNKSLPKAEQRKTTEKKKKKKKK

SEQ ID NO: 235285 - protein, 65 aa, Zea mays
  Clone ID: MRT4577_146162C.1.pep
FLLFLIKVPEDHIPKCLRTSSKPTLKHYVQLSCYDIIILPNCWVFFLELIMYLENKPLEKKKSSY

SEQ ID NO: 235286 - protein, 76 aa, Zea mays
  Clone ID: MRT4577_146163C.1.pep
YASTAGRPKGSKKFFVGGNCKCNGSGEDEKKIVTVLNQAEAPCEDGLKVEGRPAFIFLQHAKGLMRMDFADAEQNC

SEQ ID NO: 235287 - protein, 64 aa, Zea mays
  unsure (1)..(64): unsure at all Xaa locations
  Clone ID: MRT4577_146164C.1.pep
KAHNLKLXNKASEPFRLTWYRLXGPGTKNSSNSYSGYICLNQGVPGDRDGPVLWFVADLATRRG

SEQ ID NO: 235288 - protein, 129 aa, Zea mays
  Clone ID: MRT4577_146165C.1.pep
IYLFLLVADVLQTLIKRDGRVKHPLAPAESCAVLQYADDTMIVMEGNPAHVCVLKQLLDSFSKATGLCINFQKSVLVPIHMNETAVQQCVSLLGCRREGFPQTYLGLSLSLTKTRLSTFVPYMAKTDKY

SEQ ID NO: 235289 - protein, 126 aa, Zea mays
  Clone ID: MRT4577_146166C.1.pep
VFFFFFFFFFFFFFFFFFFFFFSPSGAQSSYGLIITHIPVIKHVGFGFFFTTGAGFFFGACWGCNPAGGGAFTVFFFLWIAAAAVQTVATVSVCNLPNTPDDTLISPWGAQSSFWLIITHTKGLVF

SEQ ID NO: 235290 - protein, 63 aa, Zea mays
  Clone ID: MRT4577_146167C.1.pep
ERTHTQADLPRTYYSLLLHSKIGVALNRLNHDCDNGSDDDCDHEQGELLVIARAGRGIPLEAT

SEQ ID NO: 235291 - protein, 84 aa, Zea mays
  Clone ID: MRT4577_146168C.1.pep
LASHRHHGKKSLCHVSSSSSGINGERSEIAEIEAASTSEAARLRAALRRAPPGAVREPHQSFERLTQTCFDKSRAAILQFRTTT

SEQ ID NO: 235292 - protein, 150 aa, Zea mays
  Clone ID: MRT4577_146169C.1.pep
KVQEFQHKRFYGSDMSLKGRVSELGKKEDVSEDGGDEYPPPDSDHESTESDEDFYMCQICNTEEEKNSLFCCCICASRVHPGCLTPPSTDIVNDDWSCYGCKEKVKSYLKERDAYLTELSKRYDAALDRKSKILDIIPSLDLPSNPLDDI

SEQ ID NO: 235293 - protein, 73 aa, Zea mays
  unsure (1)..(73): unsure at all Xaa locations
  Clone ID: MRT4577_14616C.1.pep
RTRGAVLPRIXSLTHGRGHRRAPHAEPNPQLASATAQQTAEEERGKSSAPHHHSHHKADYTHHTIRRAEERPH

SEQ ID NO: 235294 - protein, 43 aa, Zea mays
  Clone ID: MRT4577_146170C.1.pep
PQAKHNIACLGPKNIIYCLYLLTVPELETLKLYLSPYVTQATS

SEQ ID NO: 235295 - protein, 68 aa, Zea mays
  Clone ID: MRT4577_146171C.1.pep
PRSNKSVFHGIFSFFLLFCVLQCCTVECCSANDTYMLFRSWRPGSVDTSCCKLLSLITIPCCSLRLSI

SEQ ID NO: 235296 - protein, 115 aa, Zea mays
  Clone ID: MRT4577_146172C.1.pep
GSLITLYFLGFLFVVWGELCCFSKGLMACPFLTHPGPNREGTNKTPLGGTRRGNKGKRETPRDPGTGSREQQGPEGERGKRRGSPAQNPPTKKNSIGGEANRTNPLYKKHSRTKT

SEQ ID NO: 235297 - protein, 46 aa, Zea mays
  Clone ID: MRT4577_146173C.1.pep
LIPSSSHACVLTANASLLAPPVPALDPTWGKFPTMLYNIPSVPITI

SEQ ID NO: 235298 - protein, 73 aa, Zea mays
  Clone ID: MRT4577_146174C.1.pep
MASSRTIVALLVLLLVLLLVTFAATVDAHVVRELLCQDQFQQTCYQVHFKKMCQILTRLTRVTTPLELMLASM

SEQ ID NO: 235299 - protein, 157 aa, Zea mays
  Clone ID: MRT4577_146175C.1.pep
MGFVSFVGRVLFVAAFLLSAYQEFNEFGADGGPAAKALQPKFNVFVKNISAHLGVAVPHIELKHVIAATIALKGLGSLLFILSSSLGAYLLLLYLALITPIVHDFYNYDTEKEEFARLFAKFTQDVALVGALLVFLGMKNSIPKRQGKKKAHKAKTN

SEQ ID NO: 235300 - protein, 157 aa, Zea mays
  Clone ID: MRT4577_146176C.1.pep
MGFVSFVGRVLFVAAFLLSAYQEFNEFGADGGPAAKALQPKFNVFVKNISAHLGVVVPHIELKHVIAATIALKGLGSLLFILSSSLGAYLLLLYLALITPIVHDFYNYDTEKEEFARLFAKFTQDVALVGALLVFLGMKNSIPKRQGKKKAHKAKTN

SEQ ID NO: 235301 - protein, 157 aa, Zea mays; identical to SEQ ID NO: 235299
  Clone ID: MRT4577_146177C.1.pep

SEQ ID NO: 235302 - protein, 157 aa, Zea mays; identical to SEQ ID NO: 235299
  Clone ID: MRT4577_146178C.1.pep

SEQ ID NO: 235303 - protein, 80 aa, Zea mays
  Clone ID: MRT4577_146179C.1.pep
RTRGETRGQDCEQGVVHRDIKPSTVMLDASFNAKLGDFGLARLVDHARGAHTTELAGTMGYMDPACISTGRFSTQSAMYS

SEQ ID NO: 235304 - protein, 64 aa, Zea mays
  Clone ID: MRT4577_14617C.1.pep
NLFRLQQTETSIHGGVYLYPDCKSRDRNPCAPVALLLKKRLNGMGWLSSEGPQMPNLGRFITQL

SEQ ID NO: 235305 - protein, 126 aa, Zea mays
  Clone ID: MRT4577_146180C.1.pep
ARNPSRSRRRFVVEIRIQYHPVSGAQRSERLSTRCGTPRCRISEVAEQDALPQKAVVTPLQIMYVSRGTQRRMQCIPSSQRPAGPISYSRRRGTGTRLAERIPRWRPLRTADPCSSGGPGYLSCGA

SEQ ID NO: 235306 - protein, 158 aa, Zea mays
  unsure (1)..(158): unsure at all Xaa locations
  Clone ID: MRT4577_146181C.1.pep
MGFVSFVGRVLFVAAFLLSAYQEFNEFGADGGXPAAKALQPKFNVFVKNISAHLGVAVPHIELKHVIAATIALKGLGSLLFILTSSLGAYLLLLYLALISPIVHDFYNYDTEKEEFARLFAKFTQDVALVGALLVFLGMKNSTPKRQGKKKAHKAKTN

SEQ ID NO: 235307 - protein, 57 aa, Zea mays
  Clone ID: MRT4577_146182C.1.pep
HFMQLIINSNLNYATVQTDNRKITRRAVKVCTKVLNLDFHELTLSTGRCELTFKLLS

SEQ ID NO: 235308 - protein, 136 aa, Zea mays
  Clone ID: MRT4577_146183C.1.pep
SQHVCAAVLIGAILMFPHGDIDLAQSYHHVDVPVIEHTQKVIERLTAPHTGHGNTAPLDIVVVQDISVSMLATNLEHMNDALTRFIIQKLEIRGDRLAIITFESKAHKERDLSSMTPGPSEESADRLSKVRKPVET

SEQ ID NO: 235309 - protein, 149 aa, Zea mays
  unsure (1)..(149): unsure at all Xaa locations
  Clone ID: MRT4577_146184C.1.pep
SGGAGGACIKQRGGVKLXLTCSTLLLQQVMASPIXPSQMXMTTPRMMPTQTMXPGGDMVPXMMAPTMTQPMTIASXRPLLKTPXNMVXSHTMMPXVMPSXMTPRLMPSILMARLIPPEMMPCMALSMIMLYRITAPQXTLEFISHIMRE

SEQ ID NO: 235310 - protein, 117 aa, Zea mays
  unsure (1)..(117): unsure at all Xaa locations
  Clone ID: MRT4577_146185C.1.pep
PGGGYPRIHRERRSGCRYECRHCCIQLPSSCCEVDCIDHGITGGGQRPGGEIIAGCDDGSPSFXSETGSGNHSPCIIFREPEATGINDARSAPHRRRLRSWGIISAKEALRGLLRPQ

SEQ ID NO: 235311 - protein, 52 aa, Zea mays
  Clone ID: MRT4577_146186C.1.pep
ARCGVLGSKPNNPEVFPYYTLATTSTCHNRTRPNEYLDIQYSYQKKKKKRPL

SEQ ID NO: 235312 - protein, 95 aa, Zea mays
  Clone ID: MRT4577_146187C.1.pep
PPSPRAVIRCCRVTPMSWCVRHVHRVLCELLSSALVCVVCTRSPRSARARVTYEVVLTHHRCVGKGRPTYSTVHCREYLIHRSLDGPMTISGTVQ

SEQ ID NO: 235313 - protein, 69 aa, Zea mays
  Clone ID: MRT4577_146188C.1.pep
KASVHTKKDQSKKHLSVEPGSSVLSPIEKTDASLPPLDFYKKSCNNSSGPVFSSHAMTKSTRCILTHFR

SEQ ID NO: 235314 - protein, 87 aa, Zea mays
  Clone ID: MRT4577_146189C.1.pep
YQSHRDLLDSYFHADLKSILRAKHALLRKSTGGKAPRKQLATNADRKSAPATGGVTKPHRFRPGTVPLQLILIYWNSSWLRLLRLAE

SEQ ID NO: 235315 - protein, 88 aa, Zea mays
  unsure (1)..(88): unsure at all Xaa locations
  Clone ID: MRT4577_14618C.1.pep
PGXFLLFLLFFLPXFLLSXXPLGWFRSXLXLRPPRPCXLFVLLLLASPXLLRFLAXXXVFXXASXVXXXVAPRXXPAPPPPPLFSFCS

SEQ ID NO: 235316 - protein, 492 aa, Zea mays
  unsure (1)..(492): unsure at all Xaa locations
  Clone ID: MRT4577_146190C.1.pep
LVPVYWTASAFTQHAERRDAEHLLRLVPSCSSLPSLSQPRHATREECRRRWXLLLAAAAAVLLLLLPPPPSAGAQETCWSGPAPRRGAWMSVASFGARGDGQTLNTGAFARAVARIARRRGARGGTLLYVPPGVWLTGPFNLTSHMTLFLARGAIVRATQDTSSWPLIDPLPSYGRGRELPGGRYMSLIHGHGLQDVFITGENGTIDGQGGVWWDMWKKRTLPFTRPHLLELMYSTDVVVSNLVFQDSPFWNIHPVYCSNVVIANLTVLAPHDSPNTDGIDLDSSSNVCVEDCYISAGDDLISIKSGWDEYGVAFGRPSSGITVRRITGSGPFAGFAVGSETSGGVEDVVAEHLSFSGVGVGVHVKTNSGRGGFIRNVTVSQVTLDGARYGLRIAGDVGGHPGASYNASLLPVIDGVAVRNVWGRNVRQAGLIRGIRDSVFSNICLSNVKLYGIGSDSIGPWRCRAVSGSALDVQPSPCAELASTSGTGFCT

SEQ ID NO: 235317 - protein, 86 aa, Zea mays
  Clone ID: MRT4577_146191C.1.pep
SVTNVHVNQPDHEGVQALHTAFRDTLPRDKDGGHPERGIQYKHVCLRGTNTPRQASYRAALNQSMSTHAGSMLAGLGGAKRSRRYR

SEQ ID NO: 235318 - protein, 117 aa, Zea mays
  unsure (1)..(117): unsure at all Xaa locations
  Clone ID: MRT4577_146192C.1.pep
QPEVKNAVDRXDPIKTSFEEWATPGHLSTTITKGPHTTTWIWNLHAYAHYLNSHTGHLEDISQKVFSSHFRQLSXIISVWLSXMYFHGXALFSNYEACLNDPTHIGPSAQVVCPIVG

SEQ ID NO: 235319 - protein, 66 aa, Zea mays
  unsure (1)..(66): unsure at all Xaa locations
  Clone ID: MRT4577_146193C.1.pep
GMVNELCAMRSDHRGMTPFDVPPCIGACRTFAGKTGLAGGDIGGARXGTTFLFFFFFFFFPAGTSR

SEQ ID NO: 235320 - protein, 156 aa, Zea mays
  Clone ID: MRT4577_146194C.1.pep
KKQRNWILNKPRGMFVFTPLPKWCKRPLNRKARFFSNGKASLKEKSFPKGGRVKKSRKPSGSRKPAQKKWPGPHDPFVSFGQAPKLLWEQKRISKGKCFAFAFSGPPTIFFSPHERYFAPFRQFFLGGGVWLNAGALEKKKKKKKKKKKKKKPGGP

SEQ ID NO: 235321 - protein, 90 aa, Zea mays
  unsure (1)..(90): unsure at all Xaa locations
  Clone ID: MRT4577_146195C.1.pep
KKGSGRFRGSKLTYPGMRQKSSLMGAPKLNXLAAVXQRRDWKNPGFTKLKGLXENPLFPRGPKNKKARNDWPSKKLPNPNGKWDPPFNGL

SEQ ID NO: 235322 - protein, 150 aa, Zea mays
  Clone ID: MRT4577_146196C.1.pep
HGAARARAHLRVHVNIHARRVPCPAPPAPNETSRHRPSMALPRPPGARNVAAGRRQAIPLRPGRILRRIARTPSDCRQSAFWLARERKQRCPRGGPRVTSSDATGRSPSVRRITVAGSSTTCIDDRVVPGRFGFFFLFYVFSFSFFFPGR

SEQ ID NO: 235323 - protein, 34 aa, Zea mays
  Clone ID: MRT4577_146197C.1.pep
ARRMHINKVFSDQVQRGEGALGYQNHVRLLKRPI

SEQ ID NO: 235324 - protein, 36 aa, Zea mays
  Clone ID: MRT4577_146198C.1.pep
SQRYTQDFVVAVSDVDPNFHSDDNVMGEAGLDDPYL

SEQ ID NO: 235325 - protein, 129 aa, Zea mays
  Clone ID: MRT4577_146199C.1.pep
MAPKAEKKPAAKKPAEEEPAAAKAPAGKKPKAEKRLPAAKSSGKEGGDKKGKKKAKKSVETYKIYIFKVLKQVHPDIGISSKAMSIMNSFINDIFEKLAGEAAKLARYNKKPKHAVSEGTKAVTKFTSS

SEQ ID NO: 235326 - protein, 108 aa, Zea mays
  Clone ID: MRT4577_14619C.1.pep
RVHASIVWVVRRLFYSVPPKTGEQNRDPCFKSGPSVLLRLCPFDFSRALPKLGRLLMFKMWEAKKTPGNVKWGPPPPVFSVAGAACPSLENKKGPRKCQWPIHPGSSP

SEQ ID NO: 235327 - protein, 769 aa, Zea mays
  Clone ID: MRT4577_1461C.1.pep
MEQDQSVVVGSADSGAAAFGFATGNPPSLAVTGGSAVAPDGGAQAVDASAYQAEHTALNGTVGDMGNYPSTGVAENGEAVPNETGEPVPELSYEEAVLSAEEARLWSVVTANSLDFNAWTALIEETEKNAENNILKIRKVYDSFLAEFPLCFGYWKKYADHEARLDGVSKVIEVYERAVLAVTYSVDIWYNYCQFAISTYDDSDIIRRLFERGLAYVGTDYHSNILWDEYIKYEESLEAWSHLADIYTRVLEHPIQQLDRYFNCLKELASKHSFSEILTAEEASVYVVTSETSAQAPDGDTHPDDVDKPGQPELSSLADAENLAKYVSMREEMYKKAKEYESEIIGFELAIRRPYFHVKPLDNPELENWHSYLDFIEKEEDINKVIKLYERCVIACASYSEFWIRYVQCMEDKGSLDLANNALARATHVFVKKQPEIHLFSARFKELNGDISGARAEYQHLYSDLCPGFLEAIVKHSNMEHRLGDKELSCSVYEKAIAAEKGKEQSQLLPTLLIQYSRFLFLAIRDLEKAREILTVLHEQLNVTKPVLEAVIHLESIFPCEKRIDFLDSLVEKFVTPESSQGELASLVDKEEISSIFLEFLDLFGDAKSIKKALTRHTTLFSCKRSILPSKKRKADDAVVSDRDKFAKTGSVQSATGTDPNASNPPVWPATSETSGHQWGASYAQQAAYPAYGTYDYSHQMPQPAPQTAAYGAYPPTYSVQAYTQQSYTQPAAIPAAPVPAVVPAPTPASAYPQQPAAAPQPYYGTTYY

SEQ ID NO: 235328 - protein, 137 aa, Zea mays
  Clone ID: MRT4577_146200C.1.pep
MAPKAEKKPAAKKPAEEEPAAAKAPAAKSSGKEGGDKKGKKKAKKSVETYKIYIFKVLKQVHPDIGISSKAMSIMNSFINDIFEKLAGEAAKLARYNKKPTITSREIQTSVRLVLPGELAKHAVSEGTKAVTKFTSS

SEQ ID NO: 235329 - protein, 149 aa, Zea mays
  Clone ID: MRT4577_146201C.1.pep
MAPKAEKKPAAKKPAEEEPAAAKAPAGKKPKAEKRLPAAKSSGKEGGDKKGKKKAKKSVETYKIYIFKVLKQVHPDIGISSKAMSIMNSFINDIFEKLAGEAAKLARYNKKPTITSREIQTSVRLVLPGELAKHAVSEGTKAVTKFTSS

SEQ ID NO: 235330 - protein, 149 aa, Zea mays; identical to SEQ ID NO: 235329
  Clone ID: MRT4577_146202C.1.pep

SEQ ID NO: 235331 - protein, 88 aa, Zea mays
  unsure (1)..(88): unsure at all Xaa locations
  Clone ID: MRT4577_146203C.1.pep
MDFYVVLXRPGYRFAPPQRCKSRFGIQPRVSKEDFIKWFQVKYKGVILNKAQGNPFYKHMFSSSNKVFPSTKVLSISDNIICQNGFPQ

SEQ ID NO: 235332 - protein, 149 aa, Zea mays
  Clone ID: MRT4577_146204C.1.pep
MAPKAEKKPAAKKPAEEEPAAAKAPAGKKPKAEKRLPAAKSSGKEGGDKKGKKKAKKSVETYKIYIFKVLKQVHPDIGISSKAMSIMNSFINDIFEKLAGEAAKLARYNKKPTITSREIQTSVRLVLPGELAKHAVSEGTKAVTKFTSN

SEQ ID NO: 235333 - protein, 88 aa, Zea mays
  Clone ID: MRT4577_146205C.1.pep
LEMVSCVIIYEFVCLTCLRKKWFFLLSQTHCSSSGVLGEFVWIEEGILFVLGFGKGGGVAPAVLGMSRGDGDILLQCAQGEPKRHGVT

SEQ ID NO: 235334 - protein, 149 aa, Zea mays; identical to SEQ ID NO: 235329
  Clone ID: MRT4577_146206C.1.pep

SEQ ID NO: 235335 - protein, 50 aa, Zea mays
  Clone ID: MRT4577_146207C.1.pep
VGYCHELRLLTTAADRTEAAYSTEAVNKTPGVWQPQPQIEQEEALAASAG

SEQ ID NO: 235336 - protein, 172 aa, Zea mays
  unsure (1)..(172): unsure at all Xaa locations
  Clone ID: MRT4577_146208C.1.pep
GGGGALRTQCGKRRDPGPGLLALLCAAXGPAAXQNCGCLXYFXSHFGGXGAYSFLCXDXCQXGPCRXGGGGGGAAAGXGGGXGGAXXANVVPXAFFXGVKNQAGSGCEGKNFYTRSAFLSAGNACPGFAXGGTGVGGMREIAAFFAHGPRETGHFWYLRXVTKSNAYWDASN

SEQ ID NO: 235337 - protein, 268 aa, Zea mays
  Clone ID: MRT4577_146209C.1.pep
MAWVMHRSSSDGGSSSGWSDAAAAVVAAAEERAGWEVRPSGMVVQARDDAAGSGGAPPRPPPPPEIKVRVKYGGARHEVSVSPIATFGQLKKLLAPRTGLQPADQQLSYRGRARGNAEYLDACGVKNKSKVALAEDPASVERRYIERQRNATAESANRAIGAVALEVDKLADQVTSIEKSISRGNKVPEVQITTLIELLMRHAVKLESIPAAGDSSSQKNIQAKRVQKCVETLDVLKVSNARLQAVVVTTKWETFDAAATTTKWELFD

SEQ ID NO: 235338 - protein, 52 aa, Zea mays
  Clone ID: MRT4577_14620C.1.pep
LKSVYRQRDTQLASRFESSNLLSTFEVTPIKNGCCVTPFAQLTPSGRDSVKH

SEQ ID NO: 235339 - protein, 61 aa, Zea mays
  Clone ID: MRT4577_146210C.1.pep
FGRKSGRLAPGLAPEAWWLATTSRWRTTGALHPGPTKPVLRSRVREHLKKPSRVTRKTLSG

SEQ ID NO: 235340 - protein, 107 aa, Zea mays
  Clone ID: MRT4577_146211C.1.pep
RERSSATSGADVSEDTRREALDNGMRRVTEGTPSSTDSGAKKVAIDPWYRWIPLGWERWRDRCQGIPCEYVQFFTNLFSGSMTTMMMIQEEKKLSLGKKKKLLRHLI

SEQ ID NO: 235341 - protein, 114 aa, Zea mays
  Clone ID: MRT4577_146212C.1.pep
YVWASAAAKNIRILQTNCSCRFRHQQREQQHPWRCFHLRRNLAQPRTATRAEGFPPRRETLAPRLGHRSQGFLQGPGPSRQPGSRPRQHDSEVGPAHSPAHGLGSMTLKLVPLT

SEQ ID NO: 235342 - protein, 31 aa, Zea mays
  Clone ID: MRT4577_146213C.1.pep
GKHVIGLQMGSNRGASQAGMTGYGRPRQIIS

SEQ ID NO: 235343 - protein, 69 aa, Zea mays
  Clone ID: MRT4577_146214C.1.pep
MSFANSKIAEFSSGYQQDCARAGERGRLKSHRGNSNTIVALAGNKADVLDTRQVSADFKHILYDLEDDE

SEQ ID NO: 235344 - protein, 68 aa, Zea mays
  Clone ID: MRT4577_146215C.1.pep
HRRKQVQKGLHVPQTVMPPWVWQLALRRDSILLNIRGIVMGTCSSKRVFPIKRITKGLFNQPAVDFGD

SEQ ID NO: 235345 - protein, 92 aa, Zea mays
  unsure (1)..(92): unsure at all Xaa locations
  Clone ID: MRT4577_146216C.1.pep
QKGSPFLLVLRFRGGPIIKVKPFLGKKFEFPFYPPDSFYRIKXRVXKKKGFPPVQQRFFFFGKQLFYYKPPKDSTLEGGFVPPFVLALRGGF

SEQ ID NO: 235346 - protein, 65 aa, Zea mays
  unsure (1)..(65): unsure at all Xaa locations
  Clone ID: MRT4577_146217C.1.pep
PIPYCYSAXLFHNRHIRHWATSYSRWGYTIQDSTTTSSVPTYPNKMNPNPRPITHSGNSIKNGLS

SEQ ID NO: 235347 - protein, 93 aa, Zea mays
  Clone ID: MRT4577_146218C.1.pep
MAPTRIRVALLSLALVGLLICHLATTASAGKNRIRILDSVDDSAGDNNSSDASAGDNSTDSESEGRVVYSDMKLADETGSAPAPAPAPGPTTS

SEQ ID NO: 235348 - protein, 98 aa, Zea mays
  unsure (1)..(98): unsure at all Xaa locations
  Clone ID: MRT4577_146219C.1.pep
AGVIRSHGSCGAADRWSSWGIICRQDHATASIARDSGRTMXWKAETREEHWRCTERILDWSETSGRALHGRSGRQATLLTTREARTXDDYEKTVKMPE

SEQ ID NO: 235349 - protein, 129 aa, Zea mays
  Clone ID: MRT4577_14621C.1.pep
LPSLLLCRISRPSPMVLMLETGGLKSRSRRSWFCWICCSSSPLTYDSAESEKVLHKRSHLGERVEPICSSILPPEPRLNELARSVMEPEPAMRGLCRRCWWWWRKWYQPQPPLERDVAEAEVLQLPCMG

SEQ ID NO: 235350 - protein, 68 aa, Zea mays
  Clone ID: MRT4577_146220C.1.pep
MEKISSCSGLLKEIIAKPQGSTCSWLRAELDRARAKRERAYHKFQRQEMQIQGGDEDGGAPNPRDASN

SEQ ID NO: 235351 - protein, 60 aa, Zea mays
  Clone ID: MRT4577_146221C.1.pep
VWGVIVCYVPIVKGTTHVVGFERNILLGVVLSPEVLGYFVGLVFELLLEMGVSLTLSMCV

SEQ ID NO: 235352 - protein, 73 aa, Zea mays
  unsure (1)..(73): unsure at all Xaa locations
  Clone ID: MRT4577_146222C.1.pep
SSTGNFLEGLVGVLGWALFFLVFLQLPFGGYRNVXFVFSFVPEWGPVVLVFFPPHGDPSFPLLAVNSLAWVGA

SEQ ID NO: 235353 - protein, 53 aa, Zea mays
  Clone ID: MRT4577_146223C.1.pep
LTLNKKTTNLKSKQYLLAQSGNNINSYIASPTYNSLFCALQSLVLAILWRHLT

SEQ ID NO: 235354 - protein, 588 aa, Zea mays
  Clone ID: MRT4577_146224C.1.pep
MGMLAAAVAPALLASPQASLVRRRLSGAWTLRLKPAAASHGVAALRVHNFLPKCYITNVEVDVSTVNKEETFDDHPSLAPGRNIPLVNLRGDILDSSPFPLHDRASCPSGFEELPVLSEGEQHTLASTPAHPAGLYALYASYLFGNLVEQLWNFAWPATLAILHPNLLPVAIVGFFTKLSVFVGAPIVGKLMDHFPRIPMYTALNAVQVGTQLISAATVIYALRNLSHASTTAVVLRPWFIALVAAGAIERLAGLALGVSMERDWVVLLAGTNRPVALAQANAVLNRLDLVCETVGASVFGLLLSKYHPVTCLKIASGLMICSFPVLVMLGQLINRVSCHALDSSRTATDESICADLLDVRRIVPNSLRAIKHGWNEYKQQTVLPASAATVFLNFNVALAPGAIMTALLMHRGTSPSIVGAFSGLCSIMGLVATFISSSLVKRVGILKAGAAGLIFQASLLSIALTVYWAGSISQTTPLLIFLASIALSRLGHMSYDVVGTQIVQTGVPASKANLIGGMEVSIASLAELVMLAMAIIANDVSHFGFLAILSVSSVAGAAWMFCRWLTNPTDEQRELFMVDPLYQVQAI

SEQ ID NO: 235355 - protein, 29 aa, Zea mays
  Clone ID: MRT4577_146225C.1.pep
PLATLMVLRYVYHTSVVISLDGSILYVGV

SEQ ID NO: 235356 - protein, 102 aa, Zea mays
  Clone ID: MRT4577_146226C.1.pep
LNRKLFYYFFSKILLGFDKSSPQFSSLKYNWRYLNLLFYFSSYLYFIIIIFYTDFGPYKSYPLNRNLVLEICMRVHNHVISKHMHKQNLSLMHTLLAAHRVD

SEQ ID NO: 235357 - protein, 87 aa, Zea mays
  Clone ID: MRT4577_146227C.1.pep
NAFYLRQGQMPEILLVGYKFLASAKPGNLGGGTPQREASHASGQRCFSNPRGGHTPVLSSGETFMPTLMGDAVGNFLSRTGGTHGLL

SEQ ID NO: 235358 - protein, 63 aa, Zea mays
  unsure (1)..(63): unsure at all Xaa locations
  Clone ID: MRT4577_146228C.1.pep
RXLWXPLVACQPCXMXVXMSXCXXVLPSFSDLEACXXSSYPQCGXXRXXSFSRXPLGQXPLXI

SEQ ID NO: 235359 - protein, 65 aa, Zea mays
  Clone ID: MRT4577_146229C.1.pep
MAEEGYKVTLNVYDLSNGLARQLSTSFLGKPIEAIWHTGVVVYGNEYYFGGGIQSSPAGTTPYGR

SEQ ID NO: 235360 - protein, 165 aa, Zea mays
  Clone ID: MRT4577_14622C.1.pep
PARHNKQGRAPTRAAATTTAHRQHPADATAGKSANAATFTITNNGGHSERPAATPEGGGTQQNPGGTGTANEPDGTSSDREGDRTSCSFNSNSGSSQIFFFCQAKPRTLTGKTPRTPAEKKKKGSQERHDSPGNDRHKRAKASTSSTGARKKRKDPGRPDAHHNP

SEQ ID NO: 235361 - protein, 35 aa, Zea mays
  Clone ID: MRT4577_146230C.1.pep
AEVVRQEVELGPHRTSEWILDLTDNLHAEQLSGPR

SEQ ID NO: 235362 - protein, 590 aa, Zea mays
  unsure (1)..(590): unsure at all Xaa locations
  Clone ID: MRT4577_146231C.1.pep
MAEAEPRRRWAVWALLLLLHPAALVLANTEGDALHSLRTNLNDPNNVLQSWDPTLVNPCTWFHVTCNNDNSVIRVDLGNAALSGTLVPQLGQLXNLQYLELYSNNISGIIPSGFGNLTNLVSLDLYLNNFTGPIPDSLGKLLKLRFLRLNNNSLSGSIPKSLTAITALQVLDLSNNNLSGEVPSTGSFSLFTPIXGSSSSSTGAIAGGVAAGTALLFAVPAISFAYWQRRKPQEHFFEVPAEEDPEVHLGQLKRFSLRELQVATDGFCNKNILGRGGFGKVYKGRLADGSLVAVKRLKEERTPGGELQFQTEVEMISMAVHRNLLRLRGFCMTPTERLLVYPYMANGSVASRLRDRAPAEPPLDWQTRRRIALGSARGLSYLHDHCDPKIIHRDVKAANILLDEDFEAVVGDFGLAKLMDYKDTHVTTAVRGTIGHIAPEYLSTGKSSEKTDVFGYGITLLELITGQRAFDLACLANDDDVMLLDWVKGLLKEKKLESLVDQDLEHNYVDVEVESLVQVALLCTQSNPMERPKMSEVVRMLEGDGLAERWEEWQKAEVVRQEVELGPHRTSEWILDLTDNLHAEQLSGPR

SEQ ID NO: 235363 - protein, 89 aa, Zea mays
  Clone ID: MRT4577_146232C.1.pep
MAAVRPLVTIFNADGSVSGTTNLPEVFSAPIRTDIVRFVHTNINKNHRQAYAVSPTAGEQTSAESWGTGRAVSRIPRVKGGGTHRSGQG

SEQ ID NO: 235364 - protein, 93 aa, Zea mays
  unsure (1)..(93): unsure at all Xaa locations
  Clone ID: MRT4577_146233C.1.pep
FLYSKRNXFGRXVQAGGREIMKATIHVKWWLESVALLKDAATRIVYEYQPHLQLPPDQPPGYKATYHLKKNADXRLVXAIDLKDNVDFHKVAN

SEQ ID NO: 235365 - protein, 118 aa, Zea mays
  unsure (1)..(118): unsure at all Xaa locations
  Clone ID: MRT4577_146235C.1.pep
SLHRAAEPCSLGLALDTAGLVYRDRIXXXXGAHAIYWQHELQGGCWRPMGXHVKNGMLHYKGPTAXQALTVASFVPLVGLLMVLAALTLTVSEGVLCTSTPVILMLIHVLLPDVLHIG

SEQ ID NO: 235366 - protein, 79 aa, Zea mays
  Clone ID: MRT4577_146236C.1.pep
CTRSVARNSARGTHEHLLPEVPATSLRRDDNPTCGYSNSVSGLDSCMRRLRAWWLYSRSNYEWHFDTVPERTSNSESAT

SEQ ID NO: 235367 - protein, 83 aa, Zea mays
  Clone ID: MRT4577_146237C.1.pep
SASAELGASALLNATMLLQIFLYPKGLVYIYFVIPVPAALMGAGLIGADLVRLMGHGDVSGSAPLGGALVAALVWARIRKGWI

SEQ ID NO: 235368 - protein, 104 aa, Zea mays
  Clone ID: MRT4577_146238C.1.pep
LHSLSCQRDMWSRHSRRCGTWSTARSAGPQTRVTRCLAPLTKRHRTTKSRSRRRHMNCHNTAYYSQVSTYKWTRLRSKDAYLYRSMLDFQQEYFLAWTDTDNNS

SEQ ID NO: 235369 - protein, 56 aa, Zea mays
  Clone ID: MRT4577_146239C.1.pep
KKTGGIESSMIAFDILILMGSADYTCDYAQRSFVPNFVVHQDETELMTSLMQKDFE

SEQ ID NO: 235370 - protein, 203 aa, Zea mays
  unsure (1)..(203): unsure at all Xaa locations
  Clone ID: MRT4577_14623C.1.pep
MAFSSPASARPQRSPDEVEDIILRKILLVSLTPLANPGPAVAYLELTAAELLSESRPLLALRDAAERLLIDRLSLPDPPAGSPTPFAFLVSAFRRAADEARKISTIRDAALRARLAASIAHLRALILSYARIVAGNPDTFPSQPGAQHPAAELLVFLLAEAADPLDPTPGPGAPPPPGFIDEFFSGADYDSIETAMXELYELL

SEQ ID NO: 235371 - protein, 90 aa, Zea mays
  Clone ID: MRT4577_146240C.1.pep
MPSSVSWGILLLAGLCCLVCVSLAEDPQGDAAQKTDTSHHDQDHPTFNKITPNLAEFAFSLYRQLAHQSNSTNIGFSPVSIATAFAMLSL

SEQ ID NO: 235372 - protein, 91 aa, Zea mays
  Clone ID: MRT4577_146241C.1.pep
GGLELAKVTFPGFRRVWIPSLSKGSAPLFSEGFLPPTPAKVVSGPGWRLLTPSKKSQPPVATVANIAPFGPHFCVAVPVIPFPIMAGNAPP

SEQ ID NO: 235373 - protein, 87 aa, Zea mays
  unsure (1)..(87): unsure at all Xaa locations
  Clone ID: MRT4577_146242C.1.pep
LLLRAVRCSSSGASLPPCIAPRQSCSTMSEASXEPPPHLDDGGRSSRLRSKSRHRRHPSTLPTPLAILTATVDEDLKXSWRCSGMTA

SEQ ID NO: 235374 - protein, 154 aa, Zea mays
  unsure (1)..(154): unsure at all Xaa locations
  Clone ID: MRT4577_146243C.1.pep
VKVVFFLGRKDPKKKGSIGGRRSPKGGGGTKGQEKKGPKKDNXGREPKAEDGEREQRGPKGGTTKSGPGPAGGXQPGQSGGGPEGGENMAKRGAGGKGGTAGNGRHLGRPGASREKPGGPKGGGNQGXGGGPKGGLQKGKRGGPPGQRTGQKTG

SEQ ID NO: 235375 - protein, 81 aa, Zea mays
  Clone ID: MRT4577_146244C.1.pep
MALQTDRPTGLNKLGNQAHLPSEMYEGGRAHNIGPSDLSYEGRLARRNYMTDTLLGPQKAASSGMNVPEMRTKLWANAPAG

SEQ ID NO: 235376 - protein, 97 aa, Zea mays
  Clone ID: MRT4577_146245C.1.pep
RSFFEELTDTAVVGDAQPGESNPWYNTIIQTRPYILSIFIIQARSYRALYKANPYWIVRTGGSNGFATTHAPPENFRLEQGLRWMSEHMKPAFNRFI

SEQ ID NO: 235377 - protein, 63 aa, Zea mays
  Clone ID: MRT4577_146246C.1.pep
RPPFFFFFYQTTSRPDNQTSIQLPYLWSFCPHMFKRKKRLPFFCKKVLNPDEPRRDGLALNGA

SEQ ID NO: 235378 - protein, 103 aa, Zea mays
  Clone ID: MRT4577_146247C.1.pep
LFGLYYRSSRSQYVLKPNEVVTCLWKSACPIITHFVWTCLPTALLDHTYSGSKQKPCGAMHINKNSNYSEDSNCGVNNTKLCIKNSSGRVIHNLLGHVWKQVE

SEQ ID NO: 235379 - protein, 62 aa, Zea mays
  Clone ID: MRT4577_146248C.1.pep
LWCKQYKIIHKKLILESNTYFFRACLEASEIEVAKIPQYLKMNSEVFYPLNLLHYPYSQTSP

SEQ ID NO: 235380 - protein, 164 aa, Zea mays
  Clone ID: MRT4577_146249C.1.pep
TERRQRGSIPTKLILAKQYNVSSGCPHARRWFPRTRAGYPCTSPCSRRSAADCRTTRSRSHRCSAESEEESELGLELHCNATDSRQEQGWGSRVGQGRGMARRWGMGVVARGDGGGAAATTTGKERERRRERRSGPGAGAVGVAGGWRDQGRERRERHGGEKVR

SEQ ID NO: 235381 - protein, 116 aa, Zea mays
  Clone ID: MRT4577_14624C.1.pep
NIDGITSRTELRPRSALSRFPQIDGVRAALAQIDGICGLQMRVRGSLSVEGEERRSDLVHASTVGREYLLRSHPLRSTAGAALAREEVVPRHGPPRRINQVPRRTPRGTNLEKKET

SEQ ID NO: 235382 - protein, 189 aa, Zea mays
  Clone ID: MRT4577_146250C.1.pep
LPSHYSITRGVSFKAVDCTEMEMAPELLYGQNVYVPTAVNSYTYGYAEVGSPMDWYNHQNSLGYDAQDVYFPAFQTDGTQCVYYATPDNGSVHPSYSPYPMDPGYIVDGSYLPQEYVPDADPTCQFQNHSMMPIVQLHNSLPMKQELGNGSMVPVKPLHTPQAPTNVLDSPMAAAKHSPKAKLSGNDCF

SEQ ID NO: 235383 - protein, 38 aa, Zea mays
  Clone ID: MRT4577_146251C.1.pep
RGKGSRNGNPTAVGLPSGDDCGDDPDEAVQARDHPGRG

SEQ ID NO: 235384 - protein, 168 aa, Zea mays
  Clone ID: MRT4577_146252C.1.pep
PSHYSITRCVSFKAVNCTEMEMTPELLYGQNVYVPTAVNSYTYGYAEVGSPMDWYNHQNSLGYDAQDVYFPAFQTDGTQCVYYATPDNGSVHPSYSPYPMDPGYIVDGSYLPQEYVPDTDPTCQVVPSSYYIPSVLPYAVDSVLGITATSLHPSSVAFIPSMPAYAVT

SEQ ID NO: 235385 - protein, 109 aa, Zea mays
  unsure (1)..(109): unsure at all Xaa locations
  Clone ID: MRT4577_146253C.1.pep
FYIVQDGGRVASEHRGLEPMAEDIGSSKQAPVSAFVCSIHYYNTTWRTRGVYAINTMTVQLTRSIFFSSWCWXXQADASAMAIDEPSNVKNEPESSTKLQGQAAAYHKP

SEQ ID NO: 235386 - protein, 76 aa, Zea mays
  Clone ID: MRT4577_146254C.1.pep
RLIATLFSHPTGQASRGGPHRILDMASSSCLASPCGATLCRPRRPRCRVACSAAHARDRTGPVSAQEPVLPIPLPL

SEQ ID NO: 235387 - protein, 59 aa, Zea mays
  Clone ID: MRT4577_146255C.1.pep
MGVPWLVRHNKGRKKEKKKKKKKKKKKKKKKKKKKKKKKKKKKKKKKKKKKKKKKKKKS

SEQ ID NO: 235388 - protein, 157 aa, Zea mays
  Clone ID: MRT4577_146256C.1.pep
KNTSVEEFLGEEGVKHEFSVPYTPQQNGVAERKNRTLIEVARTMLDEYKTRDNFWAEAVNTACHAINRLYLHKIYKKTAYELLIGNKPKVDYFRVFGCKCFILNKKVKSSKCAPRVDEGFLLGYASNAHGYCVFNKTTGLVEIAIDVTFDESNGSQG

SEQ ID NO: 235389 - protein, 70 aa, Zea mays
  Clone ID: MRT4577_146257C.1.pep
ELGVRDCVKFEVVHSAIKHDVGPLVYKIGDVLDDVIPSQIWDRRLRDVLNVVDSGFFRVDARCPSLCRPG

SEQ ID NO: 235390 - protein, 150 aa, Zea mays
  unsure (1)..(150): unsure at all Xaa locations
  Clone ID: MRT4577_146258C.1.pep
MGNCWGTRIKDGSTHPGASGMFSRGSGKDGSRLSACSSRASSASMPPSAKTECEILQSANVKVFSYNDLRLATRNFRPDSMLGEGGFGSVYKGWIDEHTLSACKPGTGIPVAVKRLNLEGLQGHREWXAEVNYLGQFCHTNLVKLIGYCL

SEQ ID NO: 235391 - protein, 126 aa, Zea mays
  unsure (1)..(126): unsure at all Xaa locations
  Clone ID: MRT4577_146259C.1.pep
GKRKFGKAAIYITENGIGDVSSKGTGLPLEEALSVSKRVDGVQXHISAFMESIDLGSKVQGCLAGYVLGNFEWFAGFTGRYGVVFVDRDNKCTGNMKEYAKWXNQLIAGWKPSKKILSPAEKSGPS

SEQ ID NO: 235392 - protein, 53 aa, Zea mays
  Clone ID: MRT4577_14625C.1.pep
LQIRAVFLQVRDVSSCESDADTFNLNLACHTTRQTYHQKLSTIISGATRLRGP

SEQ ID NO: 235393 - protein, 82 aa, Zea mays
  Clone ID: MRT4577_146260C.1.pep
HQCIRRGGPLRGRCGLPSIVVLVGPIAGRVDPRSSKKLFTKTAEVQTLKCNSMLLSLILLILNVRITQIKILSKKAIKRECQ

SEQ ID NO: 235394 - protein, 93 aa, Zea mays
  Clone ID: MRT4577_146261C.1.pep
PPPGSLTNHPCHVGRLFNNKLWGGAFPLGCVPQGGPVPLPGGFPFFPIPNNPPPRGYPFSPRCKSSITGPPPTKLAAFFFQPRFNIPPLGIQY

SEQ ID NO: 235395 - protein, 87 aa, Zea mays
  Clone ID: MRT4577_146262C.1.pep
KGGHVGPVYGGSGHEAPAGGRRSWRLRGQRRGDLVGVEVGAADLLHLHPCIRRLISDRRDGVGWLGWRRSSLSLNKPSLARTGGGRD

SEQ ID NO: 235396 - protein, 473 aa, Zea mays
  unsure (1)..(473): unsure at all Xaa locations
  Clone ID: MRT4577_146263C.1.pep
YLEAGREGFPNPNPNPNPPRSTAQNPLLLSPSRSKAAAPCTAEARPRPMPPYASPQKLGPSSXAPAGIRVENCYVFKSRLQEYAQRVGIPTPEYHTLKEGPSHEPVFKSTVFVNNTKYESLPGFFSRKAAEQSAAEVALMEIAMSAPVTEIRNMPAVQETGLCKNLLQEYAQKMNYAIPSYICTKQASGVAPFVCSVEXWWHXLYIGAAARTKKEAEIKAARTALLAIQSQSEGGANGAKKYIVVPGQRPDKEANKNPTETPIPLRVKKRGSRKKWNKRKFRRMADRIVDAGKDAEGLGTLLHDDYEEARRIGYELPTDTAMVQFNKEVVMTQPGEGDRIVQLEPPRDPAEVQYNKEARSVEQDPPRDPAEVQHNKEARSVEQDPPRDPAEVQHNKEARTVEQDPPSNTEVWKPDNKATTTEQESVSAFIALRSNGDSTDVEAAPGDTLMMQGQESEATMQEASHAGEQAQPN

SEQ ID NO: 235397 - protein, 49 aa, Zea mays
  Clone ID: MRT4577_146264C.1.pep
WKNLVINCLHQRFALTLSLTKHISIQVSTLMQPPKFKFNSIFSFSRTSL

SEQ ID NO: 235398 - protein, 62 aa, Zea mays
  Clone ID: MRT4577_146265C.1.pep
YPPVYFFSAPTETKCALTSAKSHALGSARPPLVLLFTCLSFFCRMLHFLSAKNSPLFFLHCM

SEQ ID NO: 235399 - protein, 77 aa, Zea mays
  Clone ID: MRT4577_146266C.1.pep
LFIPNCPVNTWGDMDRTAAQPRESPYLNTPGGLHFALIAGHNLNAVVPFMGESATPVSIGYLIPEAFLQRRLPPHQQ

SEQ ID NO: 235400 - protein, 60 aa, Zea mays
  unsure (1)..(60): unsure at all Xaa locations
  Clone ID: MRT4577_146267C.1.pep
IHTKILMGKTWASTVCINGLRWGGGELXIYQFKAPHLCSHQNLSLIPSFPSLELRYKQTC

SEQ ID NO: 235401 - protein, 107 aa, Zea mays
  unsure (1)..(107): unsure at all Xaa locations
  Clone ID: MRT4577_146268C.1.pep
EINLKQLRYMVSQQGELALRIDKNMEETVVYVXGVQGKLLXSYNSDWAKGWLIMXILFVLMVLLMVFMFIGGCRSVIMLFQTSWMINGKELVVVDALEAVEIILTLG

SEQ ID NO: 235402 - protein, 202 aa, Zea mays
  unsure (1)..(202): unsure at all Xaa locations
  Clone ID: MRT4577_146269C.1.pep
MAAAAGGEDDAAWERAISAATKSTSAPKTLTLNGAVKSSTGGLPSAVLLERFAASLEELSVAGARLSSLTSLPHLPALRRLSLPDNHLYLGNNRFAEVQELAPLAGVRVESLDLFXCPVTKVKGYREEVFALIPSLKYLDGADAEGNERLETDDDEDEEEDDEGEEGAEGEEEGDEDDGEEEDDEDGEGDEEEEGDEEVTGF

SEQ ID NO: 235403 - protein, 77 aa, Zea mays
  Clone ID: MRT4577_14626C.1.pep
GDGDSALVPSASNVIAECTCHIANLNHLVKLSLQRSNVHTYMRLRLRAIDHTARSLLLATRSAHFRDYLSLSISCAR

SEQ ID NO: 235404 - protein, 103 aa, Zea mays
  Clone ID: MRT4577_146270C.1.pep
LYLLVQDWISSLTRSATCMINSLTVKLLLVNWILGHALVTTGNFQTIFVIFSIEIRGYLRASPRFTDIFLITGADARVAVEKTPKLAKVSEEPSMTFFSSFLG

SEQ ID NO: 235405 - protein, 359 aa, Zea mays
  Clone ID: MRT4577_146271C.1.pep
MAPTPTHTAAAVALAAHDSSGHLAPLTITRRSTGDDDVAIKILYCGMCHSDLHSIKNEWHNATYPMVPGHEIAGVVTEVGKNVTSFKAGDRVGVGCMVNSCQSCGSCDEDFENSCRAVIFTYNSVDRDGTVTYGGYSSSVVVHERFVVRFPDAMPLDRGAPLLCAGITVYSPMKYHGLNVPGKHVGVMGLGGLGHVAVKFAKAFGAKVTVISTSPGKKQEALDRLGADAFVVSKDAEEMKAAASTMDGIINTVSANLTLAPYMGLLKPNGKMIMVGLPTKPLEIPPFDLIIGNKTLAGSCIGGMRDTQEMINVAAKHGVTADIELVAADYVNTAMERLAKADVRYRFVIDIGNTLKNSE

SEQ ID NO: 235406 - protein, 160 aa, Zea mays
  unsure (1)..(160): unsure at all Xaa locations
  Clone ID: MRT4577_146272C.1.pep
LYFFLSLFFFFPDTSSPVGSKSVVKTHIANPTGIQRAXIATGVLPLKPLGLQQPRALLQELPWVHLGAQNIGAQQLQQLVLANLAEYSQQHQFLPFNQLAALNSAAYLQQQLPFSQLAGAYPQEFVPFNQLEGLNCGDYLQXXQLLPFSQVXDVGPGAFL

SEQ ID NO: 235407 - protein, 95 aa, Zea mays
  Clone ID: MRT4577_146273C.1.pep
AAAGHLCLKVFRGPSGEKGRFHRLSLQTLWGGWPFSPFFFFNRPSYWLDLSPVSWFPRFTRPSKFVFLAGLQQHPHETGLEQPNTHAYSQKRTKA

SEQ ID NO: 235408 - protein, 116 aa, Zea mays
  Clone ID: MRT4577_146274C.1.pep
VGKPEKRYKFGEFSPGTNAPIHFSLGKKAFWPLFQKPSFFLHVGRAPTKGLTPQFVNKKKGTLHWCSLKRKNPKSFIKTNWGGGGAQNPNILNGQTPQASLKNYPKLCFFTQKRPP

SEQ ID NO: 235409 - protein, 44 aa, Zea mays
  Clone ID: MRT4577_146275C.1.pep
MQHGSGDYASSAPSGHYYQHQYAPPGSNPYPTATDATAPGAVAG

SEQ ID NO: 235410 - protein, 100 aa, Zea mays
  Clone ID: MRT4577_146276C.1.pep
FHFYINSLPHVRLRQIQRNPAGRVQHLSLLAVFDPRRAPHDAAPCRHLPYRGIALRSYHLRARLRRRRADRRPLSDSDGVRARNHRRVMRTEVSALAQAY

SEQ ID NO: 235411 - protein, 106 aa, Zea mays
  unsure (1)..(106): unsure at all Xaa locations
  Clone ID: MRT4577_146277C.1.pep
QLWGVLPITPRXAFNCGGYFQHGQLFSYRQIDAAYPQRFFSIKPLGSNNPPGWGPPLFFPFNQVAFCEAPCPLGFATNDTVIPARCSFRWPPLKKKTNAAHQTTML

SEQ ID NO: 235412 - protein, 1152 aa, Zea mays
  Clone ID: MRT4577_146278C.1.pep
MNPPNPPPGGVDPLVAAQMAVMQQMADTMADMRAQMQQERQEMRQEREDIRQELRQEREEIRQERRAQQQQLQQQLQQQQQVPLPPPPPPVPPRDKHREFMSHKPPTFASSPDPLDADHWLNWSCFGPEAGTLDNRRFMLRASQQEAEEGTIEKGTARRGSAADIIFAKAFRQMQEPEDKIHYATHPLCGFGGRQIVALGKITMPVTFGFVNNTRTEQIVFDIVDMEYPYNAIIGRGTLNAFEAILHPAYLCMKIPSEQGPIVIHGSQEAARRAEGNWTYSKAIHNIDGAEACEQYKFRREKAASADQPKPMLICEDIAEQKVLLGSQLSEEQEKTLIRFLFNNKDVFAWSANDLCRVNRDVIEHSLNVDPSFRPRKQRLRKMSDDKAEGARNKVKRLLSAGVIREIKYPEWLANTVMVKKANGYHQIWMKKEDEPKTSFITPSGTYCHLRMPEGLKNAGGSFSRMTAKETFANFRQAGLKLNPEKCVFGVKGKFLGCLVSTKGIEANPNKIEAILRMEPPSTKKGAQRLIGRLASLNRFISRSAERNLPFFEVLKSVEVFQWGPIQQKAFEEMKQYLIDLTTLTPPTPGAPLLLYVAASHSAVSAALVQEKLEGQVKKQAPIYFVSEVLSLSKKNYTELEKDIIRNREATGRIGKWAAELNEFCIDYVHRSSIQSQALADFIADWTPGAQEEEMNKDAEAWTVFCDGSWGTFGAGAAAVLVSPSKVRTCYAARLDFSCTNNIAEYEALLLGLRKLKTMGIRRAILKTDSQVISGHIDKSYKARDPKLEKYLDTVRRIEASFEGFSVKNIPRGENEYADLLAKSAAQGLPLPSDGNFLSDDEAYNRRLEARARPYVIIEGELYKRGVCSPLLKCLSRAEGPLPPAQVNLRYVVVAVEYFSKWIEAKPLATITSVTVQKFFWQNIVCRFGVPKAITVDNGTQFDSEVFKEFCDQIGTKIHFASVRHPESNGLVERANGIIMTGIMKSIFNQPRGKWPEELIKVVWSLNTTASRSTGFTPFKLLFGDEAITPEEAKVGSIRTITSAEGEDEADCSVEKDAIEGIRLQAVENINKYQAETIKWRDRKVRLKNIKPGHLVLRRVANPDKVGKLQLKWEGPFLVVSSSRPGSYRLKDMDGNDIPRSWNADELRRYYV

SEQ ID NO: 235413 - protein, 1240 aa, Zea mays
  unsure (1)..(1240): unsure at all Xaa locations
  Clone ID: MRT4577_146279C.1.pep
MASFNNQAGAASDPKLVLPITGGSSSEPANKKQKKEAQRRVQHVGVQGPFIKSRWSHIPITFSQEDLQLKDYPHNDAXGSAADIIFAKAFRQMQEPEDKIHDATHPXGGRQIVALGKITMSVTFGFINNTRTEQIVFDIVDMEYPYNAIIGRGTLNAFEAILHPAYLCMKIPSDQGPIAIHGSQEAARRAEGSWTDSKAIHNIDGAEACEQYKFRREKAASADQPKPMLLCEDVAEQKVLLGSQLSEAQEKTLLRFLFNNKDVFAWSANDLCGVNRDVIEHSLNVNPSFRPRKQRLRKMSDDKAEGARNEVKRLLSAGVIREVKYPEWLANTVMVKKANGKWRMCIDFTDLNKACPKDEFPLPRIDSLVDAAASSELMSLLDCYSGYHQIWMKKDDEPKTSFITPSGTYCYLRMPEGLKNAGGSFSRMTAKVLQSQIGRNVLTYVDDIIVKSTKQENHIADLQETFAKFRQAGLKLNPEKCVFGVKKGKFLGCLVSTKGIEANPSKIEAILRMEPPTTKKGAQRLTGRLASLNRFISRSAERNLPFFEVLKSAEVFQWGPIQQKAFEELKQYLIDLTTLTPPMPGAPLLLYVAASHSAVSAALVQEKLDGQVKKQVPVYFISEVLSISKKNYIELEKVLSSIQSQALADFIADWTPGAQEEETNKDAEAWTVFCDGSWGTFGAGAAAVLVSPSKVKTCYAAKLDFSCTNNIAEYEALLLGLRKLKAMGIRKAILKTDSQIVSGHVDKSCKAKDPKLEKYLDMVRRVEASFEGFSVKNIPRGQNEHADLLAKSAAQGLPLPSDVFFETIKAPSVELLERAVLNISPVYSEDWRTEIISYLQGKFLSDDEAYNRRIEARARPYVMIEGELYKHGVCAPLLKCLSRTEGIELMKEIHAGLCGSHIGSRPLLGKIFRQGFYWPKAASDAAELVQKCEGCQKCAREQKQPSSLTQLIQPIWPLQRWGLDLLGPLPPAQGNLRYVVVAVEYFSKWIEAKPLATITSATVQKFFWQNIVCRFGVPKAITVDNGTQFDSEAFRDFCDQIGTKIHFASVRHPESNGLVERANGIIMTGIMKSIFNQPRGKWPDQLTKVVWSHNTTTSRSTGFTPFKLLFGDEAITPEEAKTGSIRVIASAASVSEADYSVEKDALEGIRLQAVENINKYQAETIKWRDRKVRLKNIEPXDTWCFXRVANPETVGKLQLKWDGPFLVASSSRPGSYRLKDMDGNDIPRSWNADELRRYYV

SEQ ID NO: 235414 - protein, 91 aa, Zea mays
  unsure (1)..(91): unsure at all Xaa locations
  Clone ID: MRT4577_14627C.1.pep
TGRVVIDPNTRHHMSREKTETILXLLVKQFFVEKEVTSTLVMDSLYTSLKALEYRMKSKKCKTRLADLEELPVAMVHVDMDMFGLADDVIA

SEQ ID NO: 235415 - protein, 168 aa, Zea mays
  Clone ID: MRT4577_146280C.1.pep
IILALHARGSGFILRCASCLLQRLPAAFFFASAVRRGLGGGERPFPLHGRLPLVSPPRRRSYPRLHPHCDRARETASLWSDHLISVLMLTVGRRSQESLHHHFFSYLFISCNLIGDWSGLGRILGCGAVGLSWALPLKRHWALVAQSPMADVAVAADELLAGGGGGGT

SEQ ID NO: 235416 - protein, 1228 aa, Zea mays
  Clone ID: MRT4577_146281C.1.pep
MASFNDQAGAASDPKLVLPITGGSSSEPANKKQKKEAQRRVQHVGVQGPFIKSRWSHIPITFSQEDLQLKDYPHNDAMVISCVIKGFLVHNVLVDTGSAADIIFAKAFRQMQEPEDKIHDATHPLCGFGGRQIVALGKITMSVTFGFINNTRTEQVVFDIVDMEYPYNAIIGRGTLNAFEAILHPAYLCMKIPSDQGPIAIHGSQEAARKAEGNWTDSKAIHNIDGAEACEQYKFRREKAASADQPKPMLLCEDIAEQKVLLGSQLSEEQEKTLIRFLFNNKDVFAWSANDLCGVNRDVIEHSLNVDPSFRPRKQRLRKMSDDKAEGARNEVKRLLSAGVIREVKYPEWLANTVMVKKANGKWRMCIDFTDLNKACPKDEFPLPRIDSLVDAAASSELMSLLDCYSGYHQIWMKKEDEPKTSFITPSGTYCYLRMPEGLKNAGGSFSRMTAKVLQSQIGRNVLTYVDDIIVKSTKQENHIADLQETFASFRQAGLKLNPEKCVFGVKKGKFLGCLVSTKGIEANPTSHSAVSAALVQEKLDGQVKRQAPIYFVSEVLTLSKKNYTELEKVLYAVLMASRKLRHYFQAYNIIVPSSQPLKDIMRNREATGRIGKWAAELNEFCIEYVHRSSIQSQALADFIADWTPGAQEEETNKDNEAWTVFCDGSWGTFGAGAAAVLVSPSKVKICYAAKLDFNCTNNIAEYEALVLGLRKLKAMGIRRAILKTDSQVVSGHIDKSCKAKDPKLEKYLDMVRRVEASFEGFSVKNIPRGQNEHADLLAKSAAQGLPLPSDVFFETIKAPSVELLERAVLNISPVFSEDWRTEIISYLQGKFLSDDEAYNKRIEARARPYVMIEGELYKHGVCAPLLKCLSRTEGIELMKEIHAGLCGSHIGSRPLLGKIFRQGFYWPKAASDAAELVQKCEGCQKCARDQKQPSSLTQLIQPTWPLQRWGLDLLGPLPPAQGNLRYVVVAVEYFSKWIEAKPLATITSATVQKFFWQNIVCRFGVPKAITVDNGTQFDSEAFRDFCDQIGTKIHFASVRHPESNGLVERANGIIMTGIMKLIFNQPRGKWPDQLTKVVWSHNTTTSRSTGFTPFKLLFGDEAITPEEAKTGSIRIVASAESDSEAAYSIEKDALEGIRLQAVENINKYQAETVKWRDRKVRLKNIEPGHLVLRRVANPETVGKLQLKWDGPFLVASSSRPGSYRLKDMDGNDIPRSWNADELRRYYV

SEQ ID NO: 235417 - protein, 943 aa, Zea mays
  Clone ID: MRT4577_146282C.1.pep
MLLCEDIAEQKVLLGSQLSEEQEKTLIRFLFNNKDVFAWSANDLCGVNMDVIEHALNVDPSFRPRKQRLRKMSDDKDEGARNKVKRLLSAGVIREVKYPEWLANTVMVKKANGKWRMCINFTDLNKACLKDEFPLPRIDSLVDAAASSELMSLLDCYSGYHQIWMRKEDEPKTSFITPSGTYCYLRMPEGLKNAGGSFSRMTSKVLHSQIGRNVLTYVDDIIVKSTKQDNHIDDLQETFANFRQAGLKLNPEKCVFRVKKGKFLGCLVSTKGIEANPSKIEAILRMEPPSTKKGAQRLTGRLASLNRFISRSAERNLPFFEVLKSAEVFQWGPVQQKAFEELKQYLIDLTTLTPPTPGAPLLLYVAASHSAVSASLVQEKLEGQAKKQAPIYFVSEVLSLSKKNYTELEKVLYAVLMASRKLRHYFQAYNIIVPSSQPLKDIMRNREATGRIGKWAAEFNEFCIDYVHRSSIQSQALADFVVDWMPGAQEEEMNKDAEAWTVFCDGSWGTFGAGAAAVLVSPSKVKTCYAARLDFSCTNNIVEYEALLLGLRKLKAMGIRRAILKTDSQVISSHIDKSYKARDPKIEKYLDTVRRIEACFEGFSVKNIPRGENEYADLMAKSAAQGLPLPSEVFFETIKAPSVELLERAVLNISPVYSEDWRTEIISFLQGPLPPAQGNLRYVVVAVEYFSKWIEAKPLATITSFTIQKFFWQNIVCRFRVPKAITVDNGTQFDSEAFREFCDQIGTKIHFASVRHPESNGLVERANGIIMTGIMKSIFNQPRGKWPDELIKVVWSHNITMSRSTGFTPFKLLFGDDAITPEEAKAGSIRTVASAEGEDEADCSVEKDAIEGFRLQPVENINKYQAETIKWRDRKVKLKNTEPGHFVLRRVANPETVGKLQLKWEGPFLVVSSSRPGSYRLKDMDGNDIPRSWNADELRRYYV

SEQ ID NO: 235418 - protein, 1237 aa, Zea mays
  Clone ID: MRT4577_146283C.1.pep
MASSNIQAGAASAPKLLLPITGGSCSEPANKKQKKEAQRRVQHVGVQGPFIKSRWSHVPITFSQEDLQLKDFPHNDAMVISCVIKGFLVHNVLVDTGSAADIIFAKAFRQMQEPEDKIHDATHPLCGFGGRQIVALGKTTMPVTFGFINNTRTEQVVFDIVDMEYPYNAIIGRGTLNAFEAILHPAYLCMKIPSDQGPIAIHGSQEAARRAEGNWTDSKAIHNIDGAEACEQYMFRREKAASADQPKPMLLCEDIAEQKVLLGSQLSEEQERTLIRFLFNNKDVFAWSANDLCGVNRDVIEHSLNVDPSFRPTKQRLRKMSDDKAEGYHQIWMKKEDEPKTSFITPSGTYCYLRMPEGLKNAGGSFSRMTPKVLQSQIGRNVLTYVDDIIVKSTKQDNHIADLQETFASFRQAGLKLNPEKCVFGVKKGKFLGCLVSTKGIEANPSKIEAILRMEPPTTKKGAQRLTGRLASLNRFISRSAERNLPFFEVLKSAEVFQWGPGQQRAFEELKQYLIDLTTLTPPTPGAPLLLYVAASHSAVSAALVQEKLDGQVKKQAPVYFVSEVLSVSKKNYTELEKVLYAVLMASRKLRHYFQAYNIIVPSSQPLKDIMRNREATGRIGKWAAELNEFCIDYVHRSSIQSQALADFIADWTPGAQEEETNKDAEAWTVFCDGSWGTFGAGAAAVLVSPSKVKTCYAARLDFSCTNNIAEYEALLLGLRKLKAMGIRRAILKTDSQVVSGHVDKSCKARDPKLEKYLDTVRRIEASFEGFSVKNIPRGQNEYADLLAKSAAQGLPLPSDVFFETIKAPSVELLERAVLNISPVYGEDWRTEIISYLQGNFLSDDETYNRRIEARARPYVMIEGELYKHGVCAPLLKCLSRAEGIELMKEIHAGLCGSHIGSRPLLGKVFRQGFYWPKAASDAAELVQKREGCQKCARDQKQPSSLTQLIQPIWPLQRWGLDLLGPLPPAQGNLRYVVVAVEYFSKWIEAKPLATITSATIQKFFWQNIVCRFGVSKAITVDNGTQFDSEAFREFCDQIGTKIHFASVRHPESNGLVERANGIIMIGIMKLIFNQPRGKWPDQLIKVVWSHNTTISRSTGFTPFKLLFGDEAITPEEAKTGSIRVVASAESDPEADHSVEKDAIEGIRLQAVENINKYKAETIKWRDRKVRLKNIEPGHLVLRRVANPDTVGKLQLKWEGPFLVVSSSRPGSYRLKDMDDNDIPRSWNADELRRYYV

SEQ ID NO: 235419 - protein, 74 aa, Zea mays
  Clone ID: MRT4577_146284C.1.pep
VSAISVRLWLFQERPVTMMRSTRAADSRASTTVIAAGVSLLAVVEAREQPICEVEFDVDELDCGGRRSRRSTRR

SEQ ID NO: 235420 - protein, 94 aa, Zea mays
  unsure (1)..(94): unsure at all Xaa locations
  Clone ID: MRT4577_146285C.1.pep
GYSYKPTYCTYRVIIQXGAMLDPVRVTIPXSVMMHDVAITKNYTIVMDLPLVVRPKEMAMNGELIHKFDXSQRKDRVGILSRFXAKDDKLIPWF

SEQ ID NO: 235421 - protein, 1607 aa, Zea mays
  Clone ID: MRT4577_146286C.1.pep
MDPKGKGMVVNDNEKESIFNEPRDDKVNDSGSSQKKKDGKKKRRIRKVVYYDSDESSSSQKDDEYEEKKKTIWDTLKISHEGNDVTMLTKMELVEGELGRFAMIRGEEPTQTYNRLKILVNKIRSYGSTRWTDHDVVRLMLRSFTVLDPHLVNSIRENPRYIKMTPEEILGKFVSGRMMIKEARYVDEALNGPIYEPQTVALKATSSRETLPSKVAQVEAAELNEDEMALINKRFKTVLKGRKEHPNKSKTKGKRSCFKCVTRNKGRAESGKRRRPTKRRRARHTLERSGIRIAPRPTLTMKDSPPQPSTSRLSSPTSITHASWQRRRSNCNRITWNSTFAKAERLRTSPQHWRPPPVNSLPLFELMASFNDQAGAASDPKLVLPITGGSSSEPANKKQKKEAQRRVQHVGVQGPFIKSRWSHIPITFSQEDLQLKDYPHNDAMVISCVIKGFLVHNVLVDTGSAADIIFAKAFRQMQEPEDKIHDATHPLCGFGGRQIVALGKITMSVTFGFINNTRTEQVVFDIVDMEYPYNAIIGRGTLNAFEAILHPAYLCMKIPSDQGPIAIHGSQEAARRAEGNWTDSKAIHNIDGAEACEQYKFRREKAASADQPKPMLLCEDIAEQKVLLGSQLSEEQKKILIRFLFNNKDVFAWSANDLCGVNRDVIEHSLNVDPSFRSRKQRLRKMSDDKAEDLNKACPKDEFPLPRIDSLVDAAASSELMSLLDCYSGYHQIWMKKEDEPKTSFITPSGTYCYLRMPEGLKNAGGSFSRMTAKVLQSQIGRNVLTYVDDIIVKSTKQENHIADLQETFASFRQAGLKLNPEKCVFGVKKGKFLGCLVSTKGIEANPSKIEAILRMEPPTTKKGAQRLTGRLASLNRFISRSAERNLPFFEVLKSAEVFQWGPIQQKAFEELKQYLIDLTTLTPPMPGAPLLLYVAASHSAVSAALVQEKIDGQVKRQAPIYFVSEVLSLSKKNYTELEKVLYAVLMASRKLRHYFQAYNIIVPSSQPLKDIMRNREATGRIGKWAAELNEFCIEYVHRSSIQSQALADFIADWTPGAQEEETNKDNEAWTVFCDGSWGTFGAGAAAVPRKLKAMGIRRAILKTDSQVVSGHIDKSCKAKDPKLEKYLDMVRRVEASFEGFSVKNIPRGQNEHADLLAKSAAQGLPLPSDVFFETIKAPSVELLERAVLNISPVFSEDWRTEIISYLQGKFLSDDEAYNKRIEARARPYVIIEGELYKHGVCAPLLKCLSRAEGIELMKEIHAGLCGSHIGSRPLLGKIFRQGFYWPKAASDAAELVQKCEGCQKCAKDQKQPSSLTQLIQPTWPLQRWGLDLLGPLPPAQGNLRYVIVAVEYFSKWIEAKPLATVTSATVQKFFWQNIVCRFGVPKAITVDNGTQFDSEAFRDFCDQIGTKIHFASVRHPESNGLVERANGIIMTGIMKLIFNQPRGKWPDQLTKVVWGHNTTTSRSTGFTPFKLLFGDEAITPEEAKAGSIRILASAESDSEATYSIEKDALEGIRLQAVENINKYQAETVKWRDRKVRLKNIEPGHLVLRRVANPETVGKLQLKWDGPFLVASSSRPGSYRLKDMDGNNIPRSWNADELRRYYV

SEQ ID NO: 235422 - protein, 177 aa, Zea mays
  unsure (1)..(177): unsure at all Xaa locations
  Clone ID: MRT4577_146287C.1.pep
MASAAAETLASFPIASPSRSLLRPFPRRPAAARTGAPSIRISAVPPRGLGLALVHRRCPPAARANVERDGDGASGNGEPSSSSGDGDRDAASESGGDSTSTSTSTTSTAATPPPPSSERNENKWRRRLTKGGGVGRWLWEPIVQGREMGFLLLQLGFAIFALRMLRPXIALPGSEPR

SEQ ID NO: 235423 - protein, 2046 aa, Zea mays
  unsure (1)..(2046): unsure at all Xaa locations
  Clone ID: MRT4577_146288C.1.pep
MYDGFDSATHGHSDAWVRVADEFVALAFAGDARLARCLRIKCRNLVRLKKVELSYHVFKHGFMPNYLIWHEHGEVDHTIESDGDLDVDRMEEMLDDIRNEYPELQNNEAFPEDVREFYKLLEASEAKVHEGTNVSVLQVVTRLMAMKSKYTFSNNCYNDIVKLIIDIIPLNHNMQKDLYHCKKLVAGLGMNYQKIDACENNCMLFWKEHENTTHCIHCSKSRYAVVLDEDGNEVTTKVSMKQLWYMPITPWLKRLFLNQETAKQMRWHKEGDRQGQDPNVMVHPSDGEAWQALDRFDPEFARDPRSVRLGLSTDGFTPYSNNSTSYSCWPVFMMPYNLPPNKCMKEEVMFLALIVPGPKDPVTKINVFMEPLIEELKMLWQGVEAYDSHLKCRFTLRAAYLWSIHDLLAYDIFSGWCVHGILRCSICMGDSQAYRLEHGKKETFFDVHRRLLPYNHHFRKDTKSFRKGKRVRDGPPKRQTGENIMRQHRDLKPGVGGRFQGYGKEHNWTHISFIWELPYTKALLLPHNIDLMHQERNVAESIISMCFDFTGQTKDNMNARRDLAELCDRPHLELRKNPSGSESRPLAPYCLKRQEREEIFQWLKKLRFLDRYAANIKRAVNLDTSKLVGLKSHDYPILIERLVPVMFRGYFSPDVWKIFAELSYFYKQICAKEISKKLMMRSSRKKRFSAEAVCIRWPKVPLHEASHLRTSPQHWRPPPVNSLPLFELMASFNDQAGAASDPKLVLPITGGSSSEPANKKQKKEAQRRVQHVGVQGPFIKSRWSHIPITFSQEDLQLKDYPHNDAMVISCVIKGFLVHNVLVDTGSAADIIFAKAFRQMQEPEDKIHDATHPLCGFGGRQIVALGKITMSVTFGFINNTRTEQVVFDIVDMEYPYNAIIGRGTLNAFEAILHPAYLCMKIPSDQGPIAIHGSQEAARRAEGNWTDSKAIHNIDGAEACEQYKFRREKAASADQPKPMLLCEDIAEQKVLLGSQLSEEQEKTLIRFLFNNKDVFAWSANDLCGVNRDVIEHSLNVDPSFRPRKQRLRKMSDDKAEGARNEVKRLLSAGVIREVKYPEWLANTVMVKKANGKWRMCIDFTDLNKACPKDEFPLPRIDSLVDAAASSELMSLLDCYSGYHQIWMKREDEPKTSFITPSGTYCYLRMPEGLKNAGGSFSRMTAKVLQSQIGRNVLTYVDDIIVKSTKQENHIADLQETFASFRQAGLKLNPEKCVFGVKKGKFLGCLVSTKGIEANPSKIEAILRMEPPTTKKGAQRLTGRLASLNRFISRSAERNLPFFEVLKSAEVFQWGPIQQKAFEELKQYLIDLTALTPPMPGAPLLLYVAASHSAVSAALVQEKLDGQTRKQVPVYFVSEVLSISKKNYTELEKVLYAVLMASRKLRHYFQAYNIIVPSSQPLKDIMRNREATGRIGKWAAELNEFCIEYVHRSSIQSQALADFIADWTPGAQEEEANKDTEAWTVFCDGSWGTFGAGAAAVLVSPSKVKTCYAAKLDFSCTNNIAEYEALLLGLRKLKAMGIRRDVLKTDSQVVSGHIDKSCKVKDPKLEKYLDMVRRVEASFEGFSVKNIPRGQNEHADLLAKSAAQGLPLPSDVFFETIKAPSVELLERAVLSISPVYSEDWRTEIISYLQGKFLSDDEAYNRRIEARARPYVMIEGELYKHGVCAPLLKCLSRTEGIELMKEIHAGLCGSHIGSRPLLGKIFRQGFYWPKAASDAAELVQKCEGCQKCARDQKQPSSLTQLIQPIWPLQRWGLDLLGPLPPAQGNLRYVVVAVEYFSKWIEAKPLATITSATVQKFFWQNIVCRFGVPKAITVDNGTQFDSEAFRDFCDQIGTKIHFASVRHPESNGLVERANGIIMTGIMKSIFNQPRGKWPDQLTKVVWSHNTTTSRSTGFTPFKLLFGDEAITPEEAKTGSIRVVASAASGSEADYSVEKDALEGIRLQAVENINKYQAETIKWRDRKVRLKNIEPXDTWCFXRVANPETVGKLQLKWDGPFLVASSSRPGSYRLKDMDGNDIPRSWNADELRRYYV

SEQ ID NO: 235424 - protein, 264 aa, Zea mays
  Clone ID: MRT4577_146289C.1.pep
RPGSRPATATTTVASIQRFVAHEYDAGELGPSRFSVASVHRVGILDVRLLNIDRHAGNILVKDPPRGLQRAHGSSSTPARLGLVPIDHGLCLPEQLDDPYFEWLHWPQSSLPFSDDELAYVASLDPFKDAETLRAELPSLKEPAIRILTVCTIFLKRAAAAGLCLADIGDMMTREFTAQQDGLSTLEALCKQAHDSVLPHPSPDGDGDGVDESTSVSGGRKHVSFGDLSLAEWTSFLERFEQLLPAALEDKKCAVLGTSTSSSF

SEQ ID NO: 235425 - protein, 166 aa, Zea mays
  Clone ID: MRT4577_14628C.1.pep
GKAPQKRGKRKKRQAKKPGPGKWPRKGGPWAGTKAIKPPVKGPPRARHLPPGWETAGTGPRCGTRQNKTKRHGQRGMDTQGKKKGYPRGLAGKGGAKKWPRNRKRAQWTPKRAPQKEGKKGATGKKTPKTGPERGTSQSKNFFFFFFIFKIFFFFFFFFFFFFFFL

SEQ ID NO: 235426 - protein, 1285 aa, Zea mays
  Clone ID: MRT4577_146290C.1.pep
MTSFNDQAGATSDPKLVLPITGGSSSEPANKKQKKEAQRRVQHVGVQGPFIKSRWSHIPITFSQEDLQLKDYPHNDAMVISCVIKGFLVHNVLVDTGSAADIIFAKAFRQMQEPEDKIHDATHPLCGFGGRQIVALGKITMSVTFGFINNIRTEQIVFDIVDMEYPYNAIIGRGTLNAFEAILHPAYICMKIPSNQGPIAIHGSQEAARRAEGNWTDSKAIHNIDGAEACEQYKFRREKAASADQPKPMLLCEDIAEQKVLLGSQLSEEQEKTLIRFLFNNKDVFAWSANDLCGVNRDVIEHSLNVDPSFRARKQRLRKMSDDKTEGARNEVKRLLSAGVIREVKYPEWLANTVMVKKANGKWRMCIDFTDLNKACPKDEFPLPRIDSLVDAAASSELMSLLDCYSGYHQIWMKKEDEPKTSFITPSGTYCYLRMPEGLKNAGGSFSRMTAKETFASFRQAGLKLNPEKCVFGVKKGKFLGCLVSTKGIEANPSKIEAILRMEPPTTKKGAQRLTGRLASLNRFISRSAERNLPFFEVLKSAEVFQWGPIQQKAFEELKQYLIDLTTLTPPMPGAPLLLYVAASHSAVSAALVQEKLDGQVKRQAPIYFVSEVLSLSKKNYTELEKVLYAVLMASRKLRHYFQAYNIIVPSSQPLKDIMRNREATGRIGKWVAELNEFCIEYVHRTSIQSQALADFIADWTPGAQEEETNKDNEAWIVFCDGSWGTFGAGAAAVLVSPSKVKTCYAAKLDFSCTNNIAEYEALLLGLRKLKAMGIRRAILKTDSQVVSGHIDKSCKAKDPKLEKYLDMVRRVEASFEGFSVKNIPRGQNEHADLLAKSAAQGLPLPSDVFFETIKAPSVELLERAVLNISPVYSEDWRTEIISYLQGKFLSDDEAYNRRIEARARPYVMIEGELYKHGVCAPLLKCLSRTEGIELMKEIHAGLCGSHIGSRPLLGKNFRQGFYWPKAASDAAELVQKCEGCQKCARDQKQPSSLTQLIQPIWPLQRWSLDLLGPLPPAQGNLRYVVVAVEYFSKWIEARPLATITSATVQKFFWQNIVCRFGVPKAITVDNGTQFDSEAFRDFCDQIGTKIHFASVRHLESNGLVERANDIIMTGIMKLIFNQPRGKWPDQLTKVVWSHNTTTSRSTGFTPFKLLFGDEAITPEEAKTGSIRVMASAESGSEVAYSVEKDALEGIRLQAVENINKYQAETIKWRDRKVRLKNIEPGHLVLRRVANPETVGKLQLKWDGPFLVASSSRPGSYRLKDMDGNDIPRSWNADELRRYYV

SEQ ID NO: 235427 - protein, 869 aa, Zea mays
  Clone ID: MRT4577_146291C.1.pep
MTAKVLQSQIGRNVLTYVDDIIVKSTKQENHIADLQETFASFRQAGLKFNPEKCVFGVKKGKFLGCLVSTKGIEANPSKIEAILRMEPPTTKKGAQRLTGRLASLNRFISRSAERNLPFFEVLKSAEVFQWGPSQQKAFEELKQYLIDLTTLTPPTPGAPLLLYVAASHSAVSAALVQEKLVGQVKKQVPVYFVSEVLSISKKNYTELEKVLYAVLMASRKLRHYFQAYNIVVPSSQPLKDIMRNREATGRIGKWVAELNEFCIDYVHRSSIQSQVLADFIADWTPGAQDEETNKDAEVWTVFCDGSWGTFGAGAAAVLVSPSKVKTCYAARLDFSCTNNITEYEALLLGLQKLKAMGIRRAILKTDSQVVSGHIDKSCKAKDPKLEKYLDTVRRVEASFEGFSVKNIPRGQNEHADLLAKSAAQGLPLPSDVFFETIKAPSVELLERAVLNISPVYSEDWRTEIISYLQGKFLSDDETYNRRMEARARPYVMIEGELYKHGVCAPLLKCLSRTEGIELMKEIHAGLCGSHIGSRPLLGKVFRQGFYWPKAASDAAKLVQKCEGCQKCARDQKQPSSLTQLIQPIWPLQRWGLDLLGPLPPAQGNLRYVVVAVEYFSKWIEAKPLATITSATIQKFFWQNIVCRFGVPKAIIVDNGTQFDSEAFREFCDQIGTKIHFASVRHPESNGLVERANGIIVTGIMKLIFNQPRGKWPDQLIKVVWSHNTTTSRSTGFTPFKLLFGDEAITPEEAKTGSIRVVASTELDSEADHSVDKDAIEGIRLQAVENINKYQAETIKWRDRKVRLKNIEPGHLVLRRVANPDTVGKLQLKWEGPFLVASSSRPGSYRLKDMDGTDIPRSWNADELRRYYV

SEQ ID NO: 235428 - protein, 82 aa, Zea mays
  Clone ID: MRT4577_146292C.1.pep
HVEQSKTPPKPHAKQHNPLEELVASANQLRGKHALPRPKYLYEEEEKIGLCSAFIYASSRVVPAALYRSPHDEPSFASDICG

SEQ ID NO: 235429 - protein, 1114 aa, Zea mays
  Clone ID: MRT4577_146293C.1.pep
MASFDIQAGAASASKLVLPITGGSCSEPANKKQKKEAQRRVQHVGVQGPFIKSKWSHIPITFSQEDLQLKDYPHNDAMVISCVIKGFLVHNVLVDTGSAADIIFAKAFRQMQEPEDKILDATHPLCGFGGRQIVALGKISMSVAFGFINNTRTEQIVFDIVDMEYPYNAIIGRGTLNAFEAILHSAYLCMKIPSDQGPIAIHGSQEAARRAEGNWTDSKAIHNIDGTEACEQYKFRREKAASADQPKPMLLCEDIAEQKVLLGSQLSEEQEKTLIRFLFNNKDVFAWSANDLCGVNRDVIEHSLNVDPSFRPRKQRLRKMSDDKAEGARNEVKRLLSAGVIREVKYPEWLANTVMVKKANGYHQIWMKKEDEPKTIFLTPSGTYCYLRMPEGLKNAGGSFSRMTAKAGLKLNPEKYVFGVKKGKFLGCLVSTKGIEANPSKIEAILRMEPPSTKKGAQRLTGRLASLNRFISRSAERNLPFFEVLKSAEVFQWGPIQQKAFEELKQYLIDLTTLTPPTPGAPLLLYVAASHSAVSAALVPEKLEGQVKRQAPIYFVSKVLSLSKKNYTELEKVLYAVLMASRKLRHYFQAYNIIVPCSQPLKDIMRNREATGRIGKWAAELNEFCIDYVHRSSIQSQALADFIADWTPGAQEEETNKDAEAWTVFCDGCTNNIAEYEALLLGLRKLKAMGIRRAILKTDSQVISGHIDKSYKARDPKLEKYLDTVRRIEASFEGFSVKNIPRGENEYADLLAKSAAQGLPIPSEVFFETIKAPSVELLERAILNISPVYSEDWRTEIISFLQGNFLTDDEAYNRRIEARARPYVIIEGELYKRGVCSPLLKCLSRSEGIELMKDIHAVEYFSKWIEAKPLATITSFTIQKFFWQNIVCRFGVPKAITVDNGTQFDSEAFREFCDQIGTKIHFASVRHPESNGLVERANGIIMTGIMKSIFNQPRGKWPDELIKVVWSHNTTMSRSTGFTPFKLLFGDEAITPEESKTGSIRTVASAEGENEADCSVEKDASEGIRLQALENINKYQAETIKWRDRKVKLKNIEPGHLVLRRVANPETVGKLQLKWEGPFLVVSSSRPGSYRLKDMDGNDIPRSWNADELRRYYV

SEQ ID NO: 235430 - protein, 89 aa, Zea mays
  Clone ID: MRT4577_146294C.1.pep
PQKFFPLNQRGALNSPGYLQQQKILPFSQEGGVSPPPFLKQPQVLPFYKPAGPKGGTLLKLQQMVPFNQLVLKNPKGFYQQPNKGGAPL

SEQ ID NO: 235431 - protein, 110 aa, Zea mays
  Clone ID: MRT4577_146295C.1.pep
MAKNRNKKNRAKSGGLAAMDTSEGGPATSTAADVPQPMDTSEGKQPSSATAALGSINKKIKKGVHMKRSQNARKMKAIARAVSKNEKSEEKIQKAKGKKTRIQSAKSLYD

SEQ ID NO: 235432 - protein, 105 aa, Zea mays
  unsure (1)..(105): unsure at all Xaa locations
  Clone ID: MRT4577_146296C.1.pep
RDDTTPPPPTQRAKPRPPPQGPQARHKRPGQRHRQGASAEPRXPAGRPSQRQRVGYDPQNGHRPVKAAQLAMRHHCRIGQGVRVVVNAAKLIKGMVCLLCRPPVR

SEQ ID NO: 235433 - protein, 103 aa, Zea mays
  unsure (1)..(103): unsure at all Xaa locations
  Clone ID: MRT4577_146297C.1.pep
MPPHKRSLVGEPEPRRVVRELVVLHQLHIFIFFLAVFHVSYSAITMALGRAKIRAWKEWEKEAAGQDYEFYNDPTRFRFTLETXFVRRYMNVLNLFLEFLAVD

SEQ ID NO: 235434 - protein, 241 aa, Zea mays
  unsure (1)..(241): unsure at all Xaa locations
  Clone ID: MRT4577_146298C.1.pep
MAAAAAPARSTKEVLPPALGAVSEPPPLFDGTTRLYICYICPFAQRAWVTRNCKGLQEEIKLVAINLEDKPAWYKEKVYPQGTVPSLEHDGKVTGESLDLIKYIDSNFHGPALLPQDPAKRQFADELIAYADAFTKALYSPLISQVAMSDEAVAALDKIEAALSKFSDGPFFLGQFSLVDIAYVTIXLERVQIYYSHLRNSRSPKARANLERNTGEKNLIRSXSKTKNVPLALLDAAKRHL

SEQ ID NO: 235435 - protein, 212 aa, Zea mays
  unsure (1)..(212): unsure at all Xaa locations
  Clone ID: MRT4577_146299C.1.pep
GPFPNPTESPAIPLGSPPCLLLWERRTGIREQGRRIRVNESLDHNEAGSQAPEGPILCXNXNCGLLRQSGYHEVCYKCHREMMTKLDQANLAASSIDRIGNGRHADREPIDAGRSTVGAVVHEEEQTLNVQEPADAAGPIKGAAAISKGGKAGPSRCSACRKRAGLTRLNXRCGRRVWATDRYLVRQDCEFDYRTAARDAIAKGNTGDGGRQ

SEQ ID NO: 235436 - protein, 49 aa, Zea mays
  Clone ID: MRT4577_14629C.1.pep
KDVNRFPYKTSNVHIYSGETSQLTSWTPTADNIQHKTVHLLPPHIASGL

SEQ ID NO: 235437 - protein, 230 aa, Zea mays
  Clone ID: MRT4577_1462C.1.pep
SANGVICVIKLYERCVIAWGGGSEFWIRYVQCMEDKRSLDLANNALARATHVFVKKQPEIHLFSARFKELNGDIFGARAEYQHLYSDLCPGFLEAIVKHSNMEHRLGDKELSCSVYEKVIAAEKGKEQSQLLPTLLIQYSRFLFRTRGDLEKAREILTVLHEQLNAVIHLESIFPCEKRIDFLDSLVEKFVTPESSQGEVASLVDKEEISSIFLEFLDLFGAVGISDILE

SEQ ID NO: 235438 - protein, 77 aa, Zea mays
  unsure (1)..(77): unsure at all Xaa locations
  Clone ID: MRT4577_146300C.1.pep
FFIGWHQQTQGGGGGLAFFGPQIIYAASYCDGDICPDILISLVMHGFLRSXRPTGSPRPPRCFPCFRAPSPPLRPPS

SEQ ID NO: 235439 - protein, 67 aa, Zea mays
  unsure (1)..(67): unsure at all Xaa locations
  Clone ID: MRT4577_146301C.1.pep
IDPGRLILPWTGFVLRSFHSMHLRGSVFKFGLVKEKDLFVSAVGLWGFFSRWSVESTLFVRYVXKKK

SEQ ID NO: 235440 - protein, 50 aa, Zea mays
  Clone ID: MRT4577_146302C.1.pep
TMVMPRNYKNTLLPNRPLRSKVFPFHVPITNLIISAPFKYESQNQTMRQL

SEQ ID NO: 235441 - protein, 72 aa, Zea mays
  Clone ID: MRT4577_146303C.1.pep
MLDDHPFAQDGISSPIAAHIFDFCDNGSGGDLFTAVNVASDLFTAPSEDASSSSVVTTPFVPCGHGDYMPLG

SEQ ID NO: 235442 - protein, 64 aa, Zea mays
  Clone ID: MRT4577_146304C.1.pep
KLLKYSVIMYASFQDCVSPSKHSDPLHASSSFTTVVMPSIRVFVLRPLLPVRRGVVPGNSENRV

SEQ ID NO: 235443 - protein, 123 aa, Zea mays
  Clone ID: MRT4577_146305C.1.pep
AKRREAGTPERTGRKRRALGAAEPEALASEPSHSEPIRAPVGKRGKRDEGSGTTDDWLPAAFRIATARNVHTHKKRHLITCHKHNMWCGRQELVDFSKWIKEGLSVCHEAVVENTRNDISFFF

SEQ ID NO: 235444 - protein, 68 aa, Zea mays
  Clone ID: MRT4577_146306C.1.pep
MAKLALALLLLLAVAASASASSGSHLDLDLGFLSSGERRRECRGTVAECLAEESDEEGLDLAGSHRRG

SEQ ID NO: 235445 - protein, 120 aa, Zea mays
  Clone ID: MRT4577_146307C.1.pep
MAKLALALALLLLLAVAASASASSGSHLDLDLGFLSSGDRRRECRGTVAECLAEESDEEGLDLAGSHRRALYGGGYISYGALRRDNVPCSRRGASYYNCRPGGQANPYHRGCSRITRCRG

SEQ ID NO: 235446 - protein, 472 aa, Zea mays
  unsure (1)..(472): unsure at all Xaa locations
  Clone ID: MRT4577_146308C.1.pep
LGGNILGGSIPSSLGQLVKLGTTLNLSSNGLVGDIPSXSALNVSYNQFSGPVPDNLLKFLSSTTNSFDGNSGLCISCSTSDSSCMGANVLKPCGGSKKRAVHGRFKIVLIVLGSLFVGAVLVLILWCILLKSRDQKKNSEEAVSHMFEGSSSKLNEVIEATECFDDKYIIGKGGHGTVYKATLRSGDVYAIKKLVISAHKGSYKSMVGELKTLGKIKHRNLIKLKESWLRNDNGFILYDFMEKGSLHDVLHVVQPAPALDWCVRYDIALGTAHGLAYLHDDCRPAIIHRDIKPSNILLDKDMVPHISDFGIAKLLEQPSTAPQTTGVVGTIGYMAPELAFSTKSSMESDVYSYGVVLLELLTRRAAVDPSFPDGTDIVSWASSALNGTDKIEAVCDPALMEEVFGTVEMEEVSKVLSVALRCAAREASQRPSMTAVVKELTDARPATGGGRSLSKSKQGKPGSQSNSSAYRQ

SEQ ID NO: 235447 - protein, 63 aa, Zea mays
  Clone ID: MRT4577_146309C.1.pep
KSRRVRRQVNTQRKLPQTENEQKAPPGDGLEQHSLLQSTPSRLFFPPSGLASALHKIICVLFV

SEQ ID NO: 235448 - protein, 81 aa, Zea mays
  unsure (1)..(81): unsure at all Xaa locations
  Clone ID: MRT4577_14630C.1.pep
ACVAESPEDSRVTNVVSALEPXASRRWLLPAXCEXSIDLNPLHDFIRNYTVLLTDKNKADFISKNITHYLVQIIKLTLEPL

SEQ ID NO: 235449 - protein, 56 aa, Zea mays
  Clone ID: MRT4577_146310C.1.pep
LAYQLPKNQPRYYIYIKIYIVGVNTIQNRLQQNLTALPTTKADNSTTTSDKITSTY

SEQ ID NO: 235450 - protein, 59 aa, Zea mays
  Clone ID: MRT4577_146311C.1.pep
KKIKKKKKKKKKKKKKKKKKKKKKKKKKKKKKKKKKKRKKNGGAVLRGPNLKSTGRAPT

SEQ ID NO: 235451 - protein, 124 aa, Zea mays
  Clone ID: MRT4577_146312C.1.pep
PICYSGREKESTHLNPPAAMALRRITPRRRPVLPVPRAFSSSPPFSSPPPPANDPDPDAAQPPFFSSPPNFGAPRNPESLVFQDIKRSPPVVFHVFVYVPESDYPVPSRPCSRGFFFWTAYWRH

SEQ ID NO: 235452 - protein, 244 aa, Zea mays
  Clone ID: MRT4577_146313C.1.pep
GRVPSTDALKQLLRDNPKIKAVILVTPNNPTGALYPPALIHDFARTCRDAKIALLLDETYRDFVLAEDEARPEIGSSSGAKGTALAEGSPSTSLPLGRPHEVFQESMDGDSAWNWRQTVIQLFSFSKSYAIPGHRLGGVVAHLAFLQQVTPSATGGEDVAFGPMAKALDNLQIGPPRTDTQRAVAWAMADEKQREWRLSTARELRDRRVAFKQGLSRKVPRRLDSDGNLLSTSSSSSSSSDVQS

SEQ ID NO: 235453 - protein, 242 aa, Zea mays
  Clone ID: MRT4577_146314C.1.pep
PQDPIQSLASACAAPSAVSTPTVAATTTLAPSPSPLSRLGSANAYMNPRVAAAAGGGGDDARKVLDVMLKPARRNPVLVGDAGPDAVLKEAVRRIPMAGSPSLAGAKVLPLESDLAKLAGDKAALAARIGDLGPVIQRLLVDHGAVVLDLGDLKWLVDGPAAAASEGGKAVVSEMARLLRQFGSGKVWAVGTAACATYLRCKVYHPTMEAEWDLQAVSTARSAPLAGAALRPGSTGILGTQG

SEQ ID NO: 235454 - protein, 1308 aa, Zea mays
  unsure (1)..(1308): unsure at all Xaa locations
  Clone ID: MRT4577_146315C.1.pep
MPIKISLRRFKLRNFTLINLRPRFIILKGIMFHGRRTLKFNTLCCLVLKAEHLRTSSQHWRPPPVNSLPLFELMASFNDQAGAASDPKLVLPITGGSSSEPANKKQKKEAQRRVQHVGVQGPFIKSRWSHIPITFSQEDLQLKDYPHNDAMVISCVIKGFLVHNVLVDTGSAADMIFAKAFRQMQEPEDKIHDATHPLCGFGGRQIVALGKITMSVTFGFINNTRTEQVVFDIVDMEYPYNAIIGRGTLNAFEAILHPAYLCMKIPSDQGPIAIHGSQEAARRAEGNWTDSKAIHNIDGAEACEQYKFRRDKAASADQPKPMLLCEDIAEQKVLLGSQLSEEQERTLIRFLFNNKDVFAWSANDLCGVNRDVIEHSLNVDPSFRARKQRLRKMSDDKAEGARNEVKRLLSAGVIREVKYPEWLANTVMVKKANGKWRMCIDFTDLNKACPKDEFPLPRIDSLVDAAASSELMSLLDCYSGYHQIWMKKEDEPKTSFITPSGTYCYLRMPEGLKNAGGSFSRMTAKVLQSQIGRNVLTYVDDIIVKSTKRENHIADLQETFANFRQAGLKLNPEKCVFGVKKGKFLGCLVSTKGIEANPSKIEAILRMEPPTTKKGAQRLTGRLASLNRFISRSAERNLPFFEVLKSAEVFQWGPIQQKAFEDLKQYLIDLTALTPPVSGAPLLLYVAASHSAVSAALVQEKLDGQARKQVPVYFVSEVLSISKKNYTELEKVLYAVLMASRKLRHYFQAYNIIVPSSQPLKDIMRNREATGRIGKWAAELNEFCIEYVHRSSIQSQALADFIADWTPGAQEEEANKDTEAWTVFCDGSWGTFGAGAAAVLVSPSKVKTCYAVKLDFGCTNNVAEYEALLLGLRKLKAMGIRRAVLKTDSQVVSGHIDKSCKAKDPKLEKYLDMVRRVEASFEGFSVKNIPRGQNEHADLLAKSAAQGLPLPSDVFFETIKAPSVELLERAVLNISPVYSEDWRTEIISYLQGKFLSDDEAYNRRIEARARPYVMIEGELYKHGVCAPLLKCLSRTEGIELMKEIHAGLCGSHIGSRPLLGKIFRQGFYWPKAASDAAELVQKCEGCQKCAREQKQPSSLTQLIQPVWPLQRWGLDLLVRHPESNGLVERANGIIMTGIMKLIFNQPRGKWPDQLIKVVWSHNTTTSRSTGFTPFKLLFGDEAITPEEAKTGSIRVVASAASDSEAAYSVEKDALEGIRLQAVENINKYQAETIKWRDRKVQLKNIEPXDTWCFXRVANPETVGKLQLKWDGPFLVASSSRPGSYRLKDMDGNDIPRSWNADELRRYYV

SEQ ID NO: 235455 - protein, 755 aa, Zea mays
  Clone ID: MRT4577_146316C.1.pep
MFQRTKGFDASFNIQAGAASAPKLVLSITGGSCSEPANKKQKKETQRRVQHVGVQGPFIKSRWSHISITFSQEDLQLKNYPHNDVMVISCVIKGFLVHNVLVDTGNAADIIFTKAFRQMQEPEDKIHDATHPLCGFGGRQIVALGKITMPVTFGFINNTRTEEVVFDIVDMEYPYNAIIGRGTLNAFEAILHPAYLCMKIPSEQGHIAIHGSQEAARRAEGNWTDSKAIHNIDGAEACEQYKFRREKSASADQPKPMLLCEDIAEQKVLLGSQLSEEQEKTLIRFLFNNKDVFAWSANDLCGVNRDVIEHSLNVDLSFRPRKQKLRKMSDDKAEGARNEVKRLLSAGVIREVKYPEWLANTVMVKKANGKWRMCIDFTDLNKACPKDEFPLPRIDSLVDAAASSELMSMLDCYSGYHQIWMKKEDEPKTSFITPSGTYCYLRMPEGLKNAGGSFSRMTAKVLHSQIGRNVLTYVDDIIVKSTKQDNHIADLQETFANFRQAGLKLNPEKCVFGVKKGKFLGCLVSTKGIEANPSKIEAILRMEPPSTKKGAQRLTGRLASLNIFISRSVERNLPFFEVLKSAEVFQWGPVQQRAFEELKQYLIDLTTLTPPTPGAPLLLYVAASHSAVSAALVQEKLEGQVKKQSPIYFVSEVLSLSKENYTELEKVLYAVLMASRKLRHYFQAYNIIVPSSQPLKDIMRNREATGRIGKWAAELNEFCIDYVHRSSIQSQVLADFIADWTPGAQEEEMNKDAEA

SEQ ID NO: 235456 - protein, 218 aa, Zea mays
  unsure (1)..(218): unsure at all Xaa locations
  Clone ID: MRT4577_146317C.1.pep
FEENSAAQAFLPAGACARHPARSDLEGTSTACARHICGNAAELQPMLEVAPTAEPSPXPENHAPTPXTHGCSXRIYQAPSVLLLEDKYMVDNIHREAPVHXYRYQVHRRXAPIRTRPEPRSYAHTLPHXDXHAPAVLFGXPHXIYDPRCMRLLDTRPELFSSLFRTCSSHNIEYSSTDNAWPLILSYNAXDTYERLVHPPTRTYVXSPTPFYYPPAET

SEQ ID NO: 235457 - protein, 210 aa, Zea mays
  Clone ID: MRT4577_146318C.1.pep
MLSSNLDEEGGMVISCVIKGFLVHNVLVDTGSAADIIFAKAFRQMQEPEDKIHDATHPLCGFGGRQIIALDKITMSVTFGFINNTRTEQVVFDIVDMEYPYNAIIGRGTLNAFEAILHPAYLCIYTPSDQRIIAIHGSQEAARRAEGNLTDSKAIHNIDGAKACEQYKFRREKAASADQPKPMLLCEDIAEQKVLLGSQLSEEQEKTLIR

SEQ ID NO: 235458 - protein, 120 aa, Zea mays
  Clone ID: MRT4577_146319C.1.pep
VEMPVGGDPTPAQREAPEAGSPLGGGGADLGPPCFVPPYKRPAVQGPCPGWSPFSPGGGAISVCRGPPAGAVFGVRPSLPVFFFFVRNTPKATINTIYERQQKKRKKKIQKTKENTKTEP

SEQ ID NO: 235459 - protein, 111 aa, Zea mays
  unsure (1)..(111): unsure at all Xaa locations
  Clone ID: MRT4577_14631C.1.pep
SRPSLGGSRPTCSTSLLNXXHFXVTYDVXETRSADLXLVANKXHVAHFXAPQDLPHMNKNVVSVIDISGSMIGQKVKQTKEAXLKILAYMQPWDSFDXVLFXTRVQSWQGS

SEQ ID NO: 235460 - protein, 362 aa, Zea mays
  Clone ID: MRT4577_146320C.1.pep
MASFKNQAGTASAPKLILPITGGSCSEPANKKQKKEAQRRVQHVGVQGPFIKSRWSHIPITFSQEDLQLKDYPHNDAMVISCEIKGFLVHNVLVDTGSAADIIFAKAFRQMQEPEDKIHDATHPLCGFGGRQIVALSKITMPVTFRFINNTRTEQVVFDIVDMEYPYNAIIGRGTLNAFEAILHPAYLCMKIPSDQGPIAIHGSQEAARRAEGNWTDSKAIHNIDGAEVNNTTNDLYGVNRDVIEHSLNVDPSFRPRKQRLRKMSDDKIEGARNEVKRLLSAGVIREASSHAPVPFYDGPTFLEGLHGCVVQIQILQIQMCCAAKRQQIVWYTMFANVIDSSVIPKNVYNENIVDLLILCAI

SEQ ID NO: 235461 - protein, 1296 aa, Zea mays
  Clone ID: MRT4577_146321C.1.pep
MASFNDQAGAASAPKLLLPITGGSCSEPANKKQKKEAQRRVQHVGVQGPFIKSRWYHIPITFSQEDLQLKDYPHNDAMVISCVIKGFLVHNVLVDTGSAADIIFAKAFRQMQEPEDKINDATHPLCGFGGRQIVALGKITMPVTFGFINNTRTEQVVFDIVDMEYPYNAIIGRGTLNAFEAILHPAYLCMKIPSDQGPIAIHGSQEAARRAEGNWTDSKVIHNIDGAEACEQYKFRREKAASADQPKPMLLCEDIAEQKVLLGSQLSEEQEKTLIRFLFNNKDVFAWSANDLCGVNRDVIEHSLNVDPSFRPRNQRLRKMSDDKAEGARNEVKRLLSAGVIREVKYPEWLANTVMVKKANGKWRMCIDFTDLNKACPKDEFPLPRIDSLVDAVASSELMSLLDCYSGYHQIWMKKEDEPKTSFITPSGTYCYLRMPEGLKNAGGSFSRMTAKVLQSQIGRNVLTYVDDIIVKSTKQGNHIADLQETFASFRQAGLKLNPEKCVFGVKKGKFLGCLVSTKGIEANPSKIEAILRMEPPTTKKGAQRLTGRLASLNRFISRSVERNLPFFEVLKLAEVFQWGPSQQKAFEDLKQYLIDLTTLTPPALGAPLLLYVAASHSAVSAALVQEKLNGQVKKQVPVYFVSEVLSISKKNYTELEKVLYAVLMASRKLRHYFQAYNIIVPSSQPLKDIMRNREATGRIGKWAAELNEFCIDYVHRSSIQSQALADFIADWMPGAQDEETNKDAEVWTVFCDGSWGTFGAGAAAVLVSPSKVKTCYAARLDFSCTNNITEYEALLLGLRKLKAMGIRRAILKTDSQVVSGHIDKSCKAKDPKLERYLDMVRRVEASFEGFSVKNIPRGQNEHADLLAKSAAQGLPLPSDVFFETIKAPSVELLERAVLNISPVYSEDWRTEIISYLQGKFLSDDEAYNRRIEARARPYVMIEGELYKHGVCAPLLKCLSRTEVTWKSFRQGFYWPKAASDAAELVQKCEGCQKCARDQKQPSSLTQLIQPIWPLQRWGLDLLGPLPPAQGNLRYVVVAVEYFSKWIEAKPLATITSATIQKFFWQNIVCRFGVPKAITVDNRTQFDSEAFRDFCDQIGTKIHFASVRHPESNGLVERANGIIMTGIMKLIFNQPRGKWPDQLTKVVWSHNTTTSRSTGFTPFKLLFGDEAITPEEAKTGSIRVVASAESGSEDAYSVEKDALEGIRLQAVENINKYQAETIKWRDRKVRLKNIEPGHLVLRRVANPDTVGKLQLKWEGPFLVASSSRPGSYRLKDMDGNDIPRSWNADELRRYYV

SEQ ID NO: 235462 - protein, 77 aa, Zea mays
  Clone ID: MRT4577_146322C.1.pep
LIHSQERSVLMEGVQVKVGCLFPLSLFSDADGHLTPTWNSTEWSGANQTWDGHQQCRAGLCGAVHGRAGLQLERPGL

SEQ ID NO: 235463 - protein, 1171 aa, Zea mays
  Clone ID: MRT4577_146323C.1.pep
MVISCVIKGFLVHNVLVDTGSATDIIFAKAFRQMQEPEDKIHDATHPLCGFGGRQIVALGKITMSVTFGFINNTRTEQVVFDIVDMEYPYNAIIGRGTLNAFEAILHPAYLCMKIPSDQGPIAIHGSQEAARRAEGNWTDSKAIHNIDGAEACEQYKFRREKAASADQPKPMLLCEDIAEQKVMLGSQLSEEQEKTLIRFLFNNKDVFAWSANDLCGVNRDVIEHSLNVDPSFRARKQRLRKMSDDKAEGARNEVKRLLSAGVIREVKYPEWLANTVMVKKANGKWRMCIDFTDLNKACPKDEFPLPRIDSLVDATASSELMSLLDCYSGYHQIWMKKEDESKTSFITPSGTYCYLRMPEGLKNAGGSFSRMTAKVLQSQIGRNVLTYVDDIIVKSTKQENHIADLQETFASFRQAGLKLNPEKCVFGVKKGKFLGCLVSTKGIEANPSKIEAILRMEPPTTKKGAQRLTGRLASLNRFISRSGERNLPFFEVLKSAEVFQWGPIQQKAFEELKQYLIDLTTLTPPTPGAPLLLYVAASHSADIMRNREATGRIGKWAAELNEFCIEYVHRSSIQSQTLADYIADWTPGAQEEETNKDAEAWTVFCDGSWGTFGAGAAAVLVSPSKVKTCYATKLDFSCTNNIAEYEALLLGLRKLKAMGIRRAILKTDSQVVSGHIDKSCKAKDPKLEKYLDMVRRVEASFEGFSVKNIPRGQNEHADLLAKSAAQGLPLPSDVFFEIIKAPSVELLERAVLNISPVYSEDWRTEIISYLQGKFLSDDEAYNRRIEARARPYVMIEGELYKHGVCAPLLKCLSRTEGIELMKEIHAGMCGSHIGSRPLLGKNFRQGFYWPKAASDAAELVQKCEGCQKCARDQKQPSSLTQLIQPIWPLQRWGLDLLGPLPPAQGNLRYVVVAVEYFSKWIEAKPLATITSATVQKFFWQNIVCRFGVPKAITVDNGTQIDSEAFRDFCDQIGTKIHFASVRHPESNGLVERANGIIMTGIMKLIFNQPRGKWPDQLTKVVWSHNTTTSRSTGFTPFKLLFGDEAITPEEAKTGSIRVVASAEPGSEAAYSVEKDALEGIRLQAVENINKYQAETIKWRDRKVRLKNIEPGHLVLRRVANPETVGKLQLKWDGPFLVASSSRPGSYRLKDMDDNDIPRSWNADELRRYYV

SEQ ID NO: 235464 - protein, 129 aa, Zea mays
  unsure (1)..(129): unsure at all Xaa locations
  Clone ID: MRT4577_146324C.1.pep
VMVVGVVLATLVVGGSCGPPKVPSGPNITTNYNGKWLTASATWYGQSNGAGAPDNSCACGIKNVNLPPYSGMTVCGNFPIFIDGKGCGSCYEVRCKEIPDFFGNSFTVYITYMNYEPIAPXHFDLSRKA

SEQ ID NO: 235465 - protein, 118 aa, Zea mays
  Clone ID: MRT4577_146325C.1.pep
MSWQAYVDEHLMCEIEGQHLSAAAIVGHDGSVWAQSESFPEPCGPAGSERGDVRISVAEARCGSKAPSLGDVVAAAAVLRAFDANIAEIKLDDLRTVDLLVRDGRIGLLASDLIWLFA

SEQ ID NO: 235466 - protein, 382 aa, Zea mays
  Clone ID: MRT4577_146326C.1.pep
MGIRRAILKTDSQVISGHVDKSYKARDLKLEKYLDTVRRIEASFEGFSVKNIPRGENEYADLLAKSAAQGLPLPSEVFFDTIKAPSVELLERAVLNISPVYSEDLRTEIISFLQSNFLSDDEAYNKRIEARARPYVIIEGELYKRGVCSPLLKCLSRSEVPKAITVDNGTQFDSEAFREFCDQIGTKIHFASVRHPESNGLVERANGIIMTGIMKSIFNQPRGKWPDELIKVVWSHNTTMSRSTGFTPFKLLFGDEAITPEEAKAESIRTVTSAEGEDEADCSVEKDAIEGIRLQAVENINKYQAETIKWRDRKVKLKNIEPGHLVLRRVANPETVGKLQLKWEGPFLVVSSPRPGSYRLKDMDGNDIPRSWNADELRRYYV

SEQ ID NO: 235467 - protein, 102 aa, Zea mays
  Clone ID: MRT4577_146327C.1.pep
IPRSSHSSLSLHKTLLRFTPLNPTTLSRNYSPAPLQQPNIITIFPIHIAISCIYLSFYHLFLYTQLPYSIITITYYNQPDLPINTLITHFLKVCHLFNHLLP

SEQ ID NO: 235468 - protein, 67 aa, Zea mays
  Clone ID: MRT4577_146328C.1.pep
MSWQAYVDEHLMCEIEGQHLSAAAIVGHDGSVWAQSESFPEVIHSHLISSRSTCLVALSMFSAPALI

SEQ ID NO: 235469 - protein, 1305 aa, Zea mays
  Clone ID: MRT4577_146329C.1.pep
MASFNDQAGAASDPKLVLPITGGSSSEPANKKQKKEAQRRVQHVGVQGPFIKSRWSHIPITFSQEDLQLKDYPHNDAMVISCVIKGFLVHNVLVDTGSAADIIFAKAFRQMQEPEDKIHDATHPLCGFGGRQIVALGKITMSVTFGFINNTRTEQVVFDIVDMEYPYNAIIGRGTLNAFEAILHPAYLCMKIPSDQGPIAIHGSQEAARRAEGNWTDSKAIHNIDGAEACEQYKFRREKAASADQSKPMLLGEDIAEQKVLLGSQLSEEQEKTLIRFLFNNKDVFAWSANDLCGVNRDVIEHSLNVDPSFRPRKQRLRKMSDDKAEGARNEVKRLLSAGVIREVKYPEWLANTVMVKKANGKWRMCIDFTDLNKACPKDEFPLPRIDSLVDAAASSELMSLLDCYSGYHQIWMKKEDEPKTSFITPSGTYCYLRMPEGLKNAGGSFSRMTAKVLQSQIGRNVLTYVDDIIVKSTKQENHIADLQETFANFRQAGLKLNPEKCVFGVKKGKFLGCLVSTKGIEANPSKIEAILRMEPPTTKKGAQRLTGRLASLNRFISRSEERNLPFFEVLKSAEVFQWGPIQQKAFEELKQYLIDLTTLTPPTPGAPLLLYVAASHSAVSAALVQEKLEGQVKRQAPIYFVSEVLSLSKKNYTELEKVLYAVLMASRKLRHYFQAYNIIVPSSQPLKDIMRNREATGRIGKWAAELNEFCIEYVHRSSIQSQALADFIADWTPGAQEEETNKDAEAWTVFCDGSWGTFGAGATAVLISPSKVKTCYAAKLDFSCTNNIAEYEALLLGLRKLKAMGIRRAILKTDSQVVSGHIDKSCKAKDPKLEKYLDMVRRVEASFEGFSVKNIPRGQNEHADLLAKSAAQGLHLPSDVFFETIKAPSVELLERAVLNISPVYSEDWRTEIISYLQGKFLSDDETYNRRIEARARPYVMIEGELYKHGVCAPLLKCLSRTEGIELMKEIHAGLCGSHIGSRPLLGKVFRQGFYWPKAASDAAELVQKCEGCQKCARDQKQPSSLTQLIQPIWPLQRWGLDLLGPLPPAQGNLRYVVVAVEYFSKWIEAKPLATITSATIQKFFWQNIVCRFGFDSEAFRDFCDQIGTKIHFASVRHLESNGLVERANGIIMTGIMKLIFNQPRGKWPDQLTKVVWSHNTTTSRSTGFTPFKLLFGDEAITPEEAKTGSIRVVALAESGSDDAYSVEKDALEGIRLEAVENINKYQAETIKWRVRKVRLKNIEPGHLVLRRVANPETVGKLQLKWDGPFLVASSSRPGSYRLKDMDDNDIPRSWNADELQWYYV

SEQ ID NO: 235470 - protein, 124 aa, Zea mays
  unsure (1)..(124): unsure at all Xaa locations
  Clone ID: MRT4577_14632C.1.pep
RPAARNPPPGAPSEVAAGQGAAAAADQAQSPTQPAGRTAAPRRRREKAARQASPRRWRRRARXAXAPPPPPRQPXRRRAHQCGRRTGFTRRHARRTSPXAPGGTKXATQRPKHRGAAAPPPGRR

SEQ ID NO: 235471 - protein, 1219 aa, Zea mays
  Clone ID: MRT4577_146330C.1.pep
MASFNDQAGAASDPKLVLPITGGSSSEPANKKQKKEAQRRVQHVGVQGPFIKSRWSHIPITFSQEDLQLKDYPHNDAMVISCVIKGFLVHNVLVDTGSAADIVFAKAFRQMQEPEDKIHDATHPLCGFGGRQIVALGKITMSVTFGFINNTRTEQVVFDIVDMEYPYNAIIGRGTLNAFEAILHPAYLCMKIPSDQGPIAIHGSQEAARRAEGNWTDSKAIHNIDGAEACEQYKFRREKAASADQPKPMLLCEDIAEQKVLLGSQLSEEQEKTLIRFLFNNKDVFAWSANDLCGVNRDVIEHSLNVDPSFRPRKQRLRKMSDDKAEGARNEVKRLLSAGVIREVKYPEWLANTVMVKKANGRWRMCIDFTDLNKACPKDEFPLPRIDSLVDAAASSELMSLLDCYSGYHQIWMKKEDEPKTSFITPSGTYCYLRMPEGLKNAGGSFSRMTAKVFQSQIGRNVLTYVDDIIVKSTKQENHIADLQETFASFRQAGLKLNPEKCVFGVKKGKFLGCLVSTKGIEANPSKIEAILRMEPPTTKKGAQRLTGRLASLNRFISRSAERNLPFFEVLKSAEVFQWGPIQQKAFEELKQYLIDLTTLTPPMPGAPLLLYVAASHSAVSAALVQEKLDDQVKRQAPIYFVSEVLSLSKKNYTELEKGTFGAGAAAVLVSPSEVKTCYAAKLDFNCTNNITEYEALILGLRKLKAMGIRRAILKTDSQVVSGHIDKSCKAKDPKLEKYLDMVRRVEASFEGFSVKNIHRGQNEHADLLAKSAAQGLPLPSDVFFETIKAPSVELLERAVLNISPVFSEDWRTEIISYLQGKFLSDDEAYNKRIEARARPYVMIEGELYKHGVCAPLLKCLSRTEGIELMKEIHAGLCGSHIGSRPLLGKIFRQGFYWPKAASDAAELVQKCEGCQKCARDQKQPSSLTQLIQPIWPLQRWGLDLLGPLPPAQGNLRYVVVAVEYFSKWIEAKPLATITSATVQKFFWQNIVCRFGVPKAITVDNGTQFDSQAFRDFCDQIGTKIHFASVRHPESNGLVERANGIIMTGIMKLIFNQPRGKWPDQLTKVVWSHNTTTSRSTGSTPFKLLFGDEAITPEEAKAGSIRIVASAESDSEAAYSIEKDALEGIRLQAVENINKYQAETVKWRDRKVRLKNIEPGHLVLRRVANPETVGKLQLKWDGPFLVASSSRPGSYRLKDMDGNDIPRSWNADELRRYYV

SEQ ID NO: 235472 - protein, 1777 aa, Zea mays
  Clone ID: MRT4577_146331C.1.pep
MTFSDLLPCDLGVGCLGDFYLYLEDSPLRLSVVVIWVLTAWGHLRGDHSPFCVFDRRGYGPIFHQCYVTFFYAMRYIVLCLILHVCVLRDATKRSARGTVHLHRVSPQKFAALFMHAMVDTHPNLRCLSCGPKNATSLDCLVFETADGHRIFHAEAEIDSSNLPGTSNQPIPALQEPPGTAMFAHSLLQQKQYGFSDAYVDTGSTSIMSFPSALAASNRQRRRSRVRHMVADEPLSITLPLDKSYVDALKDAYPERSYYGGPEHICPYCHAVFWFQERVKNDSCLTQRKIVYNLCCKGGKVNLKPFERPPPLLVDLLRFDGGASIDKTINNRTVPYVFKINGVVHHRIGTLLPQRGTQPKFAQLYTYDTEHETQNRLGMFETDDGAGGHLDPEIASSLLVGPMLRRRRSYKKKRSSAKAVCIKWPKVPLCEASHLRTSPQHWRPPPVNSLPLFELMASFNDQAGAASDPKLVLPITGGSSSEPANKKQKKEAQRRVQHVGVQGPFIKSRWSHIPITFSQEDLQLKDYPHNDAMVISCVIKGFLVHNVLVDTGSAADIIFAKAFRQMQEPEDKIHDATHPLCGFGGRQIVALGKITMSVTFGFINNTRTEQVVFDIVDMEYPYNAIIGRGTLNAFEAILHPAYLCMKIPSDQGPIAIHGSQEAARRAEGNWTDSKAIHNIDGAEACEQYKFRREKAASADQPKPMLLCEDIAEQKVLLGSQLSEEQEKTLIRFLFNNKDVFAWSANDLCGVNRDVIEHSLNVDPSFRPRKQRLRKMSDDKAEGARNEVKRLLSAGVIREVKYPEWLANTVMVKKANGKWRMCIDFTDLNKACPKDEFPLPRIDSLVDAAASSELMSLLDCYSGYHQIWMKKEDEPKTSFITPSGTYCYLRMPEGLKNAGGSFSRMTAKVLQSQIGRNVLTYVDDIIVKSTKQENHIADLQETFASFRQAGLKLNPEKCVFGVKKGKFLGCLVSTKGIEANPSKIEAILRMEPPTTKKGAQRLTGRLASLNRFISRSAERNLPFFEVLKSAEVFQWGPIQQKAFEELKQYLIDLTTLTPPMPGAPLLLYVAASHSAVSAALVQEKLDGQVKRQAPIYFVSEVLSLSKKNYTELEKVLYAVLMASRKLRHYFQAYNIIVPSSQPLKDIMRNREATGRIGKWAAELNEFCIEYVHRSSIQSQALADFIADWTPGAQEEETNKDNEAWTVFCDGSWGTFGAGAAAVLVSPSKVKTCYAAKLDFNCTNNIAEYEALLLGLRKLKAMGIRRAILKTDSQVVSGHIDKSCKAKDPKLEKYLDMVRRVEASFEGFSVKNIPRGQNEHADLLAKSAAQGLPLPSDVFFETIKAPSVELLERAVLNISPVFSEDWRTEIISYLQGKFLSDDEAYNKRIEARARPYVMIEGELYKHGVCAPLLKCLSRTEGIELMKEIHAGLCGSHIGSRPLLGKIFRQGFYWPKAASDAAELVQKCEGCQKCARDQKQPSSLTQLIQPTWPLQRWGLDLLGPLPPAQGNLRYVVVAVEYFSKWIEAKPLATITSATVQKFFWQNIVCRFGVPKAITVDNGTQFDSEAFRDFCDQIGTKIHFASVRHPESNGLVERANGIIMTGIMKLIFNQPRGKWPDQLTKVVWSHNTTTSRSTGFTPFKLLFGDEAITPEEAKAGSIRIVASAESDSEAADSEAAYSIEKDALEGIRLQAVENINKYQAETVKWRDRKVRLKNIEPGHLVLRRVANPETVGKLQLKWDGPFLVASSSRPGSYRLKDMDGNDIPRSWNADELRRYYV

SEQ ID NO: 235473 - protein, 63 aa, Zea mays
  unsure (1)..(63): unsure at all Xaa locations
  Clone ID: MRT4577_146332C.1.pep
KNRWIKKWNPPPKNPKFNFRGTPPTLPVVGLLGPPVPTLVXKGFVPKFQIQDEDPAPPNKKFL

SEQ ID NO: 235474 - protein, 107 aa, Zea mays
  Clone ID: MRT4577_146333C.1.pep
ADIMHSARHMDGLISTEITGFMVGGLLLSSSISAPKVDGFIASSQRRSLGICKRCGDLRIVPCPQCNGTGSARRCGMLTLGVQDDLDESHVAEATTDNLVPCTKCRS

SEQ ID NO: 235475 - protein, 56 aa, Zea mays
  Clone ID: MRT4577_146334C.1.pep
VRMTVKTFTDGPRTLLQAVSVKLLPTDRCFTDLSSVAKRKVLPTLHHLVIIVLPTL

SEQ ID NO: 235476 - protein, 93 aa, Zea mays
  unsure (1)..(93): unsure at all Xaa locations
  Clone ID: MRT4577_146335C.1.pep
QPMPIRFFSCAAKKDSTAKVFXIFKKQLVFSDHIKVCGXSKFFELGANSLDTVKIFMSFKEPFDFSVXESRAQTFPPVXNPGDLFDKFFFGKR

SEQ ID NO: 235477 - protein, 95 aa, Zea mays
  Clone ID: MRT4577_146336C.1.pep
SPEPFPLTNALFDKLIYGLLFTMERFTILRNRPHSLPLVVRSHERDQAGKMRIKRLHRPSFLYEKDPWSLASSRRKRDQLPGVKGATGRTSTSIF

SEQ ID NO: 235478 - protein, 65 aa, Zea mays
  unsure (1)..(65): unsure at all Xaa locations
  Clone ID: MRT4577_146337C.1.pep
ACKHNPPHGSSQPLAYKPSAMTNCXSNGAYRAMLKDYRXRHHHNRKANLAHDGLTTAYAAYVWVH

SEQ ID NO: 235479 - protein, 44 aa, Zea mays
  Clone ID: MRT4577_146338C.1.pep
WAGFLPIFGVRLILGKKKKKKKKKKKKKKKKKKKKKKKKKKKKK

SEQ ID NO: 235480 - protein, 110 aa, Zea mays
  unsure (1)..(110): unsure at all Xaa locations
  Clone ID: MRT4577_146339C.1.pep
QSHLLHPIIIINHCRMHHCRNPKLKAVCTGPLTWGNLPGRANRSAGVFVPVPPGRKNTHGARPFGPPPPPPGGLLGGGHGFPXFSGLVEPVGAEHGRGLFNGGHGAGLLH

SEQ ID NO: 235481 - protein, 306 aa, Zea mays
  unsure (1)..(306): unsure at all Xaa locations
  Clone ID: MRT4577_14633C.1.pep
MAAALSQLDDEIVRGMAIGAVFTDYAGKINCLDFHRKEDLLVTSSEDDSIRMYNITSATLLKTTYHRKHGADRVCFSHHPSSILCSSRYNLESAESLRYLSLYDNRCLRYFKGHKDRVVSLCMSPVNDSFMSGSLDHSVRIWDLRVNACQGILRLRGRPSVAYDQQGLVFAVAMEGGAIKLFDSRSYDKGPFDTFLVGGDTAEVSDIKFSNDGKSMLLTTTNNHIYVLDAYGGDKRCGFSLEPSPNVTNEAAFTPDGQYVISGSGDGTLHAWNINTVQEXLKWAPRRAMFATASTALTFWIPNQSN

SEQ ID NO: 235482 - protein, 145 aa, Zea mays
  Clone ID: MRT4577_146340C.1.pep
GVQVGSCWSSLLPISDLPVSVHASPGLPAFRNWTSQGKKTAGYTRHGQIQTDGRPGGAAAAQQLVIALHPTIRELLRCSRDSQDPCRHSCHASSSMICSGQRTAAEGRRGVPLLACSSRQVLMQRKACRPFFFFFFFFLTTSKSQ

SEQ ID NO: 235483 - protein, 100 aa, Zea mays
  Clone ID: MRT4577_146341C.1.pep
CRQLFLLRSRRHQQRCEDQNLAVLILGLSASLNREPLMRCPAQGLPMRPFLWLGHHFLRRCLIAETVVGKFLLPCLSNCGRISLGPITATNISVFRSQVP

SEQ ID NO: 235484 - protein, 231 aa, Zea mays
  Clone ID: MRT4577_146342C.1.pep
GVQVGSCWSSLLPISDLPVSVHASPGLPAFRNWTSQGKKTAGYTRHGQIQTDGRPGGAAAAQQLVIALHPTIRELLRCSRDSQDPCRHSCHASSSMICSGQRTAAEGRRGVPLLACSSRQVLMQRKALCPGPAGYTRHGQIQTDGRPGGAAAAQQLVIALHPTIREHASLLTRLSGPMQTLLPCFLLHDLQRAEDCSRGEERSTFTCLQQSAGVDAATQPRPSPASTILPF

SEQ ID NO: 235485 - protein, 237 aa, Zea mays
  Clone ID: MRT4577_146343C.1.pep
MIMQAMWKPGWLEALDTQKFFVACSFHEHAKKNEKNICCLDCCTSICPHCVAAHRAHRLLQVRRYVYHDVVRLEDLEKLIDCSSVQSYTINSSKVVFLKKRPQNRQFKGSGNICTSCDRSLQEPYFHCSLDCKVEYILRQKKKLSAYLRPCKTLQLGPDFFIPHDADDDTTHSTLVDVDEPMGSSDSENLSVPCTNFVRKKRSGPYICARSANRVSEEDMATNMSRRKGVPQRSPLC

SEQ ID NO: 235486 - protein, 91 aa, Zea mays
  Clone ID: MRT4577_146344C.1.pep
AFYRCLDHFYELVLSVPLYLDRTMDLCSINPLSHSTWFIFVWLLVQNNLEYEYSLTCFEARDSLPNSVRYAALPTLQKNHRHAFTPLFLTS

SEQ ID NO: 235487 - protein, 121 aa, Zea mays
  unsure (1)..(121): unsure at all Xaa locations
  Clone ID: MRT4577_146345C.1.pep
MGYYDDEGSFRNGGIHKLGDKSREIEIDIRETSGPASSPNTVSIPCHHIXRLGDFLMLQGRPCQVIRISTSSATGQYRXYXGVDLFTKQXXHEESSFISNPAPXSVVVQSMLXPVLKQYRV

SEQ ID NO: 235488 - protein, 290 aa, Zea mays
  Clone ID: MRT4577_146346C.1.pep
MSAPLVDAEYMAEIERARRDLRALVASKNCAPIMLRLAWHDAGTYDAKTNTGGPNGSIRFPQEYSHSSNAGIKIAIDLLEPVKQKHPKITYADLYQLAGVVAVEVTGGPTVDFVPGRKDSSICPEEGRLPDARRGASHLRQVFYRMGLSDRDIVALSGGHTLGRAHRERTGFDGPWTRDPLKFDNSYFLELLKGDSEGLLKLPTDKVLVEDPEFRQHVQLYAKDEDAFFRDYAESHKKLSELGFTPPRSCLSSRSANKHKSLLVQAAAGLAVATAVVAWAYLCESNNKFI

SEQ ID NO: 235489 - protein, 98 aa, Zea mays
  unsure (1)..(98): unsure at all Xaa locations
  Clone ID: MRT4577_146347C.1.pep
RRGSTTTWSPVAIGVICQEREQNRLFLAKSKELVQYQVMEXSKNMQESDTASVVKVSXEPVIIINGVPDLPPXDXASGSQPAVRDAQGSRVDHRFGEW

SEQ ID NO: 235490 - protein, 69 aa, Zea mays
  Clone ID: MRT4577_146348C.1.pep
GPPGPDLFFPLGRFVFPLETPPHRCVLGVPPPVGVSPPGFPNEGLTGFITPEIGAYVPKKVKPSCCLVS

SEQ ID NO: 235491 - protein, 572 aa, Zea mays
  Clone ID: MRT4577_146349C.1.pep
MKSGERPKQMRGVRQESRRFRLLVIVAGFFLVSLTFVVISKPDSILSSLNGKLPVDQAPTSILIQQKVNSPPATALETSTDALRGDPRVVDDEADPRPQGFKGEEEESRVLSEPDATSGMTELTPDKDGSGRKSNEEVLGGGGDGEGKSKEDRGHGPEKHKVTLPTVSNYTIHDTEDTQNAKQDDTSNDQQGSKPLCDFSNFRANVCEMRGDVRVHPNAASIMFMEPGHSQRDELWKIKPYPRKGDEFCLSHITELTVKSSKVAPECSKYHDVPAVIFSLTGYTGNLFHDFTDVMVPLFTTASEFNGEVQFLITDMALWWTIKYHTVLEKLSKYPVIDFSKDGEVHCFKHVIVGLHAYMEFTIDSSKAPHNYSMVDFNRFMRGAYSLGRDSVTVLGEYPKVKPRLLIIKRHRTRMFLNLDEIIAMAEELGFEVVIDEANVSSDISKFAALVNTVDVMMGVHGAGLTNCVFLPQNATLIQIVPWGGLEWVSRTDFGNPAELMGLHYKQYSIGVHESSLTEQYPSDHEIFKNPISFHKKGFDFIRQTFMDKQNVKLDCKRFRPILLEALDNLNA

SEQ ID NO: 235492 - protein, 96 aa, Zea mays
  Clone ID: MRT4577_14634C.1.pep
FGTRVLDAYGGDKRCGFSLEPPPNVTNEAAFTPDGQYVISGSGDGTLHAWNINTVQEIACWNSHIGPITALKWAPRRAMFATASTALTFWIPNQSN

SEQ ID NO: 235493 - protein, 60 aa, Zea mays
  Clone ID: MRT4577_146350C.1.pep
LLYILTYPQTIRTGAKNLIPPPQLSVSTRSHLGACSGAPPERPVITEGFYIIIASPIKCE

SEQ ID NO: 235494 - protein, 60 aa, Zea mays
  Clone ID: MRT4577_146351C.1.pep
SLFRWGAGRLCCLRGRPCSSVSGCVGIAWAPLFVVLFLVVPRAARPSRCACGSVGSAAAR

SEQ ID NO: 235495 - protein, 79 aa, Zea mays
  Clone ID: MRT4577_146352C.1.pep
ITTSFLFYYHRKIEMISDYMCTFGLQEGKSIRMTQKQMPSQCEQYGSTVHLFIGGGRSSCKITFMSITFANDLWESIKA

SEQ ID NO: 235496 - protein, 61 aa, Zea mays
  Clone ID: MRT4577_146353C.1.pep
EPTATPTCRGNSAPTKPWRGATSPARETGATQPTTHPRPSPTKRARCDATPGQTDGTGGET

SEQ ID NO: 235497 - protein, 57 aa, Zea mays
  Clone ID: MRT4577_146354C.1.pep
MQEALTTLPVARNIVFIHSIPKVSSYILKGLRCKYNLTRIEWVDIIGYYNDHYGTEV

SEQ ID NO: 235498 - protein, 70 aa, Zea mays
  Clone ID: MRT4577_146355C.1.pep
FSVFVVEGPGRWVLSTITPSRAAEIFSPVPAFAAFRGHKKKHIPSRAFHAFFSMREIKALMKHGRVGVPS

SEQ ID NO: 235499 - protein, 66 aa, Zea mays
  Clone ID: MRT4577_146356C.1.pep
PENDAVPSRKGRRRGLPVEGAATRQVTRYGWSMICIILPTNYSRSTTYNRRGNSSCVSSKPQSTPT

SEQ ID NO: 235500 - protein, 97 aa, Zea mays
  Clone ID: MRT4577_146357C.1.pep
ELRIYRVSVCVNDRRQREIRINVRRMVKVAIAAFAARRRLLFELSFCICVIFFPLSEQRQQAGLLIARSQEPLRESKSPLCCNILQMHCNNPETVTL

SEQ ID NO: 235501 - protein, 96 aa, Zea mays
  unsure (1)..(96): unsure at all Xaa locations
  Clone ID: MRT4577_146358C.1.pep
LFELGVLGGAPGPLGAQFPLPGAPVAGAVPVANNGLGPVGPPLRRASGCGSSSSSWRTEAKPAGGPAPKKAAILVRVRPRRLPGERMARXYRTRGS

SEQ ID NO: 235502 - protein, 56 aa, Zea mays
  Clone ID: MRT4577_146359C.1.pep
RRSVLTCVFILVYLRDSKRLSFPTAVAAASHHSVDTMIEYISTHVVQVVIYVGNDS

SEQ ID NO: 235503 - protein, 39 aa, Zea mays
  Clone ID: MRT4577_14635C.1.pep
QSIALVHQCTIERASVKGCVSHNLLLPGTQLSVFNQCES

SEQ ID NO: 235504 - protein, 190 aa, Zea mays
  unsure (1)..(190): unsure at all Xaa locations
  Clone ID: MRT4577_146360C.1.pep
IFKAVQLTLMALITMTVFLRTNMHRDSISDGRIYMGALFFGVLMVMFNGLAEVGLTIAKLPVFFKQRDLLFYPAWTYSLPSWIIKTPLSLLNVTIWVFITYYVIGFDPNVERLFRQFLLLLLMNEASSGLFRFIAGLARHQVVASTLXSFGILICMLLGGFLLARENVKKWWIWGYWISPLMYAQNAISG

SEQ ID NO: 235505 - protein, 73 aa, Zea mays
  unsure (1)..(73): unsure at all Xaa locations
  Clone ID: MRT4577_146361C.1.pep
MRSYLSTIPVTGTGINPARSLGAAVVYNKDKPWDDHWIFWEGPLLGAVFFAFWDQNMLRAGAIXFLSSFPSNA

SEQ ID NO: 235506 - protein, 74 aa, Zea mays
  Clone ID: MRT4577_146363C.1.pep
STHAAGGSAMCLCRPSPSSWSPICRTIARMLAPACCLGVLGQVSSTGSNGQGVLLLGRDRHMPRRIRLRYPQGL

SEQ ID NO: 235507 - protein, 51 aa, Zea mays
  Clone ID: MRT4577_146364C.1.pep
GRVGHSVQWISHESLGGAVYAEFGHWGLFHLTGFSVGKCCSLFILSLLSIA

SEQ ID NO: 235508 - protein, 52 aa, Zea mays
  Clone ID: MRT4577_146365C.1.pep
NPDNINNPLSVLMEHGVIYIMSSDNYLIFNPRNFFITSITLSSQKLEVLIRK

SEQ ID NO: 235509 - protein, 172 aa, Zea mays
  unsure (1)..(172): unsure at all Xaa locations
  Clone ID: MRT4577_146366C.1.pep
KIPRAPLSFPPSLISKTGNWVDVDYNPEAVVALRAKRAFAKFSYCGADFDKLFNLGSEEFRNMAFPRSRNRLNRCLKPRPWGFFXKFGKSKQGARPKEMPNLVKTPLRDRIVSPEMIASFIVVYSGKEFTKIQIKPEMAVHYLANVPISYSPARGERPEIGAIIFSSLIPHK

SEQ ID NO: 235510 - protein, 82 aa, Zea mays
  Clone ID: MRT4577_146367C.1.pep
LGLFSHRSFCINRTSGLTHLNLVTGRFLLALLYQQDHHHRHRRRPCSGLTSRDARLGEPFPLGRLFVRISGWGLVWFTGQCW

SEQ ID NO: 235511 - protein, 47 aa, Zea mays
  Clone ID: MRT4577_146368C.1.pep
GFHQLFQPGGPFYSKAHLNAILALGLKVYVGTAHDGVFVHLAGSRQS

SEQ ID NO: 235512 - protein, 50 aa, Zea mays
  Clone ID: MRT4577_146369C.1.pep
YLGKQNERPLVIYSKSVHKDTFFTVWFSHIDSSLHKIFQTCTITNEKSIY

SEQ ID NO: 235513 - protein, 122 aa, Zea mays
  Clone ID: MRT4577_14636C.1.pep
IQNPQYLAATMSLARQFQPREQYAAPISRAPPRPLSAPLGPRAAAPTMISVEGCQIKRLTQAEQEERRRKGLCYNCDEKYTRGHNRVCQRLFLLEGIEEDDVDDITKEPAAEGQNLAGEDGS

SEQ ID NO: 235514 - protein, 102 aa, Zea mays
  Clone ID: MRT4577_146370C.1.pep
GGGDPPFFSGRVHSQIQTTLRSKRTHTLFSFFPASPQLPHPHILSQLTKTILTCRAEIHPRYRSLNNYTFLLPPPSYVWQTPPKRNYFYSRHMFLTNPKPYL

SEQ ID NO: 235515 - protein, 65 aa, Zea mays
  Clone ID: MRT4577_146371C.1.pep
GNNNRRRRERNAARENREFNYRRTRHSQAGAGLSGRAAPILVNKGIAHKFQTQDQHAGRPNRKFP

SEQ ID NO: 235516 - protein, 347 aa, Zea mays
  Clone ID: MRT4577_146372C.1.pep
QLATVFFTFSLGTKTHYYGRMLLHGGAQYRGTGRGFVVFHAKFAENYRLYSRSHFVKGIELMILLIVYQLFGQSYRSTIAYIFITFSMWLLVLTWLFAPFLFNPSGFEWAKIVDDWSDWNKWISNRGGIGVSPDKSWESWWEVEQDHLKYSGTIGRFVEIILAIRFFIYQYGLVYHLHVTHNKSILVYLISWLVIVAVLLVMKTVSVGRRTFSADFQLFFRLIKFLIFVAFIAILIVLIVLLHMTFRDIFVCFLAFLPTGWGILLIAQACKPLARHVGLWGSVRALARAYEIIMGVLLFSPVAILAWFPFVSEFQTRMLFNQAFSRGLQISRILGGQKKERSARNKD

SEQ ID NO: 235517 - protein, 81 aa, Zea mays
  Clone ID: MRT4577_146373C.1.pep
TVAAMPCCLVSYTTYLAHQCIYLLAGRTRLVKRTLSAHQCIYLLVGRTRLVKRLCCPFVHVVAVRTCHYNSVARQVNNLLR

SEQ ID NO: 235518 - protein, 98 aa, Zea mays
  Clone ID: MRT4577_146374C.1.pep
VSKATYSYVLVPPAQWTGNPSPVSTEPLRRRDCHLLGATGGSRPGGFEGGCPAECAAQSPYRPDVLATARATLVVGSGCPPPPPPDLCGALLIFKDGE

SEQ ID NO: 235519 - protein, 56 aa, Zea mays
  Clone ID: MRT4577_146375C.1.pep
FLEPAQKELRAPCTLDLYSSRHHRQQVLYVNIFNKIVLPHLECVLCASGLNHGYAS

SEQ ID NO: 235520 - protein, 59 aa, Zea mays
  Clone ID: MRT4577_146376C.1.pep
GLSCPNFSSCCMGRFKMGNICWLPYLLIFPNNDSSTYSPKLCCSGSTVEVVVCSVLLFL

SEQ ID NO: 235521 - protein, 73 aa, Zea mays
  Clone ID: MRT4577_146377C.1.pep
HGRCWRRGRCMTIPSSANETCSFEVIRRSVNCADTLQEMCHYPAGVGSCSYPRIECFRSILALSSNIPSFWCR

SEQ ID NO: 235522 - protein, 168 aa, Zea mays
  Clone ID: MRT4577_146378C.1.pep
AHCHLQRLVSLYRSVSHPFPLFVDLTTAPTPMASAASSAAAAGKSLFQGFRRFLKKPWEITGPCASPEYRSALPGALEYRVKCPATVRDDRDKAIVPTSDPETVYDIKYFTRDRRRNRPPVRRTLLRKPDLERYMVTKQFDPTKDFPVPYVNTTVEEDDNTVGGGYQK

SEQ ID NO: 235523 - protein, 110 aa, Zea mays
  Clone ID: MRT4577_146379C.1.pep
AEGCHFARVLFLPPVFFLASFVRGLQCFSCSGVVLLLLQTVLGCIHLILDVLNSLPHALGARASPLFFFLNSSSYLIVPRMVLWVFLPLPFFSGMFCGRFFWQLGLFCSL

SEQ ID NO: 235524 - protein, 55 aa, Zea mays
  Clone ID: MRT4577_14637C.1.pep
SYRFRRLLRMKPLLVRCLYPQHHWQTRYQHQVLRLQDALRSHSQNLPIVFTTSHH

SEQ ID NO: 235525 - protein, 75 aa, Zea mays
  Clone ID: MRT4577_146380C.1.pep
LTGQACNVRQGILVVLGLHEQLHKFRFSFQISPFSASFLVVKDDGGNNMVLELTGCTFLVTCIPKLYLPGTLVTV

SEQ ID NO: 235526 - protein, 168 aa, Zea mays
  Clone ID: MRT4577_146381C.1.pep
AHCHLQRLVSLYRSVFTPFPLFVDLTTAPTPMASAASSAAAAGKSLFQGFRRFLKKPWEITGPCASPEYRSALPGALEYRVKCPATVRDDRDKAIVPTSDPETVYDIKYFTRDRRRNRPPVRRTLLRKPDLERYMVTKQFDPTKDFPVPYVNTTVEEDDNTVGGGYQK

SEQ ID NO: 235527 - protein, 77 aa, Zea mays
  Clone ID: MRT4577_146382C.1.pep
FAQISDKDGVTSIGDDGVLEIDSSVSLETTCYAMKELVSMGLVHIIGISNTICRAWLRSTARCWRSLSSGGVCSVLW

SEQ ID NO: 235528 - protein, 139 aa, Zea mays
  unsure (1)..(139): unsure at all Xaa locations
  Clone ID: MRT4577_146383C.1.pep
LTRFHLFVRQVKAIVFDEDRYDNFVMNVVMPFQNSLFVSSTRENMTVLDVLHTSRNGRFHTIIYHINNRIFAYQNINGLKLCMLQSFDQESHEMEETKKNFFQTFREFTKKDXEGDKLDVNGLRGTRILRFKATNIDMD

SEQ ID NO: 235529 - protein, 51 aa, Zea mays
  Clone ID: MRT4577_146384C.1.pep
KGAFSLYDFPLNYSASLSPDAVPPILRSPSAAEETPLDVSSESMRKWADPL

SEQ ID NO: 235530 - protein, 56 aa, Zea mays
  Clone ID: MRT4577_146385C.1.pep
QLVRTTRLPSSIPTLTRPPRPLKAPHTTHGCTPSSTSYPFVGFFHILTVLYLCMAT

SEQ ID NO: 235531 - protein, 112 aa, Zea mays
  Clone ID: MRT4577_146386C.1.pep
IIFFFFFSTRVVLFGHNRIGAHQNNGFMRIHDFLTRVSSEKQEQGRIPKPKFAIQPYTSRERGRHYLDTGRPRIFRTLAQSRRLNAGPKIGCDQVENNMHTMGNRGEPNTIG

SEQ ID NO: 235532 - protein, 66 aa, Zea mays
  unsure (1)..(66): unsure at all Xaa locations
  Clone ID: MRT4577_146387C.1.pep
TYSRDAPRQHDRVEIIANDQXNRTTETYAALTXSERLVGDAAKNQDDMNPINTVFEAHGLIGRCFS

SEQ ID NO: 235533 - protein, 51 aa, Zea mays
  Clone ID: MRT4577_146388C.1.pep
ITTTTKQDELSLTLMRHKALKTLIHTTKILHTEYQVQQLPKYHHKQQFYPI

SEQ ID NO: 235534 - protein, 57 aa, Zea mays
  unsure (1)..(57): unsure at all Xaa locations
  Clone ID: MRT4577_146389C.1.pep
SPSLFQGWLYLISPMWPCEAHSSMVEKVLFQWMLDYQNVIVLXSSTFGKVLVLYGSI

SEQ ID NO: 235535 - protein, 93 aa, Zea mays
  Clone ID: MRT4577_14638C.1.pep
RSMKNVEAAHECACSPHSQSAAHSRTGTIGRCRRVQSWRRGRRQAGRWQSRCVVSALLSRPRSFLLLACCWCLAFGLWQKGATCVHAPSPCAS

SEQ ID NO: 235536 - protein, 70 aa, Zea mays
  unsure (1)..(70): unsure at all Xaa locations
  Clone ID: MRT4577_146390C.1.pep
RSHLFGGLLSTLLRVSLLPASVILNHFISALWFLRSANEPTTCIGPSPSMRGTGRXEGKGRACRKRRTRA

SEQ ID NO: 235537 - protein, 83 aa, Zea mays
  Clone ID: MRT4577_146391C.1.pep
HGRWRASSSFGWLFVWWLMCSMPSEYVWTRVKCHSHRFIGHWRAPLVWFNCLFVYAFIIGQHRPVQLALLLSITGSRVSPRAE

SEQ ID NO: 235538 - protein, 66 aa, Zea mays
  Clone ID: MRT4577_146392C.1.pep
GRVCDLLVAKKGFVDTMVNTQICIGHNRCGVTYCKWYGPVESFCVGGFYTALESSNSSLKVPGAGH

SEQ ID NO: 235539 - protein, 63 aa, Zea mays
  unsure (1)..(63): unsure at all Xaa locations
  Clone ID: MRT4577_146393C.1.pep
FVVYXXYHSMFDHKHHRQLFDQHAVAFDACTHKFHMHNIHPSKHQNLPIDCQMLHKSHATQYD

SEQ ID NO: 235540 - protein, 201 aa, Zea mays
  Clone ID: MRT4577_146394C.1.pep
SSSERDGGADADGEEESDFIHVLLSLQQEYNLTRDQIKAQLVVMFEAGTDTSFIALRLAMPAPLLVPHLMSADCAEEGYTIPSGTREIVTEWALDSDPSCWAGVEEFMPERFMEGGSAAAMDSNKGNDFQYIPFGAGRRMCPGISFATAAIHLMLANLVYHFDWELPAESASKGIDMTESFGVTVHRTEKLLLVPVLAQQD

SEQ ID NO: 235541 - protein, 113 aa, Zea mays
  Clone ID: MRT4577_146395C.1.pep
TWLAVVKQEEELYQKLNPGARPPASTGGIASAISFNTSSSEYDVDIIDECKGDEAGNQRTAVTDPTAFNLGAAILSDIAASAPEFRFGPGFNMSSGVDYPGAAQRNDGTNWFY

SEQ ID NO: 235542 - protein, 71 aa, Zea mays
  unsure (1)..(71): unsure at all Xaa locations
  Clone ID: MRT4577_146396C.1.pep
MILAVLYANSDRNIXMFERFHGVPEEERLKWRSLLVKLGSENLKWSTNEEIHVASQKSVSIVYTTVGDVSL

SEQ ID NO: 235543 - protein, 204 aa, Zea mays
  Clone ID: MRT4577_146397C.1.pep
ASTGIQPLAPRTSRRQQVYWWLLRAFRSTCKHKDPTPQSTENKPPSAPPQPQAFQPAFSQPNQALNSLDFSLPMDGQRSIAELMNMYDNNFVPNKNPSSDSVAVMERPNAMPQQRIQMDEGFFVQGNGAFDDVNSMMQQQQQQHQAPVQQQQQFFIRDDTPFVSQMGDIAASAPEFRFGHGFNMSSGVDYPGAAQRNDGTNWFY

SEQ ID NO: 235544 - protein, 81 aa, Zea mays
  Clone ID: MRT4577_146398C.1.pep
DHREEKKLQRHRHLSGISPVSFSLICWKTQFKVKDRAKTFQCFPANTDPDWRVQVYLSEALVMPRENQNYQGQNISLTPGH

SEQ ID NO: 235545 - protein, 178 aa, Zea mays
  unsure (1)..(178): unsure at all Xaa locations
  Clone ID: MRT4577_146399C.1.pep
RAVGDGAAALLGHPAAXVHHSSSIPYAXTMATLSASAPFPTITLDLTQQAPGGLLPQPHGLHRPPGGIHPVVAAPAAAMPFPAPSPLAMFLPQRXHGADRAAGRAAAAXQQSVMETVTAAIAADPNFTTALAAAISSVMAGAAHQAQQPTPRASNIIGIAGDEANGGSSAGAATAGPT

SEQ ID NO: 235546 - protein, 129 aa, Zea mays
  unsure (1)..(129): unsure at all Xaa locations
  Clone ID: MRT4577_14639C.1.pep
MALPNHATIDYPSFKLVIFFDSGTGKTTFVKRHLTAEFXKKYEPTICVEVHPLDFTTNCCKIIFYCSNTSWQYNFGALRDGYYIHGQCAIIMFDVTSRLTYKNVPTLHIDLCTVFENIXIVLCSNKVDF

SEQ ID NO: 235547 - protein, 388 aa, Zea mays
  Clone ID: MRT4577_1463C.1.pep
MPQPAPQTAAYGAYPPTYSVQAYTGRKVAIVGSGPSGLAAADQLNKMGHFVTVFERADRIGGLMMYGVPNMKTDKIGVVQRRVNLMAEEGVTFVVNANVGSDPLYSIERLRSENDAVILACGATKPRDLTIPGRELSGVHFAMEFLHANTKSLLDSNLEDGKYISARGKKVVVIGGGDTGTDCIGTSIRHGCTSLVNLELLSKPPSTRAADNPWPQWPRIFRVDYGHQEAATKFGKDPRTYEVLTKRFIGDGNGKVKALEVVRVKWEKVDGRFQLKEMEGSEEIIEADLVLLAMGFLGPEATIAEKLGLEKDNRSNFKAQFGDFATSVDGVFAAGDCRRGQSLVVWAITEGRQAAAAVDKYLSRYDQNAAATGDSTPSGTGLVQPVAA

SEQ ID NO: 235548 - protein, 147 aa, Zea mays
  unsure (1)..(147): unsure at all Xaa locations
  Clone ID: MRT4577_146400C.1.pep
SHGITREAWCARSPTGPILCMNNCGLLGSAATXNMCLXCHKEXITKHDQAKLAAYFIDSIENGNYAQMEPVVVGINTEIVVAQVELQTINLQHPIDVAGXLGGALXSPKREXGPNRYTVCKKKLVLTAFNXSCGNLNWALHRYFYKH

SEQ ID NO: 235549 - protein, 551 aa, Zea mays
  unsure (1)..(551): unsure at all Xaa locations
  Clone ID: MRT4577_146401C.1.pep
MMGGGLMMDQSVVFPGVHNFVDLLQQNGDKNLGFASLMPQTSSGDQCVMGEGDLVDPPPDSFPDAVEDDSDDDVEDIEELERRMWRDRMKLKRLRELQQSRGKDPMASGGALADGSSKPRQSQEQARRKKMSRAQDGILKYMLKMMEVCRAQGFVYGIIPEKGKPVSGASDNLRAWWKEKVRFDRNGPAAIAKYQADNAVPGAENELASGAASPHSLQELQDTTLGSLLSALMQHCEPPQRRYPLEKGVPPPWWPTGDEEWWPELGIPKDQGPPPYKKPHDLKKAWKVSVLTAVIKHMSPDIEKIRRLVRQSKCLQDKMTAKEISTWLAVVKQEEELYQKLNPGARPPASTGGIASAISFNTSSSEYDVDIIDECKGDEAGNQRTAVTDPTAFNLGAAILSDKFLVPTPMKEETADVEFIQKRTXAAAEPELMLNNRLYTXDTNPSSDSVAVMERPNAMPQQRIQMDEGFFVQGNGAFDDVNNSMMQQQQQQAPVQQQQQFFIRDDTPFVSQMGDIAASAPEFRFGPGFNMSSGVDYPGAAQRNDGTNWFY

SEQ ID NO: 235550 - protein, 141 aa, Zea mays
  Clone ID: MRT4577_146402C.1.pep
MAAVAPPPAPAPAPVPAPAPATVPVADQTTDLLQKLSLDSQPKPADATQPAAATAKKQGAAASQPLSVAIPPETTITPVIQDFTDPNLFYLPAYYYGGYDSSMSEWDDYPRYLNSDGVEIAPAVYGDIYGYGHAPYRGILS

SEQ ID NO: 235551 - protein, 36 aa, Zea mays
  Clone ID: MRT4577_146403C.1.pep
LKTYYIRLAVKLIFPNAILLHPVNMLYTKRAIHIKK

SEQ ID NO: 235552 - protein, 170 aa, Zea mays
  unsure (1)..(170): unsure at all Xaa locations
  Clone ID: MRT4577_146404C.1.pep
PAGLFLLRHSPCRTSKPCCYPPLPLASRRAAAARLPPPHAPPPPPLAPSFYPELKLARTCLPIRRRGRGDKARSVGRSVGRGALGSRRCLPVRSLGSRAMAAVAPPPAPAPAPVPAPAPAPAPATVPVAXXXXXLLXKLSLDSQPKAADATQPAAATAKKGAAASQPLSR

SEQ ID NO: 235553 - protein, 42 aa, Zea mays
  Clone ID: MRT4577_146405C.1.pep
EGEGVSRGYNRGAVEGPQEKVVANLGGSCCGARWRESLLLLT

SEQ ID NO: 235554 - protein, 132 aa, Zea mays
  unsure (1)..(132): unsure at all Xaa locations
  Clone ID: MRT4577_146406C.1.pep
QNNLVVTNIDXIQSVEPVDSRTRDALQKSVQLAIEITTKSQEASARHEAERREQVARGKLERQKIMHEAAAEEQRKELLQLQAASAVIEASGHATAEACAKAEAMSIEGEAAVKQAELSAEAERIRVQSDLA

SEQ ID NO: 235555 - protein, 75 aa, Zea mays
  Clone ID: MRT4577_146407C.1.pep
SFPSSLGGFLLKSIYPTKPTIYYQPPISIKKPPIKPKTRSLIQKPLNPPKKKHTFLKKHTSNHPPVFRQNKSSTP

SEQ ID NO: 235556 - protein, 480 aa, Zea mays
  Clone ID: MRT4577_146408C.1.pep
MARPRPAAATLLLVTFLLAAAAAETTDVISGGGGMVGVDGTRFVVGGAAGGRPVYFSGFNAYWLMLVASEPARRDKVVAAFRQAADHGLNLARTWAFSDGGDTPLQAAPGVYDEAMFQGLDFVVAEARRHGIYLLLCLANNFHDFGGKRQYVQWARDAGHRLATDDDFFNSTVVKGYYKNHVKTVLTRVNTLTGVAYKDDPAILGWELMNEPRCDAEPTGAMVQAWVEEMAPYVKSVDGGHLVTAGLEGFYGAGAHESKDLNPWRIYYGTNFVETHRARGVDFATIHLYPDAWLWGCAADAQRAFLRNWTRAHARDAALYLRKPLLVTEYGKFLWEGVAGANRTQRDAFLRLVLDSIYASAARGGPLVGGAFWQLLDDGMDTLRDGYEIILPDDQLAATIIATHSRQLADLSLVTAEDVREEEAAPLRRRRRKSAHGKIHHVLRVGGGTSSDDSYYTQRLLHIFLLRLISLFESISSLFQ

SEQ ID NO: 235557 - protein, 43 aa, Zea mays
  Clone ID: MRT4577_146409C.1.pep
GRTHTLLCVVYLLIRPVTKRLLRMGPRGQYTCRETKLKSDSNT

SEQ ID NO: 235558 - protein, 45 aa, Zea mays
  Clone ID: MRT4577_14640C.1.pep
ALDHIRLALTGDHERDLMALDVGLKQTGTGAGAAACQIGTLSGPT

SEQ ID NO: 235559 - protein, 60 aa, Zea mays
  Clone ID: MRT4577_146410C.1.pep
TPTQTAISREGISQFQRPPQLLLPIKCMPPTYPLPAASSHSPDYTYTTPISHTSIPFTSS

SEQ ID NO: 235560 - protein, 64 aa, Zea mays
  Clone ID: MRT4577_146411C.1.pep
NLLWFSTYTDGFLVGTHFLHPSTSRLPYSIQKGHWVPFQLSLAFQRHLLHKITACGVSTNAILN

SEQ ID NO: 235561 - protein, 58 aa, Zea mays
  Clone ID: MRT4577_146412C.1.pep
FGYPIPKIFYLSPPPFNFPINVKNPFCVSQIRCLSNGGFCPVCLIISKHEFFPPPPSL

SEQ ID NO: 235562 - protein, 99 aa, Zea mays
  Clone ID: MRT4577_146413C.1.pep
RRLPFTWLMRSAETRGIALALEWPSRMGADRSFDVGSPSNPEVTSALMAGSHGRPDDMVAAQCGAGVWGTSGRSAVAGPGRALYGAWSREIRAGEVERE

SEQ ID NO: 235563 - protein, 84 aa, Zea mays
  Clone ID: MRT4577_146414C.1.pep
SEHSETHQAKRTSNNLTTMATKILSLLALLAAFASATYASIIPQCSLLLVHYSQSPPVLNGLNTTAAFKKDARLKQCNDTSAIT

SEQ ID NO: 235564 - protein, 240 aa, Zea mays
  Clone ID: MRT4577_146415C.1.pep
MAEYHLSAQLHGHEDDVRGICICGDVGVATSSRDKTVRFWTQHPEKKREYVLSKTLVGHSSFVGPMVWAPPSDRFPEGAIVSGGMDTLVLLWNLHTGEVVGTMKGHTSQVTGLAIDDNGDIISSSMDCTLRRWRDGNAVEVWEAHKVAVQTVLKLPSGELFTGSSDSTIKLWKGRTCLHTFSGHADTVRCLAQMPGMGILSASHDGTIKLWALTGQPLLEMIGHTSLVYSVDAHSSGLIA

SEQ ID NO: 235565 - protein, 116 aa, Zea mays
  unsure (1)..(116): unsure at all Xaa locations
  Clone ID: MRT4577_146416C.1.pep
MDGLFDAAASAGLPIGDEGSVKRAEITFCDAPVFVDPDGRGSRALCTAQIDYVLDPARCTIRVRALQHRCSTDMNLSDXSLFIYPSNIGMKTCGTTKLLLTIPRIHDPAEELCMPL

SEQ ID NO: 235566 - protein, 147 aa, Zea mays
  unsure (1)..(147): unsure at all Xaa locations
  Clone ID: MRT4577_146417C.1.pep
MRSSVYGLGLLVGAASANINFFWVQPTCNYTDPAAFPKCLTGQHCLQNNTCIPDDASPYSKVASRSTLLFAPEKRQNNKYSQDGKCGPQNGNLLCDPNSTVYTGTCCSEYGWCGNTAAHCSTGCQSGCDNAPKASTAATPXPTLPSG

SEQ ID NO: 235567 - protein, 574 aa, Zea mays
  Clone ID: MRT4577_146418C.1.pep
MNASRKSSHLSSKDSAETARDIITTSGQIQPLKIPDAVAALAQAAAKANGETEKYLPGWPLFSPPKVQLDKCTKCSREFCSAINFRRHTRVHRRSLKIDRDFPKNRDLLAAFWNKLTVDDASKILSLTGVVIEGVTGSSILTALSSWMCKPGYASLPVAYARAGSELLDLIQAKPSMHLPVSSDELFSLLDEASEKTFLCTNTAACIQKFLFDGEVEKIATELKNVVSCASYMLEQKLLEAWCADKTAEALRCQKLLEDEEEAAQKRQAELMERKRMKKLRQKEQRLKNLKDEDATVQSPEIMDDATCSTAIQSVNSIYDPDCFEQEESQYLQFPALITLETDNDFNVDLPVEDISCDLGPEMDKGVVLRQQVVSRHHLGRTEKLAESSILSGSVVTSKHAALARPSNYKDPNVCSAPSRNKTCELKLRSEIEEQCQKHELDVDERGIGPSKNSRVLIGSIIVAIKDCSEHLLDLGSKNDPVPPNVKTKKHASVKVVQQVTHEGNRNEGVPDSDNRSSLSVTTDEISYSTCCDADLAVDEHLQCTTFSSEEATAFLSQRWKEAIAADHVKLVVS

SEQ ID NO: 235568 - protein, 56 aa, Zea mays
  Clone ID: MRT4577_146419C.1.pep
NGFVRHPIYNHHFTSIPLLSHLHVAHTLVNHMIAHDIYVKIANIKALNLIANITTS

SEQ ID NO: 235569 - protein, 62 aa, Zea mays
  Clone ID: MRT4577_14641C.1.pep
LRWPLRLEDDVLIDHSRRRLYYEQRSQLVHPARSWRRLTRGFEDAITDLEPMATGGLLNISS

SEQ ID NO: 235570 - protein, 85 aa, Zea mays
  unsure (1)..(85): unsure at all Xaa locations
  Clone ID: MRT4577_146420C.1.pep
KFKPPNPSGFGGGFPVNVXPTGKKGKGKGVSHFFNKXGAKFAGYSPFFTGDGCFPPGEVXVGGTPGFLFWAVPPVGILGGGALFV

SEQ ID NO: 235571 - protein, 55 aa, Zea mays
  Clone ID: MRT4577_146421C.1.pep
GCFFYNGTQHEQTFRWNAYSGILGIWQEWDIENNTFSGMWMREGDSCGNKNRQTK

SEQ ID NO: 235572 - protein, 66 aa, Zea mays
  Clone ID: MRT4577_146422C.1.pep
GGIIKVFCHLSPGKRQFNAPMHACIIWPKNCPCELKEGNCTIQPCVICKLKDLFGKNPGHPCVLKY

SEQ ID NO: 235573 - protein, 85 aa, Zea mays
  Clone ID: MRT4577_146423C.1.pep
KKKKEKKKRKKKKKEKKKKKKKKKKKKKKKQKNRKGKKKRRGEKKTKRKKKKRKAKKRTSEQEGTNKFRKIIKRKRSLRHHEKHR

SEQ ID NO: 235574 - protein, 56 aa, Zea mays
  Clone ID: MRT4577_146424C.1.pep
WGPKGYYEIWKKGYESREYKVVTPKGFQRPEVCNPSKSELNIGHHIENLRFVYAST

SEQ ID NO: 235575 - protein, 176 aa, Zea mays
  Clone ID: MRT4577_146425C.1.pep
MAATSSSMSSVIFLLLATLAADASAATFTVKNNCNYTVWPAVIPAGGGERLDPGQTWTVSVPPGTTGRFWGRTGCSFSGGGSGGHCDTGDCAGALNCTVSGQPPTTLAEFSIGGAEDFYDISVVDGYNLPMAFSCSTGVGLVCTSPACPAAYLFPNDDSKTRGCSSNSNYQLTFCP

SEQ ID NO: 235576 - protein, 85 aa, Zea mays
  Clone ID: MRT4577_146426C.1.pep
SSIMCSTARSFHILHLSCGLRSLEGRRAHRMTRGPRISLSIDWQRASWKAVRVARQAAPAGSRNSSNMVLRAKAQQVPVVYDRMV

SEQ ID NO: 235577 - protein, 44 aa, Zea mays
  Clone ID: MRT4577_146427C.1.pep
IYQQGLHELFLVQSNIRYYYNAYFITFFTLPIFKTSLWSHAIFC

SEQ ID NO: 235578 - protein, 47 aa, Zea mays
  unsure (1)..(47): unsure at all Xaa locations
  Clone ID: MRT4577_146428C.1.pep
MFRRADYLYFKIEGRIVPDGVNAKLLGNHGXLDKRAPGXKAFLDAFS

SEQ ID NO: 235579 - protein, 117 aa, Zea mays
  Clone ID: MRT4577_146429C.1.pep
GEAKNWSRRCRAVEALPPASAALLRHPRPRDLRHWRQLGPRGHRSGGLWFLISHPRMSAGGGASGEPYEQQRGRGRRRQASETAVQWQAQAEKESERGRGGGRREESEGVHGAPTRP

SEQ ID NO: 235580 - protein, 135 aa, Zea mays
  Clone ID: MRT4577_14642C.1.pep
RRYRVRRASTPGTFYFSVLDNGVISKEYWTIVDVAEDFSWGLFHYRGAAQAAGLSYTGAVLVTPDGSYPDLEDPRLASALENCAIKKWELYTVDNCSCMGAPLGTPEGSKLHHQISPGKESSVLQRRLIICNMLK

SEQ ID NO: 235581 - protein, 85 aa, Zea mays
  Clone ID: MRT4577_146430C.1.pep
AGRYLSALFDIHRAYIQRFFCRLLQKTPPDFFIWRILIYKHISHNGVNTKETFALLYHTIYIWVSRNFQVFNFLTSLMAQHSKIF

SEQ ID NO: 235582 - protein, 679 aa, Zea mays
  unsure (1)..(679): unsure at all Xaa locations
  Clone ID: MRT4577_146431C.1.pep
MASETETFAFQAEINQLLSLIINTFYSNKEIFLRELISNSSDALDKIRFESLTDKSKLDAQPELFIHLVPDKATNTLSIIDSGIGMTKSDLVNNLGTIARSGTKEFMEALAAGADVSMIGQFGVGFYSAYLVADRVVVTTKHNDDEQYVWESQAGGSFTVTRDTSGEQLGRGTXDLVKKHSEFISYPISLWTEKTTEKEISDDEDEEEKKDAEEGKVEDVDEKEEKEKKKKKIKEVSHEWSLVNKQKPIWMRKPEEITKEEYAAFYKSLTNDWEEHLAVKHFSVEGQLEFKAVLFVPKRAPFDLFDTKKKQNNIKLYVRRVFIMDNCEELIPEWLSFVKGIVDSEDLPLNISRETLQQNKILKVIRKNLVKKCVELFFEIAENKEDYNKFYEAFSKNLKLGIHEDSQNRTKIAELLRYHSTKSGDELTSLKDYVTRMKEGQNDIYYITGESKKAVENSPFLEKLKKRGYEVLYMVDAIDEYAVGQLKEFEGKKLVSATKEGLKLDETEDEKKRKEELKEKFEGLCKVIKEVLGDKVEKVVVSDRVVDSPCCLVTGEYGWTANMERIMKAQALRDSSMAGYMSSKKTMEINPENPIMDELRKRAEADKNDKSVKDLVMLLFETALLTSGFSLDDPNTFGNRIHRMLKLGLSIDEDEPVEAEAEMPQLEDDAGESKMEEVD

SEQ ID NO: 235583 - protein, 61 aa, Zea mays
  unsure (1)..(61): unsure at all Xaa locations
  Clone ID: MRT4577_146432C.1.pep
LXVNQNNSLYVLAGREATCFKXNIXQFFNVNSGLRNVCIXFXLXSXDHKRDPVANNNLMYX

SEQ ID NO: 235584 - protein, 105 aa, Zea mays
  unsure (1)..(105): unsure at all Xaa locations
  Clone ID: MRT4577_146433C.1.pep
LLVFGLNTLCVSIYXKDRXPXSVSXPHXHXPPTYFFLFTHXXLLLGIVGSLFSFNRYYSKVVLSCESFFIPLCLILFHFNFFMEYSTILVFFNSHITFIFFLPLT

SEQ ID NO: 235585 - protein, 119 aa, Zea mays
  unsure (1)..(119): unsure at all Xaa locations
  Clone ID: MRT4577_146434C.1.pep
AGADVSMIGQFGVGFYSAYLVADRVVVTPKHXDDEQYVWESQAGGSFTVTRDTSGEQLGRGPKITLFLKDDQLEYLEERRLKDLVKLGLSIDEDEPVEAEAEMPQLEDDAGESKMEEVD

SEQ ID NO: 235586 - protein, 126 aa, Zea mays
  unsure (1)..(126): unsure at all Xaa locations
  Clone ID: MRT4577_146435C.1.pep
ESAGKLLGHGARRLRSRAVDPAAAHQADRPPYAPREALQDSMVIKAWKKAAPNIQPHGHPSHRMEPGPRRXSXIPSKITVQCCFSYNCDIADWGVGLRMAPGTTAHMGALPARAPQWHRSLPGLSL

SEQ ID NO: 235587 - protein, 114 aa, Zea mays
  Clone ID: MRT4577_146437C.1.pep
NCFYFLFGFRGYGIMRSNIYTHLLTGPKKQRSELDAISVNHRHIHAYPAKKRTTAGTGFPPHPRRGKKSALRISPSVWSMFTSIRTTLHSLLSFHLYIATGRGSLAETLTPISA

SEQ ID NO: 235588 - protein, 77 aa, Zea mays
  Clone ID: MRT4577_14643C.1.pep
YLEAGRAGIQRRLLVIAYAVCIRCASRIDCDLFLSFKESTVKFHDQANKLLEFHNVEDPKLLFGEGKEEEEGDKADF

SEQ ID NO: 235589 - protein, 73 aa, Zea mays
  Clone ID: MRT4577_146440C.1.pep
GADHRQGDGQSRSTTVILRGPAGDSEQRSESGCELCDLERFRETIAAGRNGVPAGHIGTNRKLCIYIYMNKLY

SEQ ID NO: 235590 - protein, 353 aa, Zea mays
  unsure (1)..(353): unsure at all Xaa locations
  Clone ID: MRT4577_146441C.1.pep
HPTILAGSTYPTACFSDVSGRKNDTSENMSISTDSGVVSKQDHQGHKKELQLPGQSLFVTSEAPCKSSDASDMLSNHLPIDASDAKGHTMQSSDGILENNLARRIGGSSASAYKAPEGNRRNIRALKLSLKSVKPEKKNNDQNENMAPNHLPSQSSFSYLQKRPLDAVSXGKNSRGGPALVQQNPNTEQQPSNTNMVSNEERNQGLKMLCSQRRRLSLKSEPRLPRVENACEKETKRPNNFPLSDXNSMNCHHLNQSPXEPVAPSELPFSAPAVLKSQTRALGSAGGQKDSSSGNSCVNENTLAIENAVVSDSEDSADERERPPRSRLSLMRRRLGGKLRTIVSPQNYFYAAL

SEQ ID NO: 235591 - protein, 87 aa, Zea mays
  Clone ID: MRT4577_146442C.1.pep
EKSGLWSPSPPCVGWMACWGVLLLYERCTPSKEQGFATFSYSLQLQLVRTILIKAAVSSGSCPTFHVIRLRTELVFFHRTKYIFLLN

SEQ ID NO: 235592 - protein, 195 aa, Zea mays
  Clone ID: MRT4577_146443C.1.pep
MAEIRRKLVIVGDGACGKTCLLIVFSKGTFPEVYVPTVFENYVADVEVDGKHVELALWDTAGQEDYDRLRPLSYPDSHVILICFAVDSPDSLDNVQEKWISEVLHFCQGLPIILVGCKKDLRYDQKIIEELRKTSQKPVSPEEGEEIRKKISAYKYLECSAKTNEGVREVFEHATRAALLSRSTRSKSHKKCLVL

SEQ ID NO: 235593 - protein, 115 aa, Zea mays
  Clone ID: MRT4577_146444C.1.pep
FPQAFRAAFSVWCGVGASGIPGCHPSASLSAGPRGRSCLLSCAVYGSWVSGVHLFPEGGPSSQLWAVLTLVMHGLFPRVSLAHCLCLGLCLVRPRQFACSPRPLSLWVRLRKRGR

SEQ ID NO: 235594 - protein, 63 aa, Zea mays
  Clone ID: MRT4577_146445C.1.pep
RVHLSKTNSTTNKYWHGLKSAGTMPLQPRSELASRFIFVVIKPLPLPWDKKLEHCFSGEVILY

SEQ ID NO: 235595 - protein, 92 aa, Zea mays
  Clone ID: MRT4577_146446C.1.pep
VSTKAMSSLHEQVCVWLWQQQCSSQNPFIYNYITWFSTFLVRASIAVIVASRQDSMIQLQGEASSWVVQKMLVLSFTCSVLRYLFTQRIWVL

SEQ ID NO: 235596 - protein, 117 aa, Zea mays
  Clone ID: MRT4577_146447C.1.pep
MSALGDDPIREWILTEGKATQIKGIRSIGGGCINSAQRYDTDAGPFFVKTNSRIGPEMFEGEALGLKAMYDTKSIRVPLPYKAGAVAPNVLESWRVGSARWRTTIAWRVWSHRRATT

SEQ ID NO: 235597 - protein, 373 aa, Zea mays
  Clone ID: MRT4577_146448C.1.pep
MITGFSTAVGGKTTTHATATRDTPVSAVASAMAANVALVLLSSCSPSTSAAAASLLPRRRFLPSRRRRASSRATTIMSALGDDPIREWILTEGKATQIKGIRSIGGGCINSAQRYDTDAGPFFVKTNSRIGPEMFEGEALGLKAMYDTKSIRVPLPYKVGSLPTGGSFIIMEFIEFGRSRGDQSDLGRKLAEMHKAAKSDKGYGFPVDNTIGSTPQINTWTDDWIEFYSKHRLGYQLELASRRYGDSAILEKGQRLIKNIRPLFDGAVIEPCLLHGDLWSGNISSDSNGDPVILDPACYYGHNEAEFGMSWCAGFGGDFYNAYFQVMPKQPGFEKRRDLYLLYHYLNHYNLFGSGYRSSAMSIIEDYLYVLAI

SEQ ID NO: 235598 - protein, 155 aa, Zea mays
  Clone ID: MRT4577_146449C.1.pep
EGAHHMPSPSSSSGRPFLSGLCAAALRRKPISARASAAASGEGLVRQLGVLELVLLGIGASIGAGIFVITGTVARDAGPGVTISFALAGAACVLNALCYAELASRFPAVVGGAYLYTYAAFNELTAFLVFTQLMLDYHIAAASIARSLASYFIQF

SEQ ID NO: 235599 - protein, 72 aa, Zea mays
  Clone ID: MRT4577_14644C.1.pep
TIAYCNHTKGSGKDGFVVSTMTVFSIQPGGGGGLSCLFTGGTSTAIQAGRWCEPWFLLDRSRVDAGLPAGWA

SEQ ID NO: 235600 - protein, 180 aa, Zea mays
  unsure (1)..(180): unsure at all Xaa locations
  Clone ID: MRT4577_146450C.1.pep
EFYSKHRLGYQLELASRRYGDSAILXXGQRLIKNIRXXXDGAVIEPCLLHGDLWSGNISSDSNGDPVILDPACYXVXXXXLSIRIQDHEXGCKRMNLHVSFXNFRRDGHNEAEFGMSWCAGFGGDFYNAYFQVMPKQPGFEKRRDLYLLYHYLNHYNLFGSGYRSSAMSIIEDYLYVLAI

SEQ ID NO: 235601 - protein, 153 aa, Zea mays
  Clone ID: MRT4577_146451C.1.pep
TIHGRPTSMVEDRRRTRRARPPGSNTRRRIRAERRGAVRAGGTRDRASLALRAGAPWRAGAGASPVSQEGRAMGKGVTRACHGRYWGSHSTSMPSSEEIQARSAMGRGQREHREGAARVHREDATGEGQGRADATGGPKLGPALRMEEQRMKT

SEQ ID NO: 235602 - protein, 186 aa, Zea mays
  Clone ID: MRT4577_146452C.1.pep
MTVVEAGEVLNLKVGENPLLEGEAKTGYVSPDDQDGETASEKPCGAPQLKKGPWSPDEDKLLKNYVEAHGEGKWNKVQRNSGLNRCGKSCRLRWTNHLMPDLKKGSFDNEEIDKILKFYLKWGPKWAKIASRLPGRTDNEINFWNTSETDLPIYLSQAPAVSSLLPTCFLGVVGMCSLHPGTDLLC

SEQ ID NO: 235603 - protein, 122 aa, Zea mays
  unsure (1)..(122): unsure at all Xaa locations
  Clone ID: MRT4577_146453C.1.pep
ADGRDGRARITFFYRTVTYCEASSRCSTPPLSYLINVVARRSPIHPFRLNAAGSCCGGGXGTEGVKGCCRLRQSIIVSIGFGSSAATFSALPPVRNRLLALWGRAEGARTSSSLLHCGTDGV

SEQ ID NO: 235604 - protein, 59 aa, Zea mays
  Clone ID: MRT4577_146454C.1.pep
LVAVDLPHLLALAWPERHLPKTLEEQFGGVLVCEDLKKQAVHPSKLAQHNFTQKNQNNT

SEQ ID NO: 235605 - protein, 81 aa, Zea mays
  Clone ID: MRT4577_146455C.1.pep
SAKFTAITSSVTRTSCLLLLTLILVSVVAILPNSLCHATRAVSAIRIHWDPNHPACIRSCSASVCSYSTLTLYTVGVPYEP

SEQ ID NO: 235606 - protein, 108 aa, Zea mays
  Clone ID: MRT4577_146456C.1.pep
MNERRPVPPALTWLPCTPADPLDTFSVNQEIRVNAPTLMLLPPPPDPAFGTPPFDSSADVSVFVDWHTCTSSGRTKTTTPTNSWVASLALLILSKKPHMGAKELQSGL

SEQ ID NO: 235607 - protein, 129 aa, Zea mays
  unsure (1)..(129): unsure at all Xaa locations
  Clone ID: MRT4577_146457C.1.pep
RTSSLLAVAGASSSRDREESKTVKALKLPDLTRHSKLPHTPRGSRLLALLPSGRTCRPTPNPRSPPPPYTRSTAPSQISTSPVVPRCRGGSLPPSRPPLGFRXTRXXMDQSRRVGRVLLTVALWCHCVT

SEQ ID NO: 235608 - protein, 201 aa, Zea mays
  Clone ID: MRT4577_146458C.1.pep
MSLSKPCAMPERRIVPVPATSDIGVLPMDALREILLRLQAKELCRLRLVCRLWRSLLSDPHFAAPHYARHRAVLIIAAYKDDAGRDVLVDIMDLSGQIVKKVPAMEGDRAAVRGGGTLDRVCVRKIDDSRSSYRVFNPIREEVYYLPDRLLDPATGAVYRIPDSYAEEHVELASSLITEPKYLFGQVARTGECMFRMLFHF

SEQ ID NO: 235609 - protein, 60 aa, Zea mays
  Clone ID: MRT4577_146459C.1.pep
HASVCCFFFFFLILYSTYLSSFWEVFFFGKGPMLMAKNFNCLISSPRFPRNHRLFKGKPR

SEQ ID NO: 235610 - protein, 45 aa, Zea mays
  Clone ID: MRT4577_14645C.1.pep
FGRVRLLSMERPDCLWGHPFGDILLISSKLINRTNWRQSLKPADR

SEQ ID NO: 235611 - protein, 137 aa, Zea mays
  Clone ID: MRT4577_146460C.1.pep
MSLSKPCAMPERRIVPVPATSDIGVLPMDALREILLRLQAKELCRLRLVCRLWRSLLSDPHFAAPHYARHRAVLIIAAYKDDAGRDVLVDIMDLSGQIVKKVPGMEGDRTAVRGGGTLDRVCVRKIDDRPRSYRVVN

SEQ ID NO: 235612 - protein, 35 aa, Zea mays
  Clone ID: MRT4577_146461C.1.pep
LLKNYTQKPKQPLPKQNSKYISLTKIIFLSIKALP

SEQ ID NO: 235613 - protein, 117 aa, Zea mays
  Clone ID: MRT4577_146462C.1.pep
MKVNGSPVADGRANAAGSKERRGRTLDGSAVVSGTERAWGGKGFTAFVNSNVQVINNSLLLQSSCNGGGPGVHLKLSTKAKKKDGEGAGGKSGSAAAPKKMISLHPSLARAWRSSSD

SEQ ID NO: 235614 - protein, 190 aa, Zea mays
  unsure (1)..(190): unsure at all Xaa locations
  Clone ID: MRT4577_146463C.1.pep
KPPELRKPLFRRYPQGGEGGGPNYVVTLSFLFLFLLHHLLRRHRRRTNGKNKRTQLPPSPPAIPGLGGXGGLXKPIHPGLAHLTERYGPGCFLRLGSREAVVGSSAAYATECVTENDVGGANRPRVPTLLRGSFGGATLPMGRYGPDWRNLRRVATEQLLSAHRVNCMLPGISAQGRAMARRMYQSAAGG

SEQ ID NO: 235615 - protein, 47 aa, Zea mays
  Clone ID: MRT4577_146464C.1.pep
LQQLGITTQKEKHTTGRDSPEFPIQREPITLEHDFELKDAEKDSHNP

SEQ ID NO: 235616 - protein, 97 aa, Zea mays
  unsure (1)..(97): unsure at all Xaa locations
  Clone ID: MRT4577_146465C.1.pep
LFFPPTLKKEGGRIKXVFGHXPFHNKLNSFAIYTFEDFLRLLVMVHHTLPSILGSVMSNKMMYILFEHAKTCILRGKHYVYYSIHSRNVCAIYNNIY

SEQ ID NO: 235617 - protein, 78 aa, Zea mays
  unsure (1)..(78): unsure at all Xaa locations
  Clone ID: MRT4577_146466C.1.pep
QDSLFSLCYTAPLSGSETKRLRAMASDAASVPNSXXAASGCPDMYADIGKHAKYLNTLNDKRERLAKARRNITRNSKK

SEQ ID NO: 235618 - protein, 405 aa, Zea mays
  Clone ID: MRT4577_146467C.1.pep
MPPVKKSKKGKRKSKDGKLKIVRARGAPPALPPELRALDTEWWYAFLNKQVELEHAVPPDEGEAFRHFFRTSRKTFDYICSIVREDLISRPPSGLINIEGRLLSVEKQVAIAMRRLASGDSQVSVGTAFGVGQSTVSQVTWRFIESMEDRARYHLAWPSQERLEQIKAVLEDAYGLPNCCGGVDATHVIMTLPAVESSADWCDHAKNYSMFLQGIVDDQMRFIDIVTGWPGSMTFSRLMKCSGFFKLCEAGERLNGSVKVSAEGAEIREYIAGDSCYPLLPWLMTPFEGKHLPAPLQNFNARQKAARLLGTNALARLKGSWRILHKVMWRPDKNKLPSIILVCCLLHNILIDCHDELLPSVQLPEHHDTGYNRENCEQVDPNGKVMRENITAHLQHCEASKFLCN

SEQ ID NO: 235619 - protein, 104 aa, Zea mays
  Clone ID: MRT4577_146468C.1.pep
TRDVSRCRTLLEKILCMKRAHPTDWHNLNDLDKDKRIQFHMRKALKDHDDAEGSLITDHAYISVSVRKGTIIWGLKLQHAMMIGGKTREHDYKEQGASVNNTLN

SEQ ID NO: 235620 - protein, 86 aa, Zea mays
  Clone ID: MRT4577_146469C.1.pep
SMFKSTRGAVWCELSPNFGSLSALVAALGLLERDDPSAHHMQPLVPIAGERFLFQPFRCHLRALVNPASGHKPGLAPLQDLAGSWW

SEQ ID NO: 235621 - protein, 48 aa, Zea mays
  Clone ID: MRT4577_14646C.1.pep
PRVRPRVSNVVDHLLLSIAFTIFLPRFAIHSFTAESIAVSLTECSSFF

SEQ ID NO: 235622 - protein, 338 aa, Zea mays
  Clone ID: MRT4577_146471C.1.pep
MWALNNAKAGGPCLTPRHPAPPSLASPSTASAGRRFWRRSPVWAPLVAVRASGGTRKDGSVGGEASGEEADSKASSAGHDDASTPTGDTSAGLNQPHDEPKTSKPINVSSSNYWRDVRANLVRREQELLVDPSTPTESKASSGDPLQLPQKWAHAITMPEAGCVLVATEALDDDSIFERTVIFLLRLGTRGTFDGPFGVIMNRPLYTKIKHVNPMFRDQATPFGDSPLFFGGPVDMSMFLVRTDDSARLKGFEEVVPGICYGFRTDLEKAAALMNSGAIRTQDLRFYVGHAAWDYEQLLGEIRAGYWAVASCSTELIGDALMGDPSRLWTEIQQLMGG

SEQ ID NO: 235623 - protein, 166 aa, Zea mays
  unsure (1)..(166): unsure at all Xaa locations
  Clone ID: MRT4577_146472C.1.pep
PASISHVQDPFRYYTYDVPKVHNEVEHWHLDPIKAHIIFGGCTDKLIHKEQAEDFYRIKXRLAWETRIEMPSXGAASRATAPTLLRLSRIEYSLSTRDTGCCSNHNITYHLYRGFPNXKXQHLHHKDXIYPENEYPNMXVVGQNFRRILENVHAIELKYPGKGTFY

SEQ ID NO: 235624 - protein, 85 aa, Zea mays
  Clone ID: MRT4577_146473C.1.pep
GAKKKLFQKQDQALHTALLCFTSTSSTYLISFNPPHFPLSSNRKNMPPSFCRAPNGVDLPSNFLRFTPAPSQPPHHTLYLTPPAL

SEQ ID NO: 235625 - protein, 94 aa, Zea mays
  Clone ID: MRT4577_146474C.1.pep
PSFNQGSRWSWRWVFPGVPVRWQIMPVLVGSPKLSSPACWVVCLNCEQPLSFYVCTPCKALWAWLIFLWQTFRPAWGCKLFLNFTANCVPEPSF

SEQ ID NO: 235626 - protein, 127 aa, Zea mays
  unsure (1)..(127): unsure at all Xaa locations
  Clone ID: MRT4577_146475C.1.pep
HSGTIPRSAWVQLDGRVGTIPLVADSTLPALCLLIGKLMTPELTNADTIWFMALXYMGISATEMLEMRESSXTFYICRTNIQLWHMXSVSAHMLTVVQGLLTASDAYASSLCGTLSAGDAQEFSYLY

SEQ ID NO: 235627 - protein, 61 aa, Zea mays
  Clone ID: MRT4577_146476C.1.pep
GFFKRAAPSRMKHFFKNLFFNMACRFFFFFYLHFFFYCIILCFSCVLYLKYHTTISGLYIP

SEQ ID NO: 235628 - protein, 147 aa, Zea mays
  Clone ID: MRT4577_146478C.1.pep
TNNLNPHQMDSADSIADKAIGRMQEIADKIFSVARETIRPGRGLTSFDATKLRVALEDIACMLEQDSLVLQENLDIVNNVNNPGVAATNLLPCPHHPLLTTTLLQTGTLWSTSKTSGVLNMTSIRCLHLVTMRFKLEHGEPSSQVLG

SEQ ID NO: 235629 - protein, 210 aa, Zea mays
  unsure (1)..(210): unsure at all Xaa locations
  Clone ID: MRT4577_146479C.1.pep
MPDSPELVVRALGKRLAHPRLCKDALIKLLKQAESALSEFSQSSSLQDPLHALSKSLVQTTLLNHKDKDVKLLVSVCLIEVMRVLAPDPPFSDEILKEIFKLFISIFADLAETSSPFLTRRMKILENVAALRCSMIMLNIGCEDLILDMVKIFFSTVKHGLQKSVHQAMLSMMTXILNEXXTQSLVDVILRNLXKDDKGACHKLAVNIIE

SEQ ID NO: 235630 - protein, 122 aa, Zea mays
  unsure (1)..(122): unsure at all Xaa locations
  Clone ID: MRT4577_14647C.1.pep
QSTVAIMDHFGKFDSVLDPRCHYMPXFTSNRVSRHLTLTLQGGGGPPXFYXTNDNLFLNXVVASIQYPALPNKTSDPFYKLSNTSPQIQPYFFDLITATLPNLHFHHPFHQKTKSKRPGRKT

SEQ ID NO: 235631 - protein, 208 aa, Zea mays
  unsure (1)..(208): unsure at all Xaa locations
  Clone ID: MRT4577_146480C.1.pep
MMEKFSGQVVEVTADVXNDQARRRATCTKAWQLVRGFLDASEAAVLVQLGDHGHLAYSHTNQALLXPRXFAAKDDVFCXLFEGELDNLDRLNQHHGVSRKDANNVLLVLQSYKMLRDRDPYSRRFMLAQLIVSYTFDLFDKYYKSLLVASDPXSLLPLFWRSPADACPVFSDDIDMLIGSCVKSLAPFPQGCFYSKALLGLKRYHNPK

SEQ ID NO: 235632 - protein, 41 aa, Zea mays
  Clone ID: MRT4577_146481C.1.pep
TRVLTLGSAFYYISSITGRGSMISFTIFGSSSRLNVSSLLI

SEQ ID NO: 235633 - protein, 103 aa, Zea mays
  unsure (1)..(103): unsure at all Xaa locations
  Clone ID: MRT4577_146482C.1.pep
MSTEEAAKKTEIDGSGSGGITKSEMMSEMRSMIQELMGLGLIGARANTGTSELKLELVPNDVKLEGSKNYLSWFRRVRVLLGGKGVXHYLEETCVEPIDKLGA

SEQ ID NO: 235634 - protein, 516 aa, Zea mays
  Clone ID: MRT4577_146483C.1.pep
MGSPKAAKSMVKQRIWRHRLVAPFAAVLITAVVVFSGLFAQDPSATSEFTAVNVGNTLPVRDKSESTEPNQAFQGTVPAAGERGTATAVPAQRERSSGGSEPEEKQSPPQDQEGEETSAKSGLVQYTTCTPRTGATVCDLSNQRYDICELCGDARTIGRSSTVMYVPQPLTSNGEEWNIPAQSRKSLPWIKKVTVKTLKASQQAPICTSRHAMPAIVFALGGFTGNVWHDVSDVLVPLFLTARQFDQDVQLLVTDSRPWFIKKYSAILRRLTRHSVIDFDADDEVRCYPHVIVGLRSHRDLGIDPDSTPQKNYTMVDFRLFVREAYGLPAPGVDIPYRADKDEPEKKKPRMMLIERGKTRRLVNTPDVLLGLGWFGFEVVRADPRTHSDLEEFARLVDSCDAMMGVHGAGLTNMVFLRSGAALVHVVPYGVEFMADGFYGAPARDMGLRHVRYSVGPDESTLLEKYGRNHAVVRDPEAVRSGGWEKVGEVYMTEQDVVLNVTRFGPSLLKAIEFIV

SEQ ID NO: 235635 - protein, 250 aa, Zea mays
  Clone ID: MRT4577_146484C.1.pep
MGSPKAAKSMVKQRIWRHRLVAPFAAVLITAVVVFSGLFAQDPSATSEFTAVNAGNTLPVRDKSESTAARGSPNKEDLATAAFEEELDVGNSELNQAFQGTVPAAGERGTATAVPARRERSSGGSEPEEKQSPPQDQEGEETSAKSGLVQYTTCTPRTGATVCDLSNQRYDICELCGDARTIGRSSTVMYVPQPLTSNGEEWNIPAQSRKSLPWIKKVTVKTLKASQQAPSCTSRHAMPAIVFALGGFTG

SEQ ID NO: 235636 - protein, 109 aa, Zea mays
  unsure (1)..(109): unsure at all Xaa locations
  Clone ID: MRT4577_146485C.1.pep
MMDLADPQQQQRIIDGAALLLATAAFLRILLGSRSGGDKRLPPTIPGTPEDGALVKKMRXTIPMIREXYDRLGSAFTDTIITRRITIFVGPETTAHFFXGNEVEMSQQE

SEQ ID NO: 235637 - protein, 61 aa, Zea mays
  Clone ID: MRT4577_146486C.1.pep
MGSPKAAKSMVKQRIWRHRLVAPFAAVLITAVVVFSGLFAQDPSEFIGTRSHLGVHCRERG

SEQ ID NO: 235638 - protein, 112 aa, Zea mays
  Clone ID: MRT4577_146487C.1.pep
FARLVDSCDAMMGVHGAGLTNMVFLRSGAALVHVVPYGVEFMADGFYGAPARDMGLRHVRYSVGPDESTLLEKYGRNHAVVRDPEAVRSGGWEKVGEVYMTEQDVVLNVTRS

SEQ ID NO: 235639 - protein, 136 aa, Zea mays
  Clone ID: MRT4577_146488C.1.pep
GASRALGAEQPITQNVFLCRSMRPSHEKHPCNSRQGLSCMKSARVPFFEGEDVKACYYERSQLALANKGQAHRGGGQRCRSVDLIKRLSGTHRQRISPFEQHFPVHNMADVFGLNSQMRQVTCICCCQRIVVTCKL

SEQ ID NO: 235640 - protein, 56 aa, Zea mays
  unsure (1)..(56): unsure at all Xaa locations
  Clone ID: MRT4577_146489C.1.pep
VKYLFLSFFPIKGEPPVSREGSIXTHYSASVRGSRIPLFPVFRLRFSPSPCSPILN

SEQ ID NO: 235641 - protein, 202 aa, Zea mays
  unsure (1)..(202): unsure at all Xaa locations
  Clone ID: MRT4577_14648C.1.pep
FGDRKVNKQTXRNPNSTLPLPPLLVSTTSPLRLGPHEIWRPGRHCSPFPSSARKPRAREGEGLPSPIRKASPRRAVSSSGRAISSLLLFSRAPLHPGRVTALIWIRLAAASGARGIAPWPAGMSGFVRVVVSDPSLQGQFTQVELRSLKAKVMFASAGWFFVPLPLRRKLQLFARLVHCVILIYGWCGAVRVSEERFRPCHH

SEQ ID NO: 235642 - protein, 68 aa, Zea mays
  Clone ID: MRT4577_146490C.1.pep
LVVEYQHAIVDPEQLWLVRLKSWLLVFSLLVFWKEASCDYRRSNCALQVQPPFPSHTVLRTCGSAVAG

SEQ ID NO: 235643 - protein, 84 aa, Zea mays
  Clone ID: MRT4577_146491C.1.pep
SPTCSKPSIPITSTSASALSLSPMSYLSHRYKRLVEDRTQLAAIRQQCTARSALWPIWKVRTLFRSEASDCIRQLARECPCPLY

SEQ ID NO: 235644 - protein, 117 aa, Zea mays
  unsure (1)..(117): unsure at all Xaa locations
  Clone ID: MRT4577_146492C.1.pep
IRSIAPHRGREAARGGAAWAWPWRRPCSSLRWLTLQAAARSRGRSWLLAAVTTTTTQPISADCPTSLIHHGAGLRVRMLSWRSGDAAXLLRRLDTPACRPPWITHQHHKMPRRWRTR

SEQ ID NO: 235645 - protein, 136 aa, Zea mays
  unsure (1)..(136): unsure at all Xaa locations
  Clone ID: MRT4577_146493C.1.pep
RSSRSRAGCSFADCLHPASSPALVRFAASFFRVAVLQLQESDAHKFAASFHPLTPTLPQLPSXVKEALCARKLSTRQQAQDSDELGGGADTILAMLWDSDSDDEAHVVDHPTEHRAAPHAEKGKTMADANASSSGA

SEQ ID NO: 235646 - protein, 49 aa, Zea mays
  Clone ID: MRT4577_146494C.1.pep
KSINCSKCFAPFSSRVLFKKTFPLVVRWLSSFRTPLEHSGFQKPCNNFI

SEQ ID NO: 235647 - protein, 88 aa, Zea mays
  Clone ID: MRT4577_146495C.1.pep
CAPFIPHCSCYLKGLLVRTSNRRFLVITLGLLDSWHSRIACGNSVFIHRCPAIFYSGARFSSFTVPSWIVRFWLAALSMPYRQEPLIR

SEQ ID NO: 235648 - protein, 153 aa, Zea mays
  Clone ID: MRT4577_146496C.1.pep
KNKTSRRRAIHKEGKYILFAVQELAAGDLCEGRFVFSRETSRARLRSPEDDDKSNLIKDGMNPKSLLQTLLMRAGHTPPRYKTKHLKTNEFRAVVEFKGMQFVGKPKRNKQLAERDAAIEALGWLTQTSGVNAVFIRREQELPPRLNLQRHVI

SEQ ID NO: 235649 - protein, 350 aa, Zea mays
  unsure (1)..(350): unsure at all Xaa locations
  Clone ID: MRT4577_146497C.1.pep
MEMPAGSGAPALARQGSVYSLTFDEFQTTLGGASKDFGSMNMDELLRNIWTAEESNAMAAAAXHGHGHGGRIRGRARAAAAAAAARGAHXRQGSFTLPRTLSQKTVDEVWREIVSLTSGEDAQQVAAPAPAPAPEPEPAPAPAPLPAQAQAQQTLGSMTLEEFLVRAGVVREXHGGAPDPPAAAARAXGFSPRGMXRAADPXLGNGMVAGVVGQGLGGGVTVAAPTTPVVFNGLGKVEAGDLSSLSPVPYPFDTALRMRKGPTVEKVVERRQRRMIKNRESAARSRARKQAYIMELEAEVAKLKDQNEELQKKQVEMLKKQKDEVLERINSQHGPKAKKLCLRRTLTGPW

SEQ ID NO: 235650 - protein, 77 aa, Zea mays
  Clone ID: MRT4577_146498C.1.pep
PRSRRGTSSFLAVCLLRLHFGLCPLQAQSHLQPWVKEKSHINICELLDMPTLATQRPSGHLIYRVGEVDQRVIAEDR

SEQ ID NO: 235651 - protein, 75 aa, Zea mays
  Clone ID: MRT4577_146499C.1.pep
MVRHPGQHLIRGQGKQRLLPHSTSQKGVHITRAFLASPSYIMLLVKWQLQSEACWGTQCVTTRWCWRAPHQGQAS

SEQ ID NO: 235652 - protein, 83 aa, Zea mays
  Clone ID: MRT4577_14649C.1.pep
SVSQLRTMACSEYERMMMADVCIVSSLGLLLRFWRAVCCVVWVPHVSRLAMCRAVLCEHPPIILKTPPVVCAATCKKERSLEI

SEQ ID NO: 235653 - protein, 60 aa, Zea mays
  Clone ID: MRT4577_1464C.1.pep
SSGSTPSCPRRRRGSSGSSAPPSSCSASTPSGSAPAPPPPPPTTTTPPGAPPRAVTACPR

SEQ ID NO: 235654 - protein, 107 aa, Zea mays
  unsure (1)..(107): unsure at all Xaa locations
  Clone ID: MRT4577_146500C.1.pep
FLXXGVFPGAASASSGCSCAAASAAAAARSLAGCCFCAVARXSAFLVLAVRRRGAPAAARCVGALLPALWGFPXPCAPGXXAAXVAAALALGLGLXRLLSGVGRVVV

SEQ ID NO: 235655 - protein, 125 aa, Zea mays
  Clone ID: MRT4577_146501C.1.pep
LLALPPMPTGDRRKQGNYHAGQRWTTLAWREGWARVRAGRAARCACYYHGTLLHHVYAGHVWVRRCPPRPQGAGRGHEILPGSPPPSDRPWTSSSRCSAAVVLNDNHRTREVTPSTSGAPSRVAR

SEQ ID NO: 235656 - protein, 89 aa, Zea mays
  Clone ID: MRT4577_146502C.1.pep
VADKLRSSNHRIKVAMLDVIPENTLRIVALVTGPIIRLFFDKYNMLQNSKDVYKPLLSQMNSRSCIVFSLAYVECALWPASLSSTPPIA

SEQ ID NO: 235657 - protein, 76 aa, Zea mays
  Clone ID: MRT4577_146503C.1.pep
LLQHPFSLESILFPPSTLPSTSWKATRASRIHPSVSVIHQFLLSCGPILVATLYCSSRLRMRSTKIKVESSTRPEA

SEQ ID NO: 235658 - protein, 131 aa, Zea mays
  Clone ID: MRT4577_146504C.1.pep
LGEPILDGVVYGNLMKGYFLKGMEKEAMDCYAEVLGEGSRVGVGAVRASFALDALGSWGRLDDALNLFDRMCMEHDPPRTITVNLGSFNVMVDAYCRAERGQDAIEVFGQMPEKRPAPDALPHYNLIDWLR

SEQ ID NO: 235659 - protein, 92 aa, Zea mays
  unsure (1)..(92): unsure at all Xaa locations
  Clone ID: MRT4577_146505C.1.pep
MIRSSPACSKKNLSEIGMQQHDLASLDNPFTEEELXAAVNDLPLDKAPGPNGFTGRFYKVCWSIIKNDLLAASPACARGHIFTFRLLNTAFI

SEQ ID NO: 235660 - protein, 78 aa, Zea mays
  Clone ID: MRT4577_146506C.1.pep
STEESNVRPTTFSISPLKPKPRDHLFYRSIVPFKRIILALPEVVFLHPLLRWWLGQVPCIRCGTPHHFSSFAPPQSPK

SEQ ID NO: 235661 - protein, 123 aa, Zea mays
  Clone ID: MRT4577_146507C.1.pep
FLSLPPLFGRDWGCIRTISFVFCSMLFCVSPMIGSIAYPIVDTLFSSGFFVLILKGEHHGQFCVYFTYSPICVYSTPTKSCTSAILHAPNLLVNVHLFGPITSEPWSLLSHFLAPYGFFAVPL

SEQ ID NO: 235662 - protein, 455 aa, Zea mays
  Clone ID: MRT4577_146508C.1.pep
MGASSTCPCHHFSSSSILTKRAIAFVLYALVPLALLHYLLSLPPRLPSPPTTGAATSPSRPQQAEEAPAARCDYSDGEWVRTAAGPRYNGSSCGKTIKAGQNCEAHGRPDTGYIYWRWRPRGCALPPFDPEEFLSAVRGRHVAFVGDSLAGNQCESLVCLLASAFPAQLVRGAGGGDGDGDGDELRKFRRWAFPSHNATVSVFWSPFLVNGTERPKSPAAAGGLDHNRIYFDQPDERWAAAVPGFDVVVLSAGQWYLNSAMFYDRGAVIGCHRCPEPNRTETGFFGVFRLAVRNALREVISRVAATSSPARPRLAVVTTFSPAHFQGDWDSPTACVRTQPYARGEREMEYMDLEMLRAGVEEVAAAGADASERGAGLAVEALQVTRLAAMRPDGHPGLYTRAFPFAEGAKDRMPNDCVHWCLPGPIDTWNEILLQLVKGWAVGVGAIADTSSPSP

SEQ ID NO: 235663 - protein, 110 aa, Zea mays
  Clone ID: MRT4577_146509C.1.pep
MDGCTPSFFYSSSASPRGPPPPPPPGSPPPPALGGPPPVSPPPPGPPLPPPCVPPPPSPPPPPPPRVPALPPLRLPFAWALRLWLPVFRPLCVLLFVFWLVGVYCITSKQ

SEQ ID NO: 235664 - protein, 40 aa, Zea mays
  Clone ID: MRT4577_14650C.1.pep
LEGPQRTAPSCVKKVGMPPLQTASRPKASETRTPATRNGD

SEQ ID NO: 235665 - protein, 79 aa, Zea mays
  Clone ID: MRT4577_146510C.1.pep
RRGFNKIGVLFLWGNGKQLFFNKTIILYLLAKWETTGFYQNRCSPLTVRAGRTTNFSGFFQEGLSRARTYNWGVKPTGG

SEQ ID NO: 235666 - protein, 234 aa, Zea mays
  Clone ID: MRT4577_146511C.1.pep
MENGLVDYSPHNPTQIEKLDSASNVILIDNYDSFTWNIYQYLALEGASVTVYRNDQITLEGLIAEKPTQLVISPGPGHPDTDGGISKAAIREFSGKIPVFGVCMGHQCMISVFGGKVDVAGEILHGKTSVLKHDGKGVYHGLPASLDVTRYHSLAGTHPELPDSLEVSSSTNLEQGAKPIIMGCRHKEFTTEGVQFHPESILTKHGRTMFRNFLKLRGGTWKEHDSCKSEPLSI

SEQ ID NO: 235667 - protein, 74 aa, Zea mays
  Clone ID: MRT4577_146512C.1.pep
MSKRGRGGSAGNKWRMSLGLPVAATVNFTDNTVSKNLYIICVKGIKGRLNRLPFGCVGDIVMATVKKGKPDLKN

SEQ ID NO: 235668 - protein, 93 aa, Zea mays
  Clone ID: MRT4577_146513C.1.pep
GATCKQGREHQRGETIPVGGPTSFMKRNRPKFTLFVKKRPPRGGGAPFGRFSPPQRGAPKPKCYGKQGGPENANQKNSSRGRAHRAPFLTGGE

SEQ ID NO: 235669 - protein, 195 aa, Zea mays
  Clone ID: MRT4577_146514C.1.pep
MGMEIDMETYPNLNTSPSAATASGDAKACANCHTTKTSLWRGGPEGPKSLCNACGIRYRKRRQAIGLDAGAAAAANSQQDLQQPKKKAAVDPQQQDQHQLRKKTTAVANPQQDRHQPRKRAAAAAAATDPQHTSITKKDTDKKDQQVTVDLHVVGFGKEATFKQRRRMRHNKCMSEEERAAVLLMALSSGVIYAS

SEQ ID NO: 235670 - protein, 72 aa, Zea mays
  unsure (1)..(72): unsure at all Xaa locations
  Clone ID: MRT4577_146515C.1.pep
RTMLIGADPTHCRXRCIRVTTHHCSFDGTRYTHHRLRFXKVHLYNNYTRSWRIYARCAGLKAHIACHCINLP

SEQ ID NO: 235671 - protein, 644 aa, Zea mays
  Clone ID: MRT4577_146516C.1.pep
MDKTTQGLEFGGGINSPKPYCYWSTTQDTTVHKDSTPEAYSTFSISNSKASKRKQGAMSGAKGGNPLLTLGLGCSPSSSYNSKLSSGTACITSSSLLKEIDEESSIDLGLNLGLYIGNDIGHCQQKSHAGFENVLSTNSPKLDLQLSLSTSSPESVVIDTNRSPDGLAMPMANSPLAIVEEGSVPHSWVFEHSIVSSSHASKATHGFPLSKKTNGGNASVPSHVMSSTMFTSVKGPVASASETTNSQQRNSNAKSCQFPGCVKGARGASGRCIAHGGGRRCQKPGCEKGAEGRTIYCKAHGGGRRCQFLGCTKSAEGRTDHCIAHGGGRRCSHEGCSRAARGKSGLCIKHGGGKRCQKENCTKSAEGHSGFCIAHGGGRRCQFPDCTKGAQGSTKFCKAHGGGKRCTFVGCTRGAEGSTSFCKGHGGGKRCAFQGGGVCPKSVHGGTQYCVAHGGGKRCASFGCTKSARGRTEYCVRHGGGKRCKFESCTKSAQGSTDFCKAHGGGTRCLWGQADTSFGAGAQQCDKFVRSKTGLCSAHSALIQDHCVHGGGTLGSAIYQSVHVKPTEMINGDKTLLDPAIPVPNSGVHPPVLAQSMIDPLPEGRVHGGGLLALLSRGGSRTSAGGSELCFGQDRVDLRLSGSP

SEQ ID NO: 235672 - protein, 51 aa, Zea mays
  Clone ID: MRT4577_146517C.1.pep
SKNMPTHCNAHIHFTLSPLHLLLGLQAPRPAHLMYYAKKDPTAAPRAAPTA

SEQ ID NO: 235673 - protein, 78 aa, Zea mays
  Clone ID: MRT4577_146518C.1.pep
PRVRYFEKLASELAPRSYLKGKAESVMQKLVTCVQNTVELYHELHALDRLEHDYRLKQKEQDGLSLRRDSLDILKQAV

SEQ ID NO: 235674 - protein, 263 aa, Zea mays
  unsure (1)..(263): unsure at all Xaa locations
  Clone ID: MRT4577_146519C.1.pep
LEAGRDLPHSLQSLRMAPHAEEPRPDTGVDLIQHDQTKSYGDWRDEFHRDGCCVIKGVVSPERAEYYKAKQIEWLQNFGLGFDPNDKSTWTKDHLPVSFKGGMYFGYGSNHEKFVWEARTEPKVLDVFTKLWETDELLTSFDGMNITLPRQKDITWSPWPHCDQSQLRKGMQCVQGLVNYQPNGPNDGGLVLMKGSSKLFDEFFKEERTGAQSVDAPPPEMKFIDHFRFSEEHVKWFEDRGCKIEKLTWKLAIWFSXTAGRCT

SEQ ID NO: 235675 - protein, 105 aa, Zea mays
  Clone ID: MRT4577_14651C.1.pep
HSSAHASGFLAHRTLFGAPGLAPSKPATLENSRAVSAIVHRTVWCATGPSGEPAEQRLTVANGRLQKRSAVNSASTEVRAQKLEGTELSGAARRQTSPTVNCSEP

SEQ ID NO: 235676 - protein, 275 aa, Zea mays
  unsure (1)..(275): unsure at all Xaa locations
  Clone ID: MRT4577_146520C.1.pep
MDAAPLLALLLAAVSLSAAAAGDGAHPGYSDEGTCTVDAAGAGVGSGPELRRLEERRPGRIIDITHAYVPDLLAFAPGAVTGPLVHLKESMANGSEYNLSELRLECHMGTHVDAPGHMNQGHFAAGLDVDTLDLDVLNGPALLVDVPRDTNITAEAMEFLNIPXGVRRVLFRTLNTDRKLMWRKGGDMSYVGFTEDGAQWLVDNTDIKLVGIDSLSVAAFEHLISAHVVFFKTPDIIPVEGLKLDNIETGIYMLHCLPLRLVGAEGAPTRCILIK

SEQ ID NO: 235677 - protein, 42 aa, Zea mays
  unsure (1)..(42): unsure at all Xaa locations
  Clone ID: MRT4577_146521C.1.pep
FLXQKKKKKKKKKKKKKKKKKKKKKKKKKNKKKKKIKKYKIK

SEQ ID NO: 235678 - protein, 127 aa, Zea mays
  Clone ID: MRT4577_146522C.1.pep
VPLSFPARNQNRVQREIHGDPAVPYPLDSLGCGQASGVRPPAASLPSGRQPPPAPPLSAPLVCSISRPPHPPTASISTPATSLVFVIRGFLHSNSQWVSTIIPLISCNSNWIYSVNQVALILSVGLV

SEQ ID NO: 235679 - protein, 63 aa, Zea mays
  unsure (1)..(63): unsure at all Xaa locations
  Clone ID: MRT4577_146523C.1.pep
MKLLILDLNGLLADVLEDYHNAHXAHAEVRTKLMFRRPYCDESIRLYSDNVELGILSSRKREN

SEQ ID NO: 235680 - protein, 102 aa, Zea mays
  unsure (1)..(102): unsure at all Xaa locations
  Clone ID: MRT4577_146524C.1.pep
GPPTPPERGKGKNPWPNVCPPSGLFFNPFGLFXTRVPPFFFGVFKNKGGGSPLFWGRAPGPPPKRPQRVSQEGGEKYCKKKGARNFFQKGVVFFPPPLGVKN

SEQ ID NO: 235681 - protein, 107 aa, Zea mays
  unsure (1)..(107): unsure at all Xaa locations
  Clone ID: MRT4577_146525C.1.pep
QCSLPTIYITTQFPTRVTLFGLXHPSVHAYNPQQTIECSVLQQPIFQLQQQSLAHLTIQTIATQHLQHFLPALSHLFIVNPXPYLQQQLLASNPLALANIIANQPQQ

SEQ ID NO: 235682 - protein, 48 aa, Zea mays
  Clone ID: MRT4577_146526C.1.pep
SKIGECDKEQQSKPKPTHPNCLGGGACLPACARATTDHTSRCVRGRVG

SEQ ID NO: 235683 - protein, 169 aa, Zea mays
  unsure (1)..(169): unsure at all Xaa locations
  Clone ID: MRT4577_146527C.1.pep
PDLPPPHPSVPPAVSLLQLRPTPLAAGCLRRLRHAPSRSSPTPPSPSPPTPDSAPASPPDAVSIMARRGLLEQDLTKVDDTKLTPVSPEVISRQVTIDIGTIGHVAHGKSTDVKAISGVQTVRFKNELEXRNITIKLGYANAKIYKCEDDRCPLPMCYQAYGSGKKDTP

SEQ ID NO: 235684 - protein, 111 aa, Zea mays
  Clone ID: MRT4577_146528C.1.pep
MVLLSLEALRKRNVAGPLLLFNLALYVSMLGFASWALNAFVDHIGDHQYYDPPAGDACTCMDTHTPAGAAPRSAGDEAMLHFLQFALLAAVLGSAAKAAAAFHARALLRLV

SEQ ID NO: 235685 - protein, 128 aa, Zea mays
  unsure (1)..(128): unsure at all Xaa locations
  Clone ID: MRT4577_146529C.1.pep
LAXXAXKETXXDTCCGTGVHKERRMVSMLFPREYDAALASGTTARFMHNWGQCEGIDRDQNGQRMISSFNRYYIARYTLLRSDIIQEKKKGRPPTSEGGPAPKKDHIWRSELPPPECNAWFRTLVTLK

SEQ ID NO: 235686 - protein, 82 aa, Zea mays
  Clone ID: MRT4577_14652C.1.pep
GIPPPEVEREHPNGPGVAKKGRQFQIPEVHLALRFSKWRRCEIHPVAGNSHPLICFVSRKSVTTTYPLFIYKQVIARACVSV

SEQ ID NO: 235687 - protein, 45 aa, Zea mays
  Clone ID: MRT4577_146530C.1.pep
LRFAFLSRASFFLFPLNRVTKRPGHSLVYSALYLVGSPMTNELNS

SEQ ID NO: 235688 - protein, 53 aa, Zea mays
  Clone ID: MRT4577_146532C.1.pep
ISEWGSFGEISFLFRMIPGLCRPQYVFVFVLFYDGIRQVPGYFVICFSGAWGF

SEQ ID NO: 235689 - protein, 67 aa, Zea mays
  Clone ID: MRT4577_146533C.1.pep
IGTIRINYTLTPNDYLHNPGCPCFIHQSNIISAIAQSTAELNGPQSSRTSSEGPNADDSTFQITQYN

SEQ ID NO: 235690 - protein, 110 aa, Zea mays
  unsure (1)..(110): unsure at all Xaa locations
  Clone ID: MRT4577_146535C.1.pep
DREIGXREKVXXSVIXFXIFXVXXXXXLYXIDXRXGGDXFXWMXVXXXXXXXIVMELGIIXIVXCGVVMEXVVGLKIIEVXXSVREDGXVVNGGXKVVGVLVGIGEGGGY

SEQ ID NO: 235691 - protein, 84 aa, Zea mays
  Clone ID: MRT4577_146536C.1.pep
NFLGGKIFPGETFFLFLSPGFISPPSGEILSPLRIPPENISRAPGSFIWGPPLFFFFLFSPSFSFLIKLPQFIAIGVHCIITVY

SEQ ID NO: 235692 - protein, 61 aa, Zea mays
  Clone ID: MRT4577_146537C.1.pep
MATVNCLYVAAASTAVSTAALQWWASSLLDGDAGAGGDGDWLGAVLRVTVALLANLAAHVF

SEQ ID NO: 235693 - protein, 83 aa, Zea mays
  Clone ID: MRT4577_146538C.1.pep
EACLAWLALSFSLNLRVMSCRCWNSFSVHISVNYLAGNVPASVGKCWSICGKVIWIPCGIEDSAEPGLSVGHCINDFVKLFVV

SEQ ID NO: 235694 - protein, 57 aa, Zea mays
  Clone ID: MRT4577_146539C.1.pep
CLARLRLAFAWRSSWVRASPSLSLGGSVPSVCSASSRSALSGCSVCCCAGRPRQLPS

SEQ ID NO: 235695 - protein, 52 aa, Zea mays
  Clone ID: MRT4577_14653C.1.pep
PFTRGLPSHYYNFLINHAIYYFNMLKYWYWNLSSTLCTIINQTVLTLQYFDY

SEQ ID NO: 235696 - protein, 163 aa, Zea mays
  unsure (1)..(163): unsure at all Xaa locations
  Clone ID: MRT4577_146540C.1.pep
MMESISIRIGEGDIERGNXSCELYCLQHGIXSDGHTXGDKIIGGGDDNFNTFFTETGAGKDEPRVVFRDLEPTVIDEVRMSAYRQLVDPEQLIMVEEDEDDDFNRGDDANGNEMVDLCIERIRELDDDCTALKVCLVFXAYXVGTGSGLATILLECMSECYGK

SEQ ID NO: 235697 - protein, 56 aa, Zea mays
  Clone ID: MRT4577_146541C.1.pep
FFLPSRQCTLDFVVFPPFGQRHLARCLVLSCRHSSPLAWLSGVRIQCFRVAQLRYK

SEQ ID NO: 235698 - protein, 110 aa, Zea mays
  Clone ID: MRT4577_146542C.1.pep
MMVADDDGEECVTQSECHGCRRLFCARCAVPWHAGLTCEEIARLGEGEREREDLLLVKAAREGSWKRCPRCRFYVEKSSGCLHITCRCGYEFCYGCGQQWQLIHDGCPGA

SEQ ID NO: 235699 - protein, 89 aa, Zea mays
  Clone ID: MRT4577_146543C.1.pep
GPLAFPKKEPKPLAQNYSVSPPPGMFYFSFWRAKTKSPPRWPPRRGVPPLVWGVCVGSPFPPTKGARLALNSCFHCGHHRPTLSKCQFG

SEQ ID NO: 235700 - protein, 83 aa, Zea mays
  Clone ID: MRT4577_146544C.1.pep
GTLEAWPDHGSLHTTEHPFSLFCASGLYILLLPIFRLDRCMQEEKMPPIDLRSTDPKALTNDQYGNRRHLVMTCQCQPDEPNG

SEQ ID NO: 235701 - protein, 77 aa, Zea mays
  Clone ID: MRT4577_146545C.1.pep
VLARELPPFFFFFGIQTSRSLFYFNLTSAFLQNGFTHSTRAHAEQSSSGHKALVPTLSGGGGGHLFSRLCRLPLYWG

SEQ ID NO: 235702 - protein, 100 aa, Zea mays
  unsure (1)..(100): unsure at all Xaa locations
  Clone ID: MRT4577_146546C.1.pep
GGNPXHANQPTVLHKLGGQFHLSSIFFEGVLSRNICLSFSSYXRRFVTRNYITHILLCPSMSVSGCINFPLIPTPFFANSPTLKYCSNFINYFHYFPLFS

SEQ ID NO: 235703 - protein, 60 aa, Zea mays
  Clone ID: MRT4577_146547C.1.pep
VCTKSHLGLLLTRCLVCRVGATAEHADRRLIYHFFYKLIDDTFVRENPGRCYKQKNGRFV

SEQ ID NO: 235704 - protein, 103 aa, Zea mays
  Clone ID: MRT4577_146548C.1.pep
NHIMNHTTGTKKFSKAKKDTQNLGTPLIYQKSGKNQLPLPCKKTTAGGGSSTDSERNQRGGTYHRTRGPPMGKKSREKKGGRGGSSPTSTFKPRGWEPPNTKP

SEQ ID NO: 235705 - protein, 91 aa, Zea mays
  Clone ID: MRT4577_146549C.1.pep
VPNPWQNKPLSFFNKGLADELNREGAWDLAIYPEENIAFPSWPMEGSLKEGGVRCKLDFVRGCPDPSSDMFDPLAPVDEGSCPLEFVSEEL

SEQ ID NO: 235706 - protein, 54 aa, Zea mays
  Clone ID: MRT4577_14654C.1.pep
FFFFFFFFFFFFFFFFFFFFFFFFFWGGKKFRGGEKTEMMGQLCFHPKTKLEKG

SEQ ID NO: 235707 - protein, 156 aa, Zea mays
  unsure (1)..(156): unsure at all Xaa locations
  Clone ID: MRT4577_146550C.1.pep
TRTGKTSTXEAEAADTXDNAKAKTQDKEGLRGGGERXXRAGGQPEDGRTRAAHNTQKESTRHPGRXRRGGTQSAAKTRADKTSTREXEAADTXDNREAXSQHKEGTPADQPRPXXAGKQREDGRTRTDXSXQKESTXHPARRPRGGXQTAGKTRTG

SEQ ID NO: 235708 - protein, 54 aa, Zea mays
  Clone ID: MRT4577_146551C.1.pep
LLQNCTGMEQRTLSGAPVHSTLKPLLHFNLVPNLNLLLVCVEPYAPVIHEFLAN

SEQ ID NO: 235709 - protein, 70 aa, Zea mays
  unsure (1)..(70): unsure at all Xaa locations
  Clone ID: MRT4577_146552C.1.pep
MMRAVRIMYDKNSGRSRGFGFVHFSNDNEAKCAKDAMDGKXMLGRPLRISFALGRVRGASVIVPRLSTVK

SEQ ID NO: 235710 - protein, 72 aa, Zea mays
  Clone ID: MRT4577_146553C.1.pep
PAHWPGFYPDTTLEVCVRPTRPPRDLEGTAPNNAIGQSPYKPRAHWAGPFWTTQNGAYLLGHTDTFHTTGDT

SEQ ID NO: 235711 - protein, 129 aa, Zea mays
  Clone ID: MRT4577_146554C.1.pep
PSHHDGHHLRRSLSAAAAKLPDELPPGAPAPTSDSRLFVAGLSWSVDERSLTDAFSSFGTVTEVRIMYDKNSGRSRGFGFVHFSNDNEAKCAKDAMDGKVMLGRPLQISFALGRVRGASVIVPRLSTVK

SEQ ID NO: 235712 - protein, 99 aa, Zea mays
  Clone ID: MRT4577_146555C.1.pep
RGRPGRDDTNRLWFRILHHLRSGELTLLFRRLLYLLDLYPLFSFRNYGCHDVETSGERIIQRSEGHEANLRDCNDSPRGLDLHVHKLLIARRNNIRARP

SEQ ID NO: 235713 - protein, 63 aa, Zea mays
  Clone ID: MRT4577_146556C.1.pep
GRAQIRIPPALLGSPYFVTVPNMACVSKRTSHPLCSAMMETSKKSLNITPEAVQITRRLNENI

SEQ ID NO: 235714 - protein, 37 aa, Zea mays
  Clone ID: MRT4577_146557C.1.pep
KKKKKKKKKKKKKKKKKKKQKKKKKKKKKLVPARAAA

SEQ ID NO: 235715 - protein, 162 aa, Zea mays
  Clone ID: MRT4577_146558C.1.pep
QIHGTQHLERPCRCSSTGISSSTRRPGLSHRGCPSSISSLPTRLPRFHGRRRPSHLPGGRPRPCPSHSSPFGPAAASTQPLPWHTPHLQHRRPPTRNPMIWGKTKSKHNPRQSLDEKSKPKPSAFSWVPEGFYVGKVLCGVISNSLLLMSYSIMTLGKDVFL

SEQ ID NO: 235716 - protein, 118 aa, Zea mays
  unsure (1)..(118): unsure at all Xaa locations
  Clone ID: MRT4577_146559C.1.pep
PPAPGPAVFRLGPPAHPATAPPKGPGPGAVGGPKSPPPSGDVGPAPPXPQAPPXPGGVPPQRNYGLGENPGPXPVGPFPGDVWXKGVPPPPGGQGQGXPMPCPPPPKAKETRPPPGPN

SEQ ID NO: 235717 - protein, 45 aa, Zea mays
  unsure (1)..(45): unsure at all Xaa locations
  Clone ID: MRT4577_14655C.1.pep
MXLPLXAHQHQLAVAVLXTXAAPVLAELXKLEEAMXSPXKGXVNA

SEQ ID NO: 235718 - protein, 160 aa, Zea mays
  unsure (1)..(160): unsure at all Xaa locations
  Clone ID: MRT4577_146560C.1.pep
MTAKLECLLPLAMLAIGLVPCTVHNXPKDYXDPHNAARADIGDGTLHXMTSRTAYAFSYTAHXQRDWQLIHXSGGPYRENLFWDSDGDNWSESHAGGSCLYQNQDYHHDXSSXAQGDVCGHYTRVEWGDCTDFWCARXDCDNHLPGFIICRYKPPAHVIG

SEQ ID NO: 235719 - protein, 46 aa, Zea mays
  Clone ID: MRT4577_146561C.1.pep
FRSRERYLCRPLEPMFLAPHANVVTLCIERLHLRLHVFACLEPDSD

SEQ ID NO: 235720 - protein, 62 aa, Zea mays
  Clone ID: MRT4577_146562C.1.pep
PFKKFFKKKFWGFNLTIITKFFINSNSIIRKKDSKGIGKRYYKGQFLMGGETPTCYLLILNR

SEQ ID NO: 235721 - protein, 110 aa, Zea mays
  unsure (1)..(110): unsure at all Xaa locations
  Clone ID: MRT4577_146563C.1.pep
AVTEEKERWFVTVNNTPGDATFVSFNCSHAQEFQFCEKLKAHLEPEAYQELLKCLHIYNQDIITXNELNRLVKXDLLQHYPYFVNGCNDFFXHCXNIDGXLEGSFNKRQT

SEQ ID NO: 235722 - protein, 102 aa, Zea mays
  unsure (1)..(102): unsure at all Xaa locations
  Clone ID: MRT4577_146564C.1.pep
KIYIATDSTPVDMQTYDXCCDSXXVVIDISCIYGLKEDGAGTPYDKESTAIIKLNNTTVLYLKEVTKFLALVCFVREESFERKGLIDYSFHCFRTAIHEVFE

SEQ ID NO: 235723 - protein, 79 aa, Zea mays
  Clone ID: MRT4577_146565C.1.pep
RCSRRSSTDEIQVSEVRARRWQRPTSGRRRIEEWRPLPPPPPSGEGEGEGRGRCRVVMGWWSHGGGEAISVGKEDVGSS

SEQ ID NO: 235724 - protein, 69 aa, Zea mays
  unsure (1)..(69): unsure at all Xaa locations
  Clone ID: MRT4577_146566C.1.pep
PTRSXSNLIFPLPLPLSSPSLSRAKIVALFTQLSQNHPPGRSPQCSRHHRKCQLGGAVLVASADRLADL

SEQ ID NO: 235725 - protein, 94 aa, Zea mays
  Clone ID: MRT4577_146567C.1.pep
ACCHPTSSPGDFHLGPRIDRGSSHPLVFYRHQRHSRRDEIHPTSAPQLSHSAWFSVDSSTTGSARLLTEVFEGNAAAALGVQKPAREQVLAHNP

SEQ ID NO: 235726 - protein, 76 aa, Zea mays
  Clone ID: MRT4577_146568C.1.pep
IFLETELFYKGIRPAINVGLSVSRVGSAAQVKAMKQVAGSLKLFLAQYREVAAFAQFGSDLDASTKQTLNRGERLT

SEQ ID NO: 235727 - protein, 184 aa, Zea mays
  unsure (1)..(184): unsure at all Xaa locations
  Clone ID: MRT4577_146569C.1.pep
HEMKAREAQSRAAEEHGDLALITVEAPQVTVSEKVSLRPPMLQVVRLASFQYAPSIPPFIVPKQSKFDGDDSVFQKELDDRRXRPIGPLVVVGVRDGVLWLVDRYMCAHALSLSHPGIRCRCLAAYGDPVSAVKWATRLGREHHDDLAQFMLGMGYATEALHLPGISKRLEFDLAMQSNDLERA

SEQ ID NO: 235728 - protein, 142 aa, Zea mays
  Clone ID: MRT4577_14656C.1.pep
APYANALKKLEKDIKDKQASVNEKIGVKESDTGLAPPHLWDVAADRQRMAEEQPLQVARCTKIIQDEKDSDKSKYVINVKQIAKFVVNLGERVSPTDIEEGMRVGVDRNKYQIMLPLPPKIDPSVTMMTVEDKPDVTYGDVG

SEQ ID NO: 235729 - protein, 760 aa, Zea mays
  Clone ID: MRT4577_146570C.1.pep
HSYLLVKAISYVQSMPLSGFGPSGSSFASDDPFSSKEGPPQNFQLYSWETYQPVSGLLAQPEWTVWDQTVEYCAFAYQQYIVISSLRPQFRYLGDVSIPFATGAVWHRRQLFVSTPTTIECVFVDAGVAAIDIETKRIKQEMKAREAQSRAAEEHGDLALITVEAPQVTVSEKVSLRPPMLQVVRLASFQHAPSIPPFIVPKQSKFDGDDSVFQKELDDRRYAEVAVAGGGVSVAVTRFPPEQKRPIGPLVVVGVRDGVLWLVDRYMCAHALSLSHPGIRCRCLAAYGDPVSAVKWATRLGREHHDDLAQFMLGMGYATEALHLPGISKRLEFDLAMQSNDLKRALACLLTMSNSRDVGQETAAADATDVTQILSLAVAKQAKQESLTDAVQGIVKFVKEFFDLIDAADATGQSDIAREVLKRLAAAASVKGALHGQMLRGLALRLGNHGELTRLSGLVSNLITAGHGREAAFAAAVLGDNALMEKAWQDTGMLAEAVLHAQAHGRPSLRNLVITWNKMLQKELDHTPTVKTDAAAAFLASLEDPKLTSLGETEKKPPIEILPPGMPPLSAPPIVIKKAGAKPGLPNAAKASNGPIGAPMAQGAPMAHGTPGPQGVPMNQVTPSQGSHDEARPSDATVADAAAAVAEGTAAPPAAEGTSAPPAAEGTATPSSEEAKAAPGNEEGTSNPINEEATAAAVSVAAGSPDSAAAPAADTSSDAPAVNPTEDTVSAPSTEAPPELTDKPSSAEASLPPPPSVSGV

SEQ ID NO: 235730 - protein, 99 aa, Zea mays
  Clone ID: MRT4577_146571C.1.pep
GVLDAYAFALVHSPYPISVYIFRPSALILNIVQFITLFIMVIYHNQSSNIHSADYAFQQKILPELNNSFTLMGHRCISIVLSIKLIIVLCSNKCISYNK

SEQ ID NO: 235731 - protein, 98 aa, Zea mays
  Clone ID: MRT4577_146572C.1.pep
QGLERASPDCTMEVVKDQMSEKHYAKAGRSLNNQLLEVPCCATWCTRICKRTAGFVFRHRAVLVAGPGANYWSSGVPLRVGPGMWNGMVQTKRLPANF

SEQ ID NO: 235732 - protein, 117 aa, Zea mays
  unsure (1)..(117): unsure at all Xaa locations
  Clone ID: MRT4577_146573C.1.pep
TARPAPPXRRPPSPRAPAPSLXSARGPNPSAPLLSRPHPLSSLPLRRGPGLSAPSSPXPPPSXAPTFPAPTSRVEPAPPRPRPXCPEPHSPSPSLPPFAPSRPSXSPSLRARRAPPP

SEQ ID NO: 235733 - protein, 65 aa, Zea mays
  Clone ID: MRT4577_146574C.1.pep
CSSQDLDLISPHEISRSQFTVHIPHDTLVTTTHRRASLHTHEPHPITELSTHTVLSSSKSSFQKI

SEQ ID NO: 235734 - protein, 48 aa, Zea mays
  Clone ID: MRT4577_146575C.1.pep
HPLRTARPLAGRSPVVRSSSPWVRVVEHGARPEQLLSLALPRAGISCQ

SEQ ID NO: 235735 - protein, 55 aa, Zea mays
  unsure (1)..(55): unsure at all Xaa locations
  Clone ID: MRT4577_146576C.1.pep
MYRLPVRAQTSRIVDSLATPAPSSSSGCGRPRLRLIRNXPTYXAPATVLRMDPTV

SEQ ID NO: 235736 - protein, 56 aa, Zea mays
  unsure (1)..(56): unsure at all Xaa locations
  Clone ID: MRT4577_146577C.1.pep
RLVYFPVSTYGARASRSHTISRDHFWFMSHDMRRISRXXFVDAVIYRELNTIFGFC

SEQ ID NO: 235737 - protein, 63 aa, Zea mays
  Clone ID: MRT4577_146578C.1.pep
SFPSWGLINFRGCLLRSPNTLLRGAHYTDYDTLRFFQNVSQLKSSECSDKVAKVCLHRPACVG

SEQ ID NO: 235738 - protein, 298 aa, Zea mays
  Clone ID: MRT4577_146579C.1.pep
METQVAAPPHHHQQQQQKAANLARTFTKLLRRKRAEAAAQGGAPEAPASVAPGDALEEERTEPPPAIPSLSKLKLSGNLAAAYSFDAFFRNAAEKKAAAAGGGAVRQAAGAGEVTLEAAADALLANLFAGVSAVKAAYAQLQLAQFPYDAEAIQSADAAVVAELTRLSDTKRRYLRDPAAAARGAAAAGHTALAAHAEEQRHLLKTYQITARKLESDLRARDAEAERARSSLTAELRAERALEARLHPGRTLASLDELHLSGLNPTHFLTALRHTVKSIRSFSRSMLSSMQSAGWDLG

SEQ ID NO: 235739 - protein, 69 aa, Zea mays
  Clone ID: MRT4577_14657C.1.pep
KRRKDKGGFKTIQVEESMGHQFATRMGKVFPIGKGKKPWVSLPKGKGIKLSIIEEQRRGDFSAQGAAKA

SEQ ID NO: 235740 - protein, 50 aa, Zea mays
  Clone ID: MRT4577_146580C.1.pep
LFQPSPQCAFAHMIASIHAWVRIGYNRHMSTSIYIIPEWIANSEPMFAGV

SEQ ID NO: 235741 - protein, 225 aa, Zea mays
  unsure (1)..(225): unsure at all Xaa locations
  Clone ID: MRT4577_146581C.1.pep
LGTSRPAGVFLHLTGDEXLFSLPDYARSMQNRQNDVYYIXEDKTIDRNSPFIRDENRSMXTVLFDAMDXYVLVHFTEFLGYHLVSAILASVNVSDNDDQNTRISHLSCKFAFLCNVMPEVLPDSCQKVLVSDPIANSCRSLVXTVEYGCTDNRXRXVKARALRNXSMPRYMSSXNTMEINPENPIMDELRKRAEADKNDKSVKDLVMLLIXTALLTSGFXLDDPN

SEQ ID NO: 235742 - protein, 149 aa, Zea mays
  unsure (1)..(149): unsure at all Xaa locations
  Clone ID: MRT4577_146582C.1.pep
KAISSSALPYWRTPPIXLKRATTEVDEMITKDAEIGXQMPSQIAESAAKTQLGTSSLVEIVXSTKILXRILKEHGMATXIPWDIYLLISKAWTIRKHLNRNWIDNDSKFXLILDDRTMHRHDRYLXRTTKIPPTWXYESTAAKHSACAS

SEQ ID NO: 235743 - protein, 47 aa, Zea mays
  Clone ID: MRT4577_146583C.1.pep
SCPTAEHISTLAVNHNSHSASYRNHSNLQGTHIVSFLSFSALLPHTV

SEQ ID NO: 235744 - protein, 63 aa, Zea mays
  unsure (1)..(63): unsure at all Xaa locations
  Clone ID: MRT4577_146584C.1.pep
TAAWAKDLXQEDFQLLCXXDGTKKPVTEFATCHLAQAPNHXVVSRKEKAARVSTVLTAQKDLF

SEQ ID NO: 235745 - protein, 459 aa, Zea mays
  Clone ID: MRT4577_146585C.1.pep
MITLIRCMGALQVLTTTLLLLVGSRHSSAVSPPSGYRSTLTHVDSHGGFTKAELMRRAAHRSRHRAFMMLLPRYSTMSTSSNAGPARLRSGQAEYLMELAIGTPPVPFVALADTGSDLTWTQCKPCKLCFPQDTPIYDTAASASFSPVPCASATCLPIWRSSRNCTATTTSPCRYRYAYDDGAYSAGVLGTETLTFAGSSPGAPGPGVSVGGVAFGCGVDNGGLSYNSTGTVGLGRGSLSLVAQLGVGKFSYCLTDFFNTSLGSPVLFGSLAELAAPSTIGGAAVQSTPLVQGPYNPSRYYVSLEGISLGDARLPIPNGTFDLRDDGSGGMIVDSGTIFTVLVESAFRVVVNHVAGVLNQPVVNASSLDSPCFPATAGEQQLPDMPDMLLHFAGGADMRLHRDNYMSFNQESSSFCLNIAGAPSAYGSILGNFQQQNIQMLFDITVGQLSFVPTDCSKL

SEQ ID NO: 235746 - protein, 137 aa, Zea mays
  unsure (1)..(137): unsure at all Xaa locations
  Clone ID: MRT4577_146586C.1.pep
HWVPRGRPGKEEKERLLAEGTAAMEACRAEAEAEKKRKRNFEREKARQALQEMERTVEINDNLHLKDLELLGTATTEHIVSSVDETSPERSHDGMAGYHPGAVNPLEQLGLFIKVDDEEDDEQCXPALKKAEKGEIS

SEQ ID NO: 235747 - protein, 97 aa, Zea mays
  unsure (1)..(97): unsure at all Xaa locations
  Clone ID: MRT4577_146587C.1.pep
XLYLYLLLLQXKARPTYNYLEXHXXXPFPYLLKPHTHSSILICILFHNFHIYNIHLTFLPTYNTSISISPSQSTLTHHPQFFLPLLLSRDLHXLLLH

SEQ ID NO: 235748 - protein, 186 aa, Zea mays
  unsure (1)..(186): unsure at all Xaa locations
  Clone ID: MRT4577_146588C.1.pep
RPRVLPLVRRAALLMILYAEVIVKGGGVLIQGGDKHYELEKLQKEEKERLLAEGTASMEACRAEAEAEKKRKRNFEREKARQALQEASVDLTHQQLQFLILIVPIRKXSFMQMERTVXINDNLHLKDLELLGTATTEHIVSSVDETSPKRSHDGMVGYHSRAVNPLEQPGLFIKVDDEEDDQHCSL

SEQ ID NO: 235749 - protein, 706 aa, Zea mays
  unsure (1)..(706): unsure at all Xaa locations
  Clone ID: MRT4577_146589C.1.pep
MTPTVLMEFGQQRPMKRGYEEMVFRAASSRGYAETVGESGVAAGSPLRVDSEDSSVPKRKCISLNSVGFDVKREILVPSKMSSSERRYLRKRFRAELDSVRDLLKKPEFAAPVPLNRAPALSSSAAPRAKKPQKSQRGGTNVIRGAKGRFLPTKPRPETSTVLSEAAAFKQCEAILKKLMTQKYSHIFNVPVDIVKLQIPDYFDIVKTPMDLGTVKKKLESGSYTSPSDFAADVRLTFNNAMAYNPRGHAVHDMAIQLNKMFESRWRPIEKKLASAATEKHVEVDRADSKRRKTPPVDRSDVSMECARQTEPETPKMTAEEREAFGNCLASISDELPPHIFELLQQCIDSNADLSGDGEIEIDIHAVSDDLLFELKKHVDKYLQEKEQSQQVKSEPSENEAVNVSGLSHSSTNPCKGGEPIEEDVDICGNASPIMLDKDAQIRNSKCGSPSSSSSDSESSSSDSDSGSDSESESEKVGSPGKLAKGTKKPDQLVEQEKSDVISPADANRPAAIVGLHGEDSESKPAPGGENSEPDTQVSPDRLLRAALLRSRYADVIVKARGILSQGGDKQEELEKLQKEEKERLLAEGTAAMEACRAEAEAEKKRKRNFEREKARQALQEMERTVEINDNLHLKDLELLGTATTEHIVSSVDETSPERSHDGMAGYHPGAVNPLEQLGLFIKVDDEEDDEQCXPALKKEEKGEIS

SEQ ID NO: 235750 - protein, 267 aa, Zea mays
  unsure (1)..(267): unsure at all Xaa locations
  Clone ID: MRT4577_14658C.1.pep
MLPGARTALFEFLTPHASALLNPDPCSNPTIVLKKTLSCSYPNLPFNEALRKESEKLQVELQRSQSNMDLGSCEVIQHLLGVTKTVESTIPEKETNVKAPEKKGSNYSESKGETAKSFDDDDDYPKKQNDEYPKKQKDTCSTLRCSLQVPYGHDLVSSRGSYSDEWHADLLXSRIASIAKDRPIXSGEACNDIMAYSLILSCCCYTCCVRRKLRQKLDIAGGCCDDFLSHLLCCCCALVQEWREVEIRGAYSEKTKVTPPACQYMEH

SEQ ID NO: 235751 - protein, 211 aa, Zea mays
  unsure (1)..(211): unsure at all Xaa locations
  Clone ID: MRT4577_146590C.1.pep
LGTSRPAGLRSRYADVIVKARGILSQGGDKQEELEKLQKEEKERLLAEGTAAMEACRAEAEAEKKRKRNFEREKARQALQEMERTVEINDNLHLKDLELLGTATTEHIVSSVDETSPERSHDGMAGYHPGAVNPLEQLGLFIKVDDEEDDEQCXPALKKAEKGEQLMVLCFSMPCHGLGAGANLLIQSDHLLRAIMCGNGLNWGGESRPFC

SEQ ID NO: 235752 - protein, 105 aa, Zea mays
  Clone ID: MRT4577_146591C.1.pep
MQASGGEGGCRFGGAGGSDDTGSPEPLAAGEDDVAWDVLLGTDVEVVESPKMWDELAEAMLVAPPPVWEGDMEDTDDWAQGGNLWDLPVWALGPTGRCSFTSFGF

SEQ ID NO: 235753 - protein, 87 aa, Zea mays
  Clone ID: MRT4577_146592C.1.pep
GTTNFWHWRGGIWECSPGLELVYTERGGVGKKGAITLVKWGHRFWGVIMVLLTPRDLDWFGKFGDGTLGGTKFWGLGGGGDLVFGNG

SEQ ID NO: 235754 - protein, 88 aa, Zea mays
  Clone ID: MRT4577_146593C.1.pep
FGGYPGPLPLFGAVGVPQGNFVVPRFVLCPKGSGGFVGAPFPFINSFGSVWCYPGGGIVSLILGVSFPGAFCWYPSFPPVCFVLGPPG

SEQ ID NO: 235755 - protein, 98 aa, Zea mays
  unsure (1)..(98): unsure at all Xaa locations
  Clone ID: MRT4577_146594C.1.pep
MGKISSKPHQNPRVSSPPLPAPPLITLFFPPKGQGPRIKKPPPPXGPPAXPPEPPPGXPGPGPPSKGSPPPIKPPPPGXPPREPCLGKGCWPPRGPAL

SEQ ID NO: 235756 - protein, 94 aa, Zea mays
  Clone ID: MRT4577_146595C.1.pep
NVTCAASHPPPGGSICLTIGMVCQHDPTQPNPTKRYSFFSLHLRAHCHHHSLLPAACPWELLQWKRGDPVIDGLQYSLTAGHCLLLRQLQCLCS

SEQ ID NO: 235757 - protein, 84 aa, Zea mays
  Clone ID: MRT4577_146596C.1.pep
LLLSCGGSHRISGKVSRSVGVGLKVVFSNYIVGMSYALFCDFGVCVSITLFGLCLWEWLYCGFVRILGLCGVLHIKKPPPFLIK

SEQ ID NO: 235758 - protein, 135 aa, Zea mays
  unsure (1)..(135): unsure at all Xaa locations
  Clone ID: MRT4577_146597C.1.pep
GGFFFFFFFFFFFFFFFRSKTLSTRHSLLGGQNRHRTAFTKAAPDRFGGGGGGNPHLSLCLAFCLAPMIQGEGSLGGGASVPALPDLANPAGPPRGQGPRRGEPVRGRGLVPGGGHREGPALPSGFPCPVPXLWG

SEQ ID NO: 235759 - protein, 64 aa, Zea mays
  Clone ID: MRT4577_146598C.1.pep
YTTISTTFLLTYNLIPILPHLLPQLHSQSSTPSFSIHPTYKLTIFLLHLQLYYNTELNHHLLHL

SEQ ID NO: 235760 - protein, 150 aa, Zea mays
  Clone ID: MRT4577_146599C.1.pep
EGLGPSWDNKDEVRSTTKAATLGTVPSPIVSQPRRRRILQLGETNLLPRRGLLATPPFLGRRCTRLVVACFQIAAALDPPELLGGAINRTKIAHARLRLRRSKIRHSWIASRESGTAPRQAGTCCVRRRRRLPWSGRARDGRREENHCRR

SEQ ID NO: 235761 - protein, 69 aa, Zea mays
  Clone ID: MRT4577_14659C.1.pep
SEHSSPRKNILTDYWYSHYYVIINHNQSYYLRVSGDLLHLPKTISPVLINIIATLAGYHFSLCQVSSYL

SEQ ID NO: 235762 - protein, 381 aa, Zea mays
  Clone ID: MRT4577_1465C.1.pep
SVIKLYERCVIACASYSEFWIRYVQCMEDKGSLDLANNALARATHVFVKKQPEIHLFSARFKELNGDISGARAEYQHLYSDLCPGFLEAIVKHSNMEHRLGDKELSCSVYEKAIAAEKGKEQSQLLPTLLIQYSRFLFLTSRDLEKAREILTVLHEQLNVTKTVLEAVIHLESIFPCEKRIDFLDSLVEKFVTPESSQGEVASLVDKEEISSIFLEFLDLFGDAKSIKKALTRHTTLFSCKRSILPSKKRKADDAVVSDRDKFAKTVVTQSATGTDPNASNPPVWPATSEASGQQWGASYAQQAAYPAYGTYDYSHQMPQPAPQAAAYGAYPPTYSAQAYTQQSYPQPAAIPAAPVPAPTAPSAYPQQPAAAQPYYGTTYY

SEQ ID NO: 235763 - protein, 102 aa, Zea mays
  unsure (1)..(102): unsure at all Xaa locations
  Clone ID: MRT4577_146600C.1.pep
MFKVFTLVTVAKENSEEDCWLTXISGKVYDVTKSLVDHPRGDVVLVSSTGKAATDDFEDVGHCNTARAMMDEYLVGEIHASTFPCRTXYVPPNQPDYNQDKT

SEQ ID NO: 235764 - protein, 91 aa, Zea mays
  Clone ID: MRT4577_146601C.1.pep
PRAFSKREIPCPFAKNPPPQKRGKVLGRYFGGARARKQDFFLGLGGFEHDGGSPGNLVIKLPRLFPGVILEPPRGGDHLGVLPPPPPGEAP

SEQ ID NO: 235765 - protein, 203 aa, Zea mays
  unsure (1)..(203): unsure at all Xaa locations
  Clone ID: MRT4577_146602C.1.pep
PRCRPGQISLSDIPEVPPTPEYHGRHRWSCDGRSSDRPTSPATGKLQLDTSILSQRQVCLLSHGDGLCPASRSFSTQAATTSSTPQPPPPPPPPEKTHCGAPKDEDLIVTKLYGLHDPCLKRAMXRHDWHMTRDLATKGADRIRDGLKKSGPRSRRSARSPSGVKWSLTPRVSDGRTSYPSVNAEESEPETXQKRVIMRHDPH

SEQ ID NO: 235766 - protein, 92 aa, Zea mays
  Clone ID: MRT4577_146603C.1.pep
TQASAWTPSATLISSRISCWWCCCPLSCSLSARSCSSVYSGAYIGSHAGSSLRSFVRKPSTYTILLSHTHTYTYTSAKYMRHCSCFACMYDE

SEQ ID NO: 235767 - protein, 65 aa, Zea mays
  Clone ID: MRT4577_146604C.1.pep
WLYLPLWLTVGWIHLSWPPTSQTVASAWGLSAQPSTAPRSASGRSRLMAVARELLGGRVGQPGYS

SEQ ID NO: 235768 - protein, 67 aa, Zea mays
  unsure (1)..(67): unsure at all Xaa locations
  Clone ID: MRT4577_146605C.1.pep
LSARALVRLSRVCLAPSLGVPGLSXGLRXXLLVCAXXASSPPASSSRWGPVPVRFCSXAVFRACVRA

SEQ ID NO: 235769 - protein, 102 aa, Zea mays
  Clone ID: MRT4577_146606C.1.pep
VCFLLFPVVAGLFRLALSLYMHQWGLVCVIECGWVSLALSLPWLSLGIAIPLVFEVFVSSVSYPWCLGCLAPFFLWFSVSNASCVFKVPQRKKQGGRRQVSS

SEQ ID NO: 235770 - protein, 41 aa, Zea mays
  Clone ID: MRT4577_146607C.1.pep
CCCCCCCSACCIRSACCCCCCRSLCCCWWWLPPVPFISSSS

SEQ ID NO: 235771 - protein, 203 aa, Zea mays
  Clone ID: MRT4577_146608C.1.pep
MWASPFALRAKLALNFKGLAYEYVEEDLRSKSDLLLSSNPVHKKVPVLIHNGVPVCESRVIVEYLDEVYSATGPRFLPADPYERAMARFWASFIDEKFLASWLKAGRGKTDEEKAEGLKLTLAAVETLEGAFMECSKGKPFFGGDSVGYLDIALGALVAWMRATEARHGLRLFDASRVRCWRSGWSASASWTRSWRSCRTSTG

SEQ ID NO: 235772 - protein, 667 aa, Zea mays
  Clone ID: MRT4577_146609C.1.pep
MDASAEVDHLAAERSAARFDVEAMKVAWAGSRHAVEVGDRMARLVASDPVFRKDNRTMLSRKDLFKDTLRKAAHAWKRIVELRLTEEEAGMLRLYVDQPGYVDLHWGMFVPAIKGQGTEEQQKKWLPMAYKFQIIGCYAQTELGHGSNVQGLETTATFDPKTDEFVIHSPTLTSSKWWPGGLGKASTHAVVYARLITEGKDYGIHGFIVQLRSLEDHSPLPGVTLGDIGGKFGSGAYNSMDNGVLRFDHVRIPRDQMLMRLSQVTREGKYVHSDVPKQLLYGTMVFVRQTIVADASKALSRAVCIAVRYSAIRKQFGSQDGGPETKVLDYKTQQSRLFPLLASAYAFRFVGDWLKWLYMDVTQKLEAKDYSTLQEAHACTAGLKAVTTSATADAIEECRKLCGGHGYLNSSGLPELFAVYVPACTYEGDNIVLLLQVARILMKTVSQLTSGKQPVGTMAYMGNVQYLMQCKCAVNTAEDWLNPVAIQEAFEARALRMAVNCAQNIGQAANQEEGFYERSPDLLEAAVAHIQLVIVTKFISKVQQDIPGPGVKEQLQNLCNVYALYILHKHLGDFLATGCITPKQGALANEQLGKLYAQVRPNAVALVDAFNYTDHYLGSVLGRYDGNVYPALYEEAWKDPLNETVVPEGYHEYLRPLLKQQLKLSRL

SEQ ID NO: 235773 - protein, 41 aa, Zea mays
  Clone ID: MRT4577_14660C.1.pep
LESLCNPIMANMCQGAGADMEGSVGMHENAPAANGGPGPKI

SEQ ID NO: 235774 - protein, 184 aa, Zea mays
  Clone ID: MRT4577_146610C.1.pep
WLYMDVTQKLEAKDYSTLQEAHACTAGLKAVTTSATADAIEECRKLCGGHGYPNSSGLPELFAVYVPACTYEGDNIVLLLQVARILMKTVSQLTSGKQPVGTMAYMGNVQYLMQCKCAVNTAEDWLNPVAIQEAFEARALRMAVNCAQNIGQAANQEEGSIYYKQSIPFFFLFFHIVAELELLD

SEQ ID NO: 235775 - protein, 167 aa, Zea mays
  unsure (1)..(167): unsure at all Xaa locations
  Clone ID: MRT4577_146611C.1.pep
SGTHATITLQVSPRASRHEQGSTSASPHDSSFSLPTFSVDTDNEYCTNNXTTQAHVTVLKILPNPNEPGKSATFRISPYSDMNIDKLNVVIHIXHFFFYPHSYTCDICGETSCPXETVDFKLYLQQILSRFTLLGSYTMLHATLMVDHNEELSCISVGFNIGFHMFS

SEQ ID NO: 235776 - protein, 206 aa, Zea mays
  Clone ID: MRT4577_146612C.1.pep
MAEVDHLAAERATARFDVEEMKVAWAGSRHAVHVADRMARLVASDPVFRKDNRTMLSRKELFKDTLRKAAHAWKRIVELRLTGPKITPIYFHPLLHTYSTLSYVIMSRSTEEEADLLRQYVDQPGYVDLHWGMFVPAIKGQGTEEQQHKWLPLAYKFQIIGCYAHVYLGHGSNVQGLETTATFDPEGDEFVIHRLIKQQQLKLSRL

SEQ ID NO: 235777 - protein, 383 aa, Zea mays
  unsure (1)..(383): unsure at all Xaa locations
  Clone ID: MRT4577_146613C.1.pep
MDASAEVDHLAAERSAARFDVEAMKVAWAGSRHAVEVGDRMARLVASDPVFRKDNRTMLSRKDLFKDTLRKAAHAWKRIVELRLTEEEAGMLRLYVDQPGYVDLHWXPINLYCISICSYQYIIPRRILCCPCCVLRSSGIGAAGCSTYGSWVSVKIRACHLIRNKYKIPAIEXYSFCTSFINIFTLQVTKTMSSXGMFVPAIKGQGTEEQQKKWLPMAYKFQIIGCYAQTELGHGSNVQGLETTATFDPKTDEFVIHSPTLTSSKWWPGGLGKASTHAVVYARLITEGKDYGIHGFIVQLRSLEDHSPLPGITLGDIGGKFGSGAYNSMDNGVLRFDHVRIPRDQMLMRLSQVTREGKYVHSDVPKQLLYGTMVFVRQTIVAD

SEQ ID NO: 235778 - protein, 667 aa, Zea mays
  Clone ID: MRT4577_146614C.1.pep
MAEVDHLAAERATARFDVEEMKVAWAGSRHAVHVADRMARLVASDPVFRKDNRTMLSRKELFKDTLRKAAHAWKRIVELRLTEEEADLLRQYVDQPGYVDLHWGMFVPAIKGQGTEEQQHKWLPLAYKFQIIGCYAQTELGHGSNVQGLETTATFDPKTDEFVIHSPTLTSSKWWPGGLGKASTHAVVYARLITEGKDYGIHGFIVQLRSLEDHSPLPGVTLGDIGGKFGSGAYNSMDNGVLRFDHVRIPRDQMLMRLSQVTREGKYVHSNVPKQLLYGTMVYVRQSIVADASKALSRAVCIAVRYSAVRKQFGSQDGGPETQVLNYKTQQSRLFPLLASAYAFRFVGDWLNWLYTDVTQKLEAKDFSTLQEAHACTAGLKAVTTSVTADAIEECRKLCGGHGYLNSSGLPELFAVYVPACTYEGDNVVLLLQVARILMKTVSQLASGKQPVGTMAYMGKVQYLMQCKSAVSSAEDWLNPDAIQEAFEARALRMAVNCAQNISQAASQEEAAGFYERSPDLLEAAVAHIQLIIVTKFIEKVHQEIPGHGVKEQLQALCNVYALYILHKHLGDFLATGCITPRQGALANEQLGKLYAQVRPNAVALVDAFNYTDHYLGSVLGRYDGDVYPALYEEAWKDPLNETVVPEGYHEYLRPLIKQQQLKLSRL

SEQ ID NO: 235779 - protein, 59 aa, Zea mays
  Clone ID: MRT4577_146615C.1.pep
KRLGEMYLGLLKWCWGPQTSPCGDSVQTFVSLLALERGVIASKSGLGHRLLHYEFLKMS

SEQ ID NO: 235780 - protein, 369 aa, Zea mays
  unsure (1)..(369): unsure at all Xaa locations
  Clone ID: MRT4577_146616C.1.pep
LLSVEALHQXHIFIFILAIAHVISCVLTMLLESVRIRQWKHWEDEIQKGATDNGPRKVTYVHQSEFIREHSKGIGRDTTMLSWLHSFLKQFYGSVTKSDYTTMRLGFITTHYRSNPKFDFHRYMMRALEADFKKVVGISWYLWIFVVVFMLLNINGWHTYFWISFIPLLLLLAVGTKLEHVITQLAQEVAEKHSAVEGDLVVNPSDDHFWFGRPKIVLYLIHFILFQNAFEIAFFFWILTTYGFNSCIMDHVPFIVPRLVVGAIIQLLCSYSTLPLYAIVTQMGTFFKKEIFDEHVQQSLLGWAQKAKKRKALRNNGNGSNGAAAGSSHPSATARLELMRRAVALEEGSAGGNGSEASAAELHDTGPKL

SEQ ID NO: 235781 - protein, 149 aa, Zea mays
  Clone ID: MRT4577_146617C.1.pep
ETRHRPPLITLQGHTFKCTIIHIYTRAQTKKKHVKKEQNPLASFHNQPGSRWRRRKARRRRLGVDWGAVPDNRMAGEGGCGVAPMEGEGVASVAGARCPSARAVDVLRLRSYHPDRGRRDVAEVAKLHVDGYSAERSRARGGRPGCELR

SEQ ID NO: 235782 - protein, 323 aa, Zea mays
  Clone ID: MRT4577_146618C.1.pep
MNSTSSQRGYPAKRWCAANMSSTSMRHSAWKSEPWTHLTHKQRRPQWIAYNPRTMRPPPLSTDTNSMKILSWNVNGLQAIVQSGFSADELVARENFDVLCLQETHLEERDVDLFKNLVHEYDYTCWSCSVARLGYSGTAVISRVQPISVQYGLGIPEHDQEGRLITLEFDDFYLVNAYVPNSGRGLRRLNYRINDWDPCFSDFIKKLECSKPVIVAGDLNCARQSIDIHNPQAKTEAAGFTIEERESFEVNFSRKGLVDTFRKQHPNAVAYTFWGENQRITNKGWRLDYFLASESIADKVHDSYTLPDVALSDHSPIGLLLKL

SEQ ID NO: 235783 - protein, 58 aa, Zea mays
  Clone ID: MRT4577_146619C.1.pep
KNAHTGFYTCIINQQTDSRTYPREESLFHQRHTINSLFKGSQGNLYNVIFKKYSSNFA

SEQ ID NO: 235784 - protein, 397 aa, Zea mays
  unsure (1)..(397): unsure at all Xaa locations
  Clone ID: MRT4577_14661C.1.pep
MASWDNLGELSNIAQLTGLDAVKLISLIVRAASTARLHKRNCRRFAQHLKLISGLLEQLRVSELRKYPETPEPLEQLEDALRRXYREIDYLRLVPLIXLVDNARIRDRLEYIERDCEYSFDEEDKKVQDALLNPDPCTNPTIVLKKTLPCSYPNLPFNEALRKESEKLQVELQRSQSNMDLGSCEVIQHLLGVTKTVESTIPEKETNVKAPEKKGSNYSESKGETAKSFDDDDDYPKKQNNEYPKKQKDTCSTQRCSSQVPYGHDLVSSRGSYSDEWHADLLGCCSEPALCLKTLFFPCGTFSRIASIAKDRPMTSGEACNDIMAYSLILSCCCYTCCVRRKLRQKLDIAGGCCDDFLSHLLCXCCALVQDXRGVEIRGAYXRKTKVTPPACQYMEH

SEQ ID NO: 235785 - protein, 100 aa, Zea mays
  Clone ID: MRT4577_146620C.1.pep
RRDSLLGPIFFWSTFQELMKDQFGNYVVQKVLKTCDERYLEMILSSIKLHLNELKNYTYGKHIVTRVEKLIVTGEERARMASLSGQRQQQPPNCTAVDAH

SEQ ID NO: 235786 - protein, 48 aa, Zea mays
  Clone ID: MRT4577_146621C.1.pep
SMLCEIVKGAPIEPAIDIFFSPQYCCSIYFRVSWSTCWYRPFYLFFIF

SEQ ID NO: 235787 - protein, 325 aa, Zea mays
  unsure (1)..(325): unsure at all Xaa locations
  Clone ID: MRT4577_146622C.1.pep
EEDELXNEENGKPDEHIDEEQKYNSSDVEKEKHITLSTNRFPREKALTLAVGDEDTDMLADVKQMAAAAAAAGQASSSFENQLRPIDRYAMRFMELWDPVIDKAALNHQVNVEEEEWELDRIEKFKEDLEAEIDEDQEPLSYESWDVDFATTAYRQHVEALTQKQLLEEQERQAQEATKELEEKNDNMSSHHRKSKKNKKKTGKLKPLKRVRLSPESEVILEETSVDNAPSPELTSDESPHHYCNKRKKITVATEENSNSRSLKKLKKTTKSSFISEALSPRLKEDLNDSDSKSVGRTKSDGRFFIPCMPVKRVIVIKPERLKRK

SEQ ID NO: 235788 - protein, 86 aa, Zea mays
  Clone ID: MRT4577_146623C.1.pep
MENWSPSGNRSRINSGFYKFKSRPPPHFYKYVFFFNFQRYCSLFNSFAFYVLIILFFFFFFNRSFTTRFASFGLNIMLSSSDAKQQ

SEQ ID NO: 235789 - protein, 41 aa, Zea mays
  Clone ID: MRT4577_146624C.1.pep
IKKKGPRAPKKKKKKKKKKKKKKKKKKKKKKKKKKKKKKKK

SEQ ID NO: 235790 - protein, 656 aa, Zea mays
  unsure (1)..(656): unsure at all Xaa locations
  Clone ID: MRT4577_146625C.1.pep
HSAPRHSTLVDVPGRELSRLRPILKPFMLRRVKIDVIAEMTKKKEEIVPCKLSSRQQVFYQAIKNKISLNELLAGSRGSLNDKKLLSLMNIVMQLRKVCNHPELFERNEGSSYFNFAEIPNSLLSPPFGELQDVHYAGKRNPIIFEIPKLVYEGIISNMENSGNICGFQNGYLNRLFNIFLPSNIYRSAIPEVSSSKESLLSSGAFGFTRLSNLCPVEASFLATASLFERLVFSVMQWNRNYTAEILDEFLDSEDTGIQSSQNDSTKVRAVARLLLSSTKAKPSLLRTKIGTGPIDGPYEALVLSHRDRLASNIRLLRSAYAFIPPARAPPINVWCADRNFAYKFTDEMYDPWAKKLFLGFARTSEFNGPRQPIAPHXLIQELNTDLPIIEPMLQLPYRIFGSSPPMSNFDPAKMLTDSGKLHTLDMLLRRLRAEGHRVLLFAQMTKMLDILEDYMNFRKFKYFRLDGSSAISDRRDMVRDFQNRNDIFVFLLSTRAGGLGINLTAADTVIFYEIDWNPTQDQQAMDRTHRLGQTKEVTVYRLICKDTIEEKILQRAKQKNAVQELVMKGKHVQDDHLMRQEDVVSLLIDDTQIAHKLKEISMQAKDRQKRRRAKGIKVDKEGDLTLEDLDDATAEAVDQDKTTSKKKHRAQKDQN

SEQ ID NO: 235791 - protein, 108 aa, Zea mays
  unsure (1)..(108): unsure at all Xaa locations
  Clone ID: MRT4577_146626C.1.pep
DAHIYALMKYLITVRHDQTRFNPTAAXXQPCSFALIINTKTMISTDYPLYTKLFLCVLVMDHPPCLCTYMVTASTMNTADADCIANLCRITLASKRQPLSAYCHCPPH

SEQ ID NO: 235792 - protein, 61 aa, Zea mays
  Clone ID: MRT4577_146627C.1.pep
PFYLFFNPSILGDWADKGPKIPGAVGGLIWSPKKGAELRPFVTLAKVGTDGASNASARKFR

SEQ ID NO: 235793 - protein, 91 aa, Zea mays
  Clone ID: MRT4577_146628C.1.pep
FRSLASIMQVSACPHSLSELLGWNACPQIATLAANECDSARWSTSAAKPIDNKDLRSHSPPKVRQSCRLTLYRNLTQPWMDSHCARILSKT

SEQ ID NO: 235794 - protein, 377 aa, Zea mays
  Clone ID: MRT4577_146629C.1.pep
RGRPGRAQQAYSSSVPPLPLSLCPPCGGDEPSAAAVLVLFASHEQHPPGHPSACFTIHLMEGHSSWDYLPVEHIRTPVFNSGVVSEASNGGNDFSISLDAVVPDDILERIFTFLPIASMMRATSVCKRWHDIICSRRFLWTHMLPQRPWYFMFTSNKTAAGYAFDPILRKWYDLELPYIDKSSCFISSSCGLVCFMDNDNRNTISVCNPITKHSRRLLEPPGETLPDYSTIAMNVDRLSHKYSIALAKSKQIPEDFVRWDFSVYKYDSSSGSWVTSVREVFVGWRGGDNSVICDGVLYCLIHSTGALGNVNPRHGLIMYDLAGEPSETSLMQTSISVPCSLTCGRLVNLKEKLVLVGGIAKHNRPDIIKGIGIWELH

SEQ ID NO: 235795 - protein, 418 aa, Zea mays
  unsure (1)..(418): unsure at all Xaa locations
  Clone ID: MRT4577_14662C.1.pep
MASWDNLGELSNIAQLTGLDAVKLISLIVRAASTARLHKRNCRRFAQHLKLIGGLLEQLRVSELRKYPETREPLEQLEDALRRGYLLVNSCQDRSYLYLLAMGWNIVYQFRKAQSEIDNYLRLVPLITLVDNARIRDRLEYIERDQCEYSFDEEDKKVQDALLNPDPCSNPTIVLKKTLSCSYPNLPFNEALRKESEKLQVELQRSQSNMDLGSCEVIQHLLGVTKTVESTIPEKETNVKAPEKKGSNYSESKGETAKSFDDDDDYPKKQKDTCSTQRCSSQVPYGHDLVSSRGSYSDEWHADLLGCCSEPAXFEDLVLPLWNLLENCFNRQGQAXLLERLAMILMAYSLILSCCCLHXCKEKASSKVDIAGGCCNDFLSHLLCCCCALVQKWREVEIRGAYSEKTKVTPPACQYMEH

SEQ ID NO: 235796 - protein, 55 aa, Zea mays
  Clone ID: MRT4577_146630C.1.pep
ALVQYTNSFNFGTLRLTRTWPSVAPDLRPVFTWLEGMAPNHGGRSCVTVQAFLVW

SEQ ID NO: 235797 - protein, 65 aa, Zea mays
  Clone ID: MRT4577_146631C.1.pep
DNEQRVESTKEDGKMRAETPQKDDDLLRVQLTTDHLNGHHEQMQEHKTGLISTMAPSPSTFGNTY

SEQ ID NO: 235798 - protein, 106 aa, Zea mays
  Clone ID: MRT4577_146632C.1.pep
VSLCSSSQPLRTPQPLLGGPWRRAPSQMALGCPAPCFSRAPAISRGSPVPSSLQTSIEGRRCSCIPKKSQASGEGEASRVIFTKCSTKARTSRQFCGFKSDVIRVS

SEQ ID NO: 235799 - protein, 565 aa, Zea mays
  Clone ID: MRT4577_146633C.1.pep
MASVAGSGGGASAGAGGLKTYFKTPEGRHKLQYEKTHSPAVVHYNHNGKTVAQMTVAYLKEKPAGQGSTPSTPSAGSGMRSAAARLLGTGNGSRALSFGSNGTSRAVSGSSRMGGGIGVSTSASGSQGMANYDGKGAYIIFNTADTLFISDLNSHDKDPIKSIHFSSSNPLCHAFDPEAKDGHDLLVGVFSGDVYSMSLRQQLQDPGKKPVSYQHFVNRDKDKDKDPSQGGAASSRSTCVAWVPEREGIFVVSHADGNLYVYDKCKDGNTDWTFPTVKDQSQVLISHAKSSKSNPIARWHICQGAINDISFSPDGAYLATVGRDGHLRVFDFAKEQLIFGGKSYYGALLCCSWSADGKYLLSGGEDDLVQVWSMDDRKIVAWGEGHNSWVSAVSFDPYWSPPNSDETEENVMYRFGSIGQDTQLLLWDLALEEIAVPLRHPSGGSPTFSSGSPSAQWDNACPPAGVLQPSPRMRDVPKLSPLVAHRVHVDPLSGLEFTSESILTICREGLIKIWARPIHSESNQQPDSSEQVVGNATAKDKMLTSSNKAGASSPSFKQPPPVLFT

SEQ ID NO: 235800 - protein, 86 aa, Zea mays
  Clone ID: MRT4577_146634C.1.pep
KHYQKFKKITGKTKIKQRPLGVKKSTPKPLNKTGSDSLKTKTPPKITTFLFKSKGTAPGGVYYNGGGGAEQPKLESFWKVVRKKKL

SEQ ID NO: 235801 - protein, 144 aa, Zea mays
  Clone ID: MRT4577_146635C.1.pep
DTQLLLWDLALEEIAVPLRHPSGGSPTFSSGSPSAQWDNACPPAGVLQPSRTRDVPKLSPLVAHGVHVDPLSGLEFTSESILTICREGLIKIWARPIHSESNQQPDSSEQVVGNATAKDKMLTSSNKAGASSPSFKQPPPVLFT

SEQ ID NO: 235802 - protein, 75 aa, Zea mays
  Clone ID: MRT4577_146636C.1.pep
LQKCHCCHQCWRKKITELAPVHKMKYYKLTGLILFVSLVQSGGQPIDSRLRTVFFPQSSNIWFLSGHTVTAVNAT

SEQ ID NO: 235803 - protein, 91 aa, Zea mays
  Clone ID: MRT4577_146637C.1.pep
EQQIKSAINSLPTKPQQPILISDLDQQLPSSFDPYAQANAVDYLAHPGTNDYLHVRIQQHRPRQTLTNTQRLKKEFSYNKILKDLKKEFSC

SEQ ID NO: 235804 - protein, 205 aa, Zea mays
  unsure (1)..(205): unsure at all Xaa locations
  Clone ID: MRT4577_146638C.1.pep
LXLVLXINLXKCXXRLXILRLTQXSRVRFNXXAXHKPMXTVXXLWXXLLXCXVDCXVVXSYAXXLPRCLXRXSXXLPXXVAGLXVLXXRNXXSXXVRXXVLXAIXXLTKTXXCCXXSXXAIACXCISXPIXXWPQPPXXRLNXSRHPIVVPFKAAKPYIYGHXXIGGPSYVINDQHGGGAIGTSAVVMVGXCSGLSNRLKLXNRS

SEQ ID NO: 235805 - protein, 598 aa, Zea mays
  unsure (1)..(598): unsure at all Xaa locations
  Clone ID: MRT4577_146639C.1.pep
MASVAGSGGGASAGAGGLKTYFKTPEGRHKLQYEKTHSPAVVHYNHNGKTVAQMTVAYLKEKPAGQGSTPSTPSAGSGMRSAAARLLGTGNGSRTLSFGSNGTSRAVSGSSRMGGGIGVSTSASGSQGMANYDGKGSYIIFNTADTLFISDLNSHDKDPIKSIHFSSSNPLCHAFDPEAKDGHDLLIGVFSGDVYSMSLRHQLQDPGKKPVSYQHFVNKDKDKDKDPSQGGAASSQCTCVAWVPEREGIFVVSHADGNLYVYDKFKDGNTDWTFPTVKDQSQVLISHAKSSKGNPIARWHICQGAINGISFSPDGAYLATVGRDGYLRVFDFTKEQLIFGGKSYYGALLCCSWSADGKYLLSGGEDDLVQVWSMDDRKIVAWGEGHNSWVXYPYNCFWLSSXAFLIETCILSQINLRLYRLAQFLLIRIGXINLQLYRLXVSFDPCWSQPNSDETEENVMYRFGSVGQDTQLLLWDLALDEIAVPLRHPSGGSPTFSSGSPSAHWDNACPPTGVLQPSPRMRDVPKLSPLVAHRVHVDPLSGLEFTSESIVTICREGLIKIWARPIHSENNQQPDSSEQVIGSATAKDKMLTSSNKAE

SEQ ID NO: 235806 - protein, 525 aa, Zea mays
  unsure (1)..(525): unsure at all Xaa locations
  Clone ID: MRT4577_14663C.1.pep
MCGCAALVAGARPPRPVLPRRLRRRRGSSVRAEVSPGGESQPKKVTVAGAGWAGFAAAHHLIKQGYDVTLLAAESGPTEEVGLRGFWQPYRNIFALVDELGISPFTGWNKAAYYSTEGLAVEFPIFHNQPRLPAPFGVFAYPEFPNLPLSDRLTSIPVIAAVIDFDNTDTAWRKYDAMTAKELFKMYGCSQRLYKEIFELVTQAALFAPGEQCSAAATLGMLYYYVLSHQENSDFLLCRGEVEEKIFSPWLQSLELKGLKFVENKVPTSLTTDVDSGCISSIVCGDDVYEADAFVLAMGLSSLQSIVKNSPFLRSDREFRNLLHLSXLDCQPTWVLFXEKEYVTGLEAGNRVVYYFDIGXTFLDLTSVYDDYCEESITIVEYNASHLVLLSDDDIVYEASSHLIKCIQDFEGANVIRYSIRRSPNSVINFLPGSYKYTLRGSTSFPNLFIAGDWIVNRHGSFSKEKAYVTGLEAGNRVVDYFDIGDFAKIIAVEGDEPHIETLRSLNRRANELKSQIPFSEFFLQ

SEQ ID NO: 235807 - protein, 72 aa, Zea mays
  Clone ID: MRT4577_146640C.1.pep
LFPLSIYLLLYQLPRLISPGDFLQLTPESKPYPNNNQHFYTYNLYNHSLRSSIYHENYSRTHSYYFLQTFLS

SEQ ID NO: 235808 - protein, 104 aa, Zea mays
  Clone ID: MRT4577_146641C.1.pep
MSGIIHKIEEKLHMGGDHKNKEEEHHKKAEEHHKKEEGEHHKKDGGEHKEGIVEKIKDKITGEHGDKSGDHMEKKDKKKKKDKKKHGEGHDHDGGHSSSSSDSD

SEQ ID NO: 235809 - protein, 96 aa, Zea mays
  Clone ID: MRT4577_146642C.1.pep
MSGIIHKIEEKLHMGGDHKNKEEEHHKKAEEHHKKDGGEHKEGIVEKIKDKITGEHGDKSGDHKEKKDKKKKKDKKKHGEGHDHDGGHSSSSSDSD

SEQ ID NO: 235810 - protein, 103 aa, Zea mays
  Clone ID: MRT4577_146643C.1.pep
MSGIIHKIEEKLHMGGDHKNKEEEHHKKAEEHHKKEEGEHHKKDGGEHKEGILESIKAGITGEHGDKSGDHKEKKDKKKKDKKKHGEGHDHDGGHSSSSSDSD

SEQ ID NO: 235811 - protein, 88 aa, Zea mays
  Clone ID: MRT4577_146644C.1.pep
MSGIIHKIEEKLHMGGDHKNKEEEHHKKDGGEHKEGIVEKIKDKITGEHGDKSGDHKEKKDKKKKDKKKHGEGHDHDGGHSSSSSDSD

SEQ ID NO: 235812 - protein, 49 aa, Zea mays
  Clone ID: MRT4577_146645C.1.pep
WSSVYISLTRVERSLSSVHSFLSRCLSPSLLPFSLPVPVLPAVSRLLSS

SEQ ID NO: 235813 - protein, 103 aa, Zea mays
  Clone ID: MRT4577_146646C.1.pep
MSGIIHKIEEKLHMGGDHKKEDEHHKKAEEHHKKEEGEHHKKDGGEHKEGIVEKIKDKITGEHGDKSGDHKEKKDKKKKKEKKKHGEGHDHDGGHSSSSSDSD

SEQ ID NO: 235814 - protein, 55 aa, Zea mays
  Clone ID: MRT4577_146647C.1.pep
GLIASRFQRMELFFMTRQTLPLYITWLRDICKGVNMTRFFKLSRGYQQAISVPAT

SEQ ID NO: 235815 - protein, 173 aa, Zea mays
  Clone ID: MRT4577_146648C.1.pep
MNEQLMRPPAPLPFHQMWAAVPAMEPPFKPVRAAWKRAVRTPWKRKAQPPASGGARWGGAAAPRNTTSFLIRAKRAGGVASLVSPCPVTPAVLPTPVLSPAREVLVEMAKEAWGVDGYGSMKGLIRLRADARDAAGDDSGSGESDVEGHVEVERRLDHDLSRFEMVHLPARGP

SEQ ID NO: 235816 - protein, 81 aa, Zea mays
  unsure (1)..(81): unsure at all Xaa locations
  Clone ID: MRT4577_146649C.1.pep
GGGXHKKAEEHHKKEEGEHHKKDGGEHKEGIVEKIKDKITGEHGDKSGDHKEKKDKKKKDGNKHGEGHXRGGHSSSSSDSD

SEQ ID NO: 235817 - protein, 372 aa, Zea mays
  unsure (1)..(372): unsure at all Xaa locations
  Clone ID: MRT4577_14664C.1.pep
MCGCAALVAGARPPRPVLPRRLRRRRGSSVRAEVSPGGESQPKKVTVAGAGWAGFAAAHHLIKQGYDVTLLAAESGPTEEVGLRGFWQPYRNIFALVDELGISPFTGWNKAAYYSTEGLAFPNLPLSDRLTSIPVIAAVIDFDNTDTAWRKYDXQENSDFLLCRGEVEEKIFSPWLQSLELKGLKFVENKVPTSLTTDVDSGCISSIVCGDDVYEADAFVLAMGLSSLQSIVKNSPFLRSDREFRNLLHLSTVDVISVKLWFDKKIIIPKVANVCSGFDDSSGWAFFDLTSVYDDYCEESITIVEAEFYNASHLVLLSDDDIVYEASSHLIKCIQDFEGAIVIRYSIRRSPNSVINFLPGELKEYYYFNINA

SEQ ID NO: 235818 - protein, 73 aa, Zea mays
  Clone ID: MRT4577_146650C.1.pep
MARRGEELDLGDLALPVLLSTPLIFVRYMLKKQHGIDGGIAVVFSLEYQRQIFFLFRLHKKRKLLQITRLYMI

SEQ ID NO: 235819 - protein, 103 aa, Zea mays
  Clone ID: MRT4577_146651C.1.pep
MSGIIHKIEEKLHMGGDHKNKEEEHHKKAEEHHKKEEGEHHKKDGGEHKEGIVEKIKDKITGEHGDKSGDHKEKKDKKKKDKKKHGEGHDHDGGHSSSSSDSD

SEQ ID NO: 235820 - protein, 134 aa, Zea mays
  Clone ID: MRT4577_146652C.1.pep
NTTSASAGMNPPSSKHTCVAPVLRHQISVAVAAAATVAAVVVVVSRPCCLLLLLRPVPSSSIHRHPLLVSSLQSLPSSSSSSPVPAAFFSFFVPFHLVASTVILFSFLRSSLCLRRRRRLPSLLPSSPSSSRSI

SEQ ID NO: 235821 - protein, 82 aa, Zea mays
  unsure (1)..(82): unsure at all Xaa locations
  Clone ID: MRT4577_146653C.1.pep
GFTKTXPKLFVWGKFPLEALIFFPFFFLTPLFCLVFGWPQPSFYSREFPIPFKNKLVLGFLSPRSKTFSPGLGAWRIFKFFF

SEQ ID NO: 235822 - protein, 68 aa, Zea mays
  unsure (1)..(68): unsure at all Xaa locations
  Clone ID: MRT4577_146654C.1.pep
ITIDVXKXXPLQGXYXDKXSXSKICPXMKGHAVMXXVKGXRKXRXGLGGRXXXXXEGXXNXXXXDARS

SEQ ID NO: 235823 - protein, 71 aa, Zea mays
  unsure (1)..(71): unsure at all Xaa locations
  Clone ID: MRT4577_146655C.1.pep
EGEVELAGEAGGLGGAEVAQPRGTADPASTLRERPRAGEKRVGGGHRHCRRPRCEDGEGGCXEVRYRTRPA

SEQ ID NO: 235824 - protein, 57 aa, Zea mays
  unsure (1)..(57): unsure at all Xaa locations
  Clone ID: MRT4577_146656C.1.pep
QALSDPMFSMFFCVHNKRFALSDYSYLRTFVCQQRVFISYLTGASGGGGASLYXFYC

SEQ ID NO: 235825 - protein, 271 aa, Zea mays
  unsure (1)..(271): unsure at all Xaa locations
  Clone ID: MRT4577_146657C.1.pep
VMSAGKDTRARHDDFVTAIGYRILEVENYLKESNLADGRGPLSWVHLDEDERDDLAAFLSASPFQQKDKVVTIPSAGDIEVGSNAARMKNDISTDSSKDSAGSTDLISGRAKEDLHRGHRRAASASADIGSWSMSIPNECEGTTEQLSDGSDKLPLRKIVKTCALTSTLQSKTRTKWKNGAVRWAGSNQQDVEEAIPLNTSQLSQGLEECFERNKSCLSTCDEHTYNKKLHGWLGALRRQLQSCMHSXQSGDYIYLLMIGFLASQDQQLVW

SEQ ID NO: 235826 - protein, 153 aa, Zea mays
  unsure (1)..(153): unsure at all Xaa locations
  Clone ID: MRT4577_146658C.1.pep
APAGACGRGLVPGGPRVVAYGLRQHTCWGGSLLGCFGPLFGALLPHYTPFALNEERGGPWGLSALDPPPPLLNDLSVTHGGGSSGVKFKQWLFCILKTHPSSRLNNVLGTYGTPLKQMQMAPLRGEKKKKKTPKKKPKKKKKKKKRKKKRKXR

SEQ ID NO: 235827 - protein, 359 aa, Zea mays
  Clone ID: MRT4577_146659C.1.pep
MATSFDRWEKDPFFLAAEEVQESADRMESVYRVWVQERSGGDSEAASVTGGPTAAQLRRELHTALGTAKWQLDELARAVRSNDLVMSAGKDTRARHDDFVTAIGYRILEVENYLKESNLADGRGPLSWVHLDEDERDDLAAFLSASPFQQKDKVVTIPSAGDIEVGSNAARMKNDISTDSSKDSAGSTDLISGRAKEDLHRGHRRAASASADIGSWSMSIPNECEGTTEQLSDGSDKLPLRKIVKTCALTSTLQSKTRTKWKNGAVRWAGSNQQDVEEAIPLNTSQLSQGLEECFERNKSCLSTCDEHTYNKKLHGWLGALRRQLQRSQYQIQYGHHIQLIVLALAALVIIVCIVRTIW

SEQ ID NO: 235828 - protein, 505 aa, Zea mays
  unsure (1)..(505): unsure at all Xaa locations
  Clone ID: MRT4577_14665C.1.pep
MCGCAALVAGARPPRPVLPRRLRRRRGSSVRAEVSPGGESQPKKVTVAGAGWAGFAAAHHLIKQGYDVTLLAAESGPTEEVGLRGFWQPYRNIFALVDELGISPFTGWNKAAYYSTEGLAVEFPIFHNQPRLPAPFGVFAYPEFPNLPLSDRLTSIPVIAAVIDFDNTDTAWRKYDASKEVPLSIQLVQISVRVTCTTCLHNGLSLSXLLVSSSVVTAKELFKMYGCSXKLYKEIFELVTQAALFAPGEQCSAAATLGMLYYYVLSHQENSDFLLCRGEVEEKXFSPWLQSLELKGLKFVENKVPTSLTTDVDSGCISSIVCGDDVYEADAFVLAMGLSSLQSIVKNSPFLRSDREFRNLLHLSTVDVISVKLWFDKKITIPKXANVCSGFDDSSGWAFFDLTSVYDDYCEESITIVEVEFYNASHLVLLSDDDIVYEASSHLIKCIQDFEGANVIRYSIRRSPNSVINFLPVEGDEPHIETLRSLNRRANELKSQIPFSEFFLQ

SEQ ID NO: 235829 - protein, 241 aa, Zea mays
  Clone ID: MRT4577_146660C.1.pep
WRLELPGPLLTAARLLLPQPLIMEEDPAGGEDLSSTAASSRHSYSGDDGEESGWTSYIDYFMETQQRRRRRKQGDVSRAAGDGPSTDDDAGRRRSSTAECSSGAGVGASSSCLPPPVLVDPPVVVVSRRLSLREGWRRKKVLHDESLEDTATSPISSPKLIELRDPDDATHHQTKTSCCAEISRSKRKNSTGGDVNNGANSGTDHTAAVAEDKAAYGNDEGLSNACFSCIADCDANKFNGC

SEQ ID NO: 235830 - protein, 86 aa, Zea mays
  Clone ID: MRT4577_146661C.1.pep
PHRSCTPPKSLRTNSFWVGYLGGLVPQLAVAFFPPYNRGCGDYKTNVLYFLFLLSHAGVIYTPFFLDRGAFFFFRKYWSHILIPKV

SEQ ID NO: 235831 - protein, 86 aa, Zea mays
  unsure (1)..(86): unsure at all Xaa locations
  Clone ID: MRT4577_146662C.1.pep
MPVTCIEKIITDTLQXDCCXIIIDSTTAGSESTISPDAHSPENGLLGFTTXVYDMICXCKKMDATTTKYSXGRYEXIVKKVSSYLK

SEQ ID NO: 235832 - protein, 70 aa, Zea mays
  unsure (1)..(70): unsure at all Xaa locations
  Clone ID: MRT4577_146663C.1.pep
GPAHASRTQDERVXGMCVVISAVCVCIQGAAVWVDQAIYITDCVLVYYCPHFKYLFFSPVLIILLHGVWH

SEQ ID NO: 235833 - protein, 75 aa, Zea mays
  Clone ID: MRT4577_146664C.1.pep
PPKLGFPGRVFKPVNFGPPLEAKKKKLPNGRPGKLGFLGFLIPTQSPRQRALLQPFATPVLPMGQNHYPNLFRFN

SEQ ID NO: 235834 - protein, 41 aa, Zea mays
  Clone ID: MRT4577_146665C.1.pep
SHPLVLWSPPWLHDGHIEVSGPGTLARPPEPKPLIAVVCGV

SEQ ID NO: 235835 - protein, 147 aa, Zea mays
  Clone ID: MRT4577_146666C.1.pep
GAPRPFLFWGGGGPPLRWVGRAPHRPPDVSGCPRYVPGGGRLVFGAGPPLLFGGGCLWVFWAPLFVVPLLGAPSFPGGVGYFSPPQPLFSLLFGGLQLLFCPPGGWPMSCPPRFSCWCLVRFFSPPLCAFPLLARYALVLPSLRRNL

SEQ ID NO: 235836 - protein, 113 aa, Zea mays
  Clone ID: MRT4577_146667C.1.pep
FLGELWLFMFFCHICCYCKGEKPASAGLGGPKLWMPTSAELVKKKSTCSPRGGLLPRSKKARVLSRGFFMIINSGGRDAINMVGAGRRPFNTTPEASHPTGQNRVRNPRDDLP

SEQ ID NO: 235837 - protein, 76 aa, Zea mays
  Clone ID: MRT4577_146668C.1.pep
DKQSPLIFKTGRKGKIQRIGTLGQGKELSTNNQKNLPRGSIWNSQLAYGGLLGYRVLVIWRDPFFWSLRLRLGNRF

SEQ ID NO: 235838 - protein, 111 aa, Zea mays
  unsure (1)..(111): unsure at all Xaa locations
  Clone ID: MRT4577_146669C.1.pep
MVSSEMTSVTVTRAQGSKLFRGKILLPGGSSDVVPSENVEFDFSDVFGPSAVHTHTXEVSVLTLGSPAPVAESNDEVYNDPDVIVKRSHXSLGGPSSLVSQSLPFSKLTLH

SEQ ID NO: 235839 - protein, 89 aa, Zea mays
  Clone ID: MRT4577_14666C.1.pep
SSSTARDATARTGAHAAGAEPPGCTDIDMRIRVSSRSHYIKDLPHYPGRGEGLATYYQMDVDMLAEKEGTTSKLAATRHLLRLEPRQCE

SEQ ID NO: 235840 - protein, 514 aa, Zea mays
  unsure (1)..(514): unsure at all Xaa locations
  Clone ID: MRT4577_146670C.1.pep
MVSSEITSVTAARAQGPKLFRGKILLPGGPPDVVPSENVEFDFSDVFGPSAVQTHTGVSILTPDSPAPVAESNDEVYNDPDVIXKRSHSLVGPSSLVSQSLPFSKLTLHKTESSLELSECPSKGKQINQGSLSDDEFDDVKKENEGVGLDDFEVLKLVGQGAFGKVYQVRKKGTSEIYAMKVMRKDKIVEKNHAEYMKAERDILTKVDHPFVVQLRYSFQTKYRLYLVLDFINGGHLFFQLYHQGLFREELARIYTAEIVSAVAHLHANGIMHRDLKPENILLDADGHXDLLIYSLPILHHLLLIYWKFEKKCPFLTCRXXAMLTDFGVAKEFDENTRSNSMCGTVEYMAPEIVQGRGHDKAADWWSVGVLLFEMLTGKPPFVGGNRDKIQQKIVKEKIKLPTYLSSEVHSMLKGLLHKEAGRRLGSGPGGSDEIKNHKWFKSVNWKRLEARQIEPSFRPNVAGKTCIANFDECWTNMPVLDSPVASPVAANSNFVGFSYVRPAPFLQKPSPLG

SEQ ID NO: 235841 - protein, 505 aa, Zea mays
  unsure (1)..(505): unsure at all Xaa locations
  Clone ID: MRT4577_146671C.1.pep
MVSSEITSVTVTRAQGSKLFRGKILLPGGSSDVVPSENVEFDFSDVFGPSAVHTHTEVSVLTPGSPAPVAESNDEVYNDPDVIVKRSHSLVGPSSLVSQSLPFSKLTLHKKDSSLEVSECPSKVKQINQGSFSDDEFDDVKMENEGVGLDDVDVVKLVGPGAFGKAGQQRTIVESEIYVMIQDISDGNLTXNVVLWVXAKRLLLENITLASYSMQYSXEPNYRLYHVLDFINGGLLLFQLYHQGLFRXSFIYFVPIKILLVLVLLSYHLSCREELARIYAAEIVSAVAHLHANGIMHRDLKPENILLDADGHAMLTDFGVAKEFDENTRSNSMCGTVEYMAPEIVQGRGHDKAADWWSVGVLLFEMLTGKPPFVGGNRDKIQQKIVKEKIKLPTYLSSEVHSMLKGLLHKEAGRRLGSGPGGSDEIKNHKWFKSVNWKRLEARQIEPSFRPNVAGKTCIANFDECWTNMPVLDSPVASPVAANSNFVGFSYVRPAPFLQKPSPLG

SEQ ID NO: 235842 - protein, 46 aa, Zea mays
  Clone ID: MRT4577_146672C.1.pep
MATVLGSPRAPAFFFSSSSLRAAPAPTAVAMPAAKVDIMCLIAIRN

SEQ ID NO: 235843 - protein, 86 aa, Zea mays
  Clone ID: MRT4577_146673C.1.pep
MAPGSTTYPTLTKTNYNDCVLLMKVKMQARGLWEAVEIGDVDERDDRMALDVICSAAPPEMVATLAIKPTAKEAWETLKTMRIGDE

SEQ ID NO: 235844 - protein, 162 aa, Zea mays
  unsure (1)..(162): unsure at all Xaa locations
  Clone ID: MRT4577_146674C.1.pep
YNQDLEKIKKMAPDNLRMDLVLSREQTNPARQKMYIHTGMAEYKEQLFXLLKKARTWVSMCGLKGMHKGIAYIMLDXLAGEDGINWLEYNXQLKKSEQWNVLVILIMILQCIVSALSILVVMSLQCIVRSIRRSKKNVWHSSHQKNEQTLKMKKKQKNSLLQ

SEQ ID NO: 235845 - protein, 70 aa, Zea mays
  Clone ID: MRT4577_146675C.1.pep
LGLCSFLFFLFSGGFFFFSLFFFFSYFSSFLLFFFSFLLKTTTWAHRAAHPETILRGGTSGLLLTGHEPR

SEQ ID NO: 235846 - protein, 70 aa, Zea mays
  unsure (1)..(70): unsure at all Xaa locations
  Clone ID: MRT4577_146676C.1.pep
YAYERLPHHNYKLAVHALNNYQPGQFXCQGYRVSKQRILSDYWDRKELSTLKLSKSMKRKNQQVYKYFKK

SEQ ID NO: 235847 - protein, 247 aa, Zea mays
  Clone ID: MRT4577_146677C.1.pep
MCHSPLGAATTTAGALALLFLLPLASAAAAAAGTAAKATPNITALMSKGGCKAFASLLDKSSDALSAFESAVGGGVTAFCPTDEAVRGFMPSYRNLRAARVRSSTTGTPSPSTPWTRCWSPWSCSTPWRTRRPLRPRRRRRWRLGPPSGRGTSGGAERTRLARPPPTPRRPTRGRTTRRTRRPRAARGGSRPPPPLSPWPPPWLLRAGWFKDCSATQLLSLDGDAMPFWFLVMLGCLLLHRLLPLLV

SEQ ID NO: 235848 - protein, 72 aa, Zea mays
  Clone ID: MRT4577_146678C.1.pep
SVNSGRRITLNHISQSYKPPVAQRSETGQKTEARPSYRKRGRGTRDYNSTPELSLCNVRAYLRSVGPLCLTQ

SEQ ID NO: 235849 - protein, 224 aa, Zea mays
  Clone ID: MRT4577_146679C.1.pep
MCHSPLGAATTTAGALALLFLLPLASAAAAGGGTAAKATPNITALMSKGGCKAFASLLDKSPDALSAFESAVSGGVTAFCPTDEAVRGFMPSYRNLSADGKASLLLFHAVPVYYTLRGLKSSNGPMNTLATDGAASNYNLTVQNAGDQVTLRTPAADAPARVRSTVYDRDPVAIYAVDAVLEPVELFDPVADAPTPAPAPAPALAPRSAKRTRHQRRRGADAPG

SEQ ID NO: 235850 - protein, 84 aa, Zea mays
  Clone ID: MRT4577_14667C.1.pep
HASDFGKLTSLHFHAWSKGLKTGMYYLRTRAAADAIKFTVDTTLLKENGNVVSNGKPTEEDVEAKMAQMVCSLNNREECMACGS

SEQ ID NO: 235851 - protein, 107 aa, Zea mays
  Clone ID: MRT4577_146680C.1.pep
ARRPGARVPNLHHRAQLPRYAVNPDRLLQGNRGPEHTAAAAAASAALAVMTVCYIFYLQSAATHDVSYLIHCTRVREVTIHLRSRRTPPSQTRRYNAFTNSLKVMLS

SEQ ID NO: 235852 - protein, 167 aa, Zea mays
  Clone ID: MRT4577_146681C.1.pep
PWGFPPRKRGPGGLFYQKTRLVLFFWCFAQPIFSGAMQNGGGGARHFPVRPGLLKVRHVLFWPFGPQSLPPFWFCNPWARAGPGGFPPREYFSLGFFFGARFGAVFVLGFLLGPPPYQNPPPPPPGKAPSPGEGALWPLRLLGDRGLFPPKKKKKKKKKKKKKKKKI

SEQ ID NO: 235853 - protein, 169 aa, Zea mays
  Clone ID: MRT4577_146682C.1.pep
MDVTDSRSTRKVNKIVIPNKINAPHHNLHLGHTLKPIVWHALRSSGLDESGTSDGRGGARWRGQEEAGRGGLGTREKHVLARAQTPDREKRRGPEEDDNDEMAGAQGGGRNLHLGRAVGPLAWRTLGISRLHESGTGDGGDLGLVARSRGGGREWRIWNKREMHVLARP

SEQ ID NO: 235854 - protein, 168 aa, Zea mays
  unsure (1)..(168): unsure at all Xaa locations
  Clone ID: MRT4577_146683C.1.pep
MGSDEEAALLVPAVEEGCPGCVMERRKASSNGRIPYSELFFVAATSLASALPITCLFPFLYFMVRDFRVAETEEDIGFYAGFLAASYMVGRGFSSIFWGVIADRVGRKPVITFSILSVXVVFSALFGLSTTYWMAIATRLVLGALNGLLAPIKVRVRCFSKNSSRLLH

SEQ ID NO: 235855 - protein, 106 aa, Zea mays
  Clone ID: MRT4577_146684C.1.pep
VFYTLTITLFSFLRALLFYSTGHACAHNGLYSRTQILVALAETHDYRRTNMCTASSNPRSLHCSLAVPTASVRASTSPITRASARTPIWTSARASVRASLRASVRA

SEQ ID NO: 235856 - protein, 190 aa, Zea mays
  unsure (1)..(190): unsure at all Xaa locations
  Clone ID: MRT4577_146685C.1.pep
HASAMPLMCAGFTVYMPMIWHSMNQQSKSLSVVVIGLGGLGHMDFKFGKAFWLKVTVFXTSESKRAQAINLLXDNFVISFDEKQMEALKSSLHFIIDTVVGNHPFDPYLSLLKAGGILTMVGFPSEFNVHPWRXGGTNGIHEMLNFCASNKIYPKIEVIKMDNINEDLETYTLLEIMVINSSAHTKSALN

SEQ ID NO: 235857 - protein, 104 aa, Zea mays
  Clone ID: MRT4577_146686C.1.pep
CNRSTALDTRLPRLGPAAIDRFPSSLAWHWVPGKHVRGWKAGSSIHGLASPATVGGAKQRPPGPGARGCGRWRRRSGGGDTEAQRVASRRLHHRVLRGSIYSGQ

SEQ ID NO: 235858 - protein, 139 aa, Zea mays
  Clone ID: MRT4577_146687C.1.pep
VGRVGLVNCPGHAAHRKAKQNNNQIMGLLSNHTSKIRTTELKKCFVLDVYDSIQLSTHGFSPGLCKFTYFSSWGLSQDNTDGLGSSATHVFFTSLNHEPSSSSREQSYQSHCNLFVLYFSCQAHTISLSAGLISWFRTF

SEQ ID NO: 235859 - protein, 95 aa, Zea mays
  Clone ID: MRT4577_146688C.1.pep
PAWLVCGLAVGSRPGSPLRCGPGCVPRCGVRCLCVRLRLCCRVLRCLGFLVLCCRAVLCLCVLGALSLIRPAGVGFAFCWEGDLLGQAALRILAS

SEQ ID NO: 235860 - protein, 47 aa, Zea mays
  Clone ID: MRT4577_146689C.1.pep
YRLILHSYEVILWIANHNSGQVYTYSSLNRAQLDDTLSLGLPESPRT

SEQ ID NO: 235861 - protein, 213 aa, Zea mays
  unsure (1)..(213): unsure at all Xaa locations
  Clone ID: MRT4577_14668C.1.pep
KTPHFRTFPTRRPPPPXPSTTPTPTXKQTPKPTPPPAPCPLPPPTAPKTWTRFLPPTPLPTKTPTRASPHPLPRPAAARPAESPPAASSPRSRNPSRRLSSPRSRRRNPPRPSPPPRLPNPPLPPETXARRPVPPAADPPXPPGSARTRRMTPRSAXPSASEAPPPPLCWIGAGVFVPPGAQALAWLRLRRGQEVGRRHRRAGEVKSWCCWPL

SEQ ID NO: 235862 - protein, 111 aa, Zea mays
  Clone ID: MRT4577_146690C.1.pep
RRGCFRLWLSLAVGIMAQMAASFFFSSGVSFLGPAMAAPGPPIFGTSVAAAASMASLLSSSSVLSSFAFSVSGSLQRSSWAALFSVKLPRRDGTASSSTSKGSIMVSDVIA

SEQ ID NO: 235863 - protein, 166 aa, Zea mays
  Clone ID: MRT4577_146691C.1.pep
MHAYVSSEFGSSKSWFATGDIAALEDLIGRLRRLKENLGFITNRITTLQASLDSWQSEQINKSLYYLSFLSIIFLPLSIVTGVFGMNVGGVPWTGQNKNPKNRDGFMNVMLICVAILLLLLLCFLFPSLYSHVTAWRTRRELTRSNSQNRRHLKLFKGHKEGYMRL

SEQ ID NO: 235864 - protein, 136 aa, Zea mays
  unsure (1)..(136): unsure at all Xaa locations
  Clone ID: MRT4577_146692C.1.pep
ATXXPQGXQXXXXXLXPPXXXPTXXXXXENPXREPERXQQAXAXGXXXXTPXXXQQXAAQKQQXXXXXXXAQNSRAQQPQQXGPANXXANXQQQXGXPGNQXXAXNAXXKEQQQQRPXSQRAAANPQQPRTANQRT

SEQ ID NO: 235865 - protein, 108 aa, Zea mays
  unsure (1)..(108): unsure at all Xaa locations
  Clone ID: MRT4577_146693C.1.pep
GERPLGRLKRYEGARPPDDETKRMVIPDARKVLRLXQPGHKCRLLGELSKSXGWSVHTTVRALEEKSKXKSKVAKERKKQLAKVCVKXAEKAAQEKLGSQLQILAPIK

SEQ ID NO: 235866 - protein, 464 aa, Zea mays
  Clone ID: MRT4577_146694C.1.pep
MLLRRMRWMSEGDGRWELDAETPVTMEGTARPVPGDPLPLGLSRGYRITRPKQLDFFHRFMASPLVPTFSAMRDGLSVNHAHIFYMTDNWSSTILEKINVKKLVSVVKEKLANRQEEASWTKDLKNHLHDVMSLGVGTEILITPDTTLLLELFDIKKGNRGKAIFHHELPHHNITFQASWPGLFVDKKGTYWDVPLSLSADLASVGSSSGLSYHLLLQQNSGEPKCFGGDETDDVPTALLPGLCAKVAISMKKSIDAWRKKEDKLKNVQPYDVFLSDSHVSLTGIVGGVASGYLGDCSRRVAIRDETHKSNAFIMFDERNKRAAFADLFASVTFTAQYGNFQRLFLDLTKASARFDITSGSLFLCGASRLAQDFFFSRRPDVETFCDICPDVTVSFQQQIVGPFSFRVESSVAIDPRSQDHFVRVDDPIFAIDWALKVLGSAKATAWYSPKHQEAMMELRFYET

SEQ ID NO: 235867 - protein, 30 aa, Zea mays
  unsure (1)..(30): unsure at all Xaa locations
  Clone ID: MRT4577_146695C.1.pep
CYIKXSEVCITRVVYGTDVGRHSLXKXSGF

SEQ ID NO: 235868 - protein, 102 aa, Zea mays
  Clone ID: MRT4577_146696C.1.pep
ELKRGFSPKKAILLEGLETAGFFVFPSSGAYYLMVGPPPFGFDNDVKFFEYLIPEVGVCAIPPSVFFLGPQKGKKLVRFPFNKDEGPLRAPVERFKAKLRRK

SEQ ID NO: 235869 - protein, 188 aa, Zea mays
  Clone ID: MRT4577_146697C.1.pep
MPSAASRLVRIGRAARSAAATTSRFAQFVEAAILSTKAVATKPHAILGSDRAASVDLRMNQSTVHAPPRAMAPASLTLSHPEEQRQEGKVKFVVEEKDLESEAALWALYERRCKDFNQKRDHDEMVHWFNTFKETVLLVHRRNNANLPYKLGINKFADGKLRKLCCCHDPILKKIDEEFGDKPGEFIL

SEQ ID NO: 235870 - protein, 71 aa, Zea mays
  Clone ID: MRT4577_146698C.1.pep
ICSVICTLEDGAAMVVIFCLLWFGCRNKCCDPSRYCLVTLSCNSIFAWSVILIAKTKALFGSDLYMLVSST

SEQ ID NO: 235871 - protein, 94 aa, Zea mays
  Clone ID: MRT4577_146699C.1.pep
SFLSPSRVPGRLPNPRRDVSYPIQAAMDFFKSILAEPDPDPASPTPDQEPDPEPEFAVSVLSSNFGGCGFCFPFFFVSLYNYRYLFYYILISFF

SEQ ID NO: 235872 - protein, 58 aa, Zea mays
  Clone ID: MRT4577_14669C.1.pep
GAFFFFFFFFFFFFFFFFFFFFFFFFFFFWPPKKRAEAPFGLKELDNKRPGWKGYKKK

SEQ ID NO: 235873 - protein, 79 aa, Zea mays
  unsure (1)..(79): unsure at all Xaa locations
  Clone ID: MRT4577_1466C.1.pep
DAYXSSISSAIILYKATKEXGVLDPDEIKYXRNLINMLIXNTAXPYVTIFHWDVCQVLEYKYGVFLDQSPNSIVEDYTY

SEQ ID NO: 235874 - protein, 248 aa, Zea mays
  unsure (1)..(248): unsure at all Xaa locations
  Clone ID: MRT4577_146700C.1.pep
AASRRPVFFFGPRRRPDSGQDRTWARRRRSATESGARGAPRRTRRTDNAVKNHWNCSLKRKLAGGAVASXRRFPLKTPPRPRRAGAXMMMSISPPDSPSGSGSGSDRSDLSSHGAGSGSGQIYRPVARSGGFEPADCAMSRPQEEDPLTALSLSLPGTDQRFHHHSAAADSHFQELPPSPSPPAPSASPFSPEFAAAMQELIRTEVQRYMASAGLRAGCGAVGAADLCMPQLVDGVMRAAAEQVGRMQ

SEQ ID NO: 235875 - protein, 197 aa, Zea mays
  Clone ID: MRT4577_146701C.1.pep
MDMTLEVVKEKENENTELQEKLLQLESQLMEANRIREEANAKTIQWKEKVLDQVGELQNIKQENDDLQAKVSAASEKIKELSSQLANARDGTMNGKAKEEDNEKGDTEKDDEPVVVVAKVWENSNFADYDSSKVKENDGDSQVDLESNRGDAGVDSNGLLPTKQSSGRTSPTKQHQQHKKKLSLKRFGGLLKKKSEN

SEQ ID NO: 235876 - protein, 307 aa, Zea mays
  unsure (1)..(307): unsure at all Xaa locations
  Clone ID: MRT4577_146702C.1.pep
MGAEAAERDRIRGPWSPEEDEALRRLVERHGARNWTAIGRGVPGRSGKSCRLRWCNQLSPRVARRPFTADEDAAIARAHARLGNRWAAIARLLPGRTDNAVKNHWNCSLKRKLGAAAAASGSAVSADDSXPPPRPRRAGAXMMMSISPPDSPSGSGSGSDRSDLSSHGAGSGSGSGSGQIYRPVAARSGGFEPADCAMSRPQEEDPLTALSLSLPGTDQRFHHHSAAADSHFQELPPSPSSPAPSAYPFSPEFAAAMQQLIRTEVQRYMASAGLRAGCGAVGATDLCMPQLVDGVMRAAAEQVGRMQ

SEQ ID NO: 235877 - protein, 62 aa, Zea mays
  Clone ID: MRT4577_146703C.1.pep
EVRLLVSCSFATRREAFLILLVVPFVIRHRNNKSLASQLLLCPSFLIFTVVFSWPSAKGLLA

SEQ ID NO: 235878 - protein, 81 aa, Zea mays
  unsure (1)..(81): unsure at all Xaa locations
  Clone ID: MRT4577_146704C.1.pep
FSNGYLXAGRDPIPSLLTARSLLLVRFFLFRGSNVSERRRPLLCCTSCCRRPKPHRRDSTRSYGRQEVWKVGSLLSPRPAL

SEQ ID NO: 235879 - protein, 484 aa, Zea mays
  unsure (1)..(484): unsure at all Xaa locations
  Clone ID: MRT4577_146705C.1.pep
KFCFFEXLVFXCPPLQALVQYKIIISTYTSSYLLQAEGIRQGHXSHIFLDEAGQASEPEAMVPLSGLCGRDTAFVLAVWKRQXLGPVVYCREAEKCGLGTSYLERLLTGFEQYQTGNPNYVTKLVRNYRCHPAILELPSELFYEGELFGRXEKENHLLTTASXLPNKSFPVLFVGIQGCDEREGNNPSWFNRIEVSKVVSIIRNLTRGEDVHESDIGVITPYRQQVAKIKKALEAFEMPSFKVGSVEQFQGQEREVIIISTVRSTVKHNEFDKFFNLGFLSNHRRFNVAITRAKSLLVIIGNPYIITKDRHWDRLLRYCADNGSYQGCPLPPPESPYSDDARFFSKYDEDQGGPSGQDYSQEPAYCNYNQEPAYCNYDDQEPSDFGSGHDTGVAQPEPASENQESWSEELPEDESQPFSNPQADVEETPKQDGEEGAAAAQGDAQADQSLTNDDSQLQDAGAGKYTFPPGWCDVSSIPATGWGD

SEQ ID NO: 235880 - protein, 40 aa, Zea mays
  Clone ID: MRT4577_146706C.1.pep
IGSYSLIPTPNMSLVQSSSVSYCMHRFLMGPVKPWHNLYT

SEQ ID NO: 235881 - protein, 52 aa, Zea mays
  Clone ID: MRT4577_146707C.1.pep
GSPGAARNSIVKLIRYRATLRRRGPRTQLRPYRRDQITLRVTGPLGFTTCVN

SEQ ID NO: 235882 - protein, 73 aa, Zea mays
  unsure (1)..(73): unsure at all Xaa locations
  Clone ID: MRT4577_146708C.1.pep
HHVDRIALFVWLPAXSVRCXVPYCIVKVKASHGLMVLNKLATVLCLAPVKTKFKFEFTKILQSIKATLNYKFH

SEQ ID NO: 235883 - protein, 69 aa, Zea mays
  Clone ID: MRT4577_146709C.1.pep
ACPYSARRWLALPPAVAAAPAAAAAASRAPSQLQIGLQGGVARGAPRTRGARALGGGGVAAQGLGKVEG

SEQ ID NO: 235884 - protein, 84 aa, Zea mays
  Clone ID: MRT4577_14670C.1.pep
LCIKKPPFSRSELFNIFLGIILEPQIPSGFEGPKSPFFSIFNQKGFFSPPVFSGFLAPQIPLYFSPPLRLPSPPYSLLIPGIFF

SEQ ID NO: 235885 - protein, 394 aa, Zea mays
  Clone ID: MRT4577_146710C.1.pep
MAAAAVVFDAEALSREEHIPAQFVWPTEERAPAGGVEEVAIPVVDLGEFLRRGVLPRGVAEACERHGVFQVVNHGVGAALLAEAYRCCDAFYALPLADKQRAQRRHGENHGYASSFTGRFHCCLPWKETLSFNCPAGAGTARAVVGYFVDVLGEDYRHMGSLLLYPIFLRACACHAARTETGKKCREVYQEYCDAMTRLALDVTEVLAAALGLDRGALRGFFEGGDSVMRLNHYPACRQPHLTLGTGPHRDPTSLTLLHQDDVGGLQVRAGGGPWRAVRPRADAFVVNIGDTFAALTDGRHTSCLHRAVVTGGGSRRSLAFFLNPPLDRVVRPPGALLQENKQAGRPRAFPDFTWREFLEFTQKHYRSDAGTMDAFVSWIAGGRRHHGGQEEGN

SEQ ID NO: 235886 - protein, 109 aa, Zea mays
  Clone ID: MRT4577_146711C.1.pep
ALPGTVRASTTLWAFDKCPAMAPKKAPGGKALLKALWKSLQVWIKPPSDPRTASSAPVDVLIGRYLNVSAWPGAFPEDPDPLAGDVEAEILDQLLQKTVWDVLPNVGGS

SEQ ID NO: 235887 - protein, 96 aa, Zea mays
  Clone ID: MRT4577_146712C.1.pep
ALERMIKNVMNGRGEGADNVEQPSADSHSEQESLTGVLGRGSVSGHKPRPVRPGTFLETVSKVLGGVYASNTSGITAQHLEWVHQTTLKILQEMAF

SEQ ID NO: 235888 - protein, 109 aa, Zea mays
  Clone ID: MRT4577_146713C.1.pep
CLAIIEQACVLDNHKEQQPWPVMCPSISFDLEVVDSGHATVKPVVTVPYMGCGRLRELASMPSVGRLARAGGRSLRPQRCGVPLGVAFYKDDHGVTGVIGVEGMDCDRL

SEQ ID NO: 235889 - protein, 80 aa, Zea mays
  Clone ID: MRT4577_146714C.1.pep
PRLPKPSRARTRELQTARRRTTTRPMMPPTTLPNQRGAISDQARTPPETDRIPTALAEIGGRFMSYDLPDHILRPPILGS

SEQ ID NO: 235890 - protein, 51 aa, Zea mays
  Clone ID: MRT4577_146715C.1.pep
HSSGSSVPTQENIYLRERDMPASLLSGEAHAPKICYFMSIGRIISWQYGAL

SEQ ID NO: 235891 - protein, 594 aa, Zea mays
  Clone ID: MRT4577_146716C.1.pep
MAMEEAGKMTCRKKGGLRTMPFIFANEVAEKLAVVGFSTNMLTYLTTQLHMPLAKAATTLTNFGGTSAATPLIGAFLADACIGRFWTIAAASVVYQAGMALLTVSAALPRFRPAPCKPGGAVACQEAAPWQLAVLYVSLLLNAVGAGGYRPCIVAFGADQFDESRAAERARSWGFFNWYYFCNGASMLLAVTAVVYVQDNVGWGWGLGVPAFCMGVSVAAFVAGYPMYRRLEPAGSPFTRLAQVVVAAVKKRRLPAADVNPALLYEDDELDAPISMYGKLVHTDQLSFFDRAAIVTDGDLVTLTDADSGKPSTAPVPDLWRLSTVHRVEELKSVIRMGPIWAAGILVITGSSTQNTFSLQQASTMDRRLAPGLSTFEIPAGSMTVFGLLAMLFTLFVYDRALIRVARRFTGLDRGISFLHRMGVGFAISVLATLVAGFVERHRRDAAAAAGATDAGTSPLSAYWLVPQYALHGVAEAFTSVGHLEFMYDQAPESMRSTATALFWLSISLGSYASTLLVDAVHRWSAGPGGANWLPDNINHGKLDYFYWVVTVLQVMNLVYYAICAKRFTFKPVQLHKKEEEEGGKALVELQEKV

SEQ ID NO: 235892 - protein, 304 aa, Zea mays
  Clone ID: MRT4577_146717C.1.pep
MDRGTVEDLIRRLLDGKKHKATGKKVQLTETEIRHLCVTAKEIFLSQPNLLELVAPINVCGDIHGQFSDLLRLFEYGGLPPTANYLFLGDYVDRGKQSIETICLLLAYKIRYPDNFFLLRGNHECASINRIYGFYDECKRRFSVRLWKIFTDCFNCLPVAAVIDDKILCMHGGLSPDLDNLNRIREIQRPVDVPDQGLLCDLLWSDPDRDSSGWGDNDRGVSFTFGADKVTEFLNKHDLDLVCRAHQVVEDGYEFFADRQLVTIFSAPNYCGEFNNAGALMNVDASLLCSFQILKPYRGKAQTE

SEQ ID NO: 235893 - protein, 114 aa, Zea mays
  unsure (1)..(114): unsure at all Xaa locations
  Clone ID: MRT4577_146718C.1.pep
MASSADPDAATPPSAPQPEPARKAVRVVVKGRVTGVGFRDWTASTAESLGLAGWVRNRRDGSVEALLSGDPAKIXDMITRRLPVGPPAATVTAVVPSTAEPVDPSTGFEIKFTV

SEQ ID NO: 235894 - protein, 325 aa, Zea mays
  unsure (1)..(325): unsure at all Xaa locations
  Clone ID: MRT4577_146719C.1.pep
TSTPNLSSTDTVCSFFDRAAIVTDGDLVTLTDADSGKPSTAPVPDLWRLSTVHRVEELKSVIRMGPIWAAGILVITGSSTQNTFSLQQASTMDRRLAPGLSTFEIPAGSMTVFGLLAMLFTLFVYDRALIRVARRFTGLDRGISFLHRMGVGFAISVLATLVAGFVEXDRRTXXXGGGRRHGRRTVPAVGLQXLVPQYALHGVGRGVXSVGXHFEFMYDQAPESMRSTATALXFWLSISLGSYASTLLVDXVHHWSAGPGGANWLPDNINHGRLDYFYWVVTMLQVMNLIYYAICAKRFRYKPVQLHKKEEEESGKALVELQEKV

SEQ ID NO: 235895 - protein, 51 aa, Zea mays
  Clone ID: MRT4577_14671C.1.pep
GGFNPGPLNPKKNFPRPKKKKKKKKKKKKKKKKKKKKKKKKKKRKKKTREG

SEQ ID NO: 235896 - protein, 108 aa, Zea mays
  unsure (1)..(108): unsure at all Xaa locations
  Clone ID: MRT4577_146720C.1.pep
MATTTVGINMLVVLATCAVNATATHACIHAHSSLVLTANIPXIIAPISEIGSQQLYRLEYAIEPGIIPRALQQPHQSSALQSLQQLTLPIMAPQLQQLVLPAMNQIDV

SEQ ID NO: 235897 - protein, 129 aa, Zea mays
  Clone ID: MRT4577_146721C.1.pep
MASRNKVAALLLCFLFLAAGVASAAEMIAGSGIGDGEGEELDKGGGGGGGHHKHEGYKNKDGKGNLKPSQCGGECRRRCSKTHHKKPCLFFCNKCCAKCLCVPPGTYGNKETCPCYNNWKTKKGGPKCP

SEQ ID NO: 235898 - protein, 82 aa, Zea mays
  unsure (1)..(82): unsure at all Xaa locations
  Clone ID: MRT4577_146722C.1.pep
TWCTTPXAPSGSRSSQCSSTRKRKKKAARHLWSCKRRFNLSSMHFQLCAGTCLIERKYSSVLGRSSEKLPRYYYINLCEHLY

SEQ ID NO: 235899 - protein, 82 aa, Zea mays
  unsure (1)..(82): unsure at all Xaa locations
  Clone ID: MRT4577_146723C.1.pep
HQTERRKTGTAWGRDAIKRRTEPQTXDNRTAAHRVEGSKGAATTPSAETKKAKRSAHGARASXXXRSGAAETMWVRASXTAG

SEQ ID NO: 235900 - protein, 87 aa, Zea mays
  Clone ID: MRT4577_146724C.1.pep
NPLNRGYKKGDFFFEIQRAFNGGKPSPGTHNKPPIPGLAASWGYGPGPTGSGPPSCFIGWQTGHPFLLLLPGPNKLFIGPLPSFFLN

SEQ ID NO: 235901 - protein, 121 aa, Zea mays
  unsure (1)..(121): unsure at all Xaa locations
  Clone ID: MRT4577_146725C.1.pep
PAGPIILSVLEVQVSRSAARAGSHEEGEPMVAAAANLLRGNGGHRASPPTRRPAVSCSCAVGFFSGRSYSGRLFRADAGSSSGTARLLRDETTNDSSAAPRPAKPSAFPPPMYGXCHPPAV

SEQ ID NO: 235902 - protein, 75 aa, Zea mays
  Clone ID: MRT4577_146726C.1.pep
KGESNSSPIPPYKSSLSLASTSCKTSTMSNSQHGKTNTSSSSSSSSDHTAAVITGLVLDVVGFDLLMLNPGVRVL

SEQ ID NO: 235903 - protein, 289 aa, Zea mays
  Clone ID: MRT4577_146727C.1.pep
MALLSAPISIPNAINNYERPGTTSRPTNNYEQMIAGSGIGDGEGEELDKGGGGGGGHHKHEGYKNKDGKGNLKPSHPTISACGAMLHGHGGHRVSPAAKRPGGVESKVVVQPFRSYHRHSPSLLPLFYRCSRFRFHAVRRELAAMKRGSPWSLRLLICCAAMVAIALLPQQGGQAACFVPTPGPAPAPPGSSATNTNDSSAAPRPAKPSAFPPPMYGGVTPGTGSLQPHECGGRCAGRCSATAYQKPCLFFCRKCCAACLCVPPGTYGNKNTCPCYNNWKTKRGGPKCP

SEQ ID NO: 235904 - protein, 36 aa, Zea mays
  Clone ID: MRT4577_146728C.1.pep
ISYLFLIFHIAVYTRLGNSVFYNFRCYWGRSLPNIK

SEQ ID NO: 235905 - protein, 177 aa, Zea mays
  Clone ID: MRT4577_146729C.1.pep
MSEPIRVLVTGAAGQIAYSLLYSIGNGSVFGKDQPIILVLLDITPMMGVLDGVLMELQDCALPLLKDVIATDKEDVAFKDLDVAILVGSMPRRDGMERKDLLKANVKIFKCQGAALEKYAKKSVKVIVVGNPANTNCLTASKSAPSIPKENFSCLTRLDHNRAKAQIALKLGVTSDD

SEQ ID NO: 235906 - protein, 57 aa, Zea mays
  Clone ID: MRT4577_14672C.1.pep
CYMHKEGMYCGIKNSTISIESDNINTHTSQYHLTSYTIIRLEDQTRHLNRAHMPYMC

SEQ ID NO: 235907 - protein, 123 aa, Zea mays
  Clone ID: MRT4577_146730C.1.pep
AATAPLTASLSSSSGDGYRGAGAESGGDSTGTSTTSAFATPTPPPSSKRGENKPRRTKGGGVRRWLWEPIVQGREMGFLLLQLGFAVFALRMLRPEIALPGSEPGPHTTYGSVPYSDFLASID

SEQ ID NO: 235908 - protein, 192 aa, Zea mays
  Clone ID: MRT4577_146731C.1.pep
MGTAAVVEDTIRVVLTCLPDPPFRTTGSSRPYQSPSGGGGGGDRISRLSDAVLSNIVARLPAKDAARTTALSRRWRRVWASTPLVLDDSDLLVFHDDGGCSTPNWLAVTDTVSHVLSSHRGPIRFVRLTCCYMALASHNGALQYWLRVLAAGGVEDLVLVNRPLPTSVGLPIDVLHLASLRTLYLGFWCFPD

SEQ ID NO: 235909 - protein, 115 aa, Zea mays
  unsure (1)..(115): unsure at all Xaa locations
  Clone ID: MRT4577_146732C.1.pep
RLSNFDAYVQILRQVLDNTHIDDFKLNIDLNSXLRSYQQERINWLAFLRRSKLHGIPCDDIVLAKTLQAYTIASSDIAEPRAQNDEQILTSLTICTSTLMHHCEYDIEKYIDSSI

SEQ ID NO: 235910 - protein, 76 aa, Zea mays
  Clone ID: MRT4577_146733C.1.pep
PAPHMLVGCMSVNQLQFYTLIPLNTCGLGLIIEYPNKANCMYSPANRGNFRFPGEMYWYYQFSLYPELSKSPCQFS

SEQ ID NO: 235911 - protein, 52 aa, Zea mays
  Clone ID: MRT4577_146734C.1.pep
SEDDEAHSGSRCILPRGTIRDSMPRKEVEERLPAIWSGIPIYRVVLKKSNLF

SEQ ID NO: 235912 - protein, 81 aa, Zea mays
  Clone ID: MRT4577_146735C.1.pep
KSPNPRDLSVSSDLPIRLLGISFEKETLKKNSGRWEATMAAQLAAVVEANESPGAVAEMCVAVIGRRRTRRGAQIPTTSLY

SEQ ID NO: 235913 - protein, 118 aa, Zea mays
  Clone ID: MRT4577_146737C.1.pep
APKVKALGLFFKLEVSGGGPFSGGFGGKSFYGAIQIALFFRPLVFLKGPGPPPGVSSKNPNRGRGGGGLFQGGAGLFSPRSPHCEPREWGNKGVALARALVFSKAAFVAKKKGARGFV

SEQ ID NO: 235914 - protein, 228 aa, Zea mays
  Clone ID: MRT4577_146738C.1.pep
MAAKGGDELKLLGVWDSPYVNRVQIVLNLKGLSYEYVEEDLLSKSELLLNSNPVHKKVPVLIHAGKPVAESQAIVQYLDEAFPSGTFPSVLPAEPYARATARFWAAFVDDKVGSPWHTVLFAREHGKKADAASRIVAALETLEGAFEDCSGGRDYFGGDAIGFVDVVLGSYLGWFKVFEKMVGVRVLDVARTPLLAAWGERFAAAEAAKDVLPDDVDKVLEFLQKFLD

SEQ ID NO: 235915 - protein, 174 aa, Zea mays
  unsure (1)..(174): unsure at all Xaa locations
  Clone ID: MRT4577_146739C.1.pep
MXXLXKHVXFFDXNNXGXFTFDEPYQGLRDVGVGAVTAKASAAFXXGALGPKXXPDNSXXSXMDXYVEKIQXGXHGSXXXAYXAQGRXVPAKLDEMFXKNAKXVPNXLTKDELDEMLKDNREKMXXAXXLXXXSEWXMLYXLAKXKEGRLPKDXXRAVYDXSLFSXLAAQAKKG

SEQ ID NO: 235916 - protein, 222 aa, Zea mays
  unsure (1)..(222): unsure at all Xaa locations
  Clone ID: MRT4577_14673C.1.pep
MSMSCSEEGERPGRRCAPLHVNAGFAVGFLAPLLVYFIFQQQAAISGFGVATRAAVAQWVTDKQLTRAPGETPVASDVQRNADTQLIQDSVNGKVVCNTGGRSRDWSVTCEVEGDVRTNGTALSVTLVTASRSEQHEWIISPYSRSDGASKSSLQAVTVTQLQDQSAAPPCTVTHTNPAVLFGLGGIXGNYWHDYTDVLVPLFVASRRYHXRXVRFLVSNIQ

SEQ ID NO: 235917 - protein, 100 aa, Zea mays
  Clone ID: MRT4577_146740C.1.pep
KKKLHFKNSSPPKKRVKKQKSAKKRGRVCQTQKTQGKGQGQKGKKKRALTARHHPKTREGTGSKKSRLYNLGGRGFAPLLYGGKGEPPSLSLGFTLKQTI

SEQ ID NO: 235918 - protein, 98 aa, Zea mays
  unsure (1)..(98): unsure at all Xaa locations
  Clone ID: MRT4577_146741C.1.pep
VASRRLAACRGEEVAQHGRLXERLLHAPRHRAALPSRAWRRAAAAAAHLDGHRTGVAAIHGRVLVRRAWNCFRDVPRDWKSKVVVSSDRCSYPPARGP

SEQ ID NO: 235919 - protein, 54 aa, Zea mays
  Clone ID: MRT4577_146742C.1.pep
KRGDPGGGAGALVQAVPPYRDPPILAEVSTGIGGAMVGINLKDPRVGRYAARSE

SEQ ID NO: 235920 - protein, 34 aa, Zea mays
  Clone ID: MRT4577_146743C.1.pep
MDLSGSRVRERKSLDRQNRCISFDMPEISRIRVS

SEQ ID NO: 235921 - protein, 80 aa, Zea mays
  Clone ID: MRT4577_146744C.1.pep
MAEQFAESANNVIIEEVNKGLNPGMIVLLVVATTLLLFFVGNYALYLYAQKTLPPKKKKPVSKKKLKREKLKQGVSAPGE

SEQ ID NO: 235922 - protein, 51 aa, Zea mays
  Clone ID: MRT4577_146745C.1.pep
KEKKIKKNKKKKKKKKKKKKKLKKKKKKKKKNACTCPGGRPGRSKFTFSTK

SEQ ID NO: 235923 - protein, 68 aa, Zea mays
  Clone ID: MRT4577_146746C.1.pep
AARPCHWPTDDIMIRPLQRVVLTVTAQSSLERQRGCSHLLTSAQTPALSLHVHRYPASHTTATHLRYV

SEQ ID NO: 235924 - protein, 36 aa, Zea mays
  Clone ID: MRT4577_146747C.1.pep
IWIKKKKKKKKKKKKKKKKKKKKKKKKKKKKEKKNQ

SEQ ID NO: 235925 - protein, 96 aa, Zea mays
  Clone ID: MRT4577_146748C.1.pep
ASPMIYGLSHISQKNFPLFNSQSRLCRSKASKNGLIGLLQMQMETCSGPILWMVFQGLLVDKKMALSCNLPPRAYYHQPSLGKLYLNKIILKNAVL

SEQ ID NO: 235926 - protein, 355 aa, Zea mays
  Clone ID: MRT4577_146749C.1.pep
MERSGGGGLKAVVISGLQDLVFDIAADGECVLRPDPVAMADDVPQLELNGHGGDEWDSDEEGLHLVVAIAMGTTTTDIEASKMHHDEHHGGEDPRSQVGKKAAKRKGEKTVSLEELQRYFSGSLKDAAKSLGVCPTTMKRICRQHGISRWPFRKLAKANRSLDKIKRVFESVQGSSQAMAAAPAPPPAAAAASYSQQAPAVAAARRAPALSPCLSSAPRVASSQASCQAPPPPLKEAAWRKPSRGGDASVVTVKASYRGDIVRFRVPSSAGVAMVKGEVAMRLGLAPGEFDVKYLDDDNEWVLLSCDADFQECLDVVPALSGASASSGSGTAQPVVRLMVHEVAEVHGSSCGSSD

SEQ ID NO: 235927 - protein, 181 aa, Zea mays
  Clone ID: MRT4577_14674C.1.pep
MGLSFGKLFSRLFAKKEMRILMVGLDAAGKTTILYKLKLGEIVTTIPTIGFNVETVEYKNISFTVWDVGGQDKIRPLWRHYFQNTQGLIFVVDSNDRERVVEARDELHRMLNEDELRDAVLLVFANKQDLPNAMNAAEITDKLGLHSLRQRHWYIQSTCATSGEGLYEGLDWLSSNISSKS

SEQ ID NO: 235928 - protein, 183 aa, Zea mays
  Clone ID: MRT4577_146750C.1.pep
LGTSRPAGDLCRPGDSPSPRASPRPPSPRAPPSPRLLSRHLREHLRCRISSAAISTSTSAASPTYSPTLSPFPRQAPSRSVSAQSTQSLGTNSLDLDGQETTSDFNLSSDAQYGPVNTNEPTEAQFVPSNQESSHREGGSARKCKQSHAGLALESDVEFKKIQNTETLETLREHKRQEDQFSS

SEQ ID NO: 235929 - protein, 80 aa, Zea mays
  Clone ID: MRT4577_146751C.1.pep
NRFDCRKSRNGVNYNRQRNCVETMNEKSLNHRWTSSNSIGCIRCMSPRVLSCTMGRVLYVASYLASSIGLNCMERKYKAK

SEQ ID NO: 235930 - protein, 178 aa, Zea mays
  Clone ID: MRT4577_146752C.1.pep
SSSTFSSIQECVCTKSQSLGTNSLDLDGQETTSVFNLSSDAQYVPVNTNEPTEAQFVPSNQESSQREGGSGRKCKQSHVGLALENYVEFKKIQNTETLETLKEHKRQEDQFSISKCQAELKGMDGLTAMDKSYALELFVSATNREIFLTTTEHDVREIWLKRKIRLLRGSDAWPEQMI

SEQ ID NO: 235931 - protein, 63 aa, Zea mays
  Clone ID: MRT4577_146753C.1.pep
MAREEDGPQFVRWREEFVSHERGSRVVHYYLEDAAGVSHLGVIGTERSLRHMLYVGLEDFNAA

SEQ ID NO: 235932 - protein, 302 aa, Zea mays
  Clone ID: MRT4577_146754C.1.pep
CCPLPPTSFEKRKIWNNVYEKGLVDVMHDHKDNPKFKGQNGWNRDGWNSITTKFNEKFPLAHFSKQQLQEKERELKGYYKAIRDSRKESGVGWNDTLCMVLAEPEVWPRLIRAHPKVSKFRNRPFPLFYSLEGLYEGSVATGELNFTSTAVDLPPPSAPSRSVSGQSLSPLSTNSLDLDGQETTSVFNLSSDAQSVRVNTNEPTEAQFVPSNQESSQREGGSGRKRKQSHVGLAPESYVGFKKIQNTETLETLKEHRQEDQFSISKCQAELKGMDGLTALDSYFGAFHICDKPRDFFNNNRA

SEQ ID NO: 235933 - protein, 112 aa, Zea mays
  unsure (1)..(112): unsure at all Xaa locations
  Clone ID: MRT4577_146755C.1.pep
PSTAAAPIXXXVIYFFNASAHKRGKGLISHSSTEKQCPTKGQGVAKLYGHQLDRVSQPNQRRLLDHGERTRRIYHVNPKKLTKEHRPKGTRSMPPWQRHPHPRSQIASQPIA

SEQ ID NO: 235934 - protein, 58 aa, Zea mays
  Clone ID: MRT4577_146757C.1.pep
PIGARVLSPLYPYYSLPDRTLITIQSPKALLWHYAKRSLTIPVSCLPCLVPSRLAVYY

SEQ ID NO: 235935 - protein, 78 aa, Zea mays
  unsure (1)..(78): unsure at all Xaa locations
  Clone ID: MRT4577_146758C.1.pep
PVVSANSTRGPRFLSLVILKPDVIAPGVNILVAWSGNASPXSLYSDTRRDGFNNLVGTFMSCPHVAGEAALIKARHPD

SEQ ID NO: 235936 - protein, 90 aa, Zea mays
  Clone ID: MRT4577_146759C.1.pep
GPPRPCPSSAGRRTEPACTGPRRSGSSGQADRPRSPLRPGTRACPYQRFRPEVAPIKPSGSSFYLLYSSTDLWLCVFDCPCPVPAYLRSS

SEQ ID NO: 235937 - protein, 139 aa, Zea mays
  unsure (1)..(139): unsure at all Xaa locations
  Clone ID: MRT4577_14675C.1.pep
TRPCPAPVLSTAGDPAVAAAAAAAAATPSGRAPRLPRWTRQEILVLIEGKRMVEGRGGRGARGRAAAAAXWRGLGGGXLEPKWAAVAEYCRRHGLERGPVQCRKRWSNLAGDXKKVKRXKAXLRASREPSFWAMRNDAR

SEQ ID NO: 235938 - protein, 108 aa, Zea mays
  Clone ID: MRT4577_146760C.1.pep
SGVLKGLMAPRGEKLQHPNIQACGQISRKAFKKVFHKDAQNPKFKKLEKSFCEKVTNFILGSIFRSCQKKKKVNVFECIKVKKVRVPRGVTLVGVPNAQGIMVKGFNN

SEQ ID NO: 235939 - protein, 62 aa, Zea mays
  Clone ID: MRT4577_146761C.1.pep
TPTMLTFILCKHEHELLMCMYWQRIITITRLVSRYAKRSHEINGFLFQCSILLSHGKNRKHI

SEQ ID NO: 235940 - protein, 166 aa, Zea mays
  unsure (1)..(166): unsure at all Xaa locations
  Clone ID: MRT4577_146762C.1.pep
RRWGRPHHGTNTNDYLGERGVLWRTPHHMQRVSNLGAHITTWDRRWVGLTHGPPVWASESAVTLALAHRGEIPXAXCLTVKGAADDLDPPYTLXLCTPGETMAXLATPKQGMTIGTTECGAXIILHSRSDNDAQVLHCDRRPDHQGLRREPHTLGTVPRVYANLSV

SEQ ID NO: 235941 - protein, 131 aa, Zea mays
  unsure (1)..(131): unsure at all Xaa locations
  Clone ID: MRT4577_146763C.1.pep
MSHRKVEHPRHGSLGFLPRXKRSSRHRGKEKSFPMDDPKKPRHLTGFLGYKADMTHMDREGEKPGSKLHKKETCEAVTMIXETPAVVIDGLVAYAKTPRGLRTLNSAXAQHRTERVRRQFYKNWCKSKKKA

SEQ ID NO: 235942 - protein, 45 aa, Zea mays
  Clone ID: MRT4577_146764C.1.pep
IADFNPPPPVQTVSCFELPRDFLCDSEKKKVNECFKKVKHNEQNF

SEQ ID NO: 235943 - protein, 68 aa, Zea mays
  Clone ID: MRT4577_146765C.1.pep
ILFHKEGEGWITTKELGTAMRSLGLILTEALLEDMTNEADADRNATIDLHALLFLAGRKMNDTFSEAD

SEQ ID NO: 235944 - protein, 98 aa, Zea mays
  Clone ID: MRT4577_146766C.1.pep
HEPNVSWWRRLSGLNHSPLNAQLSTVFRPRFTPAHYYSAVRHSVDGSPWCTRTLCTKPPPLLKSEVTTVASVFMIQYISVCSRCQYPPIYAWYTTGPH

SEQ ID NO: 235945 - protein, 238 aa, Zea mays
  unsure (1)..(238): unsure at all Xaa locations
  Clone ID: MRT4577_146767C.1.pep
VLTWDHVPKLLNLDSLQAQNLLLYSVLGQVLCKCNAGSVVFFPKGYFSNTDCFFTLLLSYVVSAINGLYMSLGSPLLPGWTGNGGDPCGEGWQGVVCTGSSITGITMNAANLGGQLGSLGNFNAITSIELNNNNIGGSIPEDLPVTLQXFLSANQITGSIPSSLSKLENLSAMSVNGNHLSGGLPDTFDSLNRLVNLDISSNNLTGVLPSSMKKFASLTSLNIENNIFSGPGPASLLN

SEQ ID NO: 235946 - protein, 71 aa, Zea mays
  Clone ID: MRT4577_146768C.1.pep
GFHLAFRVGNFLERRLVGAFLGLSQLGKRGFFSKELSLGKAGFLQFQRFKTAGNEIKLSGPIEKVLRWKQG

SEQ ID NO: 235947 - protein, 146 aa, Zea mays
  unsure (1)..(146): unsure at all Xaa locations
  Clone ID: MRT4577_146769C.1.pep
ERKPKEKKKKKLKPRNPRRXPNNKKVFFQKQTLGQRREDIQKKKNGVKPCTLEHSKVENCYTTGKHQRQLGQKNESSHCALDGFQTTSSRCTLQLADPNRPPLHSHVHNAKARKGTLPHPYHESNRHNKICHPAQTSISVSSRLLL

SEQ ID NO: 235948 - protein, 181 aa, Zea mays
  Clone ID: MRT4577_14676C.1.pep
MGLSFGKLFSRLFAKKEMRILMVGLDAAGKTTILYKLKLGEIVTTIPTIGFNVETVEYKNISFTVWDVGGQDKIRPLWRHYFQNTQGLIFVVDSNDRERVVEARDELHRMLNEDELRDAVLLVFANKQDLPNAMNAAEITDKLGLHSLRQRHWYIQSTCATSGEGLYEGLDWLSNNIANMS

SEQ ID NO: 235949 - protein, 85 aa, Zea mays
  Clone ID: MRT4577_146770C.1.pep
HLSLHLHQNIRKSRLICRAELEDQQRAHGGSRGSRAQEWTGGRAQQRSLFIARGTAELAGESWATMRAATSPCNPSEAWSRALAR

SEQ ID NO: 235950 - protein, 79 aa, Zea mays
  Clone ID: MRT4577_146771C.1.pep
IYKKYISQSSITNIFNIVPPHSNYFYLFLQFFLYLSISLTIPDHLYIHPAFYDSLSIHDTHNNFYSESFFNPIFNIHAI

SEQ ID NO: 235951 - protein, 139 aa, Zea mays
  unsure (1)..(139): unsure at all Xaa locations
  Clone ID: MRT4577_146772C.1.pep
PFLPGTFLPGPARGXFTGLTVYLAGGQGQVVGGSVVGTLIAAGPVMVMASTFANATYERLPLDDAEEDPGQAQLPPGPGGGPPLIMGGIADPSAMPMFGGGRGGVPPSLMMPGGAAASGAGLQLGHEGLAWARARPPPY

SEQ ID NO: 235952 - protein, 65 aa, Zea mays
  Clone ID: MRT4577_146773C.1.pep
ATSWVKPTVDSVCYPQNVEHRKLCMHTCLHTLIPRIMQALCQQLYAVNDKHMPFAMSIRASFSPQ

SEQ ID NO: 235953 - protein, 548 aa, Zea mays
  unsure (1)..(548): unsure at all Xaa locations
  Clone ID: MRT4577_146774C.1.pep
MLAQLLLVHLLLLPAASSADHHRHYRGRRALHEPLFPLESTPTLPPPPPAPFFPFLPGAAAPPTPVATPEVGSASTPADTGAGDASSSPHPTAPANISSLAPLPVSHGAPLRAFLSSHRLLTVLVLVVAVAAAVLTAALVYILARRQHRHSPKEEAAVYAKPSSLAPGNPVPYDGGDQHGRGSTATVSSASSPELRPMPPLPRQFQQTQMNLASCSKSVLDAGAGGKRPSEGAPPPPPPPPPPLLPPMPPVKDKGGATAATAPPAPPPPLPRAGNGSGWLPRRHSERPATTVIRASASAVHPEESPERAPSEKPADADADALPKLKPLHWDKVRASSGRPTVWDQLKASSFRVNEEMIETLFVSNSTWRSSKSGIKAPNSSSCSQENKVLDPKKSQNIAIMLRALNATKEEVCRALLDGQAESLGSELLEMLLKMAPSREEEIKLKECREDAVSKLGPAESFLKAVLAIPFAFKRVEAMLYITNFDLEVDYLKTSYKTLEAACEELQGSRLFHKILDAVLKTGNRMNTGTNRGNAHAFKLDALXKLVD

SEQ ID NO: 235954 - protein, 46 aa, Zea mays
  Clone ID: MRT4577_146775C.1.pep
VAESQKSEVRKCKMGPNYDENIGIIPPLKFAWKVHHHFEIMRPKKD

SEQ ID NO: 235955 - protein, 67 aa, Zea mays
  Clone ID: MRT4577_146776C.1.pep
MTTLDLMGGYGRVDEQVAIQEAATAGLRGMERLILQLSQAGTGERSLSPPAVQAQRQQQKQLELPSH

SEQ ID NO: 235956 - protein, 83 aa, Zea mays
  Clone ID: MRT4577_146777C.1.pep
SSLVNSLVALVSGHGSPYIPASGDTNLRAALPQSDTRILDLRLPSCPRRLWEGEGTLARFRPVRRAHPAQLRAPSGASIRQYM

SEQ ID NO: 235957 - protein, 331 aa, Zea mays
  Clone ID: MRT4577_146778C.1.pep
MTTLDLMGGYGRVDEQVAIQEAATAGLRGMERLILQLSQAGTGERSLSPPAVQAQRQQQKQLEQIQQQVDCRELTDMTVSKFKKVISILNRTGHARFRRGPVAARSQSQSQGPASPEPAQSAPAPAARPLTLDFTKSVSGYSRDSGFSVSGASSSFLSSVTTGDGSVSNGRAGGSSFLMLPPAPGAASCAKPPPAGAAQKRKCHDHAHSENVAGGKYGANGGRCHCSKRRKHRVKRTIRVPAISPKVADIPADEYSWRKYGQKPIKGSPYPRGYYKCSTVRGCPARKHVERDPADPSMLIVTYEGEHRHSPASGQDPPPPSLAPLPELPSH

SEQ ID NO: 235958 - protein, 96 aa, Zea mays
  Clone ID: MRT4577_146779C.1.pep
GRRVPSSGPPSWSCGCPLPPTRCGSLAPYLRLMVAPWFWNHSVWLWYLCWAWLHVSILGFGFPCSLLLELFTCPHWLWPRFPLPLCIKKKKKKGRP

SEQ ID NO: 235959 - protein, 75 aa, Zea mays
  Clone ID: MRT4577_14677C.1.pep
LRLLSMGGAPTGLNNVDGFPSYPSPAPAFSFEDNRARSSGKAVVGWLKIKAAMRWGIFVRRKAAERRAQLVELED

SEQ ID NO: 235960 - protein, 59 aa, Zea mays
  Clone ID: MRT4577_146780C.1.pep
VLIILVLAKGRPSIVVRAVSLMWELPALGSVFFFLRSLILGRLICTKNDACKISTCYLF

SEQ ID NO: 235961 - protein, 68 aa, Zea mays
  Clone ID: MRT4577_146781C.1.pep
QPCDKNWCNILRAAIAAIYVTTIRRSVYPLVPFPISGRCVTQNTQGVCFTQEELRVPLGDHVPDRSCF

SEQ ID NO: 235962 - protein, 84 aa, Zea mays
  unsure (1)..(84): unsure at all Xaa locations
  Clone ID: MRT4577_146782C.1.pep
LLGPTQVKKKAXYVYRACVDAKHKLLWWNLWCVLCAYELLGLPIIIARTIPNKKPRTSPPDQYTXAMHKALLFFNAKKSGHLST

SEQ ID NO: 235963 - protein, 93 aa, Zea mays
  Clone ID: MRT4577_146783C.1.pep
NYYFFGGFNIQKNPKPWNPLNQTPTQKGPRPQRFYQTATPSGDHYCVTQTNTFIFFYKTTHRTMGTFSPQIAKDEWRAHLQMREKATQHLGGS

SEQ ID NO: 235964 - protein, 46 aa, Zea mays
  unsure (1)..(46): unsure at all Xaa locations
  Clone ID: MRT4577_146784C.1.pep
MTAPEKPVKQEEMAALDVDGGGGXGGHGEYLQQQQQHQQQHGNGAA

SEQ ID NO: 235965 - protein, 299 aa, Zea mays
  Clone ID: MRT4577_146785C.1.pep
MAVEPEICVLSNGRITANIASWGATITSLLVPDAQGDLADVVLGFDTLEPYLKGMAPYFGCIVGRVANRIKNGKFDLNGVEYSLPINNVPNSLHGGLKGFDKVVWDVVERKDGEYPSITFQYESKDGEEGYPGDVTVRAMYSLPEATTLRLDMEAIPANKATPISLAQHTYWNLAGHNSGSILDHSIQIWAKHITPVNENTIPTGEIMPVQDTPFDFTTEHKIGDRISDVPGGYDHNYVLDSADEKNGLKHAAKLKDPSSSRTLDLWTDAPGMQLYTANYVNGITGKGGAVYGKHAGVC

SEQ ID NO: 235966 - protein, 57 aa, Zea mays
  Clone ID: MRT4577_146786C.1.pep
CLTIIHKVPLVRSWSIRNNECVFTIVYIFVKAIYKKILTVNESVYNDTYVLLMIGDI

SEQ ID NO: 235967 - protein, 29 aa, Zea mays
  Clone ID: MRT4577_146787C.1.pep
YALCNYGSDYKMKLFKIVMIYNVSNIYRF

SEQ ID NO: 235968 - protein, 120 aa, Zea mays
  Clone ID: MRT4577_146788C.1.pep
GTAAGSLHSIQAWTCTYMVLVQADSYSGSKMSSALGQSDPPSSTSISPVPEPEGDRSGLQPSVSGISESVVGHEYTFPFARLSQHTIANCRHLPNENSENYWVSGMVRLHSVQQSKISAG

SEQ ID NO: 235969 - protein, 242 aa, Zea mays
  Clone ID: MRT4577_146789C.1.pep
MFSHMIPRASRPLLRSANNTFRASPSTLYLVDKVQSRRSYATETEEKDLVIIGGGVAGYVAAIKAGQEGLKVACIEKRGSLGGTCLNVGCIPSKSLLNNSHLYHQILHDTKNRGIEVSDVKLNLKQMMKAKETSVNGLTKGIEFLFKKNNVEYIKGTGAFADEHAVQVNLTEGGETSVRGKNILIATGSEATPFPGLNIDEKKVITSTGAIALETVPKKMVVIGGGIIGLEMGSVWSRLGAE

SEQ ID NO: 235970 - protein, 86 aa, Zea mays
  unsure (1)..(86): unsure at all Xaa locations
  Clone ID: MRT4577_14678C.1.pep
SGEYSSTGASAILISLSPFSPDAISPNPNPAARRAAVAGALAPNVAVTRAACHHHHQLSEXARPPRHATPPPGGGADTEQPXAPPT

SEQ ID NO: 235971 - protein, 381 aa, Zea mays
  Clone ID: MRT4577_146790C.1.pep
MAAPEAPACYVGIARQSAAFRLMKQMGWEEGEGLGKDKQGIKGHVRVKNKQDTLGVGVDSPHNKWVYDTTQFDNILKKLKVQSANPVQEEVAAVESDSPDITPKKDKSAKHEVTKVTRPQGRYKKRERGKSVNSYSATDLQGILVRKNEDNSKVDQKLEPTCLDEPDPIICPDAVSQADDVNWWGHKFGFLSGGFLGAKSRKNKSSQKDPANVRQTFAEEDQENLYNLVQDKATSGKQGLGIKGLPMKVAGQRWKGNKTSFVDSDDDNSAQSDEYSEIEENGDEEEHISASESIDTDKNADKELLVDARPKTKVKKLCKRILRQAPSQSMKLKDLKVAVEEHSNVVFSSFSGRREALLFLKKKLQGSRKFNVDGKKVQLVS

SEQ ID NO: 235972 - protein, 76 aa, Zea mays
  Clone ID: MRT4577_146791C.1.pep
FTLAQIPEQIKKDKRDKDNPSAVTAELHEHVGQRRQHERAPALEDVRAGERLAQIQPRLERQEHYHPCGRHDGTRL

SEQ ID NO: 235973 - protein, 105 aa, Zea mays
  Clone ID: MRT4577_146792C.1.pep
RKNFKEAGNSMWTARKFSSCHESQANRNSLRCWCLWVDFRFFSLCSVASRKQEIQCGRQESSARVMKAKQIGILYVVGVQHSYLLLLEVPNRCRSTLSYVVLVLV

SEQ ID NO: 235974 - protein, 56 aa, Zea mays
  Clone ID: MRT4577_146793C.1.pep
MACGKEQLRRVENPVHWQVTFCMRRAGLLKKALELSVLCDASVGIIVFSAHGMLFY

SEQ ID NO: 235975 - protein, 253 aa, Zea mays
  Clone ID: MRT4577_146794C.1.pep
MKIIPKWIRNLNRHAWMNLIPSSVWMQGRFTGSHHYDPHVFVRLKGVSQADDVNWWGHKFGFLSGGFLGAKSRKNKSSQKDLANVRQTFAEEDQENLYNLVQDKATSGKQGLGIKGLPMKVAGQRWKGNKTSFVDSDDDNSAQPDEYSEIEENGDEEEHISASESIDTDKNADKELLVDARPKTKVKKLCKRILRQAPSQSMKLKDLKVAVEEHSNVVFSSFSGRREALLFLKKKLQGSRKFNVDGKKVQLVS

SEQ ID NO: 235976 - protein, 36 aa, Zea mays
  unsure (1)..(36): unsure at all Xaa locations
  Clone ID: MRT4577_146795C.1.pep
KVEREGAQSVVAVKGCTXCLPVRWVGLMSCRWCARP

SEQ ID NO: 235977 - protein, 83 aa, Zea mays
  unsure (1)..(83): unsure at all Xaa locations
  Clone ID: MRT4577_146796C.1.pep
SVPAHPSCAGASPRRSSPPGFDHFAAALASAPSWLNTTMMENRMTLNPTDLDDFDKRKWPSPIFQSTLFWGGGGSSPPPXLNP

SEQ ID NO: 235978 - protein, 74 aa, Zea mays
  unsure (1)..(74): unsure at all Xaa locations
  Clone ID: MRT4577_146797C.1.pep
IRLEDRAHSTLFAPPEVKEHVGDSMIAEGIWAHYGFNHGLHGLRSALXSMRAHEELIYQASDRNTERTMVAASL

SEQ ID NO: 235979 - protein, 66 aa, Zea mays
  Clone ID: MRT4577_146798C.1.pep
FTSKRFHLVEVKNRKWCARPFKVITFYYRSPWPSYMWVTKNPGGEGKFGSTKDSICGHFTTTNFTP

SEQ ID NO: 235980 - protein, 45 aa, Zea mays
  Clone ID: MRT4577_146799C.1.pep
SSVLTLLNGGGEVNLVISNKRKVYKLGRDLYRAGLVVVFECSLPA

SEQ ID NO: 235981 - protein, 233 aa, Zea mays
  Clone ID: MRT4577_14679C.1.pep
DRTAATASRRRPTATRAFADPRAQIAEARRRRGSSRRRRKAFATVADFPGEEMGLSFGKLFSRLFAKKEMRILMVGLDAAGKTTILYKLKLGEIVTTIPTIGFNVETVEYKNISFTVWDVGGQDKIRPLWRHYFQNTQGLIFVVDSNDRERVVEARDELHRMLNEDELRDAVLLVFANKQDLPNAMNAAEITDKLGLHSLRQRHWYIQSTCATSGEGLYEGLDWLSSNISSKS

SEQ ID NO: 235982 - protein, 79 aa, Zea mays
  Clone ID: MRT4577_1467C.1.pep
LARFLRVSCLFLPFHHCSPPALRFRRGQRLDAFCNRCSVVLEFLGMATDKYEPFYSNRLGMVTDKQIILVAYEYFRSPC

SEQ ID NO: 235983 - protein, 134 aa, Zea mays
  unsure (1)..(134): unsure at all Xaa locations
  Clone ID: MRT4577_146800C.1.pep
CTAVPQPLLLFLLDAELGVAAVVDNAAHAKPLTPGGRVYHDHHGRLTVGHGKPRHAPFYRGRDVYSTTVGAFRYKDTRTQGYGVHTAAVSTVLXGDCAHCVGCYEVQYVHSPSRCKLHAAPLVVTVTDLCPFND

SEQ ID NO: 235984 - protein, 123 aa, Zea mays
  Clone ID: MRT4577_146801C.1.pep
GGKSPPPWVLPPLGGTLPTFCLWRVYFAPLPFVCPVFGNPGGNTIFFFGLEAPWAFLKFFLRGENGFFVPLEVKKNGNPAMEGVLFFNFPESFSRNFFFPIFWVCGLFSGPHLIDKRSKKTQR

SEQ ID NO: 235985 - protein, 99 aa, Zea mays
  unsure (1)..(99): unsure at all Xaa locations
  Clone ID: MRT4577_146802C.1.pep
GSTGFGLTGERIQTAASYVEYRLLVGGLPWATDDXHSFHNAYNTYGKILESNIILDRETHRSLGFLSRTFSTEDAIRNAIQGMNGKELHRRNISINESQ

SEQ ID NO: 235986 - protein, 53 aa, Zea mays
  Clone ID: MRT4577_146803C.1.pep
YNYPAFPLIALTNPTFHPDQLLTPSHISQIRPGERSPRTLRRYHPPRANAGYP

SEQ ID NO: 235987 - protein, 58 aa, Zea mays
  Clone ID: MRT4577_146804C.1.pep
MADPRPYPTMYGTDDRRDAAIPASASERRLYNPYQDLNMPYRQLYDLPTSPEFLFQEE

SEQ ID NO: 235988 - protein, 58 aa, Zea mays
  Clone ID: MRT4577_146805C.1.pep
KTRGYNILKGSLYKKHGLRARAQNNKVVVLTPVQKHPPQLNKFTLRTEFTPSLPFFKK

SEQ ID NO: 235989 - protein, 46 aa, Zea mays
  Clone ID: MRT4577_146806C.1.pep
ASVDKMVAVSVAFWRKASRIISVMKRSLFFYSFLFFFFFFFFLRSI

SEQ ID NO: 235990 - protein, 113 aa, Zea mays
  Clone ID: MRT4577_146807C.1.pep
KVYLLEFCVSNVTRDSFKKIREELRRGYALIGVSLRSIQVILVVNGRFILTGHINKSMHCMDHTHPSSTMSDFLLLLACVGIWWWFGPTFSSYYGHTAYCIWWLLAVCRVGCI

SEQ ID NO: 235991 - protein, 177 aa, Zea mays
  Clone ID: MRT4577_146808C.1.pep
MEDGHEAYGNDVPMHQNDENNPGQPAAAADVAGEDTGFNIYHQDTSELNSSQMHTGAGITEDINEDSQRFELREDNQVDSTPKDYLFNGGGFCMEGEGEGDEQEPACDQSGAEVEPGPSGPCGAMDEVSESASISTAMECTENARMEARGASSSQQRRKASRGLSAMPTLIKRRRKS

SEQ ID NO: 235992 - protein, 170 aa, Zea mays
  unsure (1)..(170): unsure at all Xaa locations
  Clone ID: MRT4577_146809C.1.pep
FIRKQQTRAPRLGGLLVLAMEAIVVGPGTAQNSPKDYGDPQNGGRANVGVGPVSWNNTGAANAQSYAGKRQGDCQLIHSGGPYGENLFWGSAGANWSASNAGGSWVSEKXYYDHDTNSCAKGKVCGHYTQGGGGDSTAIGCARVVCDNNAGVFIICSYNPPGNVVGESPY

SEQ ID NO: 235993 - protein, 181 aa, Zea mays
  Clone ID: MRT4577_14680C.1.pep
MGLSFGKLFSRLFAKKEMRILMVGLDAAGKTTILYKLKLGEIVTTIPTIGFNVETVEYKNISFTVWDVGGQDKIRPLWRHYFQNTQGLIFVVGSNDRERVVEARDELHRMLNEDELRDAVLLVFANKQDLPNAMNAAEITDKLGLHSLRQRHWYIQSTCATSGEGLYEGLDWLSNNIANKS

SEQ ID NO: 235994 - protein, 107 aa, Zea mays
  Clone ID: MRT4577_146810C.1.pep
GFLSPPSLWVGPKRASPYLSINRVGRKTLLFATSGLFHLMKGGTLNFFFLFPSFLPGLVIIDPPKPLRGLPWSIFLPGALSPGGKNGKISLKKSPKKKKKKKEKIKR

SEQ ID NO: 235995 - protein, 78 aa, Zea mays
  unsure (1)..(78): unsure at all Xaa locations
  Clone ID: MRT4577_146811C.1.pep
MLRPLDGIAAPXTEKGMQDLTDPETISYLRGAGNTQADGFPGPGXPYMMPNWTARGWGPRYVIPVICCEDGGCLDRIH

SEQ ID NO: 235996 - protein, 234 aa, Zea mays
  unsure (1)..(234): unsure at all Xaa locations
  Clone ID: MRT4577_146812C.1.pep
MPGYYDIDDILMEDEPISVAFQVTANGVGLLDPGAESNCVEKGAKVDLPFWLAHGLLSLEQAVSIKPPPCFTQKXFFSGLLLHGLHFGLGYAPKRERESLQYYGLTNLXLLSPYHIYCRTWKEIQADAACVDLRVRCPYFYELGCKIVPLVSDKSIGLFLRYAFTSRYKEVLSKSHSSSMMTVPKFVPRLTKEETRVFESARESMTGFKKWRAGGMRLQKASILGRKRKTKLPE

SEQ ID NO: 235997 - protein, 99 aa, Zea mays
  Clone ID: MRT4577_146813C.1.pep
EKSELVLKELFQEKPNGSIKKAYLPPLSPRDPSWFLRTILYPFVFIPRVILMPVLLMVRTKNILIRVLPIGPFLPLNVNRRNPGSKALKKNLNSCCPVT

SEQ ID NO: 235998 - protein, 189 aa, Zea mays
  Clone ID: MRT4577_146814C.1.pep
MPGYYDIDDILMEDEPISVVFQVTANGVGLLDPGAESNCVDKGAKVDLPFWLAHGLLSLEQAVSINPPPCFTQKTWKEIQADAACVDLRVRCPYFYELGCKIVPLVSDNSIGLFLRYAFTSRYKEVLSKSHSSSMMTVPKFVPRLTKEETRVFESARESMTGFKKWRAGGMRLQKASILGRKRKTKLPE

SEQ ID NO: 235999 - protein, 81 aa, Zea mays
  Clone ID: MRT4577_146815C.1.pep
ELMGVILAVILAGVLAGGLTVVQESFGFGYMTFSSVRGFFIVCRCICRWVRVRVVSHRVRTGCCSGTVISGILNVFDRMRG

SEQ ID NO: 236000 - protein, 237 aa, Zea mays
  Clone ID: MRT4577_146816C.1.pep
RARLRPARPPALAPGRVSPRAPCHGRRALCSSSSSVAALPPAPLSPWPLVLAATPSWSSARRASPWSPMAPSSDLALFLSAQLPDAFSSLCRTLCSPGVRIRRLLSVPRFGGCTHLHPWMSPSLRPAPCLLLADFPCATSRSSFHGRGFQLAGVRTALLPPARRASPCIHGHCARPLLHRGGFLLPVPSPAKPLHAAVDQPPCSSHRGHHRPWTSDSPMRSTCSLFCSTRGQWHSPL

SEQ ID NO: 236001 - protein, 70 aa, Zea mays
  Clone ID: MRT4577_146817C.1.pep
ENLRFLEDLVSNFSLMRRGPYLNLYSWETKNFNIFAYGSRRERDRSVQHKWLPQLISIFYLYVYVVLNFG

SEQ ID NO: 236002 - protein, 161 aa, Zea mays
  Clone ID: MRT4577_146818C.1.pep
SLKLQAVHAKASTYIKMGSINRQSPRFFYPRKKRGKKGLNFQKKEKKKKKREFYPPLPQKKPGTFVLLKTKLQGTLLGAEGDPPPSLWLWVMHPVPLFFPPFYYFFFPLFSPFFVFARVLLFFSYMTEQALGFSSLKICGPMGWGGGGPYPGYPGAGYTGW

SEQ ID NO: 236003 - protein, 108 aa, Zea mays
  Clone ID: MRT4577_146819C.1.pep
TAWPGFVTVLDGTGLKWTGLHRARAGPGRAVHLAMSSQHVRFQFRGQGCGVHDHGGRGGLRGARRVRAQPDQAIPRWHAQETNENICIRRKCDSRWSNLSHEAENRRR

SEQ ID NO: 236004 - protein, 164 aa, Zea mays
  Clone ID: MRT4577_14681C.1.pep
KKKKKKKKKKKKKKKKKKKKIKKKKKKKNFFFWPGPPSGRVLWFSFPLGGVWPCFWGAAFRLFGGGFTFHWRGFYNSRGWEKPCAFPTFKFFGVTYPFSFWWGFILRGPARFAFPFLCPACLENGPPLYWPFNPGGGGGYPQGDRYFCQGLTARSLRFFPFFFF

SEQ ID NO: 236005 - protein, 92 aa, Zea mays
  Clone ID: MRT4577_146820C.1.pep
MSELEKAVVALIDVFHQYSGREGDKHKLKKSELKELINNELSHFLEEIKEQEVVDKVMETLDSDGDGECDFQEFMAFVAMITTACHEFFEHE

SEQ ID NO: 236006 - protein, 41 aa, Zea mays
  Clone ID: MRT4577_146821C.1.pep
DAQVAAFPIFKSSIIDSLLSHFTLLFSCFHGKLFVPYSYVL

SEQ ID NO: 236007 - protein, 114 aa, Zea mays
  unsure (1)..(114): unsure at all Xaa locations
  Clone ID: MRT4577_146822C.1.pep
ARRRGTWEAGRGKKKKNTGGEGGTPAKQKPARRARTKQTARKXTGGKAPRKQXATKGARKXAXATGGEKKPHRXRPGTXAXRENRKDQKSTEXPNRKQPXQRRGRENAQEXKTD

SEQ ID NO: 236008 - protein, 84 aa, Zea mays
  unsure (1)..(84): unsure at all Xaa locations
  Clone ID: MRT4577_146823C.1.pep
RYIYKGVDNSIDTTRVLCEGHLLLDMGGMAMSTHTSGXCSCHPPSAIYVSPATXWHLPPTCHLPWIVHLPSTCHEPSTCHLPAM

SEQ ID NO: 236009 - protein, 65 aa, Zea mays
  Clone ID: MRT4577_146824C.1.pep
NIKSTVDVHLPYFANFHASGLFFKANIFLSLLVYWSSICAPCSCDQPRTMKRLCHHFSEGMHLTI

SEQ ID NO: 236010 - protein, 89 aa, Zea mays
  unsure (1)..(89): unsure at all Xaa locations
  Clone ID: MRT4577_146825C.1.pep
TRTVLFFPGAGTKHLENLSSPVVQQLLPLLXQLPPXHIDLIKWQKDFIPKPKYTLLLIKSYYLISRNLIFKTKDHQIDXTFILAQLLIY

SEQ ID NO: 236011 - protein, 102 aa, Zea mays
  Clone ID: MRT4577_146826C.1.pep
VGLLSGTDTVRVVSDVKPARLPCVCSTPDYITPEMPQVANEFDDDDKVGKMVFYSLFLSVGISYIIYASAVVVCCLVELHCLFGFVHETIPCPKSPEKSANP

SEQ ID NO: 236012 - protein, 120 aa, Zea mays
  Clone ID: MRT4577_146827C.1.pep
PSFFIPLPNKLGSEKNPPTCIPNSPYTRPSPPHYPKAKICPPLAPKKKQQGASRFLPPRKQNRALFGGTKLNRCPISGAGGRNLSFTPRGPRPGGPGPQHFPWVSELNGVPNQGAPPKNP

SEQ ID NO: 236013 - protein, 123 aa, Zea mays
  Clone ID: MRT4577_146828C.1.pep
ELVVCFHFHFFFCVIVLKREQGAGKHPQKAFWVPDGAPKFTRGGGPPPPLWDPNDPPTSLSTGGTPWWRTLFPSPVSSFPLGGPRGAPPQRDENLREHHFLLGYLCPRRPGPPFSVNPGGWGG

SEQ ID NO: 236014 - protein, 86 aa, Zea mays
  Clone ID: MRT4577_146829C.1.pep
RSLVLEWRRSQTLTPGKRDRHPTRFGGSGPPLEGHCCNASPAGGSPRATRPRPGRLRSPTARAPRAERMSSSAVRVQPPPGACARV

SEQ ID NO: 236015 - protein, 129 aa, Zea mays
  Clone ID: MRT4577_14682C.1.pep
YAALLRVREKKNYSNHNSYYNCSVQAECHSFILDVEAHILNLLRLQTTLHHKTKKENSKIAAKMEEKGKLERTNNRFWESLRSFTLLSPIFSLHSQLPNPHSPPLTALACKIYRMDQINEIVSNGYYNT

SEQ ID NO: 236016 - protein, 118 aa, Zea mays
  unsure (1)..(118): unsure at all Xaa locations
  Clone ID: MRT4577_146830C.1.pep
MKMVIXLVMCLALAAASVCWMHMPCPCTRLDALHRAGTGLTTMMSTGGLYXPYAQYMRQSQCTPLGAAPYYSVCGQTSAMYQTMRQQSCQPLMRMMDLLSSPQQLQMMMQLERAATVS

SEQ ID NO: 236017 - protein, 160 aa, Zea mays
  Clone ID: MRT4577_146831C.1.pep
VSLSQRATDDAARIQAVELLVAIGSGDSSAREAVVQEDASSSSKVREVALRAIDGLCFSPPTSTDRLIAAGFLDRVLSLLRTGDTTLQHCALKAAHRLCPVSEEIRKAMGDAGFMLELVSVLGASSKSPEAREMAAESLCALVSVHRNRKRFVQEDRDDV

SEQ ID NO: 236018 - protein, 86 aa, Zea mays
  Clone ID: MRT4577_146832C.1.pep
MVLQNDIDLLNPPAELEKLKHKKKRLVQSPNSFFMDVKCRGCFSMTTVFSHSQTVVVCPGCQTVLCQPTGGKARLTEGCSFRKKGD

SEQ ID NO: 236019 - protein, 189 aa, Zea mays
  unsure (1)..(189): unsure at all Xaa locations
  Clone ID: MRT4577_146833C.1.pep
MIMSQLRNTSKVAASDGIGKDDMANFALMGGGADHLRGNSVNTFSQAHNIWRPQRGXPERAVSVLRSWLFEHFLHPYPTDSDKQMLAKQTGLTRNQVSNWFINARVRLWKPMVEEIHNLEMRQQXQKNTSAVDKTQLGMQQLIQHSSANSRQRGQSSGGTTRNQDELPPXMPHDMXGQGQQQQQXVSFA

SEQ ID NO: 236020 - protein, 59 aa, Zea mays
  Clone ID: MRT4577_146834C.1.pep
ETIALYRSTQSRQSAAPPCTGFSFKPYTWISTIPTTTSIPFQPPAPSCARPRGNIFLTS

SEQ ID NO: 236021 - protein, 86 aa, Zea mays
  Clone ID: MRT4577_146835C.1.pep
MVLQNNIDLLNPPEKLKKLKHKKKKLVQSPNSFFMDVKCQGCFSITTVFSHSQTVVVCPGCQTVLCQPTGGKARLTEGCSFRRKEN

SEQ ID NO: 236022 - protein, 326 aa, Zea mays
  Clone ID: MRT4577_146836C.1.pep
LEAGRVIPSALSAQRSRPTRANNPWPPRRRVSCSRSRASPSPVLQDPAELLRLAKEPAFADWMVGVRRRIHENPELGYEEFQTSELVRRELHAMGIPYRHPFAVTGVVATVGTGGPPFVALRADMDALPLQESVEWEHKSKVPGKMHGCGHDAHVAMLLGSAKILQEHRDELKGTVVLVFQPAEEGGGGAKKMIEDRAVENIDAIFGLHIADSVPIGVLASRPGPIMAGSGFFEAAARGKMVLQNDIDLLNPPAELEKLKHKKKRLVQSPNSFFMDVKCQGCFSITTVFSHSQTVVVCPGCQTVLCQPTGGKARLTEGCSFRRKGD

SEQ ID NO: 236023 - protein, 82 aa, Zea mays
  unsure (1)..(82): unsure at all Xaa locations
  Clone ID: MRT4577_146837C.1.pep
GKVFLVTGASGDIAXCIVHLLLDELYTDRLFLRDTADPEKTLQLTASEGANDMLSLLYHSLLEDRCFEDAFHVLNTVYNTVS

SEQ ID NO: 236024 - protein, 125 aa, Zea mays
  unsure (1)..(125): unsure at all Xaa locations
  Clone ID: MRT4577_146838C.1.pep
ERERYCTTPVSDRLADGTPHEHHMNQSQLALRGSSTRXLKASYSTERLMPRRTVRQLLGHKMQLPTLVDYSMRSLDEHLHDVASEVLDAHDNCWIQIAMRQFKNXVEGIQSMTYCWLNLRDDKDA

SEQ ID NO: 236025 - protein, 91 aa, Zea mays
  Clone ID: MRT4577_146839C.1.pep
EEFEFVFAVALKHMVLSFDDFSQLDHLFSEHMEPMWFNLLLSDAKAMQVRMMIMTITIAIRRPMWGMCIPMSTLQRFIMKQCIWTHDLPKA

SEQ ID NO: 236026 - protein, 209 aa, Zea mays
  Clone ID: MRT4577_14683C.1.pep
VDLENRRPINQGNFSATMSSGSNLTSGSFRTVGFTTPFNFSNGSSVFTLSAHVFNSGNEVYIDRIEFVPAEVTFEAEYDLERAQKAVNALFTSTNQIGLKTDVTDYHIDQVSNLVECLSDEFCLDEKRELSEKVKHAKRLSDERNLLQDPNFTGINRQVDRGWRGSTDITIQGGDDVFKENYVTLPGTFDECYPTYLYRKIDENRKQQA

SEQ ID NO: 236027 - protein, 56 aa, Zea mays
  Clone ID: MRT4577_146840C.1.pep
GTHVRSGVALRLRRDHNPHRCTWLSIMYVCTPFLFTGFKVYAFDPFSCLRYIALCV

SEQ ID NO: 236028 - protein, 37 aa, Zea mays
  Clone ID: MRT4577_146841C.1.pep
SVKDAIVANGGGCHRLGWLGTGPWTVQRVRVGDADQC

SEQ ID NO: 236029 - protein, 68 aa, Zea mays
  Clone ID: MRT4577_146842C.1.pep
THAYSLLRHPPWPSVQVPVRATPVRHYFKYTTDLPFTSLITPAKSPVHVYCALAVYLHCCFLGLIVRI

SEQ ID NO: 236030 - protein, 53 aa, Zea mays
  Clone ID: MRT4577_146843C.1.pep
ERNNFQIGHNRQFTLVWLNDFQLFFSGDYSQHSFNSLHFTIVFLRVTTEPIIF

SEQ ID NO: 236031 - protein, 120 aa, Zea mays
  Clone ID: MRT4577_146844C.1.pep
SSSVGGRPLFFWGQFLFLLRFTLPSGCSQFHRHKVPKKQGTMPGTHSLDKSKATTGRLSWAYKKTKTPAVYRRQDPLRIWTRDCHGTKQKRPAHPTGKGKGVGQRFMSQTAGPVLQHKRC

SEQ ID NO: 236032 - protein, 45 aa, Zea mays
  Clone ID: MRT4577_146845C.1.pep
GLGFVKPHHVKRPPQVASFCVVQRNGLSTPAKFRADVAGASSSCS

SEQ ID NO: 236033 - protein, 117 aa, Zea mays
  Clone ID: MRT4577_146846C.1.pep
STSALVTKPLALQSCHVTVLQALSSVHLVERHRPLLHCRLDICLLVHTDAALWPSPSIARSDTLSPPDFAVTELLPRSQIEVARPQRARPGAQHLFNPDASPTELVGLALVWTSPSW

SEQ ID NO: 236034 - protein, 76 aa, Zea mays
  unsure (1)..(76): unsure at all Xaa locations
  Clone ID: MRT4577_146847C.1.pep
CTTPTHHLDLPMQCNVKQKNTCISQHQSILFLTPSAGGGAVXLHSIAVELRGGGRSWWRRPMRCCXLGXLCGQRGF

SEQ ID NO: 236035 - protein, 123 aa, Zea mays
  Clone ID: MRT4577_146848C.1.pep
RRSESINTQLGISNHTTYVALNPCICQPFPRILHHMNWSALPGSTLPYHPASCQEGNCYSHHLPRPVRGCLFTYGIAGFRLTHDEVCGQLKGPRSSGQQSVRSLIDTDGRPFLLSVWSHFKLF

SEQ ID NO: 236036 - protein, 103 aa, Zea mays
  Clone ID: MRT4577_146849C.1.pep
RRSESINAQLGISNHTTYVALNPCICQPFPRILHYMNWSALPGSTLPYHSASCQEGNCYSHHLPRPVRGCLFTYGIAGFRLTHDEVCGQLKVLDHQANNRYGP

SEQ ID NO: 236037 - protein, 82 aa, Zea mays
  unsure (1)..(82): unsure at all Xaa locations
  Clone ID: MRT4577_14684C.1.pep
KKKKKNRKKKKKKKKKNKLKKKKKKKKKKKKKKKKNKRKNNKKKKXKNKKKKKKKIFRPQFTPFGGDFCFFFPPVLTPLGLV

SEQ ID NO: 236038 - protein, 79 aa, Zea mays
  Clone ID: MRT4577_146850C.1.pep
LQLQVIGFVSCDLRVNQNLSTLKVMSVYLIQLASEAHLTSYRCFTVDKINKSSVNENIKEKKREKKKKKKKKGWPRISE

SEQ ID NO: 236039 - protein, 75 aa, Zea mays
  unsure (1)..(75): unsure at all Xaa locations
  Clone ID: MRT4577_146851C.1.pep
APGKGVXSPGNEPCGRNLRGAAHPRKESKNGELVRIGSDRLILDRLRPPSPAAPASRRSQPTKRRPDVGRYEGSI

SEQ ID NO: 236040 - protein, 47 aa, Zea mays
  Clone ID: MRT4577_146852C.1.pep
GHGQPCVLTGSTDDSITMNSLRVRGLVLIAEHGTMPPLSLATRLTRG

SEQ ID NO: 236041 - protein, 58 aa, Zea mays
  Clone ID: MRT4577_146853C.1.pep
FCFFSCTNTRGRFNNERRALLTRITHGNTTVHQKEYIWSSLILHMNEICENAHLYHSS

SEQ ID NO: 236042 - protein, 94 aa, Zea mays
  unsure (1)..(94): unsure at all Xaa locations
  Clone ID: MRT4577_146854C.1.pep
YFLVFYKVCWQTTKGDLMAVIESFQNQRCNDLNLLNKANIVLILKKEGANXITDYRPISLIHSVAKVITKILALRLEPLMDKLISQSQSELLSS

SEQ ID NO: 236043 - protein, 82 aa, Zea mays
  Clone ID: MRT4577_146855C.1.pep
SQFAALNPFVCFQRQIFLPFGQLGIISPVSFLTQQQLLPFYQQFVANPAAFLQVQQLRPFVQRVFHNPAAFFQKHIMGGALF

SEQ ID NO: 236044 - protein, 81 aa, Zea mays
  unsure (1)..(81): unsure at all Xaa locations
  Clone ID: MRT4577_146856C.1.pep
RLAFVAMGASCLLKGPSILPLQGLTXXXXARQSVNQRGLESNASAHCDCECSGSRCVGFPXGSRRVPRLRHHGCECVCICV

SEQ ID NO: 236045 - protein, 68 aa, Zea mays
  Clone ID: MRT4577_146857C.1.pep
DGSKDVRGRQELGCAPCRWMASNRRKNRWIAVHFSSGYGCASLSLFGNRNVPCSVLHFAPRVIVVFVP

SEQ ID NO: 236046 - protein, 86 aa, Zea mays
  Clone ID: MRT4577_146858C.1.pep
STSLTARHRPSMSLRYSWLPIILTKCLQSLIVSHASSETSTTFLGLLPIKFSVINMTSYTPSWIIPTLSSMLITTENALSVSAHMV

SEQ ID NO: 236047 - protein, 55 aa, Zea mays
  Clone ID: MRT4577_146859C.1.pep
EHKASHCTTHGVLLSSPLPMEPQSDITCYTIGYSILHSLNGSTPTCSHIQQPCGR

SEQ ID NO: 236048 - protein, 87 aa, Zea mays
  Clone ID: MRT4577_14685C.1.pep
HASASLSPPWGLSFPRPCLLFTTSARRLPPLALPPSLPPFHSNSSAALYRTSPTPPFFYSTPGRTLHAHPVKAKRKPKTPLLHHFTS

SEQ ID NO: 236049 - protein, 95 aa, Zea mays
  Clone ID: MRT4577_146860C.1.pep
FIFFFFFFFFFLLFFWYIFFFFYFYMFFLLGPKKIPAFVAYLGIKGGILRPQKNPPTRCLNPNGGITLFGSNTHYFKTKTRGMRGFEQNKGAKKN

SEQ ID NO: 236050 - protein, 68 aa, Zea mays
  Clone ID: MRT4577_146861C.1.pep
ILFISCIYHAQLHPQQISSMSKLSPRHNQIEMVRMSFLPTAPASWSCGLDATITILSRIRTRTRASGP

SEQ ID NO: 236051 - protein, 53 aa, Zea mays
  Clone ID: MRT4577_146862C.1.pep
PRRVFALVPLFNVGVAVAVARVAIAVVTSYYSVACVGSCRRRHRCILSLPSRR

SEQ ID NO: 236052 - protein, 96 aa, Zea mays
  Clone ID: MRT4577_146863C.1.pep
AEGLTNLPHTDFTLCPCMIDQAHQEERPIRQILYLGDLLETCHFQAFWQALDDNMDLLEGITGFEDSVRKFICHVVGITYQHIDRWLLSEMLGDLS

SEQ ID NO: 236053 - protein, 320 aa, Zea mays
  Clone ID: MRT4577_146864C.1.pep
MKTVMVLVFTDRLRPFSSLLTIYVLLLLLTTAARDPGIVPRASHPPEDIHYDNLSLTDTPGILQFPCVKEVIVNGMPVKVKYCETCMVFRPPRCSHCSICNNCVERFDHHCPWVGQCIGKRNCRYFFLFVVSSSLLCIYLFVISALYIKFLMDGDYPTVWKALKHSPASLALMIYCFISLWFVGGLTGFHTYLISTNQTTYENFRYRSDGRLNVYDQGCLSNFQEVVCAKIEPSKHKFRAHIQEEVRGPPANRAGETEEEQVGGPRAKAGDGLDIDGDLMKISHRHNHEDIDIEIGCGDANEVECSVSDSKVKDNMDAHM

SEQ ID NO: 236054 - protein, 201 aa, Zea mays
  Clone ID: MRT4577_146865C.1.pep
EGKFPEALRQFLSILHTIPLIVVDSRREVDEVKELIEIVREYVLGLRMELKRKELKDNINRQQELAAYFTNCKLQRVHMRLVLSNAMALCYKQKNFATAEHFARLLLENSPNEVQAKKARQVQQQCNGKQDSHELNYDYRNPFVVCGSTYVPIYRGQKDVSCPYCGSRFVPSIEGQLCTICELSVVGADASGLLCSPTQTR

SEQ ID NO: 236055 - protein, 139 aa, Zea mays
  unsure (1)..(139): unsure at all Xaa locations
  Clone ID: MRT4577_146866C.1.pep
MGQGEKKNQKTPQPQPANANPQTQNXKKHPPRGNPPGKPSSRNEPPQNKPALLNPLLHGPAGSPCKTNPPRGPPKQKRPPXGAEHPLGXPEHHPSQFLGAPPHRGQPQDEGLLLPAPHQKEGPPPRQPFQQHPPEAPPF

SEQ ID NO: 236056 - protein, 85 aa, Zea mays
  Clone ID: MRT4577_146867C.1.pep
TKQTHSLNRWNPTRLFSIYLISNSTYHICASILSLTLESETEHSTSLASPHPISISMSSWLCLCEIFIRSPSISRPSPAYARGPP

SEQ ID NO: 236057 - protein, 165 aa, Zea mays
  unsure (1)..(165): unsure at all Xaa locations
  Clone ID: MRT4577_146868C.1.pep
AKAQXXPTHKXFSGGXPRGGTRDAXXERXGGRNPRPXRDPXEGPDTXXPNXXXXEARPTGGAXDASQXADRGRAERGREHEPXXTTXAGXNRXRXGDGXQXTGXHNXAPQPRXARRKNXPPPXEADKTDEAEPQRAXERAXAXPRPHGAAXAXXTSQARTKSTPG

SEQ ID NO: 236058 - protein, 135 aa, Zea mays
  Clone ID: MRT4577_146869C.1.pep
PTREAVVTTQSTREAVGAGVGGGSSGQKMPTLEEYGTNLTKLAEEGKLDPVVGRQDQIERVTQILGRRTKSVPCLIGEPGVGKTAIAEGSPPLYFPQRDPETIEGKKVITLDMGLLVAGTKYRGEFEERLKKLME

SEQ ID NO: 236059 - protein, 38 aa, Zea mays
  Clone ID: MRT4577_14686C.1.pep
IPDRQLLGGGDALGRIRIRGEAYETALLVASSSCETRL

SEQ ID NO: 236060 - protein, 51 aa, Zea mays
  unsure (1)..(51): unsure at all Xaa locations
  Clone ID: MRT4577_146870C.1.pep
ATEVNTSDSRVEVDSKIXKGVGGEHNTNSIKELISNTPLNYNDNRFFGKFR

SEQ ID NO: 236061 - protein, 164 aa, Zea mays
  unsure (1)..(164): unsure at all Xaa locations
  Clone ID: MRT4577_146871C.1.pep
VRALALVAVLGFLWICLLSRKKSIGGGYVKMDKQTVPDGAKLVTYQWNLPYSSSEIIRTLELLDEEDVVCWWGFGTAYRNVMDDGTXCVKRIDLSREKTXRDFEKELENFGRIMXINLVNLQGYCRFPXARLLVYDSLXLGTLECYLHGDEQEEQPLNWNARLK

SEQ ID NO: 236062 - protein, 50 aa, Zea mays
  Clone ID: MRT4577_146872C.1.pep
MEEKIKVMIAGLGGKGHGVGNIKGVGFKVVKVYGVYLMNLLKEKKNKRRS

SEQ ID NO: 236063 - protein, 138 aa, Zea mays
  Clone ID: MRT4577_146873C.1.pep
PPQTPPTPRRDPDVPLELRRPHAQEPRHAGPLAAGQEVHLLRRHRAQRRGVGRLGPCRARGRAPRRVLGQPAGLAREETVPCAVVRLHVMDWIGVLVEGLDCLPERDLFWFRELCCRPVVGYLGCYAISFAVVITSLS

SEQ ID NO: 236064 - protein, 91 aa, Zea mays
  Clone ID: MRT4577_146874C.1.pep
INAQVLITSTTKGGPDEQTPNQPTSQSVFTALLRQHASRKRTRTNDWFHFSKRGDRTDGTSEPRVATPSRPGRVGSRIFQYMDDMVVPMRS

SEQ ID NO: 236065 - protein, 72 aa, Zea mays
  Clone ID: MRT4577_146875C.1.pep
PLIRNFFFCCITPNGNENSFGRGVKTLLYLLYFFIIKYLYTASHFQEIIDTYSNEHLSLYFKNIDLCLTLLN

SEQ ID NO: 236066 - protein, 69 aa, Zea mays
  Clone ID: MRT4577_146876C.1.pep
SSTSHAHINDIGMAYPYFLPLTPLMKYLTLPYCYASNCHAYPILSFEHTLIQMITHCPKLQEFYSIIHT

SEQ ID NO: 236067 - protein, 111 aa, Zea mays
  Clone ID: MRT4577_146877C.1.pep
RGESRKMQAGGTAGCFSGDLSGTVMPESRCLHAVRVLGTRWSVLVADVEPTEVAHNDYSSSIWVSPVDDLYRLGGDARELPMISGAIRVYSVDAASKSVVGVDRDYLSYGE

SEQ ID NO: 236068 - protein, 293 aa, Zea mays
  Clone ID: MRT4577_146878C.1.pep
MAYLLKSRSEPVQQLRVPASSEEQQRRVNEVRELLGDLPTEMPNFLSDATIRRFLRARNWSTMKATKSLKEATSWRRQYKPEKIRWESIADSENEARRAYIPDYLDKKGRMVFVTLPTIKSKSSEKDHLKYLVYNLENLLIDCADAEEDNVVWISDFKGWSISSTPFSLTRQSLHIIQQYYPGLIAVGILTNAPKIFESFWKIMKHFLEPKMDEKVKFVYNDSSESQKILGDMFDLDELEHIFGGRNTADFDINVYAERMKRRDRIRGASTEDNGEATSSRCWTKTTRNSSSV

SEQ ID NO: 236069 - protein, 65 aa, Zea mays
  Clone ID: MRT4577_146879C.1.pep
SGLTWMDGLPLPLCTAKMARLVLSVLGIFSPPMSYGAELRALCIVFFVLCCIYVPPEGVLACAQG

SEQ ID NO: 236070 - protein, 91 aa, Zea mays
  Clone ID: MRT4577_14687C.1.pep
SSIWSSPITSYSPLQSDDRVTAPRAETCFSRARGLLRGDPPSDRGVSAREPAAPPSLGGMDTHGGVGSPYRGQRCSTPMCIAPLVEVRARP

SEQ ID NO: 236071 - protein, 46 aa, Zea mays
  Clone ID: MRT4577_146880C.1.pep
LPLDGPTTPYYARTENCFRSTVDTHADTSDMVTTRSPPPSQELWPR

SEQ ID NO: 236072 - protein, 48 aa, Zea mays
  Clone ID: MRT4577_146881C.1.pep
TLQIRTCNLVWEKGKKQEKRFKGRFLPYKTNKIKSTLHFNLEHSFPET

SEQ ID NO: 236073 - protein, 136 aa, Zea mays
  Clone ID: MRT4577_146882C.1.pep
SKQGPKLDAAMEGKAVRRGRGRTSWSAEHREPPWASASTGGTLRELRSREEACLKLYSELAAPRDKLTGIHGRRRKLTGDPAPGARHGRATGRRWSAAGSGSRPWEERGRKPSEQQACARDKKRAGPSACLRAERE

SEQ ID NO: 236074 - protein, 123 aa, Zea mays
  unsure (1)..(123): unsure at all Xaa locations
  Clone ID: MRT4577_146883C.1.pep
MHRADSPSSRLRRAYQAGADRVPAGHGLRSRTRDLFARPFRKKGYVPITTXLRTYKIGDYVDVXENGAVHEEMAQKNDQGRTRRVWNATRRAISVEACRXVLGRXIRQRTHARVEHVEPSPCT

SEQ ID NO: 236075 - protein, 157 aa, Zea mays
  unsure (1)..(157): unsure at all Xaa locations
  Clone ID: MRT4577_146884C.1.pep
NHLHSGYMSPEYAMEGAFSVKSDTYSFGVLMLEIVSGLKISSPHLHMDFPNLRAYXDWHTLIIIQNCPHDKNDPDMRLCHVSXWNMWKEGKIEDLVDSSVMENCSLDEVSQCVHIGLLCVQDSPSFRPLMSAVVSMLENKTTTLPTPSQPVQDAAGA

SEQ ID NO: 236076 - protein, 81 aa, Zea mays
  unsure (1)..(81): unsure at all Xaa locations
  Clone ID: MRT4577_146885C.1.pep
LVQATILRRPWLAAGLGRGRSKGTPSVLPNFWGGGGVSPXTSRLPLTFNKKAVEDEVVDDRDESAVAESGVSSAVLPLLVG

SEQ ID NO: 236077 - protein, 83 aa, Zea mays
  Clone ID: MRT4577_146886C.1.pep
GVWFFFFFVLFFFFFGPTLHRPNLLMDTILDPCQKNQGGAGVQEHPFLEVTPPPPTNFLLVKTYYYQKQGATKGRRGNYFWGP

SEQ ID NO: 236078 - protein, 270 aa, Zea mays
  Clone ID: MRT4577_146887C.1.pep
MTIEQMFLMQTQAVKVIGQTLAAIQQQQHQPPPQPQMPQMPRDKRAEFMRGNPPTFAHSSDPMDAEDWLRTVERELHTTQCDDREKVLYGLMTVKKEEFLALKQGHMSVCEYRDKFLQLSRYAPEDVNTDAKRQYRFLRGLVDPLQYHLMNHTFPTFQHLIDRAIMTERKRKEMEDRKRKANVVADALSRKSQLILEGRGKDFREGLEVQEDLTYIEKPAQILETADKVTRRKTIRMCKVRWSHHSEEEATWEHEDDLMAKYPELFAGQP

SEQ ID NO: 236079 - protein, 73 aa, Zea mays
  Clone ID: MRT4577_146888C.1.pep
RLCSQYKAPCNLANNLYAAGLCHQFHYTAIPDRETIDAGCYCSSVINDLGPPPEWHRTFQGIHHTLRPHIHHL

SEQ ID NO: 236080 - protein, 93 aa, Zea mays
  Clone ID: MRT4577_146889C.1.pep
GGGGGFFYFFFFFFFFFFFFFFFFFFLKATGRPFIFFLKTTALKRRHAFGGGGGEPSKQRPRYVTGEIFLKPDHLNGKGAPSKQGHNPPENGT

SEQ ID NO: 236081 - protein, 150 aa, Zea mays
  unsure (1)..(150): unsure at all Xaa locations
  Clone ID: MRT4577_14688C.1.pep
FGSWPMDEKNSAEKKPAGVEKAVKTTAGQKPKCEKRLAASKSSCKEGGXRRGRXKAKKSVETYKMYIFKVLKQVHPDIGISCMAMFIRNFLINDIYQKLGGEVVKLARFIKKPTITSREIQTSVRLVLPGELAKHAVFEGTKGVTKSTSH

SEQ ID NO: 236082 - protein, 166 aa, Zea mays
  unsure (1)..(166): unsure at all Xaa locations
  Clone ID: MRT4577_146890C.1.pep
TTRRGRXPPTCRRARRRSTTPSRRRRARMRLPRRRTRRAATPXRRRRRRRPPRAAAPRRGTAWRRGRRRSRAPGSGRPPPRPPAXGRRRDRRRGHRHRTMMSSDQPLSPSLPFPSPSFPWKNDLVAYASRSLLLSPPPPLPCSAPRKLLDVSAAKYRKAINVSART

SEQ ID NO: 236083 - protein, 112 aa, Zea mays
  Clone ID: MRT4577_146891C.1.pep
TDFQFSICSYDTVIPSSLLLILPSLSTKDINGLCNRAHVVHPSHEARMGCQHADLLDQPDQRYPWTPITSDYNYEFEKNMKMILYSALTHLAHGQISHNHKLTGWCPSVCIR

SEQ ID NO: 236084 - protein, 134 aa, Zea mays
  Clone ID: MRT4577_146892C.1.pep
RAYVAPRPWPPNACLWVRSVVRAMDRSCCPRMGASPSPPPLPMRCDSPVHCSASAGDHTYVWAWVLIFSEQELAAVLSTPEGGHHGASWTGKHRLLAAVSAAPESFYSVQARISRSIGGARLADGEPRTWQTKP

SEQ ID NO: 236085 - protein, 82 aa, Zea mays
  Clone ID: MRT4577_146893C.1.pep
TDACAIAHSALNALSLYRMKIGRIKNVSPVPTDSTLLMGGMMRRRLYASLLLAICWLLSVGHHESSPLWVVYAAFCVSQDEL

SEQ ID NO: 236086 - protein, 84 aa, Zea mays
  unsure (1)..(84): unsure at all Xaa locations
  Clone ID: MRT4577_146894C.1.pep
DAWVTLSFFSIQLVAEDGAFYNKASLINLSAPFICEFFRDAQYNVLPYADYIFPNXTEANIFAKVIGWYTYIIDDIAFHISQLP

SEQ ID NO: 236087 - protein, 323 aa, Zea mays
  Clone ID: MRT4577_146895C.1.pep
MPAGQPHAHEAAAAACVGSGANHSNHRVPAHSPPPLPAEVVPAYPPPESEDDETWVWTQIKAEARRDADAEPALASFLYATVLSHPSLPRSLSFHLANKLCSSTLLSTLLYDLFLATLTAHPSLRAAVVADLLAAHSRDPACVGFSHCLLNYKGFLAIQAHRVAHVLWAQQRRPLALALQSRVADVFAVDIHPAAVVGKGILLDHATGVVIGETAVVGDNVSILHHVTLGGTGKAVGDRHPKIGDGVLIGAGATILGNVKIGAGAKIGAGSVVLIDVPARSTAVGNPARLIGGKKAEGANDEDMPGESMDHTSFIRQWSDYTI

SEQ ID NO: 236088 - protein, 171 aa, Zea mays
  Clone ID: MRT4577_146896C.1.pep
GRVGAIQAHRVAHVLWAQQRRPLALALQSRVADVFAVDIHPAAVVGKGILLDHATGVVIGETAVVGDNVSILHHVTLGGTGKAVGDRHPKIGDGVLIGAGATILGNVKIGAGAKIGAGSVVLIDVPARSTAVGNPARLIGGKKAEGANEEDMPGESMDHTSFIRQWSDYTI

SEQ ID NO: 236089 - protein, 52 aa, Zea mays
  Clone ID: MRT4577_146897C.1.pep
NPFAIFAYWAMNASNKRGVGPSLSNWYTFPHFLKINFRINGEFQNASGFQFH

SEQ ID NO: 236090 - protein, 53 aa, Zea mays
  Clone ID: MRT4577_146898C.1.pep
GDMSGSEPLLAMAIGGWVAPSLQQAVTVHTSKCCINGRASFSTIREAIVRSGH

SEQ ID NO: 236091 - protein, 77 aa, Zea mays
  Clone ID: MRT4577_146899C.1.pep
HLLFFCVLYVIYTRVAMRYSFWLSICGACGHVWMVDSCSAATAQADPPIRGRGIYVVLSHECCQLDVRQATECIPTL

SEQ ID NO: 236092 - protein, 105 aa, Zea mays
  Clone ID: MRT4577_14689C.1.pep
MNPFFKDFFKKFPGGALKFPRSTKKPPFPSREIQTPGGLVLPGGFAKHPVFGGTKAVPRFPPILPPPRVPGFFGFPLFPRVFCGVLYPPPPRLCLCCEIVDVLVG

SEQ ID NO: 236093 - protein, 61 aa, Zea mays
  Clone ID: MRT4577_1468C.1.pep
TTRITSYECHHDDGHLDRTHEPDVTLQYPQDGRTTGAYATRGGNPWRPWRSQGEARRSYAR

SEQ ID NO: 236094 - protein, 59 aa, Zea mays
  Clone ID: MRT4577_146900C.1.pep
MAACRCHLNQVVGHALPMSDDEHPKIYRMTVCSANEVRAMSKMRRHCRKLKKAKKSSVQ

SEQ ID NO: 236095 - protein, 85 aa, Zea mays
  Clone ID: MRT4577_146901C.1.pep
MSMGRFVNSMDPTSGLEVIRDWNGVAQVVLRSPKGASARVSLCGGQVVSWRNDRGEELLFTSSKVNPPPLFFLFPTLLLPSSSNL

SEQ ID NO: 236096 - protein, 87 aa, Zea mays
  unsure (1)..(87): unsure at all Xaa locations
  Clone ID: MRT4577_146902C.1.pep
YILSWFLVSHSRIIGTRSQLPCLPMCHXRGALCHGVPCMAICCSCYAIVRYAHSSVGTSCRRSRFCPELPLAAASGAICVLHPLTTV

SEQ ID NO: 236097 - protein, 64 aa, Zea mays
  Clone ID: MRT4577_146903C.1.pep
PSKKMLMPKKFVEGQARAPAVLMAKYGNAKPLTGGWTPYPCRPELFLPLRAPPQVHSVSCHSTQ

SEQ ID NO: 236098 - protein, 175 aa, Zea mays
  unsure (1)..(175): unsure at all Xaa locations
  Clone ID: MRT4577_146904C.1.pep
LLYLSKEPPTCSVPRMSVLSKLFVSSRFTTTQMTXCRGGITKGQGLQDHSGRLDTERLPHCHCSCVHGPGQPIQSTATYSTTTYVGVYYPYHTYKTSSPWIHLTSEIKKMKEEQIYLCRSPPYLPLKKGHPPGAVALHLSPAFPGRQQPLLPPRDAPSLFQGLPLHVTFAIPPPQ

SEQ ID NO: 236099 - protein, 177 aa, Zea mays
  unsure (1)..(177): unsure at all Xaa locations
  Clone ID: MRT4577_146905C.1.pep
MAQEGIFSANLLSSEVKAALPEGYTLRALRKSDFNNGFLDCLRVLTTVGDITEADFVKQYDDMAAAGSYYIIIIEDTSRKENPVVGTGALITERKFIHSLGAVGHIEXDIAVAKDQQGKKLGLRIIQALDYVAEQVGCYKSILDCSEANEGFYVKCGFRRAGLQMAHYYEGEKGKSK

SEQ ID NO: 236100 - protein, 37 aa, Zea mays
  Clone ID: MRT4577_146906C.1.pep
GVSSFVFAIDLCLSLGPVLVVGLREVILLGVRHRPRR

SEQ ID NO: 236101 - protein, 142 aa, Zea mays
  unsure (1)..(142): unsure at all Xaa locations
  Clone ID: MRT4577_146907C.1.pep
NLNHDEIDFEFLGNRTGQRYIFYTNVYTGGKGDRXQMIYLWFDPTKEYHYYSVLWNKYHIVXALFLFLSISTEMHLLFSDSDXLLKKKIKGVXFFVDHIPIRVFKNCKELXVRLPFNQPMKIYSSLWNADDWATKSGLEKTD

SEQ ID NO: 236102 - protein, 99 aa, Zea mays
  Clone ID: MRT4577_146908C.1.pep
SAWCPAGVDPRVAVAMDPVTPVAFGIQFFRNLQAGKGLLASDQVLHTDPRSRPTVDALARSSVAFDRAFVKAITKMGRVGVKTARDRQGNVRRDCSVLG

SEQ ID NO: 236103 - protein, 96 aa, Zea mays
  Clone ID: MRT4577_146909C.1.pep
PIVYRSGHSRSWSVTPGEGCLLESPAGWIRAILRFGSGDLTTWDQQMRPHSRRTGMLLGGRLGKHPSPWESLPLCPSVEDRRYVGRAVCVMSVAAF

SEQ ID NO: 236104 - protein, 88 aa, Zea mays
  Clone ID: MRT4577_14690C.1.pep
TGLAHWVFLFLRNWGNPTYNKGGGPFRGANLSTPSRAGTCFFFGTLKLNSWAGVFQGMSWKTRGAPHLTWIGANPLFGPWVNIKKAPP

SEQ ID NO: 236105 - protein, 118 aa, Zea mays
  Clone ID: MRT4577_146910C.1.pep
GIACPFGNQASRRMVVMGPNMPQKVMQAGASFFGGGAKLFEPQCFKGSRRGELGCPIIVFVLVPHSLFFLVRGLVVVESLCFLLPLVHVVGSCSPGFIWQGCPCSPQGFIELLKSSHS

SEQ ID NO: 236106 - protein, 137 aa, Zea mays
  Clone ID: MRT4577_146911C.1.pep
MAAALAAMVVLALRTVAGAASTPAAAAATTSRSPVIYIFGDSMSDVGNNNYLLLSLAKCNYPWYGIDYKNGYPTGRLTNGRTIGDIMAAKFGSPPTVPFLSLYMTDDEVLGGVNFASGGAGLLNETGIYFVQYLSFD

SEQ ID NO: 236107 - protein, 83 aa, Zea mays
  Clone ID: MRT4577_146912C.1.pep
LAGIMEKKTLCKRVCVQPLTTWVYFFPPKSLSGITIAGSSLGLNILVRNILKIYSTRTRQHYYTYVWGSTNTSKYEQNARRAI

SEQ ID NO: 236108 - protein, 96 aa, Zea mays
  Clone ID: MRT4577_146913C.1.pep
GSGNGYLQPLLRRGHGQRISLYVDDVVIFLQSRTDELALTKELLRIFENATGLVTNISKSSVTPIQCGEEELAEVQEVMACKVENFPYKYLGMPLS

SEQ ID NO: 236109 - protein, 173 aa, Zea mays
  unsure (1)..(173): unsure at all Xaa locations
  Clone ID: MRT4577_146914C.1.pep
QKTPAHKTTKTEEPNTQEQHPGHSNTSKKHRQGPNKRKXKLPGERTEGDTAQHPEHGNTEDPAATEHRKGHRRKRRERPAGTTTSARPERERGAPREDTPGEEPPAREGGPPEARQAQHTAAERLAQTQPGRGPPQQTTTPPAPQPREKTPPPAHEHGAEPGRSRRXAEXDPG

SEQ ID NO: 236110 - protein, 583 aa, Zea mays
  Clone ID: MRT4577_146915C.1.pep
MAAAAEVDPSPNPPPTTASGLSKTKTREADRRRRRRSKAKKNKSVTEADAQDADGGASSSDAKENADPNPEPQVEVEIEYVPEKAELDDPLLDDFKAIFEKFTFKDAAAAAAEDDKKDEGAADATKKGSLDDDDDDEDDEQEANKKKDGGLSNKKKKLERRMKIADLKQICNRPDVVEVWDATAADPKLLVYLKAYRNTVPVPRHWSQKRKFLQGKRGIEKQPFQLPDFIAATGIEKIRQAYIEKEDSKKLKQKQRERMQPKMGKMDIDYQVLHDAFFKYQTKPKLSSHGDLYYEGKEFEVKLREMKPGMLSRELKDALGMPDGAPPPWLINMQRYGPPPSYPQLKIPGLNAPIPPGASFGYRPGEWGKPPVDEHGRPLYGDVFGVLQQDEPNYDDEPVDRSKHWGDLEEEEEEEEEEEEEEEPMEDEEMEDGIQSVDTISSTPTGVETPDVIDLRKLQRKETDKQAERPLYQVLEQKEERIAPGTLYGSSHTYVLGTQDKSSAPKRVDLLKNQKSDKVDVTIQPEELEAMDDVLAAKYEEAREEEKLRNQKEDFSDMVAENAHKRKRKQEKEGKSKKKEFKF

SEQ ID NO: 236111 - protein, 263 aa, Zea mays
  unsure (1)..(263): unsure at all Xaa locations
  Clone ID: MRT4577_146916C.1.pep
MATQRLKSGRREGKSHGRRIYKDKPDGFEAAVDGREGLRVHSLQILVSLAKTIGGFDICHDLHGLIIEEHVSHLPVEVPSYIVSHQNNPRVAGVGDDHEVPLFEDGQRGAAALDCVQAAAALELAEHSDTCGHVVLLPEVELAVAKLLLVVDERRQRERLLPVVFVRGFQEALALVSLIDDEKKLDDCQFDLWKQSYMAACAAMFGKLQRSRRLDAVQSGCTALSIFKQGDLMVVANASNSWVVLGTASDDGVIXAIQLIIHL

SEQ ID NO: 236112 - protein, 157 aa, Zea mays
  Clone ID: MRT4577_146917C.1.pep
EEEEPMEDEEMEDGIQSVDTISSTPTGVETPDVIDLRKLQRKETDKQAERPLYQVLEQKDKRIAPGTLYGYVLGTQDKSSAPKRVDLLKNQKSDKVDVTIQPDAMDDVVAAKYEEAREEEKLRNQKEDFSDMVAENAHKRKRKQEKEGKSKKKEFKF

SEQ ID NO: 236113 - protein, 115 aa, Zea mays
  Clone ID: MRT4577_146918C.1.pep
MAAAAGVDPPNPPPTTASGLSKTKTREADRRRRRRSKAKKLKQKQRERMQPKMGKMDIDYQVLHDAFFKYQTKPKLSSHGDLYYEGKEFEVKLREMKPGMLSRELKDALGMPDGA

SEQ ID NO: 236114 - protein, 165 aa, Zea mays
  unsure (1)..(165): unsure at all Xaa locations
  Clone ID: MRT4577_146919C.1.pep
LSSLKAVQMASEMSNQELISTGRKQMDQTDQAIERSKMVVAQTVEVGAQTAATLTQQTEQMKRIGNELDSVHFSLKKASQMVKEIGRQVATDKCIMAFLFLIVCGVIAIIVVKIVNPHNKNIRDIPGLAPPAMNRKLXHRRCRTLSVVNGCLPQHSATQRVRVLL

SEQ ID NO: 236115 - protein, 107 aa, Zea mays
  Clone ID: MRT4577_14691C.1.pep
ILREFDTLHTSNITTILASSLTDLHTTFAHFLGTSAYVSDAIATSAALCLLTYFPTILIRESKSKIFVRVSTATTTPPPTSTNHTTEATATTTEAVDDTQTPTVTDY

SEQ ID NO: 236116 - protein, 218 aa, Zea mays
  Clone ID: MRT4577_146920C.1.pep
EHGRPLYGDVFGVLQQDEPNYDNLFSSTLQDEPVDRSKHWGDLEEEEEEEEEEEEEEEPMEDEEMEDGIQSVDTISSTPTGVETPDVIDLRKLQRKETDKQAERPLYQVLEQKEERIAPGTLYGSSHTYVLGTQDKSSAPKRVDLLKNQKSDKVDVTIQPEELEAMDDVLAAKYEEAREEEKLRNQKEDFSDMVAENAHKRKRKQEKEGKSKKKEFKF

SEQ ID NO: 236117 - protein, 37 aa, Zea mays
  Clone ID: MRT4577_146921C.1.pep
HHIHKLWGSHIIHYIHQPLWIRGYANLLQRNMFIPAY

SEQ ID NO: 236118 - protein, 80 aa, Zea mays
  Clone ID: MRT4577_146922C.1.pep
IKLRAIHDKLRPPLRSPPSYSDPKERTQGELKMKEGGRLNRPDQRDLGELSAVSPLENPAGGAVAGAQIKMALKKGRVGG

SEQ ID NO: 236119 - protein, 114 aa, Zea mays
  Clone ID: MRT4577_146923C.1.pep
NAAQGGAHSPSSLWKRWEGRPGRAWLGNPPVGQRGRCPKAAKVGITQGFRRPNGVKRRPVNCPPPPKSPQRAPQREAPPAAQCYGYFQIFALSCFFVFRFYFFFFFFFFFFFFF

SEQ ID NO: 236120 - protein, 312 aa, Zea mays
  Clone ID: MRT4577_146924C.1.pep
MLPLSRCSSPTSSNPGPGPSLGFLLHVHTMICYVLWLAACCLLLLLYSVRFRSRISHGNGPRTYPLIGCLVSFYQNRWRLLDWYTEMLAASPTQTIVVDRLGARRTVVTANPVNVEHILKGNFGNYPKGKPFTDILGDLLGTGIFNVDGELWYAQRKLVSHEFSARALRDLEFAVLEDEARERLVPALGLAAARGDAVDMQDLLRRFSFDVICRVSLGVDPGCLDPALPAPRLAAAFDAAAGIIARRGAAPVAAVWKAKRALDVGSERQLREEIAVIHEAVMDLIHIRKKECGLRVNSGDGRRSDLLSRMIE

SEQ ID NO: 236121 - protein, 88 aa, Zea mays
  unsure (1)..(88): unsure at all Xaa locations
  Clone ID: MRT4577_146925C.1.pep
MAPKADNMPSDLKVLKEEPSEKAAPAEKAPAGKKPKAEKRIPAVKSDGKEGGDKKGRKNANKSVETYKIYIFKXVLNKVHPXDIGIFL

SEQ ID NO: 236122 - protein, 69 aa, Zea mays
  Clone ID: MRT4577_146926C.1.pep
TALQQNHETDPDHFVHLPGLGATNNASKPSKLENSALIFHGGTRSRDILGHYFDSKTFQDPILLSNSKS

SEQ ID NO: 236123 - protein, 82 aa, Zea mays
  Clone ID: MRT4577_146927C.1.pep
RACSVQVDCRASLNRVHWQSSVCDAVVRGRPQHAPEDLSRGCCFCLAQWRWSTTLWLDRDLWASISGTTRVAGGTTECLKVE

SEQ ID NO: 236124 - protein, 80 aa, Zea mays
  Clone ID: MRT4577_146928C.1.pep
LGGLLPPQEGGLSGAGPGCPRPGPFCQGPFDGRPPPRFPPSLFPPAPPLFVGVLGFGSLGRTGFRGRFWAFTFKRFFWVN

SEQ ID NO: 236125 - protein, 328 aa, Zea mays
  unsure (1)..(328): unsure at all Xaa locations
  Clone ID: MRT4577_146929C.1.pep
GVVAYNAMVAGYCRAGQLESARRLAAAVPVPPNAYTYFPVVRALCARGRIADALAVLDEMPRRGCAPIPPMYHVILEAACRGGGFRSAVRVLEDLHARGCALDVGNCNLVLNAICDQGSVDEALHLLRDLPSFGCEPDVVSYNAVLKGLCMAKRWGCVQELMEEMVRMACPPNIVTFNTLISYLCRNGLFERVHEVLAQMVEHGCTPDIRMYATIIDGICKEGHLEVAHEILNRMPSYGLKPNVVCYNTLLKGLCSAERWEETEEXLAEMFDKDCPLDDVTFNILGDFFCQKGLVDRXVIELLEQMLEHGCMPXDVITYTTXVINGLL

SEQ ID NO: 236126 - protein, 111 aa, Zea mays
  Clone ID: MRT4577_14692C.1.pep
LGAGLTVKTETEEGLPAAAPLCLSASHPPVSGGGCPCPCLAPSTPENWGVSPASSNSNHAASYLPFEDAEWRGHAGLQEVVSASAPPPPAVDSLDDLLLLVDIDDIASLFD

SEQ ID NO: 236127 - protein, 514 aa, Zea mays
  Clone ID: MRT4577_146930C.1.pep
MGADDEAAAAMEAQEREAEIEKAMRARVADFKKQADSLTLEGVRRALEKDLDLKIYSLDAHKKFIKQCVDKVFAESADENANDDALEDSDAKDDHLSKEGTDVAKPMPVSNKMSSNADVVTSSKTGKDPEEEKNQTSSSDISEDMIKEAIEKRASYFRKNSDTLTLQGVRRTLEEDLKLQKKALDAYKNFITTGLDKILQEPANGTKKKSKNGSSKDTDKTSKGSKRVHEESDSSELNDRKSDMDNSDVDSRPRKKRAEKAKVTKKQKIVTNERKLSTPKAKKVAKQDLGSSTEEQGGNSAEEDNSHSSAEEDNKRKRQQTPAYGKQAEHLKSIIKSCGMTIPPTVYRRVKQAAENKREACLIKELQDILEKEGLSKNPSEKEIKAVKKRKERAKELEGIDMSNIITSSRRRSTSSFIPLPPPPQIEVDSDDDEDDDDDAEGNDAEGDDDDAEGDDEDDAEGDDDDAEGDDAEGDDAEDDDEVDEENVKGRDEGDNDTAEAANGSADDAEKENN

SEQ ID NO: 236128 - protein, 79 aa, Zea mays
  Clone ID: MRT4577_146931C.1.pep
SFNGVPRPNKIVFDTFTSGIQYGSQSLFLRVSRLFLLFGLVLLPVLSMLRASMLVVVVCQMESISVLIPGIVRAFLSEL

SEQ ID NO: 236129 - protein, 204 aa, Zea mays
  unsure (1)..(204): unsure at all Xaa locations
  Clone ID: MRT4577_146932C.1.pep
MHIFAESLTGKTITLQVXEASDTVDNVKADIWDKEGVPADLYRVIFAGKHLEDGLTLADYNIENDSALRLVLRLKGGMHIFDETLPGQTINLDGESSDIVYNFPAFIQDNEGISSDHHWFVFAGXHIEDGRTLADYNIPNESTLHLTMRLMGCMPIFXNTLTGYTITLEVESSDTIDNGKDKIQDYEGIPPDQQRLDFCRSYSS

SEQ ID NO: 236130 - protein, 65 aa, Zea mays
  Clone ID: MRT4577_146933C.1.pep
LDWMVITQGYTGAFVDFSGRRLRMVTPAAARTIQHRRACVKHVVLVAQRPHRRYNDNVEVLPEVV

SEQ ID NO: 236131 - protein, 100 aa, Zea mays
  unsure (1)..(100): unsure at all Xaa locations
  Clone ID: MRT4577_146934C.1.pep
MAAASSATSVHDFTVKDSSGKDVDLSVYRGKVLLIVNVASQCGLTNSNYTQQAQLYDKYKNQGFEILAFPWNQVGGXEPGTNEEIAQCAWTRFKAEYPIF

SEQ ID NO: 236132 - protein, 65 aa, Zea mays
  unsure (1)..(65): unsure at all Xaa locations
  Clone ID: MRT4577_146935C.1.pep
CRTENVCPCQRSLRRAKFKXPGRQRXLERRQWGFTKFSRADXLQYKSEERIVPHGVNAQLLGKHG

SEQ ID NO: 236133 - protein, 110 aa, Zea mays
  Clone ID: MRT4577_146936C.1.pep
YIYAGFEILAFPCNQFGGQEPGTNEEIAQFACTRFKADYPIFDKVDVNGNNAAPIYKFLKSSKGGLFGDSIKWNFSKFLVDKEGRVVDRYAPTTSPLSIEKDIKKLLGSS

SEQ ID NO: 236134 - protein, 68 aa, Zea mays
  Clone ID: MRT4577_146937C.1.pep
YTTCLPSSCTTSSRAQTIDRAVLVIYPTNNLPYGSTCLKSTNLLRSLWRLSASTLLYHSSPLRCSPTL

SEQ ID NO: 236135 - protein, 136 aa, Zea mays
  unsure (1)..(136): unsure at all Xaa locations
  Clone ID: MRT4577_146938C.1.pep
MGLPEIKQGLLQVAETLDILHSNADVAHGAISXPETGLYNWLNRIWXLRGCGAALSGDQATGRLTLAQLSHHSDYDAEDTAXPLQPRLNYTAPEXGRSGDSKRGSAXDMWSYACLGDHLGDRRPRADGASTDQMHM

SEQ ID NO: 236136 - protein, 138 aa, Zea mays
  Clone ID: MRT4577_146939C.1.pep
GRAGKKKKKEPAHALGPKQRRAGDEYLRRSFPAKDLTGEGEGFINEEEIIHEETIDGRRSPPTGDGPKMDDRRQRGWFDSRRHRMILTYAISRGTKDESLHCRPGSPNRIHHFVAFWREKMIRGFLREDGIRRGGPWS

SEQ ID NO: 236137 - protein, 51 aa, Zea mays
  Clone ID: MRT4577_14693C.1.pep
KCMQLHSSTVSLSLLVLSHNPYGRRVSSGSCASPCPSFEIPSTTLEAGRVA

SEQ ID NO: 236138 - protein, 108 aa, Zea mays
  unsure (1)..(108): unsure at all Xaa locations
  Clone ID: MRT4577_146940C.1.pep
MANIKMVAKGDEKIRIPRTLTQPVDRRCKRLKTACHPFLITPYMTYMLPDNTGHGQSEHWDIMLTDSXRLVLCKKPWTXVFSILNREEIPMGDAGAEGVVDSTHDLTD

SEQ ID NO: 236139 - protein, 134 aa, Zea mays
  unsure (1)..(134): unsure at all Xaa locations
  Clone ID: MRT4577_146941C.1.pep
MDDVTVLNDALNAMYKHQKIPKRDPMIHAVDQHIINLLTVLQRHGYIEHVDHLHEHPIGRYSSFHTQQVSACKKLRPYIRASPFISTVTDMXRTARLLPARHPLYILTLTSSSIMDHDEAHTNMALGNVLGFVY

SEQ ID NO: 236140 - protein, 73 aa, Zea mays
  Clone ID: MRT4577_146942C.1.pep
DTILVAVTRCVHSQLELHPADELELATKGTGGAGQAPLGVLTVYPATSESTIGEVGHAPADERARLVVGAAPT

SEQ ID NO: 236141 - protein, 100 aa, Zea mays
  unsure (1)..(100): unsure at all Xaa locations
  Clone ID: MRT4577_146943C.1.pep
MTEMFVVLALLALAASATSTHTIGGCXCHPPXTIHLPPPAHMPPPFHLPPPEHLPPPVQLAATVQLPPTVHVPPPFHLPPTPXHYPTQPPRPHPHSQTHP

SEQ ID NO: 236142 - protein, 110 aa, Zea mays
  unsure (1)..(110): unsure at all Xaa locations
  Clone ID: MRT4577_146944C.1.pep
TRVPNGPKRAPRAAGWGPKFLLCHTRRPLPAGGGSSKVWAGKKESPGCRWYERNAPPPPRGGAGLPGRKQAPKKNRSKEKNKQRKXKKKKKKKKKKKKKVKKKKKKKKKE

SEQ ID NO: 236143 - protein, 82 aa, Zea mays
  Clone ID: MRT4577_146945C.1.pep
IHKGPGHFFIIWPPPTGGGVLTEKKTPFQNLEGSPFPSFGRTFFFSPNWGKRPSERGLRVLLTLKEQNHFWNKLPLLGVSFS

SEQ ID NO: 236144 - protein, 74 aa, Zea mays
  Clone ID: MRT4577_146946C.1.pep
RLDSHLYEYFSESNSRLSDSYSLRIRLGVKVLRSKNSDLLRCAFGTRFSDALLRLFYDVYEFTTHVFCYCCSAL

SEQ ID NO: 236145 - protein, 43 aa, Zea mays
  Clone ID: MRT4577_146947C.1.pep
RFFFLERRHLCPFPHRVILCPPMVKPGFPSGTGLVFPRRFPII

SEQ ID NO: 236146 - protein, 76 aa, Zea mays
  Clone ID: MRT4577_146948C.1.pep
MVGFGHHGHDSQNPPVHGGVHHPTFKIFCKADEGYCLTVRDGNVVLAPANPRDEHQHWYKDMRLSTQVKDEEGNPA

SEQ ID NO: 236147 - protein, 44 aa, Zea mays
  Clone ID: MRT4577_146949C.1.pep
PHPRLWDFYGIFPPQSGKTLWREETPLAAQTQGFFFSLKGTGPF

SEQ ID NO: 236148 - protein, 48 aa, Zea mays
  Clone ID: MRT4577_14694C.1.pep
GGRSSGCTLCSSCKRNKCFHILTLITKLMADYYKVPDRKNFNVLKINS

SEQ ID NO: 236149 - protein, 76 aa, Zea mays
  Clone ID: MRT4577_146950C.1.pep
NWDGDFFRVARAPFFALFLAATFFTPKGLFALPCQIVFYMTRGQPPKKFSQPFPLKKGFPPWGERGIPRGTPGAFE

SEQ ID NO: 236150 - protein, 50 aa, Zea mays
  Clone ID: MRT4577_146951C.1.pep
SESIAHLLHFSVVNAYEECRRPLLVHVLICLLVGRERAKICSSRASNLIL

SEQ ID NO: 236151 - protein, 48 aa, Zea mays
  Clone ID: MRT4577_146952C.1.pep
IIPIDHIGFEFEVGVLWVRLTQGADQRKQCCQFPYEFKNVDVLRPKCF

SEQ ID NO: 236152 - protein, 24 aa, Zea mays
  Clone ID: MRT4577_146953C.1.pep
GYYTSMVVLKPTATRTLTPNENHT

SEQ ID NO: 236153 - protein, 458 aa, Zea mays
  unsure (1)..(458): unsure at all Xaa locations
  Clone ID: MRT4577_146954C.1.pep
MAPSPRCRPSTTRRRRSAFPKTPAFDYTPPPYNGPRAEFIFRKRAQFLSLSLFHFYHRPLDIVEGKMQYLFDEDGRRYLDAFGGIATVCCGHCHPDVVEAIVNQAKRIQHSTVLYLNHAIADFAEALASKMPGDLKVVFFTNSGTEANELALMIARLYTGCNDIISLRNGYHGNAAGTMGATAQSNWKFNVVQTGVHHALNPDPFRGAFGSDGEKYARDVQEIIEFGTTGRVGGFISEAIQGVGGIVELAPGYLPVAYSMVRKAGGLCIADEVQAGVARTGSHFWGFEGHGVIPDIVTMAKGIGNGIPIGAVVTTPEIAQVLTRRSYFNTFGGNPVSTAGGHAVLKVLEKEKLQENAFVVGSYLKEQLNNLKDKHEIIGDVRGKGFLLGVELVTDHEKKTPAKAEISRVMNHMKDMGVLVGKGGFYGNVFRITPPLCFXTKEDSDFFIEVMDIALSKL

SEQ ID NO: 236154 - protein, 68 aa, Zea mays
  Clone ID: MRT4577_146955C.1.pep
VRPRVRGSVGGRVGGDGVTDTVPVDEGDALPHAILRLDLAGRDLTDCLLKILTGRGYSFTAGGGRVIV

SEQ ID NO: 236155 - protein, 69 aa, Zea mays
  Clone ID: MRT4577_146956C.1.pep
CICSPVNRSHRRHPHPSNVCLGGLLNGYNTGASNNLQPSNCAKYPLTGSRGVSNVVIINNGPCATTFRR

SEQ ID NO: 236156 - protein, 218 aa, Zea mays
  unsure (1)..(218): unsure at all Xaa locations
  Clone ID: MRT4577_146957C.1.pep
MQRLASSRRLLQAALAPARANSSLSAADEVQAGVARTGSHFWGFEGHGVIPDIVTMAKGIGNGIPIGAVVTTPEIAQVLTRRSYFNTFGGNPVSTAGGHAVLKVLEKEKLQENAFVVGSYLKEQLNNLKDKHEIIGDVRGKGFLLGVELVTDHEKKTPAKAEISRVMNHMKDMGVLVGXKGGFYGNVFRITPPLCFTKRIPDFVXFFIEVMDIALSKL

SEQ ID NO: 236157 - protein, 632 aa, Zea mays
  unsure (1)..(632): unsure at all Xaa locations
  Clone ID: MRT4577_146958C.1.pep
MQRLASSRRLLQAALAPARANSSLSAAAVAAPAPANGAFPKMPAFDYTPPPYDGPRAEEIFRKRAQFLSPSLFHFYDRPLNIVEGKMQYLFDEDGRRYLDAFGGIATVCCGHCHPDVVEAIVNQAKRIQHSTVLYLNHAIADFAEALASKMPGDLKVVFFTNSGTEANELALMIARLYTGCNDIISLRNGYHGNAAGTMGATAQSNWKFNVVQTGVHHALNPDPFRGAFGSDGEKYARDVQEIIEFGTTGRVGGFISEAIQXPISKRRLGISITLKQKPNFSPEHGMFFSXGVGGIVELAPGYLPVAYSMVRKAGGLCIADEVQAGVARTGSHFWGFEGHGVIPDIVTMAKVKLETRSXCRLLYCHDMTSWXIIRMRIRWCIESATHMFSLIXGIGNGIPIGAVVTTPEIAQVLTRRSYFNTFGGNPVSTAGGHAVLKVLEKEKLQENAFVVGSYLKEQLNNLKDKHEXSREMKKRSNESCHCCSPLTFYLSCSAVIGDVRGKGFLLGVELVTDHEKKTPAKAEISRVMNHMKXTCCALTTFSRGEXDVELSLSLSLCDLSALLLQXMGVLVGKGGFYGNVFRITPPLCFTKEDSGKTCYLLKHSSLNSLTSDTDFSGEMTSCLLLQTSSLR

SEQ ID NO: 236158 - protein, 72 aa, Zea mays
  Clone ID: MRT4577_146959C.1.pep
IRSDRVHGRVNVLPMWVRRRETSSLGDGLTYLRVTKDSGDKGVEQAPTNGVYARSLPEWTFSFRWFCRAFIS

SEQ ID NO: 236159 - protein, 56 aa, Zea mays
  Clone ID: MRT4577_14695C.1.pep
AVVQPCVLIDCQVLQCLEFSPRCHPEDIQHKYHPSAAEFVRIMPSVIKFVQPQHHK

SEQ ID NO: 236160 - protein, 120 aa, Zea mays
  Clone ID: MRT4577_146960C.1.pep
TISRIMSFLLDDETLSQLCCENGLSHRPAQLVTGQGGMPHANMGRQGLTAAADEPWDDSLVLPLASICCGNQIPYHRMCRSAPSLCNSQSSLTGLPLHDAITATTIRSGERKLSGSSTRP

SEQ ID NO: 236161 - protein, 64 aa, Zea mays
  Clone ID: MRT4577_146961C.1.pep
MANHILRAFLVLLVAKVCIVMAMVATAVQGRPGPGPTALESVPACCFYHPECCYDAAGPPADLG

SEQ ID NO: 236162 - protein, 61 aa, Zea mays
  Clone ID: MRT4577_146962C.1.pep
PGGVGYGCLQHRRRKQSVVFVHNAQDCLGYTFHQACLGVSPIVSKQVTCCTHSPPRVRSTV

SEQ ID NO: 236163 - protein, 111 aa, Zea mays
  unsure (1)..(111): unsure at all Xaa locations
  Clone ID: MRT4577_146963C.1.pep
PXLRXFXLXLFXLXGLAVLLRLPLRXGXXXLXXXXWVGASXXWRRGXVXGCXLXXSXPAVAAAGLXXXXFLVAGXGFVXGLVXXLXXGLXPGVGRRRSPGCRRGGARXRRG

SEQ ID NO: 236164 - protein, 110 aa, Zea mays
  Clone ID: MRT4577_146964C.1.pep
RYLHHIPKASVDPSSLRYYTAISAGERWEEKSSSWRRKCYFAELDLFVHEYLLVAPTEKDKLRHRRSSIAPSFHRPNDHIRSRRLVPSWPHSLSFMNIKVKNQPRDMVDN

SEQ ID NO: 236165 - protein, 123 aa, Zea mays
  unsure (1)..(123): unsure at all Xaa locations
  Clone ID: MRT4577_146965C.1.pep
THREATFYKRRDCLFKKGGELSGLCDVNLLLVLSSTCGKLYHYLSATVPYVEDLVERYEGTTHTKGCTDIRQERRAQLAKAELTCELMEKELRVMTGDDGXQYTVPTVELLEHKLDAAVHKVR

SEQ ID NO: 236166 - protein, 389 aa, Zea mays
  unsure (1)..(389): unsure at all Xaa locations
  Clone ID: MRT4577_146966C.1.pep
FSSAYLKQEKLFSSRNRTEVSLGKKLKFTYLPEIEKIHKKKEKLLKKQQREAILLDSCLTVNGLTSGRSRRERKHVTYTFDDYERSINEAIKTIXKCIFCSQXPLIYEFINXEIYRKNENAVEVGPSPLCKGFYGETPEKLYYKAKTDEGKAETLHRSYRQRKRSQRYTKDYVEAISDIDLDFDSDDDIMGEAVYDEEYLRRRKRYKASLSENDDEFQLDQVANDGDDEVGTSLNVNEDTEDLQWYKRFPLLTPQGTKLKSIDEIQTGIRRSKRSTRSRINYRQLDTFGANTKYGKSEKCNASDPDASSDALNDTELSTSQDREEEDGVNKAQQQYTEKPIVPVKESRSVRRKFLVLNELVPIAGFDDASVLVKDKHVNNNGGKCSAAH

SEQ ID NO: 236167 - protein, 394 aa, Zea mays
  Clone ID: MRT4577_146967C.1.pep
MVPQMVLLLCCCLLAFPPHGPLVVEAFVGGYGVNYGRIANNIPSPDKVVELLRRAKIRNVKIYDSDHSVLDAFKGSGINLVIAIPNELVKDMAANTSRSMDWLNQNVQPYLPQTRIVGITVGNEVLGGQDQSLYQPLVDAVKNVYDGLKRLHLERKIELFTPHSEAVFATSYPPSACVFKEELMPYMKPLLDFFAMIGSPFYVNAYPFLAYISDPEHIDINYALFKPNKGIIDPNNSLHYDNMFDAQVDAAYAALHAAGYDNMEVRVAETGWASSGDQNEAGASSENARTYNFNLRKRLFLRTGTPLKPKRPVKAYIFALFNENQKPGAGSERHYGLFLPDGRISYDIGVSGLLPSSASSSVLSIKNVQAGGWILQHWATVLLCSFHFLRAIVT

SEQ ID NO: 236168 - protein, 51 aa, Zea mays
  Clone ID: MRT4577_146968C.1.pep
HQHLSYTYFNKDNPLTKDTTRKIHHIYIAPHKNLNFLLKTQHYISTPHNHD

SEQ ID NO: 236169 - protein, 72 aa, Zea mays
  Clone ID: MRT4577_146969C.1.pep
VRRVGQHHGLLLLLPDARGGGGGIARGLEYQQRRDLHRRIRAARVGSGRRRRRKGGELGPRGDGGGVARARA

SEQ ID NO: 236170 - protein, 45 aa, Zea mays
  Clone ID: MRT4577_14696C.1.pep
MAKRLLPSLNRVLGEKLGQSKKTVGGVLVPETSKQVPPPAFVKND

SEQ ID NO: 236171 - protein, 102 aa, Zea mays
  Clone ID: MRT4577_146970C.1.pep
CSQQKLGSCHLRLQFAGRLPVHETVSGQEVRPPDYVHYPLFSLPLLFNVDDQMSLVLFNCVFFIVHSNVSVHQSVFINFFTLFYSVYPMSYIPLLESLVIRK

SEQ ID NO: 236172 - protein, 75 aa, Zea mays
  unsure (1)..(75): unsure at all Xaa locations
  Clone ID: MRT4577_146971C.1.pep
FNANGPEIGFDCFLSASHFVVEDXSLLENXLKFRRFESSFPSQLPECVFQKMEFPFDVFKFAXTGHLTTAPFGLV

SEQ ID NO: 236173 - protein, 74 aa, Zea mays
  Clone ID: MRT4577_146972C.1.pep
GIGPGVYDIPSPRIPSAEEIPARINKMLAVLDPNILWVNPDCGLKTPKYPEVKPPLTNKVSPVKFIRTQLARAK

SEQ ID NO: 236174 - protein, 50 aa, Zea mays
  Clone ID: MRT4577_146973C.1.pep
MAVTLLQRCYKICLNNQDLILLRVHPIVTFSFFFFFFFFFLFFFFFFFFF

SEQ ID NO: 236175 - protein, 108 aa, Zea mays
  Clone ID: MRT4577_146974C.1.pep
DSVYGLSFSETAGASRSASKGTLYKLLALLCRTALVQTAMCVSSSPMMLLWCLRRFKFVSSRADKTSLFIFLSSQMLSDQVQNWTGSEGVEHELVKNWHMWSKTLRFL

SEQ ID NO: 236176 - protein, 125 aa, Zea mays
  unsure (1)..(125): unsure at all Xaa locations
  Clone ID: MRT4577_146975C.1.pep
TASFSSXGIEWKEXPRSNAFKVDLPVVKKVEVKVXEEYGYMLVIMXRLIKKNEDXDDKRLCVERSSGQIIKSFRLPSNVKVDQVKAGLENRVLTVTVSDVEENNPEVNAIEISGSASNSIRTWMK

SEQ ID NO: 236177 - protein, 101 aa, Zea mays
  Clone ID: MRT4577_146976C.1.pep
DGDGLLDAAEFARLVAGLHAGAAEEDRHRCLRQAFRMYSSDDDAAEGRGSSCITPDSLRRMLARLGAHQDVDDCRAMICRFDLDGDGVLSFHEFKVMMGAA

SEQ ID NO: 236178 - protein, 92 aa, Zea mays
  Clone ID: MRT4577_146977C.1.pep
LKVSSTSTNGRCSGTSGRSQLRIMINPISYSFLMFPPLRELLALSTCLGMFDIYSRRPTFKRVRRVVAILRLPAGRSQEASMDLLPLGKVYV

SEQ ID NO: 236179 - protein, 55 aa, Zea mays
  Clone ID: MRT4577_146978C.1.pep
TITTKTKKKGTRRSKSTSYSPLLTYKTPSYSNTFITLTLCTFQPLALIFPYLIPF

SEQ ID NO: 236180 - protein, 50 aa, Zea mays
  Clone ID: MRT4577_146979C.1.pep
SKGSSPCLESSLCAILVLMKSSFFPGFSSNLSAKKGLRVRIQHQKSSAFC

SEQ ID NO: 236181 - protein, 91 aa, Zea mays
  Clone ID: MRT4577_14697C.1.pep
RAFARATQRCACGVGAERVEKGLTRTASFSRRGPPVGEPVVRGGTKLRLQEEEVVGAGSEAPGGAARTRRAGPASRSCRVKNPSRPEWTRR

SEQ ID NO: 236182 - protein, 118 aa, Zea mays
  Clone ID: MRT4577_146980C.1.pep
DFYRVQYTSIYRCVNVHETISFILPCHVQRAVRVKFLLTTGYRPHLPCMLASCWKISPVCAVDTFCTAPPAVTTSPSSPAISVPSWYFSSPPFLAPLVGLAFLYCSSYSRFHSTVPHG

SEQ ID NO: 236183 - protein, 135 aa, Zea mays
  Clone ID: MRT4577_146981C.1.pep
ALYWTSREVLPCEFESRQRLSMTSSVSGSSKSPRKPPVSYRKWMDADNPVCCKCSGVMLELTSWTDSNPSRGFLRCQKGSEGCNLFQWEAEIARLRMQLEKITSDRQTENDFSCSVCWNLVFAHALVSTWGCGRQ

SEQ ID NO: 236184 - protein, 132 aa, Zea mays
  Clone ID: MRT4577_146982C.1.pep
RALCRRLRRLPPHRRRWLHRLPPLDATGPVHALSPLLDVKRSAALRVRIQRLSMTSSVSGSSKSPRKPPVSYRKWMDADNPVCCKCSGVMLELTSWTDSNPSRGFLRCQKGSEGCNLFQWVSPPPFRTLIKN

SEQ ID NO: 236185 - protein, 47 aa, Zea mays
  Clone ID: MRT4577_146983C.1.pep
ELEMQQLPQMLSADGYVALPSDATTRQPLKLSIGAITSILEYIMLSD

SEQ ID NO: 236186 - protein, 89 aa, Zea mays
  Clone ID: MRT4577_146984C.1.pep
RVCSIWGVFPKVEVPAFGKVRYELLFAKEVFVGSPDFLYAQGLVYLFGELFSMPNPKEVFQEMFVPGLGGAFPFDWAVKIGSLGNSCPL

SEQ ID NO: 236187 - protein, 62 aa, Zea mays
  Clone ID: MRT4577_146985C.1.pep
HHLYIYMYDMIVLSIIYMEPICAWIYRHEVYSSSSIVCLVKNHMISRDTTLSIVVCPTASMY

SEQ ID NO: 236188 - protein, 78 aa, Zea mays
  Clone ID: MRT4577_146986C.1.pep
AVSALETFFPLPLDVLLVLWFLIKYKLLVIQLLYLQQGRLYYTSPQMTKRCDVQGFCFFNPDSIDEGRVVLYYFCPFR

SEQ ID NO: 236189 - protein, 80 aa, Zea mays
  Clone ID: MRT4577_146987C.1.pep
RILCRQSVMSVLLTNGSMAASHIISSLSLLYSMPSRRRAAIRLPLYTSASIPALVSTTRSTDPRSVRVPSAQLICHSRAS

SEQ ID NO: 236190 - protein, 152 aa, Zea mays
  Clone ID: MRT4577_146988C.1.pep
MVKAVAVLTGSEGVKGTIFFTQEGEGPTTVTGSVTGLKEGLHGFHVHALGDTTNGCMSTGPHFNPAGHVHGAPEDEIRHAGDLGNVTAGVDGVASINITDCHIPLTGPNSIVGRAVVVHGDADDLGKGGHELSKSTGNAGARVACGIIGLQG

SEQ ID NO: 236191 - protein, 52 aa, Zea mays
  Clone ID: MRT4577_146989C.1.pep
VSCCGTWLILEMYSCIFFYYINRNIYSIYTLSVYKYMTLLNFLKKYMTTRLI

SEQ ID NO: 236192 - protein, 76 aa, Zea mays
  Clone ID: MRT4577_14698C.1.pep
SPSAGPRRTLNFLLHCGALHFFPPGLPSKLKISGRSLVPLKGTSKLGGKSDRVPTGLSWVPSLPAPGANAFGPARP

SEQ ID NO: 236193 - protein, 62 aa, Zea mays
  unsure (1)..(62): unsure at all Xaa locations
  Clone ID: MRT4577_146990C.1.pep
DEELGKLLGGVTIAHGGGLRNIYPGLLXKKTAEKASSGGSKVAKSPKKADKCPKKAYTDCPE

SEQ ID NO: 236194 - protein, 82 aa, Zea mays
  Clone ID: MRT4577_146991C.1.pep
LTPSDQQPYCKLQTPMVWSSSCHVMNSCRLLLGMFLCPESSKRARQPNTKWGGRQIQDPHFNSESSRHSSHSCIVCIPTLCT

SEQ ID NO: 236195 - protein, 201 aa, Zea mays
  Clone ID: MRT4577_146992C.1.pep
MAPDLSELAAAAPARGAYLAGVGVAVLLAASFLPVAESSCVRDNSLVRDISQMPQSSYGIEGLSHITVAGALNHGMKEVEVWLQTISPGQRTPIHRHSCEEVFTVLKGKGTLLMGSSSLKYPGQPQEIPFFQNTTFSIPVNDPHQVWNSDEHEDLQVLVIISRPPAKIFLYDDWSMPHTAAVLKFPFVWDEDCFEAAKDEL

SEQ ID NO: 236196 - protein, 54 aa, Zea mays
  Clone ID: MRT4577_146993C.1.pep
EKIELFSWGGIERLSSLRKCTFVMKIIEGEAVGWRYSIIFCFLEYCVKNTSIGC

SEQ ID NO: 236197 - protein, 92 aa, Zea mays
  Clone ID: MRT4577_146994C.1.pep
RGGFFFFFFFFFFFFFFFFFFFFFSKKKGPMFIHSTVRGQSTKKENIHILNNFGGNKLFPSGENRLHLKPSRPPYLVAEKFGEIKSPPAPGF

SEQ ID NO: 236198 - protein, 67 aa, Zea mays
  Clone ID: MRT4577_146995C.1.pep
QAKLFPLQEGSHCRLKHFWCLEYINSPKGFLAGFGVFQFREFRFSPVPKVYFFEGGTGAPVKTMEFP

SEQ ID NO: 236199 - protein, 154 aa, Zea mays
  unsure (1)..(154): unsure at all Xaa locations
  Clone ID: MRT4577_146996C.1.pep
MGGRGKEEEEQQQQHKEEEXXQGEXRXXXQQETAADEEAEXAXXRKNXGXAAGGGRXPXXSPXPEGNAXXTDPXTARXPRSTXDXERXGPEXQRKRAGXTRXXADAEAXXEAHXXDXXAAXDNPXDHXPXXPNXTNXXXXSQXEHGPRARHDPG

SEQ ID NO: 236200 - protein, 82 aa, Zea mays
  Clone ID: MRT4577_146997C.1.pep
ASTDTTVDMCRTQCALVRASVAEGLLLLTPSTTSSGHYKLRRCDVSHGTLPLLPEQNWRPTLLTLLKRSLEPLDGQHDRLTT

SEQ ID NO: 236201 - protein, 22 aa, Zea mays
  Clone ID: MRT4577_146998C.1.pep
LGVIQISGKLSYPAGVTPSPLQ

SEQ ID NO: 236202 - protein, 90 aa, Zea mays
  Clone ID: MRT4577_146999C.1.pep
RVEAELHEPTGRSGSLIVSACGFGFVPAEFGFLFHSRQWEVGTTLRAGHRGGVREPAGGVWFDESYSSNLVDEPIHIRNLVDEPIHISTN

SEQ ID NO: 236203 - protein, 79 aa, Zea mays
  Clone ID: MRT4577_14699C.1.pep
WFVIGCFGVGSLSLLVLAPSIVCRILFVCVSLFGSGRVVLVPVALLGFWILLVGCCFVGYICLVVCFGSSGFSSGSPWL

SEQ ID NO: 236204 - protein, 91 aa, Zea mays
  Clone ID: MRT4577_1469C.1.pep
ELRACVIMSWLVYKLMKGCELRSKCYAIRASIVCLIKIFPLSPRGSLISDAPLMPRYFVGISVRYIAERRPTTVPLIHSLNKLELLTPPVS

SEQ ID NO: 236205 - protein, 217 aa, Zea mays
  Clone ID: MRT4577_146C.1.pep
MYHPTRGGVRGGRDQFKWDDVKVDKHRENYLGHSVKAPVGRWQKGKDLLWYTRDKQSDSEDAMKEEIRRVKEEEEQAMREALGLAPKRSSRPKGNRLDKHEYAELIKRGSTAEDLGAGHAEAAQVQGLGLYKAPHNEEEPSSLSPDPPGTEPEQVDFAPATKQEDSEGDRRGKRRGEERRGDREKERRREKHYEGKERKRDKYESRHDSEDREKRHR

SEQ ID NO: 236206 - protein, 47 aa, Zea mays
  Clone ID: MRT4577_147000C.1.pep
LALWWFSLNRVFGFAVIQLCYERISCPWVLYGSPQPVIVICCCAFNG

SEQ ID NO: 236207 - protein, 279 aa, Zea mays
  unsure (1)..(279): unsure at all Xaa locations
  Clone ID: MRT4577_147001C.1.pep
MKFGKSLNNQIVETLPDWRDKFLSYKDLKKRLKQIGAGSGERRSKRQRVGDGRGGSSPPAMTPEEAGFVALLDAELDKFNAFFLEKEEDYVIRLKELQDRVVSAAEVGSAEELLRVRKEIVDFHGEMVLLENYSALNYTGLVKILKKYDKRTGALIRLPFIRNVMQEPFCATDVLYKLVKGCEEMLDQLLLPRNQQRPVPSDNGGEGDSDGXTTTSNDRRSQAPHRCPXGGGGAGDMELEEIEDMESMYMKSTVAALRALREIRSGSSTVSAFSLPPLR

SEQ ID NO: 236208 - protein, 201 aa, Zea mays
  unsure (1)..(201): unsure at all Xaa locations
  Clone ID: MRT4577_147002C.1.pep
MKFGKSLNNQIVETLPDWRDKFLSYKDLKKRLKQIGAGSGERRSKRQRVGDGRGGSSPPAMTPEEAGFVALLDAELDKFNAFFLEKEEDYVIRLKXLIDHTHSCRDPIPSPPRVVRSLAAARIEXGLIRVSVVGIERAQELQDRVVSAAEVGSAEELLRVRKEIVDFHGEMVLLENYSALNYTGETHLTRDERVFIFISKR

SEQ ID NO: 236209 - protein, 84 aa, Zea mays
  Clone ID: MRT4577_147003C.1.pep
DAWADAWSDFLSPILRPPTCAGEGLFRATAVTRGAAATARHGPVPLRASAVRQPLAQNACGSDRRRGRRGRSHVHVCVLLQYPA

SEQ ID NO: 236210 - protein, 43 aa, Zea mays
  Clone ID: MRT4577_147004C.1.pep
MELEEIEDMESMYMKSTVAALRALREIRSGSSTVSAFSLPPLR

SEQ ID NO: 236211 - protein, 104 aa, Zea mays
  Clone ID: MRT4577_147005C.1.pep
GTTQKGFFFFFFFPNRDFLPSKIFFGQLEAKPFLIFKCIIHGPKGGAQPMGFLLHFPPPGPLIFLKGGGGGNLFFFQMDPINTPKWLQPFFFFARGLFPIFLEN

SEQ ID NO: 236212 - protein, 71 aa, Zea mays
  unsure (1)..(71): unsure at all Xaa locations
  Clone ID: MRT4577_147006C.1.pep
MEGDHGKRGDQGKXATPHGQGGPPGRGRDPARRGGPRGRGGQPGEAGPEPEGEPPLPKGSRIKAGGKQGQR

SEQ ID NO: 236213 - protein, 176 aa, Zea mays
  Clone ID: MRT4577_147007C.1.pep
MTMPRRALLFAAVLLAASAAAVSGFHLAGDESGLVRGVLTAVRERAEAEAEDAARFAVAYHNRNQGAALEFTRVLKSKRQVVTGTLHDLILEAADAGKKSLYRAKVWVKPWEDFKSVVEFRLAGDSESEPEPSVASDEGSGQGVAKLSLEADIIHEEAHLHTIENDGLSSDFASSA

SEQ ID NO: 236214 - protein, 112 aa, Zea mays
  unsure (1)..(112): unsure at all Xaa locations
  Clone ID: MRT4577_147008C.1.pep
GPFAVCLSACLPQSSLRLPGGPLPTTDRRVKEAFXLFDKDGTAXLTTKELGTVMRSLGQNPTXAXLXDMGDEVAAAGXGTVDFPALLALVARVMAVAASGEELLVAFRVSRR

SEQ ID NO: 236215 - protein, 39 aa, Zea mays
  Clone ID: MRT4577_147009C.1.pep
ETKQHQRRSKARLQPLVHVIHERTRTCVEYISCGEKEQN

SEQ ID NO: 236216 - protein, 65 aa, Zea mays
  unsure (1)..(65): unsure at all Xaa locations
  Clone ID: MRT4577_14700C.1.pep
NDHGPPLLSPIPLWFPEFFFPPLLGYMSFLSIFYNFKHNMIHLYIVVHPLLPPNVNALEHPXXXI

SEQ ID NO: 236217 - protein, 36 aa, Zea mays
  unsure (1)..(36): unsure at all Xaa locations
  Clone ID: MRT4577_147010C.1.pep
KECPNSECGPGVFMSNPFGRHXCGKFGLTYVDNQKA

SEQ ID NO: 236218 - protein, 76 aa, Zea mays
  unsure (1)..(76): unsure at all Xaa locations
  Clone ID: MRT4577_147011C.1.pep
DAYSVIQTPPPMPPPPPPPAPXXPPPPPEPAPAPPPXPPPAPPPXQPPTAPPRPEAXPPPAPPPAPPPYPPPAPPP

SEQ ID NO: 236219 - protein, 137 aa, Zea mays
  Clone ID: MRT4577_147012C.1.pep
MAPKAEKKPAEKKPAEEKAEKKPRAEKRVPSKEGGEKKGKKKAKKSVETYKIYIFKVLKQVHPDIGISSKAMSIMNSFINDIFEKLAAEAAKLARYNKKPTITSREIQTSVRLVLPGELAKHAVSEGTKAVTKFTSS

SEQ ID NO: 236220 - protein, 138 aa, Zea mays
  unsure (1)..(138): unsure at all Xaa locations
  Clone ID: MRT4577_147013C.1.pep
MAPKAEKKPAEKKPAEEKAEKKPRAEKRVPSKEGGEKKGKKKAKKSVETYKIYIFKVLKQVHPDIGISSKAMSIMNSFINDIXEKLAAEAAKLXARYNKKPTITSREIQTSVRLVLPGELAKHAVSEGTKAVTKFTSS

SEQ ID NO: 236221 - protein, 29 aa, Zea mays
  Clone ID: MRT4577_147014C.1.pep
AAAAVKESIQTNCSVRGLPSRTALRCCLN

SEQ ID NO: 236222 - protein, 137 aa, Zea mays; identical to SEQ ID NO: 236219
  Clone ID: MRT4577_147015C.1.pep

SEQ ID NO: 236223 - protein, 137 aa, Zea mays; identical to SEQ ID NO: 236219
  Clone ID: MRT4577_147016C.1.pep

SEQ ID NO: 236224 - protein, 169 aa, Zea mays
  unsure (1)..(169): unsure at all Xaa locations
  Clone ID: MRT4577_147017C.1.pep
MGRRCRVPLIRRRTSLVHGRPLPAQRLQHLRQRYSRPRSCSIARRRGQEGGDGAHSQPRRRXRTAXRPRTVRTXRSKMQRKNGXRAPXQERGGGRGCGGRRLRRLCLAGARREEEGPLRGRXEACGDXAPLLRLIDPPASSYLRXATRTRESDIEHPPWCARRPMYALE

SEQ ID NO: 236225 - protein, 137 aa, Zea mays; identical to SEQ ID NO: 236219
  Clone ID: MRT4577_147018C.1.pep

SEQ ID NO: 236226 - protein, 74 aa, Zea mays
  Clone ID: MRT4577_147019C.1.pep
CQLHSRCQPWPDCVRNTCTLHQAGRYNNTSLLFYKRRNDIPTRRAHAIFTECQESYYGPSCHRTCRVGKPVLMR

SEQ ID NO: 236227 - protein, 281 aa, Zea mays
  unsure (1)..(281): unsure at all Xaa locations
  Clone ID: MRT4577_14701C.1.pep
LGTSRPAGYVVSCXLYGVHKTSKDSRERGLYENILNLMLTYPALRIAYIDEKEVQLRNGKIEKQYYSVLVKGDDEEIYRIRLPGKPTEVGEGKPNNQNHAIIFTRGEALQAIDMNQDNYLEEAFKMRNLLEEFLLTHGKSEPTILGVREHIXTGSVSSLAWFMSSQETSFVTIGQRVLANPLKVRFHYGHPDVFDRLFHLTRGGISKASKIINLSEDXICRXAVLTVYVFLYGRLYXLGLSGLEKSILQDPNIQNIKPFXENALAXSSVFQLGMXLVLPWM

SEQ ID NO: 236228 - protein, 143 aa, Zea mays
  unsure (1)..(143): unsure at all Xaa locations
  Clone ID: MRT4577_147021C.1.pep
KKLGGGGGKKTAGAQGXXGAQGXTPPXTGGAGKPAXXGAGSFFFAXXESXVWVGEIFSFXXGXXTGXGASGGEXGPPRGXGRTDTGAAGAGAPGGQREKDGDAGATGXKXTAPKPKAAKKRAPRARGKEGHDTDQPQRDANTR

SEQ ID NO: 236229 - protein, 205 aa, Zea mays
  Clone ID: MRT4577_147022C.1.pep
LQNSGLLRCAPEIFEQSGVASLFSDIGLSPHSTSILMSTLNALLILPCITAAMLLMDVCGRRVLVLATTPVLILSLSVMSMSTLVNMGPFESAVLFHFALTICFWSYVIGLGPIPNILCSEIFPTKARATCASFCSLSFWFGGLLSAYCFPVMLSTIGLGGACGIYALVCCAPLFLVYYRIPETKMLNLELIAELFKLSRQEHVQ

SEQ ID NO: 236230 - protein, 65 aa, Zea mays
  Clone ID: MRT4577_147023C.1.pep
MELHIPTAIHNLLRSDTVTDLVAVMSLTMIEFEVLERVMRLVFPSDRLRGVRRRVEPVEPRCSGC

SEQ ID NO: 236231 - protein, 68 aa, Zea mays
  Clone ID: MRT4577_147024C.1.pep
QDPLQRTCHCKFHRSLWISAYSSPHHAHVGFDRRARDTSYGGVKTLSHEAVVAEMTGRRFICNMVVSL

SEQ ID NO: 236232 - protein, 152 aa, Zea mays
  unsure (1)..(152): unsure at all Xaa locations
  Clone ID: MRT4577_147025C.1.pep
MADVDAEPEVADAAPNNRTLREYSYRGAELHALLDCPHTTLAQIFAARARRRSMRDLKRKPMTLINRTAHRTNIDAPXGEKPEPVDTHLRNLIIVPDMIGSIVGVYYGQTFNQVEIKTEMIVHYLAEFSISYKPVKHVRPGIGATXTSRFIP

SEQ ID NO: 236233 - protein, 80 aa, Zea mays
  Clone ID: MRT4577_147026C.1.pep
CTFFGRICYTQRFRDSEHSSRSSPVKMKNWIYGIHGLQTIDVAILWLNQFLLLVQAKICQPEELVCAHPSLSEEKEYHRK

SEQ ID NO: 236234 - protein, 368 aa, Zea mays
  unsure (1)..(368): unsure at all Xaa locations
  Clone ID: MRT4577_147027C.1.pep
SGADARDNAAQEGGGGRXSGAGAGAGVGRPRLFAMPRLLVGLEAPRCGAPDCDSPMTARSPTSPLDLRPFASLLRSPRSPRTRSWDSHRLGLGGLVDDTLAEPVACARSRLLGLGPQARQPXSCRNASPSPWPPSRGTAPTXSSELGNVGTAAGCKPLPCSRSYGDVKSGPEVTVPGGAPPGASSHPADVGKFPAPGSLPVSIGGPRWYIGSVSATEVEQSEDYTCIIAHGPNPKTTRIFGDCILEPCTPSVSDGDGMDAMEVKEGAESYWLVKCFDASEPGEFLDSCISCXKKLDGNDPCVYRGVRAFCRGNWRNQEVLAEQEDNIPAVSFSSAGSSSSFNDEVVMAEMVVVAAPVDVHYPESGKPG

SEQ ID NO: 236235 - protein, 558 aa, Zea mays
  Clone ID: MRT4577_147028C.1.pep
PRVRLNIAECCLLPCPSLKRTDDSTAIIWRDEGLDDYPVNRMSLKELRSQVITVAHALDAIFEKGDPIAIDMPMTCNAVIIYLAIILGGFVVVSIADSFAPQEIGSRMGVSKAKAIFTQDFIVRGGKKVPLYSRVIQGTSSKAVVIPAIGDSLGITLRDGDMSWKDFLSHAAGRSSSYSPVYQSVDALTNILFSSGTTGEPKAIPWTQLSPIRCASDTWAHLDVRPCDIGCWPTNLGWVMGPIIIYSCFLTGATLALYHGSPLGRDFCKFVQDAGVTVLGSVPSLVKSWKAGNCAEGLDWTKIRVLGTTGEASDIDDNLWLTSRASYKPIVECCGGTELASSYIQGSLLRPQAFGAFSGASMSTGFVILDEQGTPYPDDIPCSGEVGLFPLYFGATDRLLNADHDKVYFDGMPIYKGRQLRRHGDIIQRTVGGYYIVQGRADDTMNLGGIKTSSVEIERVCNRADECLLETAAVSIKPSGGGPEHLAILAVLKDRSAQYDVNLLKRKFQTAIQKNLNPLFKVSYVKVVAEFPRTASNKLLRRVLRDQLAQELSNRSKL

SEQ ID NO: 236236 - protein, 76 aa, Zea mays
  unsure (1)..(76): unsure at all Xaa locations
  Clone ID: MRT4577_147029C.1.pep
RRGGLVRYEEECRPPVFSPSTRDKASSGVWRAAHCTNVQRSRVRDSVGTGKSHQHVGKERRGXXMSXXRRGVEPGY

SEQ ID NO: 236237 - protein, 71 aa, Zea mays
  unsure (1)..(71): unsure at all Xaa locations
  Clone ID: MRT4577_14702C.1.pep
RKERKLFPPLPXNRDARHIIHFVVALHGTQAGKFPHLLAHHQGNPLSEGLLPRMWQIHLYKPISHPLAPQP

SEQ ID NO: 236238 - protein, 256 aa, Zea mays
  Clone ID: MRT4577_147030C.1.pep
MEVAATSAAGYGFKADDDVDSLRATELRLGLPGTEEEEADEGHNKAPPPPPSTPRGMKREEAAAAAAEAEEEEPRQAQKVAAPPSTPRGKKRDGVSGVTDPAPPAAKAQVVGWPPVRSYRKSCFQQQQAAAGAKGKPAAADEGAPGPAGGGVFVKVSMDGAPYLRKVDLGTCGGYRQLREALEAMFLCFSGPGSGSGDASGGGSPSDFAVTYEDKDGDLMLVGDVPFGMFIGTCKRLRIMKGTEARLGLGSAKNND

SEQ ID NO: 236239 - protein, 240 aa, Zea mays
  Clone ID: MRT4577_147031C.1.pep
MEVAAAASYSYYGLEAADDDVDNLRATELRLGLPGTEAAAAAAEAEEEEPRQAQKVAPPPSTPRGKKRDGVSGVTDPAPPAAKAQVVGWPPVRSYRKSCFQQQQQAAAASAKGKPAAAAPALAKGAPGPAGGGVFVKVSMDGAPYLRKVDLGTCGGYRQLREALEAMFLCFSGPGSGSGDASGGGGGSPSDFAVTYEDKDGDLMLVGDVPFSMFIGTCKRLRIMKGSEARLGLGSAKNND

SEQ ID NO: 236240 - protein, 80 aa, Zea mays
  unsure (1)..(80): unsure at all Xaa locations
  Clone ID: MRT4577_147032C.1.pep
KAVKGLGRQDRRRWKLSHLTXRLILHSPEEAGQTEEPHPLPPPYLSSSSHLCHQNTHRGVRGSAKKGKKKRKKEATGDEG

SEQ ID NO: 236241 - protein, 118 aa, Zea mays
  Clone ID: MRT4577_147033C.1.pep
SFSISLHLRPLVPIQASSFIFSLMADEEGMVQHKPILPHASDAQQSPAHACTSRRVRGSRSGLHNGRRLPLPQSLFLADPRPNLASDPFMILSRLQVPMNMLLADAPLLADNARGEGT

SEQ ID NO: 236242 - protein, 90 aa, Zea mays
  Clone ID: MRT4577_147034C.1.pep
MAPTRVLHLIVLVLAAAVAADAATITVVNRCSYTVWPGALPGGGARLDPGKSWQLNMPAGTAGARERPRTGCTFDGSGRGRCITGDCGGA

SEQ ID NO: 236243 - protein, 88 aa, Zea mays
  unsure (1)..(88): unsure at all Xaa locations
  Clone ID: MRT4577_147035C.1.pep
FERAERAXINLITNPSILRILRTAASQPHGQNQDRDQWDRQDRKAGGQGGPAFFLRGGPSRERPLNKNRPHDLNVQERHLSTDRRKHQ

SEQ ID NO: 236244 - protein, 394 aa, Zea mays
  Clone ID: MRT4577_147036C.1.pep
LIQDLNSLKSRNRAPNPFQTQSPISDPMPPTGDDPSAAAGISFPDAGGGGDSEDGDFAGSHLLDPTDPGLPNPTTSSATGLPHAIPAAGSGGGPVTSGNGGERRPLFQRLWTEEDEIVILRGFAEFTAARGTAFASHQYDTDPFYEDMRRRLQLDFSKSQLVEKLRRLKRKYRNCVSRLRESGATFTFRSPHEQAIFEIARNIWRPANKHGRDPSADSDDEDAAAATQIPANTSPNGEVRSPSSARQRRRRRATEFTPATNMLQPPQPVPLSVSVPVKTDDSLPAQPQTPMPTMDGSEPVRLPVVSPQSGVSDAEKTCLTPLFREIIHAAMNVGANPFGAKLPEPPLGLPLPMEGEKWRRQRILELEVYLKRIELLQDQAKATLEELKSSTPGT

SEQ ID NO: 236245 - protein, 156 aa, Zea mays
  unsure (1)..(156): unsure at all Xaa locations
  Clone ID: MRT4577_147037C.1.pep
MRSPVPACPDASAMMGMLPSGTQLDANNYDSKMHELLSQGDTEEIFTSYDEGPDIFDDMGLQHNLLLRIYAYGYDKPSAIQQREILPFCDGLDAIHQLQSVTGDTATVCSGIHLQLDYGLVECHXLVLAPTLRSSPTKFEKAVLCTCMTTCAGEGS

SEQ ID NO: 236246 - protein, 40 aa, Zea mays
  Clone ID: MRT4577_147038C.1.pep
KFGTKALPQCCLLYLRRQPATASIRSPPTLPGGALCLAEP

SEQ ID NO: 236247 - protein, 109 aa, Zea mays
  unsure (1)..(109): unsure at all Xaa locations
  Clone ID: MRT4577_147039C.1.pep
MYNSGRILRGQGSCHFIIVGLCTXAAKATIFSKPYXGPIRSVLSPYVRSERLSVFGRPYFKPPGRQRGSKDGIXPLSPLLLLQILALLGEFPLLHILVQNIXVQQLQQF

SEQ ID NO: 236248 - protein, 268 aa, Zea mays
  Clone ID: MRT4577_14703C.1.pep
MNIRQVAAGVAAIGYLEAGREPTELSKKASTNQPAVQHNIMNKRQVAAAVAALLALLAASSTAGAVTFDATNTASDTPGGQRFDQAVGLDYAKQVLADASTFIWNTFDQPSPADRKPVDAVTLVVEDIGGVAFTSANGIHLSAQYVGGYSGDVKTEVTGVLYHETTHVWQWDGQGQANGGLIEGIADYVRLKAGYAPGHWVQPGQGDRWDQGYDVTARFLDYCDSLKPGFVALLNAKMKDGYTDDFFAQILGKTVQQLWQDYKAKYGG

SEQ ID NO: 236249 - protein, 90 aa, Zea mays
  Clone ID: MRT4577_147040C.1.pep
QIVHFCDISNCKFDSFLDNFILAISTSIVWMYTLLNVQNHNFLMFPFFCVMPDFQPPFQGSDCSICHRNATSHFLFKCKVTHYRHPSGWV

SEQ ID NO: 236250 - protein, 67 aa, Zea mays
  Clone ID: MRT4577_147041C.1.pep
LFIFCSFIRLIVHPIQILEYSRNIHFFFSFSNSYDCKIQNSFVQTLILTVLILKFLSNYPLSNHTIP

SEQ ID NO: 236251 - protein, 28 aa, Zea mays
  Clone ID: MRT4577_147042C.1.pep
SEIYSAGRLKDLSTRPMSNTASTTMAST

SEQ ID NO: 236252 - protein, 445 aa, Zea mays
  unsure (1)..(445): unsure at all Xaa locations
  Clone ID: MRT4577_147043C.1.pep
MRCLPFLHGDVSEKDPVTKSVSVRSMSTTSTERDARSGSDFTSLNVSDMSAESIRRTQYPSFTDRPSNLRVFSFAELKSATRNFSRSLMLGEGGFGCVFSGIIKTSDKPNERIEIAVKQLNRKGLQGQKEWLTEMNVLGIVDHPNLVKLIGYCAEDDERGVQRLLVYEYMPNGSADDHLSSRSTTLSWPMRLKVALDSARGLKYLHEEMEFQVIFRDLKTSNILLDESWNANQFGTDSFTYMSSPCHLTSSILEQSEVTIPXLRPSFFVMFHFEQVVGTLGYTAPEYMQTGHLTAKSDIWSYGVVLYELITGRRPIDQNRPKSEQKLLDWVKPYISDVKRFPVIIDPRLEGHYNLKSATKLASVANRCMVRLPKSRPKMSEVYGMVQRIVDGVGTGPPQPPLLHYHHGAGLRAGCQARRERVAEEEVPGIQVRLPARCPAAGQEA

SEQ ID NO: 236253 - protein, 66 aa, Zea mays
  Clone ID: MRT4577_147044C.1.pep
IFHIPIMQFGYMLTYACEMTSHILVFPLWACLLAWPLPYTPMHHNGLIIVCANAVVIVRVLLGFRG

SEQ ID NO: 236254 - protein, 143 aa, Zea mays
  unsure (1)..(143): unsure at all Xaa locations
  Clone ID: MRT4577_147045C.1.pep
MGRARMEIKWIXNPTKWQATFYKSRXGLFMKDSDFSVLWDVDLVLFLFSTSGKIYHYLSTTVPSDLDLINRNHVTTPTKGXTDIRQESSWHLNKGDIKCYMXXKELRFXTVDDXGDRYTVXSLELLQHXLDCAEHMVPSDKDR

SEQ ID NO: 236255 - protein, 54 aa, Zea mays
  Clone ID: MRT4577_147046C.1.pep
HASAKTSCCCCAPLVLYNLGEYQLPEMMHAFLLNYITMAICAHPMIDGWMMVVS

SEQ ID NO: 236256 - protein, 78 aa, Zea mays
  Clone ID: MRT4577_147047C.1.pep
AFLCSTLIFGWLRCHKKKKKKKKKKKKKKKKKKKKKKKKKKKKKKEKKKKKKKGPWPGTPLGANFENFLNLGGRSTLL

SEQ ID NO: 236257 - protein, 56 aa, Zea mays
  Clone ID: MRT4577_147048C.1.pep
MGHSNVWNSHPKNYGPGSRVCRVCANPHGLIRKYGLMCCRQCFRSNAKDIGFIKYR

SEQ ID NO: 236258 - protein, 72 aa, Zea mays
  Clone ID: MRT4577_147049C.1.pep
ARPKRGGGHQTHEVGKRSDPTWMAGLTRTLPYVGHPRPMWPALHHLYQELGPPPPGAQNLPPAPPPRVGQAL

SEQ ID NO: 236259 - protein, 88 aa, Zea mays
  Clone ID: MRT4577_14704C.1.pep
GVFFCFLKKNQEGTCIKTSPKKRDFGLMEMLFQGIYFGNNEQKILTKKVCVKGVWVIKPTKGVFKKIVHSFFPPLEFLKASEPVLPGF

SEQ ID NO: 236260 - protein, 104 aa, Zea mays
  Clone ID: MRT4577_147050C.1.pep
SFFFFFFFFFFFFFFFFFFFFFFFLTGKGKNGKNKKKKKRAKKREKRKREKKRARWRHRNAKRASWGTRAPPKATKKKLGGGESAKKGQKSFPPLQKEMDPPGP

SEQ ID NO: 236261 - protein, 38 aa, Zea mays
  unsure (1)..(38): unsure at all Xaa locations
  Clone ID: MRT4577_147051C.1.pep
HFPXAHICIYQLTAMIVYYSNIYHITPPLPHMTXPSIP

SEQ ID NO: 236262 - protein, 77 aa, Zea mays
  Clone ID: MRT4577_147052C.1.pep
WCISYCFWIVLLERGSEIREIKNAVTAILAFFSFYLKALPCVYLVLLNFMICSLALQEVCWSVVTKCYGSKTGQHNC

SEQ ID NO: 236263 - protein, 77 aa, Zea mays
  Clone ID: MRT4577_147053C.1.pep
SMMKLYKMEPQLRIKLKQQLGCSLQACGKRHPLITDKGREPRLQYLTQPKLVCHLGSSISSTSRNVFKGLTTIPNLK

SEQ ID NO: 236264 - protein, 98 aa, Zea mays
  Clone ID: MRT4577_147054C.1.pep
LVIVYMRIIEYEMTLFWAARATRCLAACRTSTTTHKPCNAMQARGTHPWRPAISLAGFTRPGYSSCSSCRRSSSCSTPYTCRCSSGIAGTRYPHPWLR

SEQ ID NO: 236265 - protein, 57 aa, Zea mays
  Clone ID: MRT4577_147055C.1.pep
CILESNSAENKGFSQTRYLIAHLASSSITSGQLIGVPHVYEATSATFVVAPCSRSKL

SEQ ID NO: 236266 - protein, 87 aa, Zea mays
  unsure (1)..(87): unsure at all Xaa locations
  Clone ID: MRT4577_147056C.1.pep
KMVLTTEGYWPTKSPIHTPLADGARAGXAGEACXTYPMALITSRDTIEKDVFHNIRHAFEESLRDEGPLQLPRGLTPRLIGVVTHAA

SEQ ID NO: 236267 - protein, 230 aa, Zea mays
  unsure (1)..(230): unsure at all Xaa locations
  Clone ID: MRT4577_147057C.1.pep
MAIGSLLASRLARSGYALATRAIAQAPRTHQHHHATSPLLSRLGAVARAFSSRPAAADVIGIDLGTTNSCVSVMEGKTPRVIENAEGARTTPSIVATNSKGEILIGITASRQAVTNAENTVRGSKRLIGRAFDDPQTQKEMNMVPYKIVRGTNGDAWVEMAGKSYSPSQIGAFVLTKMKETAEAYLGKSVSKAVITVPAYFNDAQRQATKDAGRIAGXEVMRIINEPTAA

SEQ ID NO: 236268 - protein, 64 aa, Zea mays
  Clone ID: MRT4577_147058C.1.pep
CQTGIAISSTQLPHKGNVQPLKPSVLYLKGTEPAHLNKHACIIPRTRIICTLGYPTTLLGYSPR

SEQ ID NO: 236269 - protein, 103 aa, Zea mays
  Clone ID: MRT4577_147059C.1.pep
NSGADHRRPPMDRKNLPKGHRLANNNKRPGLVGEPKGCGDKNGFNLPGRSRGPFLVAVLNNAQANQGQRGVEEGRSNNGLQLPPCSVKEGEGGPYLPGGPLYS

SEQ ID NO: 236270 - protein, 98 aa, Zea mays
  unsure (1)..(98): unsure at all Xaa locations
  Clone ID: MRT4577_14705C.1.pep
EXLFWLXXXKXEEEXXXKMXXXXXXXXXXGXIFSXIFLXXXXSEGXXGXVDEXKGDEXXKEKKXXIXXIFXXFGXVILSXKLFMXXXMKEEXXDXEXI

SEQ ID NO: 236271 - protein, 96 aa, Zea mays
  Clone ID: MRT4577_147060C.1.pep
LGRNGVDSAAANRTPSTGRSTFAPPVGVSVRPLQAVEIPNGTPRDRRAVYPDPTFAQSTRSRDSHDSSTLTEELEMLKDENVNLLEKLGLAEKKLR

SEQ ID NO: 236272 - protein, 55 aa, Zea mays
  unsure (1)..(55): unsure at all Xaa locations
  Clone ID: MRT4577_147061C.1.pep
FGVQPLWLLXPSRPLCQPGPXXEQGPFKVPLGLLXXPLTSPPGAGDALVPPPPPP

SEQ ID NO: 236273 - protein, 198 aa, Zea mays
  Clone ID: MRT4577_147062C.1.pep
CINFIAFAVCYSNKALFAILYFISFVLDGVDGWFARKFNQASTFGAVLDMVTDRVSTACLLALLSQFYRPGLVFLILLGLDITSHWFQMYSSFLSGKTSHKDVKHTGNWLLKLYYGYRPFMAFCCVSCEVLYIFLFLFADEESTSLLSVCKGILNQSPVVILVFVSTLVGWAVKQATNVIQMKTAADACVVYDLKRSK

SEQ ID NO: 236274 - protein, 125 aa, Zea mays
  Clone ID: MRT4577_147064C.1.pep
NARKERHNRRQQRLISSAAPLLSLRRRRRRQQGRNLPISSTSAVRVPPPPALLWYLLRNANAVMDRSSDSSNPPGLAVPAASKPPQMAANNNPWRAPLPPLLNARAGFGGDTSLFSTSLPVLPHE

SEQ ID NO: 236275 - protein, 445 aa, Zea mays
  Clone ID: MRT4577_147065C.1.pep
MDEEYDVIVLGTGLKECILSGLLSVDGLKVLHMDRNDYYGGDSTSLNLNQLWKRFRGEDKPPAHLGASRDYNVDMVPKFMMANGTLVRTLIHTDVTKYLSFKAVDGSYVFSKGKIYKVPATDMEALKSPLMGLFEKRRARNFFIYVQDYNEADPRTHQGLDLTRVTTRELIAKYGLSDDTVDFIGHALALHRDDRYLDEPALDTVKRMKLYSESLARFQGGSPYIYPLYGLGELPQGFARLSAVYGGTYMLNKPECKVEFDMEGKVCGVTSEGETAKCKKVVCDPSYLPNKVRKIGRVVRAIAIMSHPIPNTNESHSVQIILPQKQLGRRSDMYVFCCSYTHNVAPRGKFIAFVSAEAETDNPQSELKPGIDLLGSVDEILYDIYDRYEPVNEPSLDNCFVTTSYDATTHFETTVTDVLNMYTMITGKTVDLSVDLSAASAAEEY

SEQ ID NO: 236276 - protein, 445 aa, Zea mays
  Clone ID: MRT4577_147066C.1.pep
MDEEYDVIVLGTGLKECILSGLLSVDGLKVLHMDRNDYYGGDSTSLNLNQLWKRFRGEDKPPAHLGASRDYNVDMVPKFMMANGTLVRTLIHTDVTKYLSFKAVDGSYVFSKGKIYKVPATDMEALKSPLMGLFEKRRARNFFIYVQDYNEADPRTHQGLDLTRVTTRELIAKYGLSDDTVDFVGHALALHRDDRYLDEPALDTVKRMKLYADSLARFQGGSPYIYPLYGLGELPQGFARLSAVYGGTYMLNKPDCKVEFDMEGKVCGVTSEGETAKCKKVVCDPSYLQNKVRKIGRVVRAIAIMSHPIPNTNESHSVQIILPQKQLGRRSDMYVFCCSYTHNVAPRGKFIAFVSAEAETDNPQSELKPGIDLLGSVDEIFYDIYDRYEPVNEPSLDNCFVSTSYDATTHFETTVTDVLNMYTMITGKTVDLSVDLSAASAAEEY

SEQ ID NO: 236277 - protein, 339 aa, Zea mays
  Clone ID: MRT4577_147067C.1.pep
MARQRQVASMLAAALLVATTFASIPTTVHSIGVCYGTLGNNLPSSSDVVQLYRSKGIKGMRIYSPDAKALAALRNSGIALILDTGNGGGVLGQLARSASFADSWVQSNVRPYYPAVGIKYVAVGNEVQGDDTRSLLPAMRNLDAALARAGFPGIKCSTSVRFDVVANSFPPSSGSFAQGYMADVARYLAGTGAPLLANVYPYFAYRDNPRDISLGYATFQPGTTVRDNGNGLNYNNLFDAMVDAVVAALEKAGAPNVRVVVSESGWPSAGGFGASVDNARKYNQGLIDHVGRGTPKRTGPLETFVFAMFNENQKGGDPTEKNFGLFYGNKQPVYPIRFN

SEQ ID NO: 236278 - protein, 60 aa, Zea mays
  Clone ID: MRT4577_147068C.1.pep
QSRAIMDHTATKQSQPPEWKRRMGDGTIQKLLTPQQNRAGAGGVKDNYYRRIAPGIGGVL

SEQ ID NO: 236279 - protein, 65 aa, Zea mays
  Clone ID: MRT4577_147069C.1.pep
ERPTRFSLLDTFLDYYNKGDRCHNGCCAHFYTCAFNNVNKNCFVTITNENIIFLQQDLLLALQYH

SEQ ID NO: 236280 - protein, 68 aa, Zea mays
  unsure (1)..(68): unsure at all Xaa locations
  Clone ID: MRT4577_14706C.1.pep
LRVPXPXISRGXPTPSAPMALTNLTLLMLLGKHPAYRIYSTELAFILFPLSLPILLTSSTGNMLTHYS

SEQ ID NO: 236281 - protein, 53 aa, Zea mays
  Clone ID: MRT4577_147070C.1.pep
LVKKKKKKKKKKKKKKKKKKKKKKKKKKKKKKKKKKKKKKKKKKKKKKGGGPF

SEQ ID NO: 236282 - protein, 78 aa, Zea mays
  unsure (1)..(78): unsure at all Xaa locations
  Clone ID: MRT4577_147071C.1.pep
RLGNWKLGIGAAVIAAPFLVNFNXKKVPQNREFLLGCIAPYVVRNMGRLIPIYTQEKGALLFTHPPMGSFNSTGLTIF

SEQ ID NO: 236283 - protein, 68 aa, Zea mays
  Clone ID: MRT4577_147072C.1.pep
KKKKKKKKKKKKKKKKKKKKKKKKKKKKKKKKKKKKKKKKKRGRPFLGVPILLPLASNVLFFFWGPLI

SEQ ID NO: 236284 - protein, 385 aa, Zea mays
  Clone ID: MRT4577_147073C.1.pep
MDPKGKGMVINDKEKEKETLYFDEPKVVIIPYLSMNYRKTKSEAHIGKEWDSDCSSSDSDDKGLAASAFDKSFLFPNEHHTCLMAKEKKVRTRDTPKYTSSSDEEYDDDVDYSDIFKGLDRSKVDKINEVIDALNEKDRLLEKQYDILYEEHDKCINAEKSLAVEIKKNELLSSELSSCRDSISSLNNLNAKLEKVNVASSSMDHVSICNRCKEIDIDACNTHASTISKLNDEIANLNAQLKTCKNECDEIKFARDAYTIGRHPSIKDGLGFQKGTKNLSQRASNLIKEKGKAPMASSSHSFHDKKNHAYLYAHVKNATNAAHHDGCYNHVVLPVYASGGTSWIIDSGCTNHMMGEKKMFTSYVKNKDSQDTIVFGDGNHGKLKE

SEQ ID NO: 236285 - protein, 87 aa, Zea mays
  unsure (1)..(87): unsure at all Xaa locations
  Clone ID: MRT4577_147074C.1.pep
FPNIPKGLKGPPVGFVSPGGNWVPFFKLRLDRVFQDQFXKISLXKALASTPXSLNFKSLKXWPAPSPKYGFGWWEPFLPPKFTNGSA

SEQ ID NO: 236286 - protein, 109 aa, Zea mays
  Clone ID: MRT4577_147075C.1.pep
GFFPSRGRAFFWGFPKLTCLTLKRIVLGHWGLPLRGGGSNLGRGLLSGTWPSEPSCGPVRRFLLGLCNSPGPPVFFFPPLGFQFWWVWWAPPLGGAPPFFCKKKPAPGY

SEQ ID NO: 236287 - protein, 72 aa, Zea mays
  Clone ID: MRT4577_147076C.1.pep
GVPGGVLEGEPPPFYGFWWQLDPKNGPILARVASSCLLLLWGFLAVLNPLFFPCEGGVLVIFFVPLFVKGPC

SEQ ID NO: 236288 - protein, 82 aa, Zea mays
  Clone ID: MRT4577_147077C.1.pep
AGEQTPLKLGVGQTMSHLNSTTWGGLYKPVWGGEKKPAFRPQKLPCFYPTPRGPPEKKDFAKKTSSFPWIFLTKWTGLTPPV

SEQ ID NO: 236289 - protein, 89 aa, Zea mays
  Clone ID: MRT4577_147078C.1.pep
IKSSNSFKPGYKEPHQGIHYIELHQTMNQSPMQPEYTHTEACNAERGLSHAVENLLEVGHGNHIDRLVVHDLSFVSRHGALARLDHSTG

SEQ ID NO: 236290 - protein, 192 aa, Zea mays
  Clone ID: MRT4577_147079C.1.pep
MYTARKKIQKDKGLEPSEFEDSVAQAFFDLENGNQELKSDLKDLYINGAIQLDVAGSRKAVVIHVPYRLRKAFRKIHVRIVRELEKKFSGKDVVIVATRRIVRPPKKGSAVQRPRSRTLTAVHDGILEDVVFPAEIVGKRVRYRLDGAKIIKIFLDPKERNNTEYKLDTYTTVYRRLCGKDVVFEYPMTENA

SEQ ID NO: 236291 - protein, 44 aa, Zea mays
  Clone ID: MRT4577_14707C.1.pep
MKVLGILLRGRFLYKRKNGSGPLKGKKSFMGIFFPARENIIFPA

SEQ ID NO: 236292 - protein, 192 aa, Zea mays
  Clone ID: MRT4577_147080C.1.pep
MYTARKKIQKDKGLEPSEFEDSVAQAFFDLENGNQELKSDLKDLYINGAIQLDVAGSRKAVVIHVPYRLRKAFRKIHVRIVRELEKKFSGKDVVIVATRRIVRPPKKGSAVLRPRTRTLTAVHDGILEDVVYPAEIVGKRVRYRLDGSKIIKIFLDPKERNNTEYKLETCTAVYRRLCGKDVVFEYPMTENA

SEQ ID NO: 236293 - protein, 109 aa, Zea mays
  Clone ID: MRT4577_147081C.1.pep
MCRGCDVLFGLLYLHALFDLENGNQELKSDLKDLYINNAIQMDVTGSRKAVVIHVPYRLRKAFRKIHVRLVRELEKKFSGKLLSIKRFDMVDLPLSEQDELMDMLWNIS

SEQ ID NO: 236294 - protein, 192 aa, Zea mays
  Clone ID: MRT4577_147082C.1.pep
MYTARKKIQKDKGLEPSEFEDSVAQAFFDLENGNQELKSDLKDLYINGAIQLDVAGSRKAVVIHVPYRLRKAFRKIHVRIVRELEKKFSGKDVVIVATRRIVRPPKKGSAVQRPRTRTLTAVHDGILEDVVFPAEIVGKRVRYRLDGAKIIKIFLDPKERNNTEYKLDTYTTVYRRLCGKDVVFEYPMTENA

SEQ ID NO: 236295 - protein, 135 aa, Zea mays
  Clone ID: MRT4577_147083C.1.pep
ATQVPEICFLSLWLFLSLLTVHFEKDKALARRFQPVLVNEPSQEDAVKILLGLREKYETYHKCKYTLEGINAAVYLSARYIPDRHLPEAGSRARMESFKRKKEEQCFILSKSPDEYWQEIRVVQSTHEVVMQCSW

SEQ ID NO: 236296 - protein, 85 aa, Zea mays
  Clone ID: MRT4577_147084C.1.pep
KLSHFCDFHGLFPINTHIHSLTNQIDPFRKKNCKERILFENREAPLLNHIKTPRVQRLYSKYCPEISQTKRQSCQGNPGSTPGTK

SEQ ID NO: 236297 - protein, 48 aa, Zea mays
  Clone ID: MRT4577_147085C.1.pep
YRTVNAEGHSPFTHSDHTNIQYTLGWGGGRLYHTLITRTCHAAESSLL

SEQ ID NO: 236298 - protein, 193 aa, Zea mays
  unsure (1)..(193): unsure at all Xaa locations
  Clone ID: MRT4577_147086C.1.pep
MYTARKKIQKEKGLEPSEFEDSVAQAFFDLENGNQELKSDLKDLYINNAIQMDVAGSRKAVVIHVPYRLRKAFRKIHVRLVRELEKKFSGKDVVIVATRRIVRPPKKGSAVQRPRTRTLTAVHDGILEDVVYPAEIVGKRVRYRLDGAKIIKIFLDPKERNNTEYKLETYTAVYXRRLCGKEVVFEYPMTENA

SEQ ID NO: 236299 - protein, 160 aa, Zea mays
  Clone ID: MRT4577_147087C.1.pep
PLLATILRTLPLLSPRIYQLRLHRHLPTVLELAGKDHCETCYKVPTVCILKISVHFEKDKALARRFQPVLVNEPSQEDAVKILLGLREKYETYHKCKYTLEGINAAVYLSARYIPDRYLPDKAIDLIDEAGSRAQMESFKRKKEEQCSILSKSPDEYWQE

SEQ ID NO: 236300 - protein, 37 aa, Zea mays
  Clone ID: MRT4577_147088C.1.pep
HTKLNMTGFLDRAEGSYPIHKTNSTSLITSYTYTFNS

SEQ ID NO: 236301 - protein, 192 aa, Zea mays
  Clone ID: MRT4577_147089C.1.pep
MYTARKKIQKEKGLEPSEFEDSVAQAFFDLENGNQELKSDLKDLYINNAIQMDVTGSRKAVVIHVPYRLRKAFRKIHVRLVRELEKKFSGKDVVIVATRRIVRPPKKGSAVLRPRTRTLTAVHDGILEDVVYPAEIVGKRVRYRLDGSKIIKIFLDPKERNNTEYKLETCTAVYRRLCGKDVVFEYPMTENA

SEQ ID NO: 236302 - protein, 80 aa, Zea mays
  Clone ID: MRT4577_14708C.1.pep
MLDARYMFWPCVFMLCNFGRHPSSVKLPLRVDVLFTHIQKMMTGDSVVMAEPGDSWFSRHKLKLPEGYGYEFQTQYGLIG

SEQ ID NO: 236303 - protein, 192 aa, Zea mays
  Clone ID: MRT4577_147090C.1.pep
MYTARKKIQKDKGLEPSEFEDSVAQAFFDLENGNQELKSDLKDLYINGAIQLDVAGSRKAVVIHVPYRLRKAFRKIHVRIVRELEKKFSGKDVVIVATRRIVRPPKKGSAVQRPRTRTLTAVHDGILEDVVFPAEIVGKRVRYRLDGAKIIKIFLDPKERNNTEYKLDTYTTVYRRLCGKDVVFEYPMAENA

SEQ ID NO: 236304 - protein, 170 aa, Zea mays
  Clone ID: MRT4577_147091C.1.pep
MYTARKKIQKEKGLEPSEFEDSVAQAFFDLENGNQELKSDLKDLYINNAIQMDVTGSRKAVVIHVPYRLRKAFRKIHVRLVRELEKKFSGKDVVIVATRRIVRPPKKGSAVLRPRTRTLTAVHDGILEDVVYPAEIVGKRVRYRLDGSKIIKVDASVFLSSDSLHVLLRN

SEQ ID NO: 236305 - protein, 117 aa, Zea mays
  Clone ID: MRT4577_147092C.1.pep
GGGPAALRAPDSYYDELKRDYSAKKAILLEGLEAAGFIVYPSSGTYYIMVDHTPFGFDSDVEFCEYLIREVGVCAIPPSVFYLDPEEGKKLVRFTFSKDEGTLRAAVERLKAKLRRK

SEQ ID NO: 236306 - protein, 70 aa, Zea mays
  unsure (1)..(70): unsure at all Xaa locations
  Clone ID: MRT4577_147093C.1.pep
LRSAVDHLSQYFFEGGRGGHLYVPDAKWLTGLLNLTSHLILYLHQDDVILGSQDVGEWSIVDPLXSYGRG

SEQ ID NO: 236307 - protein, 99 aa, Zea mays
  Clone ID: MRT4577_147094C.1.pep
WGPFGPPGCHKLGLGRSQVNVNGRAVALGPPLGATGARGGPTFLNEMNPRGKNFKFGVVPLCIGFGMGAPPGFQRGNPGDGLPPWGGPRAHYFLFKDAK

SEQ ID NO: 236308 - protein, 159 aa, Zea mays
  unsure (1)..(159): unsure at all Xaa locations
  Clone ID: MRT4577_147095C.1.pep
EPPPRGLPPPVHRRAAGGGAEGPPEGTPPPPQDVGGVDHXRPPRGGPSCFXRQXRWPGGPPPTTGGCLRSPPRCSPPXGGRPPAPPGGPEGRPPRRRPPAAAPRRRXPWRPPPPTTAAPPAGPPPPPAGGRRNQPPLLQKKTSYQRGVKEEKKILFGGY

SEQ ID NO: 236309 - protein, 169 aa, Zea mays
  unsure (1)..(169): unsure at all Xaa locations
  Clone ID: MRT4577_147096C.1.pep
MAAAANDGLADEKAPRTIGVGRYEEMEQDGASSTAKSRLSGLLWHGGSAYDAWFSCASNQVAQVLLTLPYSFSQLGMLSGILFQLFYGLMGSXTAYLISILYVEYRTRKEREKADFRNHVIQWFEVLDGLLGRHWRNVGLAFNCTFLLFGSVIQLIACARYVRAHGRSS

SEQ ID NO: 236310 - protein, 87 aa, Zea mays
  Clone ID: MRT4577_147097C.1.pep
SNQTLGAVRGRCFSPPAALLVRRRGAQDPPGLLLHPGCLRAVRAPAPRRGGPGSICCIIGRSRHFLRLLVDFFQGLFFPCHDPFLMP

SEQ ID NO: 236311 - protein, 124 aa, Zea mays
  Clone ID: MRT4577_147098C.1.pep
MTMRGLLRCVSTGACRVAPGAVAEPVPASPGATGGKVPAGHVPVEVGAEGEETQRFVVPAELLGRPPIAELLRHAAQEYGYARRGPLRIPCPVAAFRLLLGALAGSGAGGPDGALTLAYFAVAV

SEQ ID NO: 236312 - protein, 347 aa, Zea mays
  Clone ID: MRT4577_147099C.1.pep
WRNGRRWSRPVVHNDKGSVVGIVAFKYADLQDATKKFSEKLGEGGFGSVFKGCLGDSTTTVVAVKRLDGARQGEKQFRAEVNSIGIVQHINLVRLIGFCCEGDRRLLVYEHMPNGSLDSHLFRSHGGAGAGAALDWNVRYKIAVGVARGLAYLHHGCRDCIIHCDIKPQNILLDASYLPKIADFGMAKFLGRDFSRVVTTMRGTVGYLAPEWISGTPITSKIDVYSYGMVLLEIVSGKRNSITQQSSSHTEGQQGDYLPVQVAGKLLRGDVLSVVDADLRGDVNVEEVERVCRIACWCIQDREFDRPTMVEVVQFLEGICEPEIPPMPRLLHAIAGGGSNQMAGVGV

SEQ ID NO: 236313 - protein, 62 aa, Zea mays
  unsure (1)..(62): unsure at all Xaa locations
  Clone ID: MRT4577_14709C.1.pep
LFLLYLTLXSGLVRIANRADLSHLPDHLLIDLFLKTLNADKLTNKVLKFFLATRCEDIILPN

SEQ ID NO: 236314 - protein, 599 aa, Zea mays
  Clone ID: MRT4577_1470C.1.pep
TVEIQGDAESLERCLDQFTAVEWLDGDNKYKCDGCNDYVKARKHLSVQQAPNILTITLKRFQTGRFGKLNKRVTFPMELDLTPYMSCTDGSDLYDLYAVVVHLDMLNASFFGHYICYIKGYQGRWYKIDDCKVMVVDEEEVHAQGAYMLLYSRRTARPRSLLTVDESVKQQQQCKSLLSNGQSHMILADTTLNCESSLKIPEDMLQQDCESNNESLHEMGIKDQESDMDLRTSIEDDKFISNGNLRLPGSLVSHVLEDTRAPDSVLEGSVQLGPPLEGGPTTMSSVQFGNCTSEASSEHSFAEQCEVPASCIDSVDYMDVDTEAGAEVERCDEQRPVLNDSVGRPNNNTATPTANGVPGEPKPSFSSGFFDKPSRKRSSFTEEASAGSPRKLNGYCNGHISSLEQEVLCNSGSEKCNGDAPVTSSNGKFCAANVDMQSIDDSLHEDKRDVPSVSHGFEPRPYKLQSDSNNNCGRTCNGKPKACQGDMSFLPRGFLGRSSSRGISVKADDSLPFSTDASSSFGNGNSKSSNNSSSMGGLSPGFLTRHRRESTVIGTSSDIPMDKKSNGATVVPDHAGKKVSDCTTNGSSFQIRAASDHLD

SEQ ID NO: 236315 - protein, 71 aa, Zea mays
  Clone ID: MRT4577_147100C.1.pep
RHQLPAGTPARPLISLRDKLNTISIYILRIILVVVSQSEQPCACIYLCIYVLYLYPIHGRMPLLYIPSISV

SEQ ID NO: 236316 - protein, 88 aa, Zea mays
  Clone ID: MRT4577_147101C.1.pep
GKSKTVPCSTLLQGTNWVHGWLTYMGGALEWGVSPANFPTDLKKPLPYRQGFNHPFSGAKGNRLGLPLLWRSLDFPALRGGFPRAPPT

SEQ ID NO: 236317 - protein, 42 aa, Zea mays
  Clone ID: MRT4577_147102C.1.pep
FIKEGKRQSRPGNGCQICSFQNCTGRSMVAESLLKWCLVSRQ

SEQ ID NO: 236318 - protein, 59 aa, Zea mays
  Clone ID: MRT4577_147103C.1.pep
RRAQGLATHRTRSNTTRARRATATGTRGKHTREGAPRPKKDGECGRQRKGDRQITKLGG

SEQ ID NO: 236319 - protein, 328 aa, Zea mays
  unsure (1)..(328): unsure at all Xaa locations
  Clone ID: MRT4577_147105C.1.pep
MGERKVLNKYYPPDFDPSKIPRRRQPKNQQIKVRMMLPMSIQCGTCGTYIYKGTKFNSRKEDVVGETYLGIQIFRFYFKCTKCSAEITFKTDPQNSDYTVESGASRNFEPWRAQDEAADKEKIKRDAEEMGDAMKALENRAMDSKQDMDILAALEEMRSMKSRHAGVSVDQMLEILKRSAHEKEEKAIAELDEEDEELIKSITFRNSGFYVKRIEDDDDDDDEDLAPGQSSRTIKINESSESVTKPTDVLSKNNGSEVANKEGSKSWMPKFIVKXSLQAQILIRDRRLNPRLSKTPGKAKXDEQKSEPAKQTNVLQSLCQNYDSDDSE

SEQ ID NO: 236320 - protein, 109 aa, Zea mays
  Clone ID: MRT4577_147106C.1.pep
RASNSRWKMGPPYRDTKPRTCTSCSRHSRSQTALPRSPRTSGTTDPITTHSRPCHLLSTYPTAGILTAPHPHWIDHLLLLPRHHRGEAPIAARRLVQAALQPHPQAATR

SEQ ID NO: 236321 - protein, 142 aa, Zea mays
  Clone ID: MRT4577_147107C.1.pep
MPTPYWGAGAAAFPQTPERSPRFTGDARLGHCVHDVAERYGCAEDAGEVARAARTLEYAPAPRQEQARWGGESEAEAPALYESGAESLRPACLLTVAFALCFSLALRGSSQRANHRLAEKEIVIVLSSTSAVPVESSVAVFD

SEQ ID NO: 236322 - protein, 101 aa, Zea mays
  Clone ID: MRT4577_147108C.1.pep
FKKTLIGGDDSGGHPMGTTKALGNMAPFLVKPQGPPLKIMPILGFWTPGTLSRVAKLVLYFVVLARALCSRDQGAPPCWPVPPDFPWGAPGPFFPLSCSVV

SEQ ID NO: 236323 - protein, 76 aa, Zea mays
  Clone ID: MRT4577_147109C.1.pep
LRQLVMGTKRMSTEKKKKHGILLCYKISTPCSLSTVRCDQKSCCRINKLYYNLLTGIITLQLFTLDGAIVSCEVHI

SEQ ID NO: 236324 - protein, 207 aa, Zea mays
  Clone ID: MRT4577_14710C.1.pep
MSGSSLPGALALSLLLVSGSLLPGPGAAQNEPRIVTSEEVIIRESLLPVTLQCNLTSSSHTLMYSYWTRNGVELTATRKNASNMEYRINKPRAEDSGEYHCVYHFVSAPKANATIEVKAAPDITGHKRSENKNEGQDAMMYCKSVGYPHPEWIWRKKENGVFEEISNSSGRFFITNKENYTELSIVNLQITEDPGEYECNATNSIGS

SEQ ID NO: 236325 - protein, 225 aa, Zea mays
  unsure (1)..(225): unsure at all Xaa locations
  Clone ID: MRT4577_147110C.1.pep
PDPLLPPPGHLPPTPLSPRRALLAISSVRLALSTQPHVPSPSPSPTPSSARRLPHFLSFLAAAAAAAAGGATVALCDSGLDHRVGGKDSADLVVRGERKFVPQEFIDELASFLGDNITLDYEERSFHGTPQNSFHKAVNLPDVVVFPSSQDEVQRIVMACNKHKKIKSLNVEDMDVVVEPGVGWIELNEYLKPYGLFFALGPGPGAXLGGMXATRXSGSLAWEGW

SEQ ID NO: 236326 - protein, 92 aa, Zea mays
  unsure (1)..(92): unsure at all Xaa locations
  Clone ID: MRT4577_147111C.1.pep
FFCPLGSAPVKNGPLKRALNIFFCLPQRRVLXSARLFLSLFLSSWGVALYVRDRPLLCFYTTRALWLLRATKHPSPLVFWFVNGVNKKHKGV

SEQ ID NO: 236327 - protein, 555 aa, Zea mays
  unsure (1)..(555): unsure at all Xaa locations
  Clone ID: MRT4577_147112C.1.pep
MATSLLRLSRPRRALLAISSVRLALSTQPHVPSPSPSPTPSSARRLPHFLSFLAAAAAAGGATVALCDSGLDHRVGGKDSADLVVRGERKFVPQEFIDELASFLGDNITLDYEERSFHGTPQNSFHKAVNLPDVVVFPSSQDEVQRIVMACNKHKVPIVPYGGATSIEGHTLAPHGGVCIDMTLMKKIKSLNVEDMDVVVEPGVGWIELNEYLKPYGLFFPLDPGPGATIGGMCATRCSGSLAVXCRYGTMRDNVINLRAVLPNGDVVKTGSRARKSAAGYDLARLIIGSEGTLGVITEVTLRLQKLPSHSVVAMCNFKTIKDAADVAIATMLSGIQVSRVELLDEVQIKAINMANGKNLPEVPTLMFEFIGTEAYALEQTLLVQKIATEHHGSDFVFVEEPDAKAELWKIRKEALWAGFAMKPDHEAMITDVCVPLSRLAECISTSKRLLDASPLTCLVIAHAGDGNFHTIILFDPSQEDQRKEAERLNHFMVHTALSMEGTCTGEHGVGTGKMKYLEKELGIESLRTMKRIKAALDPNNIMNPGKLIPPHVCI

SEQ ID NO: 236328 - protein, 73 aa, Zea mays
  Clone ID: MRT4577_147113C.1.pep
RSSRTPVETRHIHMSPHVAGEVRRSVLREIQKKLCVSINLHSQVGQINGLHAVGRAESTTKPATNVSHVVGYR

SEQ ID NO: 236329 - protein, 86 aa, Zea mays
  unsure (1)..(86): unsure at all Xaa locations
  Clone ID: MRT4577_147114C.1.pep
PKRVLFLQGPFAFFKKSKTLGANVQGSFGWSLLDTFEWFSGYPERLGFFFFSRNNGCKRXIKGSPKWFKKFNFAKKPAPKKFFPPP

SEQ ID NO: 236330 - protein, 106 aa, Zea mays
  Clone ID: MRT4577_147115C.1.pep
MPKEVKQKSGLIVGINAGHKVTPRTPAPRISRRKGFLSKRTAFVREITKEVAGLAPYEKRIIELLRNSKDKRARRLAKKRLGTFGRSKRKVDEMTKVIAESRRAGH

SEQ ID NO: 236331 - protein, 46 aa, Zea mays
  Clone ID: MRT4577_147116C.1.pep
TTRALVHIQSTNIHAGPSTLLTVIMITMNLHKILKCFYYGGVLFNN

SEQ ID NO: 236332 - protein, 74 aa, Zea mays
  Clone ID: MRT4577_147117C.1.pep
RGVSHFVSWFLKFVDFFNLCYWPFPLAVHICTQKCSIKYVVFSNSNLCYKNIPQIVSLSLKKKKKKKKKKKNTP

SEQ ID NO: 236333 - protein, 184 aa, Zea mays
  unsure (1)..(184): unsure at all Xaa locations
  Clone ID: MRT4577_147118C.1.pep
MGNKPPELYYDILHVARDASPQRVRAAYRSLVRQWHPDKHPPESRPAAEARFKVITEAYEELLGQQGNRSAAPAVAARDGGRSSPAXGGGVSQGGAERKGRRRALHAGXREEPAFKTVVYSVSSSVGGGRGRRALAEFSSYVVRKAPPLERRVECTLEELCSGCHKEVRYTRDVVTKTATGGST

SEQ ID NO: 236334 - protein, 101 aa, Zea mays
  Clone ID: MRT4577_147119C.1.pep
MGNKPPELYYDILHVARDASPQRVRAAYRSLVRQWHPDKHPPESRPAAEARFKVITEAYEVTLTPHRQNINICSLVSWPQRFLAARVVAPTISCCGRARWR

SEQ ID NO: 236335 - protein, 203 aa, Zea mays
  Clone ID: MRT4577_14711C.1.pep
AGLEASVRAYGSSAGAGGRWPSPFTIACGALLALSLLAPLLPPLRWLAVAAACVGSQPMLLRAFAAAGKLTLDINILMLIAVAGSVALGSFTEAGAIVFLFTVAEWLETLACSKASAGMLSLMSTVPKTVVLAETGQVVGMGDVAVGTVVAVRAGDVVPVDGVVVGGHSEVDESSLTGESFPVPKQPQSEVWAGTINLDGYIS

SEQ ID NO: 236336 - protein, 236 aa, Zea mays
  unsure (1)..(236): unsure at all Xaa locations
  Clone ID: MRT4577_147120C.1.pep
TYSGLIGRRELVKQDPTPQALRSNVCSALVYSWKRETLSCPPLIYQEPSMXLPDDPFPSAAKTETQAXSPPSYLKWNQRDKKCTVDRMCHECIPYLCDYMAVNNALRCALXGFVLXATLSDLLMGYQTDSKVPADLAAITLMMSXLSENKSIDPILCDDDYIDTIXVGSVHFIAQLVWIERACDDLDSAVCDPLIIRDAQAHSAPKVVNASVQQLSRCSSRVLGDLFTVHVTEALD

SEQ ID NO: 236337 - protein, 680 aa, Zea mays
  unsure (1)..(680): unsure at all Xaa locations
  Clone ID: MRT4577_147121C.1.pep
AYWCTEEEIRQVAGLDSVVFLRLFIFSIRIFSITSLVCVFVVLPVNYHGKEMNHNHIPEESLNVFTIANIVEESRKLWVHCSALYVITISACILLFHEYKYISRKRLAHVTGYPPNPGLFTVLVRSIPRFDNELLDDTIRNFFVNYHGSSYLSHQMIFRKGHFQKFVDRAERAYRRFVRVXSPYLSGXRSSMSRCGVCGVRASSFQLYRNKFIEAKKSDLTNPEVVEAQKNCPGALVFFKTRYAAVVASRVFQSSNPMLWVTDLAPEPRDVYWSNLWIPYRQIWLRKLATLAASIVFMFVFIVPVAFVQSMMQLEQLKRMFPSLTGLLNKSFFARVITGYLPSVTLLLSLYTVPPLMMLFSSIEGSISRRGRKRSGCLKILFFNIWNVFFVNVLSGSVLNQLNVFSRPKDMPTMLAELVPKQATFFITYVLTSGWASLCSEILQVFNLVYNFFSRFVCCCHRQNKEYVYSFPYHTEVPKVLLFNLLGFTFSIMAPLILPFLLVYFCLGYLVYRNQILNVYYPKYEMGGKLWPVMHNAIVFSLVLTQVIALGVFTIKRSPVTAGFTILLLVGTVLFNEYCRHRFSRIFEAYSAQDVIELDRDDEQSGRMQEIHQHLLDAYSQTPPGEGSSRGGSQVPIELIMEDPAQEASESSQELCDTVQEVSGAIHDHDHVVEDKAHSV

SEQ ID NO: 236338 - protein, 136 aa, Zea mays
  Clone ID: MRT4577_147122C.1.pep
PSFPPGAPLLGSLPRAPFFPLGPPVFTVLANQRAFLENFFRAWVGLAPKNNLFLGSNLPEWVGLQPGFFFWKGPKKANLLVGFCWAFRFFFWVFSKSSLLGFCFFGTRNSQGFFFRGPDPVFFFFYNFIGGALSPR

SEQ ID NO: 236339 - protein, 34 aa, Zea mays
  Clone ID: MRT4577_147123C.1.pep
LTRAGTKLHHMNIHLVLKQNKNKFVFFLNECSYY

SEQ ID NO: 236340 - protein, 94 aa, Zea mays
  Clone ID: MRT4577_147124C.1.pep
VGDQGHNLCCASSGPKENSCSCSSPSWYTAFRKDVFLQMCSSCPQQGCGCYTPVAVFDLSGQQDAVPKTGRRVCASVAPFHDKVSQWLHVIYPA

SEQ ID NO: 236341 - protein, 129 aa, Zea mays
  Clone ID: MRT4577_147125C.1.pep
MCIGMNLVLLLIEQNCPGALVFFKTRYAAVVASRVFQSSNPMLWVTDLAPEPRDVYWSNLWIPYRQIWLRKLATLAASIVFMFVFIVPVAFVQSMMQLEQLKRMFPSLTGLLISKLRRPPPVAAPALDS

SEQ ID NO: 236342 - protein, 215 aa, Zea mays
  unsure (1)..(215): unsure at all Xaa locations
  Clone ID: MRT4577_147126C.1.pep
FITYVLTSGWASLCSEILQVFNLVYNFFSRFVCCCHRQNKEYVYSFPYHTEVPKVLLFNLLGFTFSIMAPLILPFLLVYFCLGYLVYRNQVXILETTLCACDMILIPEASVAHIFVCLTLIWVSCPACXLNVYYPKYEMGGKLWPVMHNAIVFSLVLTQVIALGVFTIKRSPVTAGFTILLLVGTVLFNEYCRHRFSRIFEAYSAQVGVVYAACT

SEQ ID NO: 236343 - protein, 37 aa, Zea mays
  Clone ID: MRT4577_147127C.1.pep
LNKMETGRASKNRRKRLAGVEHRFVYIYILGIYIRAL

SEQ ID NO: 236344 - protein, 201 aa, Zea mays
  unsure (1)..(201): unsure at all Xaa locations
  Clone ID: MRT4577_147128C.1.pep
MTTLKSEVKQALAKREYDPEIKDMASYIHNTPIDSELAYDTARWVFIDTLGCGLEGLRFEQCRNILGPVVEGTVVPNGTRVPGTNYQLDPINGAFNIGAMIRWLDFNDCWLAAEWGHPSDNLGAILATADWITRTNKAGGNLGNGKIFKVRDVLEAMIRAHEIQGCMALEXSXHKVGLDHVILVKLASTAVVSKMMGLSEA

SEQ ID NO: 236345 - protein, 203 aa, Zea mays
  Clone ID: MRT4577_147129C.1.pep
PRVRGRVGNNLTGSLPRSLGKLKNLKNIRLGQNLISGNIPVEIGACLNITVFGLAQNKLEGPLPKEIGRLTLMTDLILWGNQLSGVIPPEIGNCTSLSTIALYDNNLVGPIPATIVKISNLQKLYLYRNSLNGTIPSDIGNLSLAKEIDFSENFLTGGIPKELADIPGLNLLYLFQNQLTGPIPTELCGLKNLSKLDLSINSL

SEQ ID NO: 236346 - protein, 47 aa, Zea mays
  Clone ID: MRT4577_14712C.1.pep
KLWWCFIFFHSCLKKNNLSSQNIIPKKFPELYKIMIKWGNPPKGQLF

SEQ ID NO: 236347 - protein, 167 aa, Zea mays
  Clone ID: MRT4577_147130C.1.pep
MGPRERACLREAVPSDPDRVNEIGGHDQALGRLTAMAVPLLLTTVRSPELGRVQARGALRSPELARTGEKDPAYSLMGFRTRDRDQGVRTPEGKLWANRGNSSDESRSRGGGIRCAKARISSNEGRGILWTNTGTQCEAELASHHVGCGEPAWMNSGEAKLAKFRRK

SEQ ID NO: 236348 - protein, 40 aa, Zea mays
  Clone ID: MRT4577_147131C.1.pep
IVTDTRAKKRLQHGMRLAQSKIYHAVCSRQRKTRNFLTQS

SEQ ID NO: 236349 - protein, 84 aa, Zea mays
  Clone ID: MRT4577_147132C.1.pep
SELHMTSGVSLSTWIKGSKLKYTAAPAVTSAIFFPETGPANAQVPPVRCKLGTKPMVRFSNAHGTCQNKMHTGSRSVEELSQQP

SEQ ID NO: 236350 - protein, 132 aa, Zea mays
  Clone ID: MRT4577_147133C.1.pep
LPWKLSLPLESGTKRCVWKPPPRSRLAHVHLPRREPTKQFSHPLAPSSARTACVPASARALVWLGSLPARRRGQPASPRRRGLWPCSVSKSLSCSAVPRHRRGRTAVARPSTSRRASTPPRSSQHYHHLTVA

SEQ ID NO: 236351 - protein, 74 aa, Zea mays
  Clone ID: MRT4577_147134C.1.pep
AIPPGGLKINPQLPRLGSGYSKTRICQPPPCEKSQPANWLSVFSKGIKLGVILVGGFLRDLLDKFHPHFIGIIP

SEQ ID NO: 236352 - protein, 178 aa, Zea mays
  Clone ID: MRT4577_147135C.1.pep
MVAFRFHQYQVVGRALPTPGDEHPKIYRMKLWATNEVRAKSKFWYFLRKLKKVKKSNGQVLAINEIFERNPTTIKNYGIWLRYQSRTGYHNMYKEYRDTTLNGAVEQMYNEMASRHRVRSPCIQIIKTATVHFKLCKRDNTKQFHNSEIKFPLVHRKVRPPTRKLRTTFKASRPNLFM

SEQ ID NO: 236353 - protein, 56 aa, Zea mays
  Clone ID: MRT4577_147136C.1.pep
NKSVEVNCSIFQPNTHRSLFPYISQFFSHFESRSSLGVFTKFATPCCPPPCFRNKK

SEQ ID NO: 236354 - protein, 141 aa, Zea mays
  Clone ID: MRT4577_147137C.1.pep
RAKSNFWYFLRKLKKVKKSNGQVLAINEIFERNPTTIKNYGIWLRYQSRTGYHNMYKEYRDTTLNGAVEQMYNEMASRHRVRSPCIQIIKTATVHFKLCKRDNTKQFHNSEIKFPLVHRKVRPPTRKLRTTFKASRPNLFM

SEQ ID NO: 236355 - protein, 178 aa, Zea mays
  Clone ID: MRT4577_147138C.1.pep
MVAFRFHQYQVVGRALPTPGDEHPKIYRMKLWATNEVRAKSKFWYFLRKLKKVKKSNGQVLAINEIFERNPTTIKNYGIWLRYQSRTGYHNMYKEYRDTTLNGAVEQMYNEMASRHRVRSPCIQIIKTATVHFKLCKRDSTKQFHNSEIKFPLVYRKVRPPTRKLKTTFKASRPNLFM

SEQ ID NO: 236356 - protein, 178 aa, Zea mays
  Clone ID: MRT4577_147139C.1.pep
MVAFRFHQYQVVGRALPTPGDEHPKIYRMKLWATNEVRAKSKFWYFLRKLKKVKKSNGQVLAINEIFERNPTTIKNYGIWLRYQSRTGYHNMYKEYRDTTLNGAVEQMYNEMASRHRVRSPCIQIIKTATVHFKLCKRDNTKQFHNSEIKFPLVYRKVRPPTRKLRTTFKASRPNLFM

SEQ ID NO: 236357 - protein, 78 aa, Zea mays
  Clone ID: MRT4577_14713C.1.pep
LSPVNKALLRSSAYFTSVSSLCNLHHRCYLGVTRLCLLEKHAPFCSGYTARRARIFTTSDVFPIFTDHWSAPCTASST

SEQ ID NO: 236358 - protein, 85 aa, Zea mays
  Clone ID: MRT4577_147140C.1.pep
WKIWRGTRAGARKRLGGDPTSMGANANQIKENKRKKGPEEVNRLGLAHYHGWGALSRPGSQSSAFSPGWRNTPSRGGSLRARTRG

SEQ ID NO: 236359 - protein, 129 aa, Zea mays
  Clone ID: MRT4577_147141C.1.pep
RVHAYVRLHPLHRTPLLFYCVCHHTFPNHTSTIFNGHFSTNNIALVLPLTFTHIGKLLSRNRVYKHAPDYIVSMLHLFHSTAEYGYQIDKSVHDLWTMSSCSVRIHDDITRCGVLTLTCQLSKLCSVLT

SEQ ID NO: 236360 - protein, 178 aa, Zea mays
  Clone ID: MRT4577_147142C.1.pep
MVAHRFHQYQVVGRALPTPTDEHPKIYRMKLWATNEVRAKSKFWYFLRKLKKVKKSNGQMLAINEIFERNPTTIKSYGIWLRYQSRTGYHNMYKEYRDTTLNGAVEQMYNEMASRHRMRSPCIQIIKTATVHFKLCKRDNTKQFHNSEIKFPLVYRKVRPPTRKLKTTFKASRPNLFM

SEQ ID NO: 236361 - protein, 178 aa, Zea mays
  Clone ID: MRT4577_147143C.1.pep
MVAFRFHQYQVVGRALPTPGDEHPKIYRMKLWATNEVRAKSKFWYFLRKLKKVKKSNGQVLAINEIFERNPTTIKNYGIWLRYQSRTGYHNMYKEYRDTTLNGAVEQMYNEMASRHRVRSPCIQIIKTATVHFKLCKRDNTKQFHNSEIKFPLVYRKVRPPTRKLKTTFKASRPNLFM

SEQ ID NO: 236362 - protein, 178 aa, Zea mays; identical to SEQ ID NO: 236361
  Clone ID: MRT4577_147144C.1.pep

SEQ ID NO: 236363 - protein, 107 aa, Zea mays
  Clone ID: MRT4577_147145C.1.pep
EQKSPVLLLNWPHLLYSPNYTTAPSRSKKKKGDRKGCMRGGGGLGHTTRHWAKGPHHHKKATPTLFSPHFLNPAPDTSKQQTLLNKYGVTFDRYTHTHKKTPGTRPF

SEQ ID NO: 236364 - protein, 178 aa, Zea mays; identical to SEQ ID NO: 236352
  Clone ID: MRT4577_147146C.1.pep

SEQ ID NO: 236365 - protein, 165 aa, Zea mays
  Clone ID: MRT4577_147147C.1.pep
LGPSRPAGYYCAHCCSDRGFVCPGHAKTPYVPASQCSKRQQRLAAVDVELMPISKRPHRPALPSVAAHTTTSSVDQPIVTPALQRFAREVSLDAVFRRVRLGGPEPDVAYYTTITIAGHVFRGVLYDVGPHSGSTAASDTDGSGEEVGSSLTTAGGSCLDLSLGM

SEQ ID NO: 236366 - protein, 36 aa, Zea mays
  Clone ID: MRT4577_147148C.1.pep
RKKKKKKKKKKKKKKKKKKKKKKKKKNKKKKKKKKK

SEQ ID NO: 236367 - protein, 97 aa, Zea mays
  unsure (1)..(97): unsure at all Xaa locations
  Clone ID: MRT4577_147149C.1.pep
GEIRSPPPPRLTLPPRKLAGAELSGAGTVRIGGKTRFMGCRGPVWSRRRRQPRPRHGYRRACRDLXGSPPSGAGRPDADGCLRPRQRRPLMTRQVLR

SEQ ID NO: 236368 - protein, 57 aa, Zea mays
  Clone ID: MRT4577_14714C.1.pep
MATSSSSSGPGGPYPPPPSRFGDTTLTKVFVGGLAWETPSDGLRHHFRAYGDILEAV

SEQ ID NO: 236369 - protein, 44 aa, Zea mays
  Clone ID: MRT4577_147150C.1.pep
AAGVGWNDVSLNGAVRIRGSHEGCATSFPTMLKGDIAMISADLP

SEQ ID NO: 236370 - protein, 55 aa, Zea mays
  Clone ID: MRT4577_147151C.1.pep
QYFVTNTLNRLIIKENIITQSLSSIYSINQCYFTCYIIMIQFMQYNISLSKHYMS

SEQ ID NO: 236371 - protein, 111 aa, Zea mays
  Clone ID: MRT4577_147152C.1.pep
NSATFENGGVYYYSERGDRLIDLDAFREKLLQISQELNSQLTEPEKAGLKESVHHLLKWAWRYNKNLEEQAAQLHMLTGWSQIVEVAVSRRMSLFEDCSQLLFERSIPSSQ

SEQ ID NO: 236372 - protein, 390 aa, Zea mays
  Clone ID: MRT4577_147153C.1.pep
MVKDTRYYDVLGVDPSATESEIKKAYYVKARLVHPDKNPNDPQAAEKFQELGEAYQVLSDPTQRQAYDSHGKDGISTEGIIDPATIFAILFGSELFEEYIGQLAMASMASLDNFGEDEQIDARKLQERMQAVQKDREEKLAETLKNRLHIYVQGNKAEFIQHAEAEVSKLRNAAYGVVMLNTIGYVYSRQAAKELGKKVMFLGVPFIAEWFRDKGHFIKSQVTAATGAIALMQLQDNLTKYMSAEGQYTEEELEMYMENHKKVMVDSLWKLNVADIEATLSHVCQMVLQDSSARKEELRLRAKGLKTLGRIFQGAKVNPSEGETSQTKNIDNMDGNDGSSPDSSPNREAQFTPNQPPVPSPYVEAPHVNGVYCPFPMPAAPPGARRDRIP

SEQ ID NO: 236373 - protein, 168 aa, Zea mays
  Clone ID: MRT4577_147154C.1.pep
MHHQAMWKPAWLEALSTEKFFVACPFHEHAKKNEKNICCLDCCTSICPHCVSTHRVHRLLQVRRYVYHDVVRLEDLEKLIDCSGVQSYTINSSKVVFLKKRPQNRQFKGSGNICTSCDRSLQEPYFYCSLDCKVEYILRKKKDLSAYLRPCKTLQLGPDFFISHDADD

SEQ ID NO: 236374 - protein, 136 aa, Zea mays
  Clone ID: MRT4577_147155C.1.pep
SYRSGTLHIPNRIRRRRRLPLASNLTLHIAPFPLDQPVFDERTERSCLTDVGLTHLARGCRGLEKLSLVWCSAISSTGLVRIAENCKNLTSLDLQACFIGDPGLAAIGEGCKLLRKLNLRFVEGTTDEGLIGLVKN

SEQ ID NO: 236375 - protein, 89 aa, Zea mays
  Clone ID: MRT4577_147156C.1.pep
SFQKKKKTPVKFVNFNALKREPCISPVVLHGKFRRLQLPMDGGFPGGFIKAPKFFCVFSKKIWCRRKSASRLIWGIPFKIPPLSPFLAP

SEQ ID NO: 236376 - protein, 152 aa, Zea mays
  unsure (1)..(152): unsure at all Xaa locations
  Clone ID: MRT4577_147157C.1.pep
RHPPSTPPPFRRASPEANARXXXXXEDEXXXKXGEXQXKRXHRXLTXQEDDKGKEXXXDQXGEGATSYEDXTNSXPEKDGRXAXXXXDXXXAEEXQKSRXXXXQRXPXXAKXKSKXXXASXNQKXKXGXKGXQXERQXTXAXEXSXEENKXR

SEQ ID NO: 236377 - protein, 40 aa, Zea mays
  Clone ID: MRT4577_147158C.1.pep
GDDDLSKPGLTMLGPHATENLIYSSTIYRDSEQLNCTMKV

SEQ ID NO: 236378 - protein, 81 aa, Zea mays
  unsure (1)..(81): unsure at all Xaa locations
  Clone ID: MRT4577_147159C.1.pep
SPLARNAHTARAAICDPRSPLPSKMQICRKTLTGETITLXAEYSDTIDNAKDKIQDNEGITPDQQRLISSGKQFDDGRTLA

SEQ ID NO: 236379 - protein, 68 aa, Zea mays
  Clone ID: MRT4577_14715C.1.pep
LRTAANTDHAATTYSQQLDLARDTEGCPSDLLPPSSRPACCTRPSSLARAGLAGAPAGAALAPAVLTS

SEQ ID NO: 236380 - protein, 70 aa, Zea mays
  unsure (1)..(70): unsure at all Xaa locations
  Clone ID: MRT4577_147160C.1.pep
KSXIXXMLTPLLSRFPLYGLLINLGIPQPYQYLYLPXXXSWMTTASLHVLCFTXEFYPIIKFTSSIIFHT

SEQ ID NO: 236381 - protein, 40 aa, Zea mays
  Clone ID: MRT4577_147161C.1.pep
PNYPAGSEDNYPESHRLQSRLLTMHTFLATAVDVRSHKQG

SEQ ID NO: 236382 - protein, 513 aa, Zea mays
  Clone ID: MRT4577_147162C.1.pep
MGDNYDDEGEPIVNLDEREPSPEHQPYEDLDDDLDGGGDWTRDRSPTPVHGDDGGAGSSSKPRKRLLKKGGGGGMPGDDGLDDFGLEDEDADPSAEARKRKGSSSLRDLARGGAGREKKAKKMRMEDDGRGRDTGMVRDRRGSGGRDSGGRDDQDDGEREIQELWDTIAGGESEDDQEGVRTVDDDNFIDDTGVDPADRYGSDNERHSPGRYAQAEEGEEDDEIERLFKGGKKKKKKNDRPRADIGLIVEQFIAEFEVAAEEDANLNRQSKPAINKLMKLPLLIDVLSKKNLQQEFLDHGVLTLLKNWLEPLPDGSMPNMNIRSAVLKLLTDFPIDLEQYDRREQLKKSGLGKVIMFLSKSDEETTANRKLAKELVDKWSRPIFNKSTRFEDMKRYDDERAPYRRPQMKKPSSSSSGMESRDDDLDADFSQRKSGQSSSRQHASRPEASPLDFVIRPQSKIDPEQIRARAKQAVQDQRRLKMNKKLQQLKAPKKKNLQASKLSVEGRGMIKYL

SEQ ID NO: 236383 - protein, 86 aa, Zea mays
  Clone ID: MRT4577_147163C.1.pep
KVTPDMTVDALDDTSSACYTARPWTNFCSPRTPRSPVALTTRTPPPSSKQLITCYSCTAYHTERVGKVSNYRIRFAETKPVKTCTN

SEQ ID NO: 236384 - protein, 352 aa, Zea mays
  Clone ID: MRT4577_147164C.1.pep
MAQAHHPLLLLILLLFLSSTAIPSSKRTQPKFSAVFYFGDSVLDTGNNNHLPTVAVANHAPYGRDFPGKKPTGRFSDGRLIPDLLNERLQLKEFSPPFLDARLPNSDVATGVNFASAGSGFNDQTSRLSNTLPMSKQVDLFEDYLLRLRGIVGDKEASRIVARSLIFISSGTNDFSHYYRSPKKRKMEIGDYQDIVLQMVQVYVKELYDLGGRQFCLAGLPPFGCTPIQITLSGDPDRACVDEQNWDAHVYNSKLQRLLAKLQGSLHGSRIVYVDAYRALMEILENPAKYGFTETTRGCCGTGLREVALLCNAFTPTCKNISSYVFYDAVHPTERVYMLVNDYIVNDVIPQF

SEQ ID NO: 236385 - protein, 140 aa, Zea mays
  unsure (1)..(140): unsure at all Xaa locations
  Clone ID: MRT4577_147165C.1.pep
KKKNDRPRADIGLIVDQFIAEFEVAAEEDANLNRQSKPAINKLMKLPLLIDVLSKXYLESKCQCILSSVYSXPDIKIFLVYLHFXKNLQQEFLDHGVLTLLKNWLEPLPDGSMPNMNIRSAVLKLLTDVGIFIFFGPFAL

SEQ ID NO: 236386 - protein, 54 aa, Zea mays
  Clone ID: MRT4577_147166C.1.pep
LDKGVIVTHAMSSYLSSEVARLLISSDTATALVQCVPTAIPVISLLTDRQIRGQ

SEQ ID NO: 236387 - protein, 77 aa, Zea mays
  Clone ID: MRT4577_147167C.1.pep
KVRVLDKDPLFFFGIRAGKVKVKAPFFFFYFLFFFFLFFFFFFFFFFFFFFFFFSIPDKISLTHNLHATIVKLCRLQ

SEQ ID NO: 236388 - protein, 51 aa, Zea mays
  Clone ID: MRT4577_147168C.1.pep
LDSVSTRVYICIIPLATLTHVCSFRQSWQLHQYVYLHPHALTTKPQNKCHP

SEQ ID NO: 236389 - protein, 239 aa, Zea mays
  unsure (1)..(239): unsure at all Xaa locations
  Clone ID: MRT4577_147169C.1.pep
MSDQILYVTVLVGLLLLYRLANSTDKPKIKGIPEIPGVPLFGNLFQLGTDHARVARKWVAKYGPVFQTRLGNKRVVYVNSYDAVKHFWITHQSALISRPMFHTFHSVVSTSQGFTIGTSPWDESCKARRKAAATALNRPATQSYMPILDLESFVSIKELFDDCEKGTKDLDPSPYFARFALNTSLTLNYGYRINGDVNSELLHEITHVEREIXNFRSTSNNWQDYVPLLRLWGAQNSSA

SEQ ID NO: 236390 - protein, 138 aa, Zea mays
  unsure (1)..(138): unsure at all Xaa locations
  Clone ID: MRT4577_14716C.1.pep
MSPDHGSSRSRRGVWSHWVPLAVTLTVATVGVAAWVWSQRKDTEEEDDNGLDYSNHARGGDHQAYGXTMSARATFKGRXKPPRPDGQSHGIAHANEEATGGXWGXRVTGALRRTPSRQQFFDSTGKTVAAGCPQLQAQ

SEQ ID NO: 236391 - protein, 84 aa, Zea mays
  Clone ID: MRT4577_147170C.1.pep
PPLVLWLRSMGSCPLFPRAESLAHLRCSLRFVATKVSFGEGGRLRRPPPCFLVGSVQGQGPGVSGVFLATHYIPCDMCRWLGGA

SEQ ID NO: 236392 - protein, 86 aa, Zea mays
  Clone ID: MRT4577_147171C.1.pep
YIFFFFFFLSFLPFSSPFFPKGNSLPYNPPLKTTFPGQLQSPPKEQNPRETCPQKPQHEPPGLPGWEIPRPLKPPKQQKIYGPPPQ

SEQ ID NO: 236393 - protein, 76 aa, Zea mays
  Clone ID: MRT4577_147172C.1.pep
KTGRGIIYFWCNPRTLPYFIYIYIYIYIYSPQGGAIGGKHLTNFFPPLKNPNNIRFPFLFTPGKKNWAPPFGRDKT

SEQ ID NO: 236394 - protein, 120 aa, Zea mays
  unsure (1)..(120): unsure at all Xaa locations
  Clone ID: MRT4577_147173C.1.pep
LNETIAIIKHQTSGFDKLEALPMASLFWRRRQQANSKMDTRQSIGAEQTEISLLSPLPSPCSHAVXRRILLSVADSFCAADNSCAAPRTALASPLRLAAPSPDMASIRRGGSSVTETITQ

SEQ ID NO: 236395 - protein, 104 aa, Zea mays
  Clone ID: MRT4577_147174C.1.pep
KPEIFHLGPGVSALGRQRGAFRKKKGGVLCSGETPSTHVRCGEIPWVKKWGPKTFLEGPEKILFGESSLKVPNPVWAGNGELGASPKSCPGKPGYNSRGVFFGL

SEQ ID NO: 236396 - protein, 659 aa, Zea mays
  Clone ID: MRT4577_147175C.1.pep
MRKAASTAMAGAGATFRRRAMEGLATVLLLYALLVLALESPLVSTSPFGGAAGGTARKLHLSFGAGERAAPARPASASVPGASAHGQDHRLSRFATGLDVRLLDSARSGALRRSIADAVAAGARAFSDLEALDPAVVAAPSGESDAARCPHSIALTAEELGARGRVVELPCGLALGSHITVAATPRAPHEERNPAIAVLRDGERHAMVSQFMVELQGLRAVDGEDPPRVLHFNPRLRGDWSGHPVIEQNTCYRMSWGAAQRCDGWRSRPDEETVDGLVKCEKWIRDDDDRLEKSKTTSKTAWWLNRLIGQKEEVNFGWPFPFVEGRLFVLTLSAGLEGYHVSVDGRHVTSFPYRTGFVLEDATGLSLNGDLDVHSVIAGSLPTTHPSFVPQNYLEFSTVWQAPLLPDEPVEIFIGILSAANHFAERMGVRKTWMSVVHKSPNMVARFFVALHGRTEVNAELKKEAEFFRDIVFVPFLDNYDLVVMKTLAICEYGLANFGLARVFGIPVRTFTHEVVTLWYRAPEILLGERQYSMPVDVWVLGTPNEQSWPGVTSLPDFKSAFPKCQSQDLAAVVPNLEPAGLDLLSPIYVFIAHGQKMLRYEPSKRITARQALEHDYFKDLEMKCENPNNNEIFLSKSSYISLHYASFVMLETYMAPFQ

SEQ ID NO: 236397 - protein, 58 aa, Zea mays
  Clone ID: MRT4577_147176C.1.pep
MSEGTANCVDILIAIILPTLGVFLMYRCGHQLWIWLLLSFLGYILGIIYAIYAIIKNS

SEQ ID NO: 236398 - protein, 110 aa, Zea mays
  Clone ID: MRT4577_147177C.1.pep
PESAGSEQRKGRSAKKYTFRGLSLEDLVALNTDQLKGHLRARIRRRFNRGLKHKYTRLVQKLRKAKIGVQPGEKPVAVKTHLRNAIVLPEMVGSVVPVHTDKKFPNVQIN

SEQ ID NO: 236399 - protein, 99 aa, Zea mays
  Clone ID: MRT4577_147178C.1.pep
GSLVKMLKAKKKNLTSRSARITVAQHARSPPDREMRIRGDALGHQRLRLRVRGRRHGTRVHGAARAAPVASGAPAAGDHGAFVAVGGRLPAAAYHVVMR

SEQ ID NO: 236400 - protein, 72 aa, Zea mays
  Clone ID: MRT4577_147179C.1.pep
HPPPCAPSPWWSVSHGSFKLGMCMSRLVTSLHMEVVKVSRPRVRRRDSVRLIMGRLCCVCVLPKTTLNPEYV

SEQ ID NO: 236401 - protein, 158 aa, Zea mays
  unsure (1)..(158): unsure at all Xaa locations
  Clone ID: MRT4577_14717C.1.pep
MSINKIYLRSHQEEYHPSALKVVFDEYIYTLICDFAGHISVMYFTKLTGSVPTNTADLITTAMWHAFSLIASASVVANILXVYVNPPETLGAFLRGXNITLVRGVLYWMTQMLASTAACLLLRFSTGGXDTCTFALTTMTMREAMPLRIMMTFSLVYT

SEQ ID NO: 236402 - protein, 75 aa, Zea mays
  unsure (1)..(75): unsure at all Xaa locations
  Clone ID: MRT4577_147180C.1.pep
DKIRXITSSRNGSRSRRAGLASCERSSSGDPSDPNRMGSFAPISSIRPLSAQRAHHSRVTLDQYMILVNNGKVFT

SEQ ID NO: 236403 - protein, 78 aa, Zea mays
  Clone ID: MRT4577_147181C.1.pep
VSGGVLLEKNFSHQDRFFLGPAPPASGQVFSFLFEGIFVFCWGLFPPFVLGGHFVFKLLVTVLFCGGMGPQGVALGGV

SEQ ID NO: 236404 - protein, 41 aa, Zea mays
  Clone ID: MRT4577_147182C.1.pep
RRNGKTKYEVARDETVKHVQQVFNSLGIHVLAQTIRDVISP

SEQ ID NO: 236405 - protein, 41 aa, Zea mays
  Clone ID: MRT4577_147183C.1.pep
CHLQTYKLCMTLPFSELALYTRGVECSTFRCCHFTHRLWET

SEQ ID NO: 236406 - protein, 588 aa, Zea mays
  unsure (1)..(588): unsure at all Xaa locations
  Clone ID: MRT4577_147184C.1.pep
MGMAALLLVWALLHCAGTVTMVRASHAVYPELQSLEAEKVDETSRTGYHFQPPKHWINDPNGPMYYKGLYHLFYQYNPKGAVWGNIVWAHSVSTDLIDWTALAPGIYPSRQFDVKGCWSGSATVLPSGVPVVMYTGIDPDEHQVQNVAYPKNLSDPFLREWVKPDYNPIIXXDSGVNASAFRDPTTAWYGPDRHWRLLVGSKVGGKGLAVLYRSRDFRRWVKAHHPLHSGLTGMWECPDFFPVAVHGGGRHYRRGVDTAELHDRALAEEVKYVLKVSLDLTRYEYYTVGTYDHATDRYXXDAGFRDNDYGLRYDYGDFYASKSFYDPAKRRRVLWGWANESDTVPDDRRKGWAGIQAIPRKLWLSPRVRQLIQWPVEEVKALRAKHVNVSDKVVKSGQYFEVTGFKSVQSDVEVEFAIGDLSKAERFNPRWLTDPQALCKKRGARETGEVGPFGLWVLAAGDLTERTAVFFRVFRANSSSSSRLVVLMCNDPTNSTFEAQVYRPTFASFVNVDIARTKTIALRTLIDHSVVESFGAGGRTCILTRVYPKKALGDNAHLFVFNHGEVDVKVTRLDAWEMRTPKMNVPAQ

SEQ ID NO: 236407 - protein, 94 aa, Zea mays
  Clone ID: MRT4577_147185C.1.pep
MPTRLPLRLLLLVLAIAGAAHGRRGISFSDDDRSLLLAGSSDDGCRRDASPPATVRGWGGSFYQASEMTYDYLRSTDTVPPKDSLEPLYHSCTR

SEQ ID NO: 236408 - protein, 65 aa, Zea mays
  unsure (1)..(65): unsure at all Xaa locations
  Clone ID: MRT4577_147186C.1.pep
GSSHIDHTVNXPRVYTDAQHYSEILTGRIRVNLIPCAHYKVLLGYGQFYLDSLLGLVPCVQKDLL

SEQ ID NO: 236409 - protein, 94 aa, Zea mays
  Clone ID: MRT4577_147187C.1.pep
GWAWSEGKVNDYGVDDVMLNTHLAICALRVYTHIPNTEKERGMRATKEWKCSLHCLPNSGLPCTHIIYSTGEHLSEGLKIWWMYLGQMNSIIGP

SEQ ID NO: 236410 - protein, 104 aa, Zea mays
  Clone ID: MRT4577_147188C.1.pep
RIFLLGFFYTCFFLCTVLIRMHGRVCFCSICVPHNSTASPGSVHSIYATFDSSNDARQHADVLVPTAIQRLVKKWSRMSSSYLIFCVPYGQCTCHCSRKRPAKR

SEQ ID NO: 236411 - protein, 49 aa, Zea mays
  Clone ID: MRT4577_147189C.1.pep
EKVKEIYSALFLHNVKVSGRVMFKTLSHHVKVPSHLCLKIKKKKKGRAV

SEQ ID NO: 236412 - protein, 93 aa, Zea mays
  Clone ID: MRT4577_14718C.1.pep
KIYVQTLLLNTQEGEPQCLLPTEAALCSRTVGCTAVSQAGVSGLFPSNHPFQEIQQPTRHWASAWLPFPPGRAALGIIPGNLPAPEQKPCWDP

SEQ ID NO: 236413 - protein, 82 aa, Zea mays
  Clone ID: MRT4577_147190C.1.pep
DSPWLQSLENRRPPKCYIVVRRMDGPRDQVPTTQHSTISACKKRCHIRMWAWLIEDGTYSHSERGRWKQGSTCKELDRNQSS

SEQ ID NO: 236414 - protein, 164 aa, Zea mays
  unsure (1)..(164): unsure at all Xaa locations
  Clone ID: MRT4577_147191C.1.pep
MAGVLSRCTGRSPHSPLFAGPTTAPILMASAASSAVGAGKSLFQGLRRFLKKPWEXTGPCASPEYRSALPGALEYRVKCPATVRDDRDKAIVPTSDPETVYDIKYFTRDRRRSRPPVRRTLLRKPDLESYMATKQFDPTIDFPVPYVNTTVEEDDNTVGGGYQK

SEQ ID NO: 236415 - protein, 91 aa, Zea mays
  Clone ID: MRT4577_147192C.1.pep
SPLVLGNAPTFLHQQLLHHQFLPQIVPALTKLVGANPGAFLQQLLPFSQLFVSNFAGYLQQGPQFLYPLPVANPLVAAFLQQQPIVGGALF

SEQ ID NO: 236416 - protein, 53 aa, Zea mays
  unsure (1)..(53): unsure at all Xaa locations
  Clone ID: MRT4577_147193C.1.pep
MQLMTKNRVKQIPXVIDGPGILGMVSIGNFVGGVVAKHREELNRLNDYIQGGF

SEQ ID NO: 236417 - protein, 50 aa, Zea mays
  Clone ID: MRT4577_147194C.1.pep
CRRYQSQARSFRGERTASVFRSQVADLCMHSIIVRRLNFYYLYAGDSSCC

SEQ ID NO: 236418 - protein, 84 aa, Zea mays
  Clone ID: MRT4577_147195C.1.pep
LPGPPKQKVKQLFRSWAFEKGGPFNMGKGLKTPDIQMMDFGPQKGPPPSLKLGPDLEDHGRIGSFLFPPELVRTSPPRGFELFF

SEQ ID NO: 236419 - protein, 82 aa, Zea mays
  Clone ID: MRT4577_147196C.1.pep
VVKVRSSSCGSNASPDNRMILVSRTSLVSAQGVVERVVVRVPEETAEETAVLKIGRGHLDQLTRDSVNRRASRTRTRTGGGG

SEQ ID NO: 236420 - protein, 86 aa, Zea mays
  unsure (1)..(86): unsure at all Xaa locations
  Clone ID: MRT4577_147197C.1.pep
LVPALYLAVAPWLTVEDTTRASVGNAFLLRLAPNLGLDKDPDEALXWEGGTTTRGHNATLITGHIHGLTLGIKTRLSLRMQTASMY

SEQ ID NO: 236421 - protein, 87 aa, Zea mays
  Clone ID: MRT4577_147198C.1.pep
LCSSDIVIINSSGDVVVFKTIGVICSMASSSALMIITLVLPCSQRGSAFHYHLPQVISARNHDIQRLGRHIQIIPAGAGGGKIASVE

SEQ ID NO: 236422 - protein, 93 aa, Zea mays
  Clone ID: MRT4577_147199C.1.pep
LIDAAHDRDGQHERDAIADRDPSFIGFCARALPAPYSYSPAQTALPCFSRSSMALPYDMLHEKHGNIGAPFTHRRENCCVLVLYCRFSTLKKM

SEQ ID NO: 236423 - protein, 63 aa, Zea mays
  unsure (1)..(63): unsure at all Xaa locations
  Clone ID: MRT4577_14719C.1.pep
SYSVTKXLMCVRSSGRRDEXLRSWAAGXXARAQLSYXAGEVYWRRXTVARWXPTRVIFPGLFT

SEQ ID NO: 236424 - protein, 312 aa, Zea mays
  unsure (1)..(312): unsure at all Xaa locations
  Clone ID: MRT4577_1471C.1.pep
GVDVDIQKXKAACDRARAQLEAASQSADAASASIAQPRDAHLARQLLELCHAVLDMWRAMRQHHEAQGLLAQQLRGLSSRTSMDPTSEIHHRATRALEAAMNAWSAAMAHMAKHQRDYVHAVHGWLKLTLTPVNGAADAEASPVAAELTAFVDRWGKVLDRVHCVDVLKSIKSFAGAVRAIHALQSDELRVARRVRQYSREDRKSRMLRQVEKSYYDSYLPGGMSMWHWGRQAHDAGNEVAQRRDEIAACRKMVEDEMRRHAKAIDATRTATVTAVQGKLPAVFQSMAAFSASLANSLEAAYRAPQQNNMQE

SEQ ID NO: 236425 - protein, 93 aa, Zea mays
  Clone ID: MRT4577_147200C.1.pep
DAWADAWVKKKKKKKKKKKEKKKKKKKKKKKKKKKKKKKKKKKKKKKKKKINKKRVALFKNSMFIILQISCHYFFFSLPKLKFFGLFLKYSFL

SEQ ID NO: 236426 - protein, 121 aa, Zea mays
  Clone ID: MRT4577_147201C.1.pep
FRHETVLTASTLTDEHEPQERPWYRPWRVQGGGAYLDPIIIFIRLEVVTSGRGAPSPDRLKCSCSTSSRRWCHRSRRCKTKRRPRWPPRSRGAGLGGRGGEDRALDAAGGRGLQVRGHAVA

SEQ ID NO: 236427 - protein, 35 aa, Zea mays
  Clone ID: MRT4577_147202C.1.pep
QLAGIIYTSDIKINKSINRMFNHPTLERPIQRFVG

SEQ ID NO: 236428 - protein, 107 aa, Zea mays
  Clone ID: MRT4577_147203C.1.pep
TCPGFFFEPLFLTPLAFCPPELLSKAFFVQIQDWFSPLDFFPGWVHFKGVSPPILEIINEPCGLFKSPLRKPFCAKFHFFFQSFVFRYPLFSFEYFLGLVWFFGFGR

SEQ ID NO: 236429 - protein, 38 aa, Zea mays
  Clone ID: MRT4577_147204C.1.pep
RYRNTGSKHVVTLKTPYLFGMFRTLDLIKLILTFHKHA

SEQ ID NO: 236430 - protein, 165 aa, Zea mays
  unsure (1)..(165): unsure at all Xaa locations
  Clone ID: MRT4577_147205C.1.pep
AQQWSVMDLMFGGVDEEINGLRTKLRAAAQAEERGRKAADELAAALAAVTMEAKQLKAWLADAQAELEAAGAESDRLRGLLQGAEAELWSATERADALASDWKEAAAGWRAREKALLARARAAEKDDDNAALRRALERAAEEARASXEALEAXRADCAXLXEAXA

SEQ ID NO: 236431 - protein, 69 aa, Zea mays
  Clone ID: MRT4577_147206C.1.pep
KTRGLGLHPPGIQLSGPDAELCCPGCVALSPTNIPRPAVPPPFHLPAPRPVSCRASHWVFLLSVFGCPP

SEQ ID NO: 236432 - protein, 94 aa, Zea mays
  Clone ID: MRT4577_147207C.1.pep
YKERCFCDTGGVTADVDTASLTATGGTERDEGHRCAVVLPTDRGCIPYSRGQHLHVSCVRRSPSSFLIAWQVCVTRYRWDHTRGEQTHALNKVH

SEQ ID NO: 236433 - protein, 81 aa, Zea mays
  unsure (1)..(81): unsure at all Xaa locations
  Clone ID: MRT4577_147209C.1.pep
TVNLTRSVSXLCGXGXXXQXTPGXXSXVRVXXWSGQXTXXRXPVGQVSRSXLPIFFXIFEXXLWLWIXKLLVXQXWVPVTK

SEQ ID NO: 236434 - protein, 62 aa, Zea mays
  Clone ID: MRT4577_14720C.1.pep
WRCYLSKMDVWMHMTTDRKGSLVFSDVSLDFVVVEVDVERGLRDYVTYVCQYGVVSVVGDCL

SEQ ID NO: 236435 - protein, 241 aa, Zea mays
  Clone ID: MRT4577_147211C.1.pep
MLRDCFHYSLNTSTCRAKILVKYFGEDFGPDGCRMCDICTNGPPQMHDFKEEAIVFMNVLQGRSGGETDEMIYSRVPHYSSGRRGFGEAPNFRMVVSHIREKLPRFAATDKIWWQGLSRILEGLRYVEEAAETPRVSMQYPELTEDGLKFLSSSQSEAPLYAYPDAAMLLAMKEPRPFSGFSDWGRGWADPETRRQRLAGKKAGRRKRKWRSRGRQQQQQPGGFTTARERLTAILAKKKKR

SEQ ID NO: 236436 - protein, 227 aa, Zea mays
  unsure (1)..(227): unsure at all Xaa locations
  Clone ID: MRT4577_147212C.1.pep
MADAGEGRRVCGMPEKAQLHVAMLALQFGYAGFHVVSRLALNMGISKLVFPVYRNIIALCLLVPFAYFLEKKDRPQLTFNFVVQFFFLALCGITANQGFYLLGLDNTSPTFASAIQNSVPAITFAMAAALRIEKVRLDRRDGVAKVAGTLACVAGASVITLYKGPTIFGPSGGLELAATSKAVAGDKNWTLGCVYLIGHCLSWSGWLVLQAPVLKKXXARLPRSCYP

SEQ ID NO: 236437 - protein, 496 aa, Zea mays
  unsure (1)..(496): unsure at all Xaa locations
  Clone ID: MRT4577_147213C.1.pep
MADSGEGRRVCGMPEKAQLHVAMLLLQFGYAGFHVVSRLALNMGISKLVFPVYRNIIALCLLVPFAYFLEKKDRPQLTLNFVVQFFLLALCGITANQGFYLLGLDNTSPTFASAIQNSVPAITFAMAAALRIEKVRLDRRDGVAKVAGTLACVAGASVIALYKGPTIFGPSGSGGGGGLELAAVGGDKNWTLGCVYLIGHCLSWSGWLVLQAPVLKKYPARLSVTSYTCFFGVIQFLVIAAFMERDAEAWKFHSGSELFTILYAXYISISLLISLITIIYICTEKENERHTCPPDARGKSGGAPRNNTKLIAIASCANDARPFSIQYCIIMNXKLVAGLIISCLSIIRSLKQQPFGSXLMMFLCMPXGFIASGVAFAVQIWCIDRGGPVFVAVYQPVQTLVVAIMASLTLGEKFYLGGIIGAVLIVAGLYLVLWGKSEERARVARDAVSGGDREGLLVAAAAGGGGGGIIRSAGNKVASAATQPLLLPSSTSTDNV

SEQ ID NO: 236438 - protein, 392 aa, Zea mays
  unsure (1)..(392): unsure at all Xaa locations
  Clone ID: MRT4577_147214C.1.pep
MADAGEGRRVCGMPEKAQLHVAMLALQFGYAGFHVVSRLALNMGISKLVFPVYRNIIALCLLVPFAYFLEKKDRPQLTLNFVVQFFFLALCGITANQGFYLLGLDNTSPTFASAIQNSVPAITFAMAAALRIEKVRLDRRDGVAKVXGTLACVAGASVITLYKGPTIFGPSASGGLELAATSXAVAGDKNWTLGCVYLIGHCLSWSGWLVLQAPVLKKYPARLSVTSYTCFFGVIQFLIIAAFMERDADAWKFHSGSELFTILYAGFIASGVAFAVQIWCIDRGGPVFVAVYQPVQTLVVAIMASLTMGEKFYLGGIIGAVLIIAGLYLVLWGKSEERARFARDAATLVSGTGDREGLLPAGGGGIRSASKAAASAATQPLLLPSSTSTDNV

SEQ ID NO: 236439 - protein, 82 aa, Zea mays
  Clone ID: MRT4577_147215C.1.pep
SAFGSSSFGFQCFSVGFRFLPMGCSSLLKGWPWLAPGFWGWLIGFFLAFYRIFFFFKKWARLFQELCPAFLLSWFGLVLVFS

SEQ ID NO: 236440 - protein, 99 aa, Zea mays
  Clone ID: MRT4577_147216C.1.pep
ILDTYTSSPPFFFFLRIDPLGRDLVFSLWVLHTQRADYHIIPSHTQRIAPLTRRLLTDPNLHDHHEPPYFCHSPATHDELSCPESERIICGESAALFWG

SEQ ID NO: 236441 - protein, 52 aa, Zea mays
  Clone ID: MRT4577_147217C.1.pep
KLKEIKNGRLAMLPILGYFMQGLVAGVGPFQNLLDRLGVSVFKNVLTTPQFL

SEQ ID NO: 236442 - protein, 102 aa, Zea mays
  Clone ID: MRT4577_147218C.1.pep
IVRLWIMRCSLNCLTAINTYTIESSIKKYLLRIGTKALGSRLCNINIFMISMKVQQRPSSSGSLGKCSSSCPPSGSLWSGPGACTRQPWPMEEHWRPGGGAL

SEQ ID NO: 236443 - protein, 109 aa, Zea mays
  Clone ID: MRT4577_147219C.1.pep
PPAKQCIKDTNMPIGPLRKPKYIQAKWLGTPQREIPPPPPVAPKNPVVAVPSVAVGFFPKKQTKFRGSIFTFNFCRTPLEVPLWRPTHKSFPPPGIKSSLKKNKKASPF

SEQ ID NO: 236444 - protein, 82 aa, Zea mays
  Clone ID: MRT4577_14721C.1.pep
AVLAYTKQNLCWEPSLYICIWGTKLGHYLLTKTLSITDRCTKKCTKNTMDALPSSPSASQYHFPMMKPVRIMSRLPHTWLVC

SEQ ID NO: 236445 - protein, 45 aa, Zea mays
  unsure (1)..(45): unsure at all Xaa locations
  Clone ID: MRT4577_147220C.1.pep
LIXRLFDKYHIYXCIHLNNIGGGGYNNAISIYILYDIIDILKFKL

SEQ ID NO: 236446 - protein, 75 aa, Zea mays
  Clone ID: MRT4577_147221C.1.pep
LFIKRSRSLVPISSWRDVLSSLCVMIIPHVTALRSYNMCVASSSCIQGYAVRLLLSHDKNIRFASLELEKSCKCP

SEQ ID NO: 236447 - protein, 48 aa, Zea mays
  Clone ID: MRT4577_147222C.1.pep
DSALRDHWLSKTAKPTRYRPHTSRVNTSDTILEMPPPRNMTTFSASSF

SEQ ID NO: 236448 - protein, 157 aa, Zea mays
  unsure (1)..(157): unsure at all Xaa locations
  Clone ID: MRT4577_147223C.1.pep
MNHRNYNVQRATAVFENQPHIFLNDKAAGSLKNIRSRKWYEDDELPFRTPNTDIGDTYLDDNCPFLGVDSIRGRILTGYXMASKMHRTLIFRREYFHFFSYHSRYKKCHNNLRPHVSLAFLVEPSDQVAVARCRALSQTDRFHVLRVLLLKGKDGNI

SEQ ID NO: 236449 - protein, 70 aa, Zea mays
  Clone ID: MRT4577_147224C.1.pep
FLQLWVCTSHPATQLSKFLQQWVFKLMRHGPVDVLSFGKNIGSFEATVVMTPVLCRNTFINNPSNQSATT

SEQ ID NO: 236450 - protein, 142 aa, Zea mays
  Clone ID: MRT4577_147225C.1.pep
MAASASTGSGLGGASLLSRPRFSTIFTRGTRLSARNPLMRRNLDRNGRITCVTVPRHWLYRYLRGIGFPLIRCMGPSIVPLINGNSLTEIFFSSIAQDVVHFPTSPSVMSQVWLGLVTWYLALIIVLSFADIRFKVSTEDYF

SEQ ID NO: 236451 - protein, 84 aa, Zea mays
  unsure (1)..(84): unsure at all Xaa locations
  Clone ID: MRT4577_147226C.1.pep
MXEMMQVVASAAGLLPGERSWLCLNSGGGGHRWSLVKGGHGRRHDNRSWIVIPACSSSAVRRSSRPIAFFKGEEVEGPKLTLGD

SEQ ID NO: 236452 - protein, 180 aa, Zea mays
  unsure (1)..(180): unsure at all Xaa locations
  Clone ID: MRT4577_147227C.1.pep
CHCSSVRAALSRLFTSCSWRSQRRTYSRQPLAWRRLLLLQQRCAPFQARAAACGAGHSAHGXKADAPRVASSSVARVVRASAAAVHRVKLVGPDGSESELEVAEDTYVLDAAEEAGLELPYSCRAGSCATCAGKLASGEVDQSEGSFLDDAQRAEGYVLTCVSYPRADCVIYTHKEEEVH

SEQ ID NO: 236453 - protein, 46 aa, Zea mays
  Clone ID: MRT4577_147228C.1.pep
VKALCFPPVGCSVFSALVTPLSLPLCSFSVCHARPLYKGFVYLAMF

SEQ ID NO: 236454 - protein, 102 aa, Zea mays
  Clone ID: MRT4577_147229C.1.pep
CSLTLQNHPLAASYFYNSLLVVKNHNYWQVLLNSNPMLSILWHITYILLDFSQCMNLDSPTMPYKNDCVSTYLLRMLLLPYFDIVLLTLPILIPMLTISLFQ

SEQ ID NO: 236455 - protein, 167 aa, Zea mays
  Clone ID: MRT4577_14722C.1.pep
CHDRGFLHRDVSLSLLSLLPAGNRVAPVPAPAPHRGSPVWPRPRPRATISTRPELDARTRSFGMARRSGGSSATTRRSSWTDASTWTILASQTLPITVHHYKASRPSFVGFFEPESALHALVRYHVIFLAYIWREISDTTNASQVVLTRTSSSAGTITSLCSRWRAT

SEQ ID NO: 236456 - protein, 172 aa, Zea mays
  unsure (1)..(172): unsure at all Xaa locations
  Clone ID: MRT4577_147230C.1.pep
AISRLFTSCSWRSQRPTYSRQPLAWRRRLLLLQRCAPFQARAAACGAGHSAHGXKADAPRVASSSVARVVRASAAAVHRVKLVGPDGSESELEVAEDTYVLDAAEEAGLELPYSCRAGSCATCAGKLASGEVDQSEGSFLDDAQRAEGYVLTCVSYPRADCVIYTHKEEEVH

SEQ ID NO: 236457 - protein, 46 aa, Zea mays
  Clone ID: MRT4577_147231C.1.pep
NQLRNVYNTALCFTVRFVALKLCKTKFIRFLHIKKKKILLYQLVNY

SEQ ID NO: 236458 - protein, 66 aa, Zea mays
  Clone ID: MRT4577_147232C.1.pep
AQTDVHGHQFVSLSHELVEPHRVSQEVLVHLRSPRLCPLGLRPVKPGERLYSLSFAGMLTREQMPH

SEQ ID NO: 236459 - protein, 122 aa, Zea mays
  Clone ID: MRT4577_147233C.1.pep
LNPLRGTHNRPPPGGYILVTHQPPSCSPRPPDPVPPDNERSPPLSHGRGVLHCRRSTGSIGGVQIGCSGHCCTPVFEFLPRRSRIRVSGAQNCSSERNRVLASVPLRGPASLCFGRLKTSKS

SEQ ID NO: 236460 - protein, 137 aa, Zea mays
  unsure (1)..(137): unsure at all Xaa locations
  Clone ID: MRT4577_147234C.1.pep
MASTKQIDRKSTVGKDTRMQLXATNSARXSAPTTGGVNKPHMYRPGMVVLXMIRKYQMITELVIRMLPFHRLVREIAQDLQTDLRVQRHPVLVLQEAGEVYLAGLFEDTNLCAIHAKRGIMMSKDIQLDRRIRSNWA

SEQ ID NO: 236461 - protein, 112 aa, Zea mays
  Clone ID: MRT4577_147235C.1.pep
LSFFFFFFFFFFGVLGFLLLVFFFLAKAKFPLFWDLFFLVSTGGLHLFIFMHTKKAQGPLPSITFPPTGGKEKPPVATNEGNNNVRGGIQHDTTGGVSKHSFSTRVFFNLPV

SEQ ID NO: 236462 - protein, 74 aa, Zea mays
  unsure (1)..(74): unsure at all Xaa locations
  Clone ID: MRT4577_147236C.1.pep
MMFNSNLPRRIIMETQXLFSEPAPVIIESSSEENMRYFNAMILGPAQSPYEGGDYTLALXLPEVYPLAAPQGRS

SEQ ID NO: 236463 - protein, 124 aa, Zea mays
  unsure (1)..(124): unsure at all Xaa locations
  Clone ID: MRT4577_147237C.1.pep
MWLEAPMVKKAPKEKKAPKENKPSAGKKPTAHPTYAEMIVXAIAALKERKGSSXWLITKYVEGQHGGELPTNFRTQLTEQLKKLAAAGKLTRVKNSFKLTAXPDAKPKAAQVNAPKDGPKPKPS

SEQ ID NO: 236464 - protein, 36 aa, Zea mays
  Clone ID: MRT4577_147238C.1.pep
QICCWPGLVTAASFFFQNKCSRHIYYTSHLILAITT

SEQ ID NO: 236465 - protein, 68 aa, Zea mays
  unsure (1)..(68): unsure at all Xaa locations
  Clone ID: MRT4577_147239C.1.pep
STSQTHHLTMSSDRIGPERQGLEAKRRGGAPLXPTHXISKITLKEPXFHMRPEAKTNHTPLKTSNEWV

SEQ ID NO: 236466 - protein, 108 aa, Zea mays
  Clone ID: MRT4577_14723C.1.pep
NKKRATSKRAGLCSALLSNLGFPFYVCARAGMLKQTPRACCGAPGVGEYNFNLTSKCGEPGAYACPDPSNHWSWDGIHLTEAAYGHIARGWLYGPFADPPILDAKHLG

SEQ ID NO: 236467 - protein, 103 aa, Zea mays
  Clone ID: MRT4577_147240C.1.pep
KWGVSFFFRFGKKKHSLFLFALQKNVSDFDAFFQGFIKLFLLTPLGVFLVGEHLGRNRPLTSFFALLFWGDTGGQHRLFLSQPLPQNQTTYLGGWSRPIRSCF

SEQ ID NO: 236468 - protein, 195 aa, Zea mays
  unsure (1)..(195): unsure at all Xaa locations
  Clone ID: MRT4577_147241C.1.pep
PTRPRTRGRYWTAYADGDCEGCSYTGTFRAPKCQAGCGQPTQRWYHVPRSWLQPSRNLLVVLEELGGGDSSKIALAKRSVSSVCADVSEDHPNIKKWQIESYGEREPAGPRCXLRCAHGQSISAIRFASFGTPVGTCGNFQQGGCHSASSHAVLEKRCIGLQRCVVAISPDNFGGDPCPSVTKRVAVEAVCSPAA

SEQ ID NO: 236469 - protein, 184 aa, Zea mays
  unsure (1)..(184): unsure at all Xaa locations
  Clone ID: MRT4577_147242C.1.pep
ETQSQTQAHGATERAQGPPAGTGKQPGHPGKRKQADGKKEKKEEPPAAGGRGSRKHKPEKGNEAAERHPAEATTRKSRRTATQXKRGKDHXXKEEESRASQERQRPSEDKTEEDRAKDNNPRGTPKNAETQEETSDESQAQRTPRERPEDDDGTPRPEEKDQXEPGRATPKHNKAPAEAETEKD

SEQ ID NO: 236470 - protein, 74 aa, Zea mays
  unsure (1)..(74): unsure at all Xaa locations
  Clone ID: MRT4577_147243C.1.pep
VENIHAIFRLHITHSWVEVPTFEGRPFIAGNGFFEALINXKGRHAALPHHTINPILASPNCIXTLNQLVSQEAD

SEQ ID NO: 236471 - protein, 201 aa, Zea mays
  Clone ID: MRT4577_147244C.1.pep
RAKAEVWTILDSVGRRGPPYAQVHCKRCSYTGTFRAPKCQAGCGQPTQRWYHVPRSWLQPSRNLLVVLEELGGGDSSKSAVGRRSVSSVCADVSEDHPNIKKWQIESYGEREHRRAKVHLRCAHGQSISAIRFASFGTPVGTCGNFQQGGCHSASSHAVLEKRCIGLQRCVVAISPDNFGGDPCPSVTKRVAVEAVCSPAA

SEQ ID NO: 236472 - protein, 142 aa, Zea mays
  Clone ID: MRT4577_147245C.1.pep
MHDSAGHSGFPATYSRLKQLFYWTVQVPVQILQRRKLIAQVKVRWSGMLEELATWKDAKALRARFPAAQVVFQARGNVSTDEEQSEKGIGVPADEERGKGAGTTNSMATVGSVILWPFACVVKTCGRVPLRGVAKATRELSE

SEQ ID NO: 236473 - protein, 193 aa, Zea mays
  Clone ID: MRT4577_147246C.1.pep
MQLDRFMAASVVVLAVVVSLAAVLPIARAEIKTTPIVSDSRSVILFEEFGFRRGGHATVSATGITWRVPEDSQLQAVDTTLMGFFLISNSLFYKINNESDYAEATGGAFCPLTSKYVQRLFLFKEVAPDGTGRGSLTIDSDDQYTVLFSSCQEGVEVTMEVRTEMYNLRRSGAREYLPVGLLPLPWIFAAAAL

SEQ ID NO: 236474 - protein, 84 aa, Zea mays
  unsure (1)..(84): unsure at all Xaa locations
  Clone ID: MRT4577_147247C.1.pep
FPRRAXKKANAVDSTXEVASHXTQVQGDYSPITSDEKPSVEVVKVTHEMKSYPAHGKLRXERMNKSLLGGRQKKPPEAFKNENK

SEQ ID NO: 236475 - protein, 60 aa, Zea mays
  Clone ID: MRT4577_147248C.1.pep
PGFRGGRKTSSIGICFSKKKTEWVYKATINTRIKGDSFFLVDFFGGKIYTDLKKKSGFLS

SEQ ID NO: 236476 - protein, 110 aa, Zea mays
  Clone ID: MRT4577_147249C.1.pep
QTSVLAYEERMIRTNPTSCGERQLSSMLIQQTQDTRRRALIGYGPKAIGLPYDGYDHDLANQIKSYEREMRLNLLRRFTLWLARPCHVGTGLPLIYKDRTRYPSLQWGWI

SEQ ID NO: 236477 - protein, 44 aa, Zea mays
  Clone ID: MRT4577_14724C.1.pep
RGHSVSSGTPTFVGNELQAHRVMVLQGQEDGIVSCEFPSSTMSS

SEQ ID NO: 236478 - protein, 135 aa, Zea mays
  unsure (1)..(135): unsure at all Xaa locations
  Clone ID: MRT4577_147250C.1.pep
TIFYTVIIHPRRALHQEKRAIXPPPPPLYYXQYHPPPPSPHFYHTNPPPPSMXYQPPPHASTTPSPSFFLIGRXAITLWIRDLALXMDDNYLYSFFSHTDXVISVNIIXNNHTDQPLCYVFIKYSNHSLFQHISS

SEQ ID NO: 236479 - protein, 59 aa, Zea mays
  unsure (1)..(59): unsure at all Xaa locations
  Clone ID: MRT4577_147251C.1.pep
KSLSHLLPIMHASMRTRRQEPWQLKVRIQAFISLAHRHQLPIRPRADTKLRXGXXGSAQ

SEQ ID NO: 236480 - protein, 51 aa, Zea mays
  Clone ID: MRT4577_147252C.1.pep
QIFCRVFFFGHSTKKLFAECFIFDTQQKTSLPSVKNITLNKELFIDCFFQH

SEQ ID NO: 236481 - protein, 89 aa, Zea mays
  Clone ID: MRT4577_147253C.1.pep
KKKNPPRSPRLWNQDVWDYTGGFFKGGGGGGDTFFKNRWKGFSPLFGTPGQFIWGKKGGKRGAFPLNPHLFLFWRSMENWFWGKVAPKF

SEQ ID NO: 236482 - protein, 91 aa, Zea mays
  unsure (1)..(91): unsure at all Xaa locations
  Clone ID: MRT4577_147254C.1.pep
HTFISSLQWCGTCXIYGKAMGTDRATPQQNAMGDGACLCCMLHFIIVYMYLSLILPPTPKQLSSTAPMVTVDFCTLVRVWYSLSILMRVEI

SEQ ID NO: 236483 - protein, 367 aa, Zea mays
  unsure (1)..(367): unsure at all Xaa locations
  Clone ID: MRT4577_147255C.1.pep
YEEEVTREFLMLMEQGEEKARTPSLRLXVSSLKSGAKPGSGVDATCYISDLGKGLGPVVQTRDGGYLAATNPFDIPVERKELPKLAMQLSKPFILRDQKPPGGGAEVFQRLCAGGSEALCAKLGALISMDDVVGKTAEQIAFEGMASAIISARSKDLVASSSAAESVSLLRTMSAATNYGRQERIATGIWNAQEAPVTADEILAFSLPKIESMAVEALKVQADMSDEQAPFEVSPARXAVTLLVVVQLRDPLRRYEAVGAPSVVIIQAVRAGGGRDDEPKFKVANLHLGGLRLKSPDRRNMWDGEKQRLTAMHWLVAYGLGKAAGRKNRAAVSGKAGNEVLWSMSSRVMADMWLKPMRNPDVKIYQK

SEQ ID NO: 236484 - protein, 41 aa, Zea mays
  Clone ID: MRT4577_147256C.1.pep
EMERFLHEHRSRNKKFYRAFKRRNSVDKISRQNKLETKTIK

SEQ ID NO: 236485 - protein, 51 aa, Zea mays
  Clone ID: MRT4577_147257C.1.pep
HATRVDHSSPHAFSESHNTDLTDPVCLGLMETLQGSLRPICQLSGYHSSAL

SEQ ID NO: 236486 - protein, 50 aa, Zea mays
  Clone ID: MRT4577_147258C.1.pep
YDSIATHADDCSFSQTSQFTEQLRGVSPHDDCQTYGVLYNQKELSKAFRI

SEQ ID NO: 236487 - protein, 52 aa, Zea mays
  unsure (1)..(52): unsure at all Xaa locations
  Clone ID: MRT4577_147259C.1.pep
ARLIRRTTRPSKRPNNRSIRDSSLCLDHADYKEVSXIXKRGXKKAXNSIQXN

SEQ ID NO: 236488 - protein, 127 aa, Zea mays
  unsure (1)..(127): unsure at all Xaa locations
  Clone ID: MRT4577_14725C.1.pep
LNTLSWVHNAXALRRKVKELRARHPGXVRIVYADYYTPAIQFVLHAEKYGMLKQTPRACCGAPGVGEYNFNLTSKCGEPGAYACPDPSNHWSWDGIHLTEAAYGHIARGWLYGPFADPPILDAKHLG

SEQ ID NO: 236489 - protein, 71 aa, Zea mays
  Clone ID: MRT4577_147260C.1.pep
SYPATAPLAPTEKEPMRVLVTGAARHIGYAVVPMIAKSVMLGADHPVILHMLDIASASEAINGVKTELVDA

SEQ ID NO: 236490 - protein, 83 aa, Zea mays
  Clone ID: MRT4577_147261C.1.pep
AIRSLVGRLAGSWGAHDVGLGAGQHCGGRGGDDDEDGEEDPLHLHLAPAVVVVRRRRIALGTGSARLFARMAAARVLLVSLAG

SEQ ID NO: 236491 - protein, 103 aa, Zea mays
  Clone ID: MRT4577_147262C.1.pep
LSLLFMSPHSPSRRRGAASRLLFPISFSCTSRRLLLLLVLMIRSPWRMLFFLMSSRWLTIDAVLTSFISIFILLICARDGLVSLSLTFSFHTVFFCLFLFLYL

SEQ ID NO: 236492 - protein, 193 aa, Zea mays
  Clone ID: MRT4577_147263C.1.pep
MASLDTVRGDLGLVVLYLSKAEARDKICRAIQYGSKFLSNGQPGPAQNVDKSTSLARKVFRLFKFVNDLQALISPPAKGTPLPLILLGKSKNAMLSTFLFLDQIVWAGRTGVYKNKERAEFLGRIAFYCFLGSNTCTTIIELAELQRLSKSMKKLEKDLKHQELHKNEQYRMKLQKSNERLLALIKSSLDIVV

SEQ ID NO: 236493 - protein, 129 aa, Zea mays
  unsure (1)..(129): unsure at all Xaa locations
  Clone ID: MRT4577_147264C.1.pep
ITSESDGFTYXGALVCGVPLMHGNTLVSGSYGLSDNIFGRDIVCLISKSPIVDVVPKXLSDLXREHSLHVRAFSPYAMXARSPGFDVPXSXKVFRVGNLIGGNLDRLSAADAQVNTVGVAQHEVQGRLS

SEQ ID NO: 236494 - protein, 85 aa, Zea mays
  unsure (1)..(85): unsure at all Xaa locations
  Clone ID: MRT4577_147265C.1.pep
IMSCLPSTTITKSTPLNSPQTRPASRLPTSSPPFPFLGTCPYIYPHPLCFRVALLLPYVSMLAYLFVLSPSPVFVIMVIXXNKPI

SEQ ID NO: 236495 - protein, 57 aa, Zea mays
  Clone ID: MRT4577_147266C.1.pep
HYKTERPTWPMVKPYNIRGGLFYTPWPAEHKRRGPNSDHFWGNPGGDLTHPPIGEGL

SEQ ID NO: 236496 - protein, 131 aa, Zea mays
  unsure (1)..(131): unsure at all Xaa locations
  Clone ID: MRT4577_147267C.1.pep
SAPHHAEGKGGKWRGSTHSTPEEAKRKMKNTARENIENEDIDEAWTCIREHTLPHVHQEGEKRALTFGTENESSQPTILKKGKEAAARGSIRPNQNSKGLTRLAXGRDDWSQDIPSAKRPLDNAAFNSYIR

SEQ ID NO: 236497 - protein, 61 aa, Zea mays
  Clone ID: MRT4577_147269C.1.pep
ARSTSKSPVATPVFCLLLLGFHQLALHCSQKPYTRGIPLYVSYDLIRHEGKKVRAQPLVLF

SEQ ID NO: 236498 - protein, 78 aa, Zea mays
  Clone ID: MRT4577_14726C.1.pep
NTEEHNDQDPTTPDNGDNKYYTNTEARRGTQKTDQEQPTTPGAPTAAKRRTERRQPERAQQEQRQDQGQQGEKTGADR

SEQ ID NO: 236499 - protein, 89 aa, Zea mays
  Clone ID: MRT4577_147270C.1.pep
MGGGGLQTDTFADVEELLYLIWINACLRGELNNTGTPGAGALSTAQDLSDTLRAGSDLTAEALIVEFAYVGADERSLSCIEFGSQSASS

SEQ ID NO: 236500 - protein, 59 aa, Zea mays
  Clone ID: MRT4577_147271C.1.pep
HHCPFSVRTSFIHLDVFKKDCLLATSYSISPTSFFPIYYSFPFQWFIQVTAHTTTHGDG

SEQ ID NO: 236501 - protein, 49 aa, Zea mays
  Clone ID: MRT4577_147272C.1.pep
DRRRSRAPTRRGRRRPWRPQQPPSFRSSPYIVSSPEQPFTPSARRRRWS

SEQ ID NO: 236502 - protein, 131 aa, Zea mays
  Clone ID: MRT4577_147273C.1.pep
GPNGSTLRGPCDSPALIRFFSSNDVTVCGLRIENSPQFHLRFDDCERVRVDGLFVSSPASSPNTDGVHVENTKSVQILNSRIYNGDDCVSIGAGCSDVHVENITCGHGHGISIGSLGVHNTHACVSNVTVR

SEQ ID NO: 236503 - protein, 67 aa, Zea mays
  Clone ID: MRT4577_147274C.1.pep
HGGVLLHFVGWIRGCTLHVHSHKNCFLWVQKQHLPPATKFACGGQKHGQTGVKVKGEKARALKVFTN

SEQ ID NO: 236504 - protein, 149 aa, Zea mays
  Clone ID: MRT4577_147275C.1.pep
GRPRVHPRVRGRVGGRVGDCERVRVDGLFVSSPASSPNTDGVHVENTKSVQILNSRIYNGDDCVSIGAGCSDVHVENITCGHGHGIRYLSVCHSLTHQRASMARGTVCSEPDAASCCCHPRSIGSLGVHNTHACVFKVHGPERADTRLR

SEQ ID NO: 236505 - protein, 90 aa, Zea mays
  Clone ID: MRT4577_147276C.1.pep
HLTPSHVGPQTHVKVRVRSLYFAWQQASQAEPKRSEFRSDLHDRRLRLTMSLRGSQQPRRDVVRSHHHRYVRREPSDAHDQTRYKLSSRQ

SEQ ID NO: 236506 - protein, 40 aa, Zea mays
  Clone ID: MRT4577_147277C.1.pep
ILGLAPAGTSYMTSLIWDSFHCRRRHRRCKQRSSLQENQA

SEQ ID NO: 236507 - protein, 85 aa, Zea mays
  unsure (1)..(85): unsure at all Xaa locations
  Clone ID: MRT4577_147278C.1.pep
PLLVGQKHGWKAFXGPPGQKGQAPFGKCIRVKNRATGGSLVARVVDQCNNGGLDLEYKTVFKKIAPHGGGYQMGPPNVDYQFVAC

SEQ ID NO: 236508 - protein, 44 aa, Zea mays
  Clone ID: MRT4577_147279C.1.pep
KKVSNELRTLPTAQIDIPLLLRTMKYLFNISYYEFFDVMKRVDL

SEQ ID NO: 236509 - protein, 61 aa, Zea mays
  Clone ID: MRT4577_14727C.1.pep
TSFLANKIHLRLSTHPPPTQTLTLPTSKLAADCTQKQLFHRRQRLLLSHHDPTDPTSPPSI

SEQ ID NO: 236510 - protein, 67 aa, Zea mays
  Clone ID: MRT4577_147280C.1.pep
TKKGGLIPPNIFQTPPNGTTPKFDFLDSRPGVISRKKFAFRVSPKKNKNKKKKKQKRKKKKKTPFKM

SEQ ID NO: 236511 - protein, 56 aa, Zea mays
  Clone ID: MRT4577_147281C.1.pep
GKSGPPEAPARISWLNRGFRQAVGQPFRFEWLKGHPKGFWPWLYGWGGKIHLILKG

SEQ ID NO: 236512 - protein, 897 aa, Zea mays
  Clone ID: MRT4577_147282C.1.pep
MATATTAKVAMRATAAAAGAAAAKAAAAAAAAGAATKPVAKRHWFKCNHMSVVSESDLLHLVFIGVLPLKELCSWRICRGATVPTEDTHESVIFIPFLIRGLALPISPFFRALLDFYHLNLTHLNPNSILQVSVFVHLCEAYLGILPHFGLWKYLYHCRPGMAGGQHQLVGGASLEMRRGRKTECLDIPLKDSIKGWRLEWFIIENHGKSLPPRSGRQPDVRVSSWIESPTDLEPLKDKAYLAYLYRGIADSTRVTNRRIPAVDLVSQLEMILRGKVSNVGAPIAYSAWNLPPSKTFISFVSNPPTEGNGSGLRVRPSFEEVEALVALLGDIPDDERQVHFEMPVNPSDAEISAMLDLLADDSSNLVPAESLVVAVIPEPEETLDIQRLDSTRPKRPRRAIQPTSPAEGKKKRRLRRVSCLNQDAGPSVPDAEGVHVELSFGADPNGCDSANADPNGCNLAELDDAEPNGCGVRIVDEDEEEEEEIPLIRKNNRRYVVSGESSEIPSPALSALVGLQELSLANFDQALEDVIPEDLLSEPTDERGLQSQEVDPDCSVPMKMAENPPALEVAGAESPVLKDGASVCPAPEGVAGNDLAQEIALEVGVPDTRALIPVGDTVLAPNDAPQIASVDDPSSSHQQASHDLGLPSFVSNLLALGDEMAGQLKSQGASVPERALSLTHWNPALLQRRISELELTNADMARRYSALEEKCSQGQTDLAQVKDSLNDANVLNSSLSAQLDSEKEEKRALATSRDNLDKLYRDINNSLTTLERSHSFTMDDLNNQRYKLQESLDEMIRLRELMSSKDSIIKDPCASKKSIARELEAARLAVKAAEDTSTILKAHRDRAMDKAIRAGRILMRRPGVVVPDDIIVDVNAAPNSSSHPSSSVAPEKNTAK

SEQ ID NO: 236513 - protein, 49 aa, Zea mays
  Clone ID: MRT4577_147283C.1.pep
QLNKSVIMAQRFSSDYPRPAKLVGGRRSSFPGDSGIPGRFIKTFCARFL

SEQ ID NO: 236514 - protein, 310 aa, Zea mays
  Clone ID: MRT4577_147284C.1.pep
MTPAAGEYRSREASVLEELFRSYRDPNLSSSGDNNSERNDHLGRQLTGQGAWSPGDSSDNDAESWAASGSAAAGTSASHTRHCRSLSVDSIMGNLNFGGLDQVSLRVPPLSPVADASVSLSRTGTGASGGAVATASSQPANGEFSESEMKKIMANDRLAELALVDPRRVKRILANRISAAKSKERKVKYMGELERKVRVLQMETSTLSSKAASSQRECEALRILNNEMKIRLQAMEQQAQLKDALNEALTAEVQRLKQIAGEASDPHVPNMSRKIVEQQLQKQPSEAQLAEQQQPQESEEFKAQQKQWNH

SEQ ID NO: 236515 - protein, 112 aa, Zea mays
  unsure (1)..(112): unsure at all Xaa locations
  Clone ID: MRT4577_147285C.1.pep
LDPPELITPPKIFVIEGLHPMFDERVRDLLDFSIYLDISDEVKFAWKIQXENTCMFLSLLHMSQXGVFLLFNFXKISPLLIWQRDMAERGHSLESIKASIEARKPDFDAYID

SEQ ID NO: 236516 - protein, 183 aa, Zea mays
  unsure (1)..(183): unsure at all Xaa locations
  Clone ID: MRT4577_147286C.1.pep
MTTGWLAGSLPLRSASTAPSAARAQPLPSAAAPRRIPARLSVATGGGEQQLVTAQEPAHAEPDYGVVSIHHVGILCENLERSLAFYKDLLGLRVNPARPNDKLPYRGAWLWVGSEMIHLMELPNPDPLTGRPEHGGRDRHTRIAIRDVLKLKEXGISYTLSKSGRPAIFARDPDGNALEFTQV

SEQ ID NO: 236517 - protein, 187 aa, Zea mays
  Clone ID: MRT4577_147287C.1.pep
MATGWLAGSLPLRSASTAPSAARAQPLPSAAAPRRIPARLSVAAGGGEQQLVTAQEPAHAEPDYGVVSIHHVGILCENLERSLAFYKDLLGLRVNPARPNDKLPYRGAWLWVGSEMIHLMELPNPDPLTGRPEHGGRDRHTCIAIRDVLKLKEVFDEAGISYTLSKSGRPAIFARDPDGNALEFTQV

SEQ ID NO: 236518 - protein, 147 aa, Zea mays
  Clone ID: MRT4577_147288C.1.pep
MEATVDHLSAAYDDFMAAAAAVVEARVQSGGEKKTAATDAALEAFKQRWEIFRVACDHAEELVESIRQRIGSECLVDEATGSASAGSVAAPGIKPISAVRLEQMSKAVRWLVIELQHGASAQGTGGSGGAATPNAGAGGQHPEEGAQ

SEQ ID NO: 236519 - protein, 132 aa, Zea mays
  Clone ID: MRT4577_147289C.1.pep
GANLFSPVFFLKKIFQGTLRFPPGGLKASFQKLTGLGFFPPSQKTPRGSKKLGLGPPPQKGFPKRLAPQVAHFGFFWVNFLPPKKLALGFLNSPLMGGQRCFAFFQKKTPPGLLKPLNPFSKFYSPFFPSPP

SEQ ID NO: 236520 - protein, 42 aa, Zea mays
  Clone ID: MRT4577_14728C.1.pep
YPRPPLEFFFFFFFFFFFFQATSIYVTYLTGFIVYDIITTIH

SEQ ID NO: 236521 - protein, 97 aa, Zea mays
  Clone ID: MRT4577_147290C.1.pep
YCTDLPSDDGRKHPIISHGGQDTHHGFSAPHLGSSYRLIPASLLILFLIVNYITCRPLWRAHSITCLWLASTKGPLIAHHSWCPCRLTRARTRAWGS

SEQ ID NO: 236522 - protein, 82 aa, Zea mays
  Clone ID: MRT4577_147291C.1.pep
NAFIFLLSRASDSVPTDEIVHRSFCYKQCSSHNRSIFDHMYTIHPPLHDVLGRILHIRPESMILLFPLDVAHMSANVVAPPN

SEQ ID NO: 236523 - protein, 119 aa, Zea mays
  Clone ID: MRT4577_147292C.1.pep
CVQIHIHREGHSTLAISYVMQSVRLDLHLIVLRHSGDERRTPRPAPFSPRGAAERTLDPRRRTQRQYTKTGGEARAFEAEAGEGICGLGFGSRHSTGGRTSVGSCGPNRIRSTGTAVSS

SEQ ID NO: 236524 - protein, 149 aa, Zea mays
  Clone ID: MRT4577_147293C.1.pep
QLTGHVVGTQGFLAPEYLEDGLITPKLDVFAFGVVLLELLSGKEAGFADAGTGEEILLCESAEEALVADGGEDMDRAKVRAFMDPRLHGDFPMDLALSMAALALRCVAMEPRARPAMDEVFISLSAVYNSTMDCDPSDYGTSGSSMIGR

SEQ ID NO: 236525 - protein, 76 aa, Zea mays
  Clone ID: MRT4577_147294C.1.pep
NIKLKPLNDSFYDRPLTLVRENQTCIQGTYPTIIQKTNFLGISAQTTACTTNSQLPDHHPKDSANLELLEDKRPES

SEQ ID NO: 236526 - protein, 206 aa, Zea mays
  unsure (1)..(206): unsure at all Xaa locations
  Clone ID: MRT4577_147295C.1.pep
EIIPGITSASGIAAELGIPLTHRGVATLVRFLAGHSRNGGTDPLYVAGNAADPDTTLVVYMGLSTLASLAPKLMKHGLPPDTPAVAVERGTTPQQRMVFALLKDLVDEVKSADLVSPTLIIIGKVVSLSPFWVESSEHDALKIESSYASEAXDDNTFSXILVIGQYXLSNAISQIXSSSWDPFRTCEHRFDLVYTTFQEAWILNDG

SEQ ID NO: 236527 - protein, 1105 aa, Zea mays
  Clone ID: MRT4577_147296C.1.pep
MPCSPAACWRLQLIMQLDGSMDRSPGPLQAREAMHHNVSLSEGSQRPRTSEIDAPIDRALFNGSMGRELDSQLTIDLTTHEMVHDQLDGGLVACRRGRLCWWVASAPGKVLIAGGYLVLERPNAGLVLSTTARFYAVVRPLRDSLPADAWAWAIQFSVAAAKATIIDKERKDVVDKLLLQGLNITILGCNDFYSYRKQIEARGLPLTPEALLSLPPFSSITFNSEVANGTMTGEKCKPEVAKTGLGSSAAMTTSVVAALLHYLGVVSLSCPGQSSGDNTTTRELDLVHSIAQSAHCIAQGKIGSGFDVSAAVYGSQRYVRFSPEILSSQATGGTFLPDVVSDIVTQRWDHENKQFSLPPLMTLLLGEPGTGGSSTPSMVGSVKRWQKSDSEKCKDTWSKLAFANSALENQLRILKGLSENHREAYESVVLSCSHLTYEKWTEVATNQHQELIIKSLLAARDACLEIRLHMREMGIAAGVPQHGRVRDEVAGMFKDKLGVSVSGTGQSYRKSYSHRFDTVPYPQGTRIPDFSKFSGESGKSTHEHISQFIAHLGELADGEAYRVRLFSLSLTDTAFAWYAALPPNSINSWEELEQKFHEHFFSGEHELELADLASVRQGPEESVNDYIRRFRDTRNRCFQIHVAEKQLTGLAFNGLRPYLKEKLDGTQFFSLVHLHQRAMTCESRSKETSKSASHKMHLVGYDNSDDESTDVYTAELVWPGQAKPSACSALQSIRKNRQEEVKFTFNVAKCDKIFDELLKNGNIKLTHTIPPPDELKRRAYCKWHNSFSHATNDCNVFRRQIQSAINEGRLAFQEMQVDTQPFPVNTIELTCKKVLVRPEMADKGKGKGIVISNPRMSDISQKKITRKASDEKAKRFEDAGGQAQLINQTHQSSPSIVDGPAPTCGQSGAQTNGPANSAGQSTYDQRRQPLHKARKKTQGQSTYNRLIKADPTFDQLLSKNTSKKTVPRDRSTKKPRSPAKTKRSNETTRKATQQASSIHSMRPGYFPPIYSSSIEPDSQTRLLDATMNMEGVLLAGVPGAGGFDAVFSVTLGDASNAVANAWSSAGVLPLLVREDCRGVSLEDADPRTREEVVVAAISLSVVSGQ

SEQ ID NO: 236528 - protein, 39 aa, Zea mays
  unsure (1)..(39): unsure at all Xaa locations
  Clone ID: MRT4577_147297C.1.pep
XRGSDERVGIQVKVVDRNPPVQDVLEQILGWNLEGQLVP

SEQ ID NO: 236529 - protein, 511 aa, Zea mays
  Clone ID: MRT4577_147298C.1.pep
MEVVASAPGKVLIAGGYLVLERPNAGLVLSTTARFYAVVRPLRDSLPADAWAWAWTDVKVTSPQLSREATYKLSLTKSTLQLTSARESTNPFVEQAIQFSVAAAKATIIDKERKDVVDKLLLQGLNITILGCNDFYSYRKQIEARGLPLTPEALLSLPPFSSITFNSEVANGTMTGEKCKPEVAKTGLGSSAAMTTSVVAALLHYLGVVSLSCPGQSSGDNTTRRELDLVHSIAQSAHCIAQGKIGSGFDVSAAVYGSQRYVRFSPEILSSQATGGTFLPDVVSDIVTQRWDHENKQFSLPPLMTLLLGEPGTGGSSTPSMVGSVKRWQKSDPEKCKDTWSKLAFANSALENQLRILKGLSENHREAYESVVLSCSHLTYEKWTEVATNQHQELIIKSLLAARDACLEIRLHMREMGIAAGVPIEPDSQTRLLDATMNMEGVLLAGVPGAGGFDAVFSVTLGDASNAVANAWSSAGVLPLLVREDCRGVSLEDADPRTREVSAAVSSIQIN

SEQ ID NO: 236530 - protein, 433 aa, Zea mays
  unsure (1)..(433): unsure at all Xaa locations
  Clone ID: MRT4577_147299C.1.pep
MEVVASAPGKVLIAGGYLVLERPNAGLVLSTTARFYAVVRPLRDSLPADSWTWAWTDVKVTSPQLSRVATYKLSLNKTTLQLTSSRESTNPFVEQAIQFSVAAAKATIIDKERKDVVDKLLLQXIGARGLPLTPEXQSSGDNASERELDLVHAIAQSAHCLAQGKIGSGFDVSAAVYGSQRYVRFSPEILSSAQAIGGTVLPDVVSDVLTQRWDHENKQFSLPPLMTLLLGEPGTGGSSTPSMVGSVKRWLKSDPEKSRDTWSKLAIANSTLENQLRILKXLSENHHEAYESMVRSCSRLTYGKWAEVATNQHQELIIRSLLAARDACLEIRLHMREMGIAAGVPIEPDSQTRLLDATMNMEGVLLAGVPGAGGFDAVFSVVLGDASNAVAHAWSSVGVLPLPVREDCRGVSLEDADPRTREVSAAVWSIQIN

SEQ ID NO: 236531 - protein, 121 aa, Zea mays
  Clone ID: MRT4577_14729C.1.pep
KNKPKKKMLFNLPQKKWIDGLIFKKVDPPSKNQQTNCPGSIRLVWEFPFNQPKNYMCPDCAKKNGAKRPPNSYPVSPNSYFKIWTPVVFSPLRKLEKSFLPSFMITMVLWSNKILGVWSHS

SEQ ID NO: 236532 - protein, 122 aa, Zea mays
  Clone ID: MRT4577_1472C.1.pep
IIQRPGQAQHTSVPRAPMYGSLARPRLLYDDHPAALIRHDKYSVTLHHIFHQPSSRPRPIAVPAVRFDVHKPNVAAGAMATGRGGKGKGKAMHGTKLELAPGWPVLAGVRARFRAAWWDSEH

SEQ ID NO: 236533 - protein, 334 aa, Zea mays
  unsure (1)..(334): unsure at all Xaa locations
  Clone ID: MRT4577_147300C.1.pep
MEVVASAPGKVLIAGGYLVLERPNAGLVLSTTARFYAVVRPLRDSLPADSWTWAWTDVKVTSPQLSRVATYKLSLNKTTLQLTSSRESTNPFVEQAIQFSVAAAKATIIDKERKDVVDKLLLQGLNITIIGHNDFYSYRKQIEARGLPLTPEVLLSLPPFSSITFNSEVANGTMTGEKCKPEVAKTGLGSSAAMTTXVGAVLLHYLGAVNLSCSGQSSGXHASGRELDLVHTIALSAHCLAQGKMGSGFDVSAAVYGSQRYVRFSPEILSSAQAIGGTVLPDVVSDVLTQRWDHENKQFSLPPLMTLVSRQASMSILLFPKWQSNHFTGSHQPP

SEQ ID NO: 236534 - protein, 114 aa, Zea mays
  Clone ID: MRT4577_147301C.1.pep
PTLSSAGARPALPWTSSYALKLQVRTLSGLDVCLALPPLVPRRNVLGRGQLLERVLATALNGVLGFVPALTDPGWWVRPLPCIFHAVISQYVTSRGYHLDGFPSFRKKKKKKRP

SEQ ID NO: 236535 - protein, 47 aa, Zea mays
  Clone ID: MRT4577_147302C.1.pep
TYDFKTPGICSSSILALFCVSGKQEKVTFLFCWSTVLQSVQFSFLKV

SEQ ID NO: 236536 - protein, 110 aa, Zea mays
  Clone ID: MRT4577_147303C.1.pep
VTVNVLHIFNNNNNNKRSVRALDDYKGARVKYLSKTTTMEVSGELRTLLGRYPRANRSLPVPPTMLRSEGANTGKGPVVARVLPFVLPEVGKGKVYGGEAPGFFQGRGHP

SEQ ID NO: 236537 - protein, 110 aa, Zea mays
  unsure (1)..(110): unsure at all Xaa locations
  Clone ID: MRT4577_147304C.1.pep
PPTGKKAAPFWGPQITGLPKKGPRGPPGPKKNPERGGXAPPKRPERGPXGPGPEKSQRNQALGLQIGPLPTPWKKTEKKRGGGPPGGPKARGFKALTGGPKPKKRGPGGG

SEQ ID NO: 236538 - protein, 102 aa, Zea mays
  Clone ID: MRT4577_147305C.1.pep
PTRTPTRSQIPISPYILNRATEGGGGFHHGLRAQSDPPYDGRPVQAQQVSLEHFFHNKELFQPTKAVLNLPLLPYRFFNFNRFNSQLSLDPHINHTPCLSYP

SEQ ID NO: 236539 - protein, 47 aa, Zea mays
  Clone ID: MRT4577_147306C.1.pep
PEKNEPYFIVSRHKNDREEDDHQTRLGVPKHISKCAPEHCGTKCSAQ

SEQ ID NO: 236540 - protein, 94 aa, Zea mays
  Clone ID: MRT4577_147307C.1.pep
RAQTHLSPAPTLRRALPSYSYRRAHPSQPRMTTSSAASSAPPTAENPTEETNTTRRTPITAHALSGAHKRHDEIALTGEGRQHRNEGPPKEKGR

SEQ ID NO: 236541 - protein, 70 aa, Zea mays
  Clone ID: MRT4577_147308C.1.pep
SSTSHQLSQSIKECITHGIDHHHQAPYSLNGAEYFTEFLTIYPGDLHSSLLSALPLSFFLNPLYTGYAPL

SEQ ID NO: 236542 - protein, 72 aa, Zea mays
  Clone ID: MRT4577_147309C.1.pep
TWPSASRPSSSHPSATAERACRHKLYVASDELHKIKPVYLAKKKKKKKKKKKKKKKKKKKNALRLLPGLGTE

SEQ ID NO: 236543 - protein, 119 aa, Zea mays
  Clone ID: MRT4577_14730C.1.pep
KKKKKKKKKKKKKKQKKKKKEKKKKKKKKKKKKKTKKKKTKKKKKKKKEKKKQEKKRKKKKDGKQKKKKAKKKTGEKGGRKKRKKRKTQEEGDKKRTARRKKKRAPPKKKKSLNENGQE

SEQ ID NO: 236544 - protein, 151 aa, Zea mays
  Clone ID: MRT4577_147310C.1.pep
MPSKLDPSQVVEVFVRVTVGEVGAASSLAPKIGPLGLSPKKIGEDIAKETARDWKGLRVTVKLTVHNRQAKVSVVPSAAGLVIKALKEPERDRKKVKNIRHSGNVALDDVVEIARTMRPRSMAKEMAGTVKEILRTCVSVGCTVDGKDPKD

SEQ ID NO: 236545 - protein, 166 aa, Zea mays
  unsure (1)..(166): unsure at all Xaa locations
  Clone ID: MRT4577_147311C.1.pep
MPPKLDPSQVVEVFVRVTGGXVGAASSLAPKIGPLGLSPKKIGEDIAKETARDWKGLRVTVKLTVQNRQAKVSVVPSAAALVIKALKEPERDRKKVKNIRHSGNVALDDVVEIARTMRPRSMAKEMAGTVKEILGTCVSVGCTVDGKDPKDLQQEIDDGEVEIPSA

SEQ ID NO: 236546 - protein, 89 aa, Zea mays
  Clone ID: MRT4577_147312C.1.pep
IIFFFLSLFVGFNLSFFLDTAPLSNYTLEWEAIHNCPMLLADCRCNLDRAGGGIAFLYFYRPAQDLHACLTALKRYPFPRLHVPQKIGS

SEQ ID NO: 236547 - protein, 36 aa, Zea mays
  Clone ID: MRT4577_147313C.1.pep
TGERLTMMTGRAEDEWSILSVGDSQHGLKSRRSVDG

SEQ ID NO: 236548 - protein, 57 aa, Zea mays
  Clone ID: MRT4577_147314C.1.pep
HVPVLIRGRRTPTLREAHMWGRFKMEDEHHRKGDERLMIVVGELHKKVSVEHIDGIS

SEQ ID NO: 236549 - protein, 40 aa, Zea mays
  Clone ID: MRT4577_147315C.1.pep
LVLDRVGLFMCLLYVVYTINNAPETCIATLGAVKWHFRTI

SEQ ID NO: 236550 - protein, 210 aa, Zea mays
  Clone ID: MRT4577_147316C.1.pep
KKKKKKKKKKKKKKKKKKKKKKKKKKKKKKKKKKKKKKKKKKKKKKGGAVFWVSNFPSPSLGGVGFFLGPPNLISWAVFLNLVVWKTLGFPNFIPLAPLPFFPGWVFTKRAPPFPLSKLWPPFFGNWNPPFWALLVAGVLGFPPVCPFSLARPFAPFFFVFFLFFLSPFWGFFPRLFFYMGGVSFLGFPLFYWVFIGALFSPPKKNFFFL

SEQ ID NO: 236551 - protein, 49 aa, Zea mays
  Clone ID: MRT4577_147317C.1.pep
IGFSNAAPVSKKAPKKGTPFKKTPLAPGVLTEQKFPELVVPKKKIGPSD

SEQ ID NO: 236552 - protein, 36 aa, Zea mays
  Clone ID: MRT4577_147318C.1.pep
PLRASPAGGTSSMLQNSRMVVSKHNAVSNHGQQGIT

SEQ ID NO: 236553 - protein, 99 aa, Zea mays
  Clone ID: MRT4577_147319C.1.pep
PSCKPTASPSSPCCTRSPARTTHVSGSQPTARTTASSLFTAKEASLFQLKTEMDIFLHSNTAEQARHYNTQVSHYRQVLLLLPRQLQQDDRQDEPPVYR

SEQ ID NO: 236554 - protein, 68 aa, Zea mays
  Clone ID: MRT4577_14731C.1.pep
QETRRYHSGCIRTNWPNYMDPKQYPPLKVNCQESKMTPLKDFLTKESDPSPQSQAIYLQSTVHRFKYP

SEQ ID NO: 236555 - protein, 58 aa, Zea mays
  Clone ID: MRT4577_147320C.1.pep
LCIVNTMNWVLGNTSTENGALRRSKPKRSIFITRSNFYVSSILCNIMLALRSEHRFSP

SEQ ID NO: 236556 - protein, 160 aa, Zea mays
  unsure (1)..(160): unsure at all Xaa locations
  Clone ID: MRT4577_147321C.1.pep
MDKDDVIKSGAGGAEIAAKDYTDPPXAPLIDEPELQSWSLYRVEIAELIDTLLYLNITVATEIGYNHHTDATSPDNNAARGAVTELSIAWTFSAMIFILGYCTAGISGYHINPAVTFELFMTCKASLVLTLIYIKKKRLDDIXCTTATRCIHNAYIHRYG

SEQ ID NO: 236557 - protein, 45 aa, Zea mays
  Clone ID: MRT4577_147322C.1.pep
PPFIICREKAGNFRKKEWKKVKKAGLRGLLSVSATWRETTLPPAL

SEQ ID NO: 236558 - protein, 41 aa, Zea mays
  Clone ID: MRT4577_147323C.1.pep
LHRNPGNYGPGPVGARRFPIVCLRLAGGNDGPTLFPVRNRP

SEQ ID NO: 236559 - protein, 159 aa, Zea mays
  Clone ID: MRT4577_147324C.1.pep
DGVLELMKHATECGLETNKGISLDVSTRWNSTFLMLRDALYYKDAFTQLKLADRRRYEHISPTPEEWDKAKMLFHALKKFYDLTELLSGTLYPTANLFYKGFCEIRSLLGDWSTSEDINIREMAISMSKKFEKYWNKSNVALAVASFLDPRYKRKVVEF

SEQ ID NO: 236560 - protein, 137 aa, Zea mays
  Clone ID: MRT4577_147325C.1.pep
GDLREIIKMRSGDSPSRRRPADQLKVLCKCRSRETTALLAPRRRSRRRKREDAAPSNSGEKAEARPTQLKCSPSGLRAGAASSWSGGAPGQGGDARHRSGRLTSSCCNSPERCQILAAPVRRDFFPRVRGRVGGRVG

SEQ ID NO: 236561 - protein, 93 aa, Zea mays
  Clone ID: MRT4577_147326C.1.pep
PQKRGGVGTICFSPKNPKKLFFFLQPPPGGPKRPPQPDHGPPQKGGPPPPRVGPGCQPQKQPPRESLQRGPIKKNTGGPPKGTNLPTCPWGEL

SEQ ID NO: 236562 - protein, 49 aa, Zea mays
  unsure (1)..(49): unsure at all Xaa locations
  Clone ID: MRT4577_147327C.1.pep
VEVLSCRQHRTVVMLIGFCVERRWRLLVHEYICNRSLXSRLYGRNSETL

SEQ ID NO: 236563 - protein, 131 aa, Zea mays
  Clone ID: MRT4577_147328C.1.pep
LAPQKCGHHFKRLMHHHTFLSSAAAAQAPYGLSSGFHSLAPSSFFSSAGLYEHAGGPLSGVSVLPCQNLIHLSHDEVGKVRERLHHRHQKERQQAVEASPVVLWARQAVVWIVPPSSDLPAGTDPSPPSRL

SEQ ID NO: 236564 - protein, 63 aa, Zea mays
  Clone ID: MRT4577_147329C.1.pep
DLLMIRSRQIKASDGRTANQRRQDEKAAVGSRKQSEKKGQSHNTLNINYPLSLLNVQNFISNS

SEQ ID NO: 236565 - protein, 201 aa, Zea mays
  Clone ID: MRT4577_14732C.1.pep
MDSSSSSVPAAAAAEGAPPAGENLAVFWHEGMLAHDAGRGVFDSGRDPGFLDVLDHHPENADRVRNMVSILRRGPIAPFLSWHSGTPAHASDLLSFHSPEYIEELAQANASGPKKLCEGTFLNPGSWGAALLAAGTTLSATRHILDGHGKIAYALVRPPGHHAQPDHADGYCFLNNAGLAVQLALDSGRAKVAVVDIDVHY

SEQ ID NO: 236566 - protein, 116 aa, Zea mays
  unsure (1)..(116): unsure at all Xaa locations
  Clone ID: MRT4577_147330C.1.pep
KXXQYILXQLXXHGLHATXVTXVQXQAXFANGRXHXPQGKXTIKXXAHDCPPQMYXXSFLPCVAHPPTXXIFLGAGKXPHHSPPPRVNXXGIXXETKGTQXITXLIXXXAXHVXXH

SEQ ID NO: 236567 - protein, 137 aa, Zea mays
  Clone ID: MRT4577_147331C.1.pep
MHITQTLFKYYPRWMPKPQGGNSFLRKQALYKLTFAQPGRARNCYRLATRCFIRHLQIDQEESKQRYSYFRDLNSQRIYAACEDLGYPYKYFIGKLPKMGIEIDRKCLANIAIWEPRTFESLVEIAKKYDETNFKLE

SEQ ID NO: 236568 - protein, 245 aa, Zea mays
  Clone ID: MRT4577_147332C.1.pep
SGYQKLEWCCVDNDQVFQNLRHLSVAGCPKLREYPTYPWTLEHIAILDGEQIRFKTFIPSARVSRTFCILVSSFFHVLRAHHLEFVEDMEIYVNHVVCMSREVLENLKSLQNLKIYGIHRANTCSVIAKLWDENGSAVFPSSLRSLQLVQCYLKPSYFSKQLNNLSSLETLRLLNCDTIGMPCPPVNMWHLRILKQLVLYKCDWITFLEGSEALVSLEEMAIIDLYHLKYVPDLNNMPSLEKLHL

SEQ ID NO: 236569 - protein, 75 aa, Zea mays
  Clone ID: MRT4577_147333C.1.pep
LQKAKDTCSLPRCRRHVWHRAYGNACSWYNFLCRCRSCFLLLAVICLTTLSIHVSTINHIIFIIPNIVVICTPYV

SEQ ID NO: 236570 - protein, 100 aa, Zea mays
  unsure (1)..(100): unsure at all Xaa locations
  Clone ID: MRT4577_147334C.1.pep
LFIARLWLLLTGLAPARVIVSDQLASCCSWAISCLMLGLLAPGPAHACWCVWSLASAHLRFVGWDLGLGFPRLSVSKPPCCXGRPPARELVVPGVFPGRS

SEQ ID NO: 236571 - protein, 54 aa, Zea mays
  unsure (1)..(54): unsure at all Xaa locations
  Clone ID: MRT4577_147336C.1.pep
LAEADELKGKMKERESLXNPTIAKMCQGPGEHMDGADGMNEDAPPGSGGPGPKI

SEQ ID NO: 236572 - protein, 221 aa, Zea mays
  unsure (1)..(221): unsure at all Xaa locations
  Clone ID: MRT4577_147338C.1.pep
GTLGPARPTSPMDPAISARVEEQYVSNSLFTGGFNSVTRAHLMDKVIDSEASHPQMAGARGSSCAVNGCDANVMSDERGDDILPCECDFKICAECFADAVKNAGAICPGCKEPYKNTELDDVVGAAADATAGGRPTLSLPPPPGAAASRMERRLSIMRSQKAMTRSQTGDWDHNRWLFETKGTYGYGNAIWPKENEVDAAGGLGGGGSXDGQXPXEFTTKP

SEQ ID NO: 236573 - protein, 57 aa, Zea mays
  Clone ID: MRT4577_147339C.1.pep
SVRLSCASSINRRLLKDGCPDDHFNSVTTDFLQSLCSNSSSSERPLRSVIDSLFSSK

SEQ ID NO: 236574 - protein, 88 aa, Zea mays
  Clone ID: MRT4577_14733C.1.pep
PGQAGPKEWASDPQGPEGFQRFGGRLSQIQKRVVPLNPGPPPQNPHGPGGFPFPVVFPHPPHPKGGPPGIPPQGLSNSISLLVLFVLT

SEQ ID NO: 236575 - protein, 191 aa, Zea mays
  Clone ID: MRT4577_147340C.1.pep
AACRLDSLKDVFFWGDAFGSILECGDTSKPLPMLVDSTNMLDVQSIACGETHAAIITKQGEVYSWGNESSGRIGNQVNIKVSRPKVVQSLASLHVKAVAYGSKHTCAVTVSGELIEWGEGPYMGQLDSYARNQWFPHKLFSPLDGISVVKIACGPWHTAIITSSGQLYTYGDGTFGVLGHGDTQGTTRPKK

SEQ ID NO: 236576 - protein, 50 aa, Zea mays
  Clone ID: MRT4577_147341C.1.pep
KYIFTSQTTASRATSLNIIFGIHQVKNNHQSCMHLYLETLADFKHAHLIS

SEQ ID NO: 236577 - protein, 77 aa, Zea mays
  Clone ID: MRT4577_147342C.1.pep
VVLPLVVCLAFCGGLLRSSWLRVLVPCLPCRALVVVSPLVLGCLLGAVGVPRLCFFYPPLLVALAGGITGGCDCLGR

SEQ ID NO: 236578 - protein, 312 aa, Zea mays
  Clone ID: MRT4577_147343C.1.pep
RPASAQRPNSALAGEEAEKASFGFFDRNEKYVECLLSVNRKVNADGVVTGVFCFIHVPSDDLQHALHVQQASEQTAQRKLKAFSYMRHAINKPLSGMLYSRETLKSTGLNEEQMRQVRVGDNCHRQLNKILADLDQDNITDKSSCLDLDMAEFVLQDVVVSAVSQVLIGCQAKGIRVACNLPERSMKQKVYGDGIRLQQIVSDFLFVSVKFSPAGGSVDISSKLTKNSIGENLHLIDFELRIKHRGAGVPAEILSQMYEEDNKEQSEEGFSLAVSRNLLRLMNGDIRHLREAGMSTFILTAELAAAPSAVGR

SEQ ID NO: 236579 - protein, 68 aa, Zea mays
  Clone ID: MRT4577_147344C.1.pep
DTFTEAVQLVQTEDIYRTALMFVAVLYGELIMNTDVHQSSSTLAPMNTLKMLHLRQTTLFLLNMSYDS

SEQ ID NO: 236580 - protein, 114 aa, Zea mays
  Clone ID: MRT4577_147345C.1.pep
EAIAASDLQQPISQLPQESLEHLTIQTMATRLRQLFVPGLSQLAMVNAAGYLLQQLLASDPLALANLDANQAQHQLQQLLTTLNELAMANHAIYLQQQQLLSSNPLAVANAPTY

SEQ ID NO: 236581 - protein, 102 aa, Zea mays
  Clone ID: MRT4577_147346C.1.pep
GSQVAAPIPSAAARNSCVCCRKGERKGDEWIESTTEPFMHPLCGQRGPVLVGETRRARPGCCAQPRREDGAMSSGPLIGDKTAREAARPSDERAQTGSGRSV

SEQ ID NO: 236582 - protein, 99 aa, Zea mays
  unsure (1)..(99): unsure at all Xaa locations
  Clone ID: MRT4577_147347C.1.pep
LPTLNHVIATNLAAYLHQQXLVPFNQLHGANPAIYLQAQXLLPFNQLAGSPYAFLLQQQLLPFHLQAVANIAAFLIQQHLHAFYPQDVGNINAFLHHQQ

SEQ ID NO: 236583 - protein, 166 aa, Zea mays
  unsure (1)..(166): unsure at all Xaa locations
  Clone ID: MRT4577_147348C.1.pep
GAFLQKGKLVSLPVFLAHVVTNHVLKLLPQFVTRLCLLVVLSCGALGRMLPLLXCCPLFVGNALKYLRQHLLPHSAQGLPQPNVACPDAYRPQVLPFSQLXLWNCFAHLGPPPQSPNPLVVAHPLXSALLPGQRMLPYLQVPFFNPVLTWLAIQGSRYHPCGFYIR

SEQ ID NO: 236584 - protein, 33 aa, Zea mays
  Clone ID: MRT4577_147349C.1.pep
PQSRVSGAISPTSFGSRPASAFTIGPASLPLMS

SEQ ID NO: 236585 - protein, 131 aa, Zea mays
  unsure (1)..(131): unsure at all Xaa locations
  Clone ID: MRT4577_14734C.1.pep
EDSATKKAKKARTPNKPPVEKRLPARHPSEGRTGKHRYFECEDFVESYDIYVVMEMMDVDPXDSGLSLRACYIMNSLINDIFEKMACESDLVRRYTXNPTITSREIHTSVGLILPGKVAKNTESEEAKAVP

SEQ ID NO: 236586 - protein, 79 aa, Zea mays
  unsure (1)..(79): unsure at all Xaa locations
  Clone ID: MRT4577_147350C.1.pep
PPVCLNLPPGGXRPRFCCYKGKGPLAGSLPRLVSPLAAMGYVVSPPPLGGPPGNVXEWXFLMGGDFFFRKKGFWDFFVG

SEQ ID NO: 236587 - protein, 74 aa, Zea mays
  Clone ID: MRT4577_147351C.1.pep
NAASSIVSIMVRTHLIVDVALVGVPVVVAFMIRHVHHLVLLLITGGMRGRSRPLTPDRAAARARAAGRVGGRVG

SEQ ID NO: 236588 - protein, 184 aa, Zea mays
  unsure (1)..(184): unsure at all Xaa locations
  Clone ID: MRT4577_147352C.1.pep
RSIISEGVTNTETYCPYCSSTYAKEICHDELHDPETFEAFDVHGLRDINEPVMRTPFCANAPAEKGCQNFMIDIMMGAVPPAVTKTAAAPIXKRSMLYYXNLDDMINPRTISQPNKDIADCFXRTIKDEGFSSLWRGNTANVIRYFPTQALNFAFKDYFXKRLFNFKKDRDGXWGKWFAGNLTS

SEQ ID NO: 236589 - protein, 110 aa, Zea mays
  Clone ID: MRT4577_147353C.1.pep
SGSEHFHSIPRPRSRPTAVLFAFRRAIPISTVLPHPPYSSPLESPVLPVCPVLSASGRYLPQPLFPVTRMRVALRYCTQVLVFSSVHLMVRNTLFVQPAFTLRYYSVLGN

SEQ ID NO: 236590 - protein, 750 aa, Zea mays
  unsure (1)..(750): unsure at all Xaa locations
  Clone ID: MRT4577_147354C.1.pep
NDNSIDDANIIDIKFRDQNEPCIGADRPCSSNLSVICSSQKFAEDRISINIPQDKAIDATNDKPLDKDEKEKHPISNLVQEXLNERPIGRVTPTAPRTTSHRNRFTSISRAFGDGSKLLPEDHMLTGFAGGSKKPHGQVSYSLSPKAQEHGIKNKGHFRMIQSHVGAKINDAKKLPDSSRSGHSSPESLTCVANVLVTVADRGWREYDTQITKDSDGQSVRRICVKLAERTKYAHKVCQVLHPGATKRXTHAMMWTGGXKGAXDLPLGHCHLFLTELKAACYGHDTRAACVTNIPSPGMHCVELHDDNDVVYFVXAQCLILKADLAMHKATLAIMVADATWTSMKNKCRDCRRKFEEXEERLTFXAFSREPLAYTHNLNSILLLMMGGSLRFXMKELETDDVPLHTIEVIHAYWQDKRQKRGMPLIRHFQSAMWKIYEQQLHEWESKVCRMQSSSNGYQEKKLPPKPALFAFCLRPRGLHVPYKGPKQRSHKKLMSTGCHSFSREHDGFYRQVSGRRYNECTGDGRISESYDTGSLYSPTGYSPRFSTRTDSPRAFESSERSSTPRFSRNNSSTKRSAALAFSDDHQPSPSCRPQRAKRSAHDHWNAAIHDWHNSKHLFPGSPRVDIEELKLRDAASAAQHAAAMAKLKREKAHCLMQKADLALHKATVALMIADAIKSSSRDTTRDCRRGFEERGALTFFWAFCREPLAHAYSLISTHFLMVGVCSFHLVEPVVSIHFVFSFESPVSCT

SEQ ID NO: 236591 - protein, 59 aa, Zea mays
  unsure (1)..(59): unsure at all Xaa locations
  Clone ID: MRT4577_147355C.1.pep
ESSSRALESSRRNHRRQPNQRQRRACGRPREYPARKPCAPPRKRNRVRSLASTXRVGRP

SEQ ID NO: 236592 - protein, 86 aa, Zea mays
  Clone ID: MRT4577_147356C.1.pep
PGGLKRAKRKGKKYYVQDTGDSKEKTKGEMMLSTDSTKWHSYHQETMSRDQAVCMHAPRAHGKRPKKIGESALLVPPRVLCVVTTA

SEQ ID NO: 236593 - protein, 133 aa, Zea mays
  Clone ID: MRT4577_147357C.1.pep
GRTRPAGETARYVTSIMVLPQNDSVNGVLKLVSFKQAPLITASKTTYETGVSCSCKRGRVDNTVMTTGPQRTQTRSCQRMSMIDHHTLPCRHLLLQHDLPSLSLRVAASTSAAWMHTPHPRAPASIPMHACCA

SEQ ID NO: 236594 - protein, 132 aa, Zea mays
  Clone ID: MRT4577_147358C.1.pep
PPGGGFPPKNSFFKGPQRGQKKGPTPPFGGKKKGRKTLGPRPEKRKKKGFPGGKNWGPRANGEKFGLANFPLGGKPPLGKNGKRFEIPKKAKTPRGKTPRKKKKKKKKKKKKKKKKKKKKKKKKKLEERRRY

SEQ ID NO: 236595 - protein, 61 aa, Zea mays
  Clone ID: MRT4577_147359C.1.pep
RIYSVASITFHATSNYYHMCFHHVNQEYKHLFHVATLYLSLYPKSSGSQLASIFPMLNRIH

SEQ ID NO: 236596 - protein, 50 aa, Zea mays
  Clone ID: MRT4577_14735C.1.pep
KKIKPPVKKMFAFQAKKVTPLFSPDGKKKAYVNLSPDYNALDVANKSGIF

SEQ ID NO: 236597 - protein, 171 aa, Zea mays
  Clone ID: MRT4577_147360C.1.pep
MAPPPPASMPLGQRLAALAQTLQFAWFAGHVTLLLSTLRYGLSYITFNFSSRWASFSYRTAFLSACVTYGIVVYKAYRARMRAGKQSGVVALATDENVQYLIMALTWLFSRQIPLAILPFSVYSIFHVATYVRSNLLPTIQPPPAAPGAKPQHQPPRTLSAGLSRNTMMAP

SEQ ID NO: 236598 - protein, 74 aa, Zea mays
  Clone ID: MRT4577_147361C.1.pep
HLIFPGGGRPPISPHIGSSPLRLKLLPLCYPEPTTRSRHCTPTTTLTYLPHTTRTNTTPPPSPSTTTLTHLPHT

SEQ ID NO: 236599 - protein, 90 aa, Zea mays
  Clone ID: MRT4577_147362C.1.pep
TPNLTSQPATKLSSSREPQYPFPPLRQQHTSPIDTARAHVEAGTEDPSLRPPLLPIKAHAPARKRILHSITDGHAYSPHHTPQEKRAQLR

SEQ ID NO: 236600 - protein, 43 aa, Zea mays
  Clone ID: MRT4577_147363C.1.pep
NRGCALLVVFHSERHLTATDWRSLLNPTNLASVRAVSLTRGSE

SEQ ID NO: 236601 - protein, 104 aa, Zea mays
  Clone ID: MRT4577_147364C.1.pep
GPRERQLLYSTGSSSASVLITARALRYQFFMIVLSLRILAEHNSSSSMTQSFFSLALPEERRARMRQHVSLWLDRILTSKSAVDGEYVKASNINCSSFRPEKTS

SEQ ID NO: 236602 - protein, 41 aa, Zea mays
  Clone ID: MRT4577_147365C.1.pep
SKGPLFRWSNETRVRETIPPSLKTFTLGAKKKKERGSTGIA

SEQ ID NO: 236603 - protein, 81 aa, Zea mays
  Clone ID: MRT4577_147366C.1.pep
SDSCALSTLFFKLQLTSLISEHAQLSHQHFITVTSNKSSYLLFNEIQDMNFLSHLPWKEQNEQDLVVLPTDAALSEDPSVN

SEQ ID NO: 236604 - protein, 69 aa, Zea mays
  unsure (1)..(69): unsure at all Xaa locations
  Clone ID: MRT4577_147367C.1.pep
ICPEGGLSIVYSAVRDCFCXVGFGVASFSPSLGVSYLLPGGGLMDGXXFAGGGXXXXRASSSPSCARGA

SEQ ID NO: 236605 - protein, 401 aa, Zea mays
  unsure (1)..(401): unsure at all Xaa locations
  Clone ID: MRT4577_147368C.1.pep
MKLPSSSKFSSRSLEEKQNQCTVGCSMGATQNKGGLRESLWVTRLLPKASVELMEATPCNVENAXSNSAPGQVVLSTSXQNFNLEKELNNIQYFTGRGSSDGVTSSKCPATPPEEPKQSETMASVFAKRLDALRHANTSAVSLAIACEHGSPKLRNHKTNSFVVSYSSHDKVEAGHENHKSSSGNGRIVLWVGDKGKEPMCLNNEELRGNFISEREHQHHGGNTAGKLATQHNLELNILAEDTDRSQVELKGGVLDFMAGPSDNKQIVPYGTMSNDESSVIFGALHRLRLSRSDILRWLRSPIMHTTLDGFFVRLRFGKWEEALGGTGYHVARLNGALDRSRLSVTIRNSTCQVDSRFVSNHDFHEDELKAWWSAAMKGEWKLPSKEELGVKLREKELLRA

SEQ ID NO: 236606 - protein, 44 aa, Zea mays
  Clone ID: MRT4577_147369C.1.pep
CLYGWKVLFNDVYVIDYLDYGRWLIVICGMEACLELGCWVEKVS

SEQ ID NO: 236607 - protein, 666 aa, Zea mays
  Clone ID: MRT4577_14736C.1.pep
MSSLMLCHLNDLVAAGLKTSKGFKKHMYNGCARAINEKFSTRINGEQVKNHLKTWQKRYAKIIKLKKLSAALFDEENCMITLDNEHYNSYVQDHKSDADFLNKPLVHYREMESIFGNSMATGNFAKDSSAALGTENVGESHEEDDVTAHAQTEGTSTQGATSSSTRPSKKAKLAGMEDEGLVAAFISVGENLAAAIKLVAKPDNELPSDLFDMLNQMPGFNSAHISFYYAYLVANPHIGKAFYNLPFEHKLHWITMFIAEKFHRIAYARLLSKRSFVIDSSMSGVELGAIRVFWSPPGAWDDSALAGSFGFEMKGVHGMKGAIWKKDEPASKLWMEKLRLSTRTHLRTSDQHWRPPPVNSLDHFRQALTFVMPLKKTTGPGAALQPLDVNQETLCEARSQKRKATSPTSQEEELDQEIRDLEAIHRQRKIDEATEEMRHLTQDDQDRRPQHRELRQDNSYNDDEWYDDFHGNSFDDASPLAAYLQATPYPPSYKPPQCMQDHEKYLQAYVRRFLRLRAQAPTVPNEIVIEAMIKGLRPGPTAQYFARKPPQTLEKLLQKMDEYIWADNDFRRRREEAYMFSEMTRGFGGRIHPRHVKSIHNSNPSDDRGSQPQRQQHSSQSSGPQQSSFRPPAQEAEAAEASKEDTEISPEDYIAYSTVKTWATPQ

SEQ ID NO: 236608 - protein, 46 aa, Zea mays
  Clone ID: MRT4577_147370C.1.pep
GPQPTGESQSGVTILISNVSMENPPITIFKTRVSIPFTRLFLSSSL

SEQ ID NO: 236609 - protein, 186 aa, Zea mays
  Clone ID: MRT4577_147371C.1.pep
YISQLESEVAGKVQDNNDLRSQNRALLEENKRLSDLTRMLLSSPAFSNFLDHLSANPSVGAPAQVKPEPQQSPEQRSVKDVNPYGSQSSQHQIGMAMIPEQNVDFSLIGNGFNFQPRVFVVETSEIPSPIESSILSGKAPSVIEQAFKSEDEKVEVPVIERPVEQTPVAQSEGGPIDEEFEADPEF

SEQ ID NO: 236610 - protein, 59 aa, Zea mays
  Clone ID: MRT4577_147372C.1.pep
ISISGGVNFGKEGGFRSPFKLANFLKRDLVQAFLVLCHPGFTGFAGRKIRSVNSRFFPL

SEQ ID NO: 236611 - protein, 88 aa, Zea mays
  Clone ID: MRT4577_147373C.1.pep
DSAIIIIIIHIHLVWLVLVQRRAPAPALHIYIYIPGICPCVASESMGGNTLIYKNSYWYSTLLLGSLKYVCTNNDCALQQHNGRDDAF

SEQ ID NO: 236612 - protein, 61 aa, Zea mays
  Clone ID: MRT4577_147374C.1.pep
SCMCYLSLGRHQTWVNTVLATSCKQGACLILCMHCIGGVLVSVVSAKARHGLMWSLSKRVR

SEQ ID NO: 236613 - protein, 57 aa, Zea mays
  unsure (1)..(57): unsure at all Xaa locations
  Clone ID: MRT4577_147375C.1.pep
MCVFRSNKFLVKIMEKKVCIFFLFXXVXPFTIGYMXMXXVVWLKXXKNYXXGGRSRY

SEQ ID NO: 236614 - protein, 85 aa, Zea mays
  Clone ID: MRT4577_147376C.1.pep
PKTFFQKLGPAGPPPPLILYVHPHIHGPRNFGSPKPTTMQPHSPPPPPIFLKKVAPPSPKGPTKNKPSPPQVLNLKGVPTPFKPF

SEQ ID NO: 236615 - protein, 194 aa, Zea mays
  Clone ID: MRT4577_147377C.1.pep
LMHPSVRPRVRRHREICALSCYGASSPSEMCLRWRHARVNGLAAASRARTCYCVCAPLPAFKHAASSPTPSPLRRGGSRGRTRISLAAALSLLPRSLSSCSPPRPRERPRCRFLHSPRATPRFRPSRLLSLSVAHNQARLRAGVHAARGGDELRHDRDVTNDSEFRSWGAGSPAPHAVIGQSVGTLRSGGLLQS

SEQ ID NO: 236616 - protein, 67 aa, Zea mays
  unsure (1)..(67): unsure at all Xaa locations
  Clone ID: MRT4577_147378C.1.pep
PPRPRPSPVFGELLAPTVGPASSLSPTCDXRSTPSPSXSPSPRSPPPSLRAGPSPYPSPSQADLPPP

SEQ ID NO: 236617 - protein, 86 aa, Zea mays
  Clone ID: MRT4577_147379C.1.pep
RAPHPPTPSPSRTQAFPHAVHPPAPHPLSQSWPNGQSSLSPQVMGSNFKAASPHLRRKGLSRFIPSQTPLMWESPTLSLPSASPAK

SEQ ID NO: 236618 - protein, 103 aa, Zea mays
  unsure (1)..(103): unsure at all Xaa locations
  Clone ID: MRT4577_14737C.1.pep
ITPVPFIRGATIVTTPPILITFLPTNLTTVANTVDMHPEALHDALTINNVCFNVKNNYLNDLHQXFLEXNSNVYPAKXHARFTYKAIIINHLFHIGIDISLTA

SEQ ID NO: 236619 - protein, 76 aa, Zea mays
  Clone ID: MRT4577_147380C.1.pep
AFRHPVEQVQHVGPLGPSAGESATEASTDYASAMGDCTMATNRRSAMTKATLARAMGTVSSYVGLVDRNLAEFIAW

SEQ ID NO: 236620 - protein, 84 aa, Zea mays
  Clone ID: MRT4577_147381C.1.pep
LTMLHLTLLSSDSVTNLQYTHIYRCERATSSPMCYPGSALFRFHLPLDLLRHSEAIFWLGVLDSLNCDFRHVACNLCPFDARSA

SEQ ID NO: 236621 - protein, 76 aa, Zea mays
  Clone ID: MRT4577_147382C.1.pep
GPRAFEYTHYIWYNPRRLREAKMALKHKSCSINPDIHNQVSAHVQMPVKELFMAILQIGHWPYFILWVLEPQTGPW

SEQ ID NO: 236622 - protein, 79 aa, Zea mays
  Clone ID: MRT4577_147383C.1.pep
HRCLRLRLIEERPRVPLTKQEKPRAARPTEPRDSYASGIRIPHSSPSHEATHTWLSGSVSRQASPSARNEEKTRLCAEN

SEQ ID NO: 236623 - protein, 88 aa, Zea mays
  unsure (1)..(88): unsure at all Xaa locations
  Clone ID: MRT4577_147384C.1.pep
GGDDGSFRRRRANFQLIRIECRVPEYGWTTXTQKLFHFLNVIVNGXIFQPVLIDLPGLAFFTSYTLLVLFWAEIDYQVRFQFNSSFSH

SEQ ID NO: 236624 - protein, 172 aa, Zea mays
  Clone ID: MRT4577_147385C.1.pep
MASLTLPPAPPNPRQDAIDLHKAFKGFGCDSTTVSNILSHRDSMQRGYIQQEYKTMYSEELSHRISSELSGNHKKALSLWILDPAGRDATVLKEALSAESLDLKAATDIICSRTPSQLQIMKQTYYAKFGTYLEHDISQQASGDHQKILLAYVGIPRYEGPEVDPTIVTHDA

SEQ ID NO: 236625 - protein, 135 aa, Zea mays
  Clone ID: MRT4577_147386C.1.pep
FRQLLGPEPRRWRGSGGHPAMATMDARLHLPRPRRALRRRFIPSPSKPNPPRTFLVFFTHLLLSLACNWGSALVWSHELRRGRRFVQAETSQCVYSVFQMRLIQTEADRQWLPVSLAHLMSISPVPTDKNRVPGS

SEQ ID NO: 236626 - protein, 184 aa, Zea mays
  unsure (1)..(184): unsure at all Xaa locations
  Clone ID: MRT4577_147387C.1.pep
QYKLFFFFFFFFFFFFFFFFFFFTPPGGPPQGRNPPHRGALQKEPGPEPRGGEPSQKGGPGGKRYPPTKTHKKPPGNKKRKPRGAKKKTQPPKKGGHPQPAXPGGKPAFPAEKKKRPPPQERGQPQXGGSPFLGTNPLPPDITRGGGGSAPPKGGKRFSTEKGGNPRKNGGAKGXEKGPKPQKG

SEQ ID NO: 236627 - protein, 38 aa, Zea mays
  Clone ID: MRT4577_147388C.1.pep
NRLSTCIIIDININIAFWFQASWGRLELKPNKKLCSKS

SEQ ID NO: 236628 - protein, 178 aa, Zea mays
  unsure (1)..(178): unsure at all Xaa locations
  Clone ID: MRT4577_147389C.1.pep
PYIIIRGELYKHGVCSPLLKCLSRAKGIELMKEIHVGLCGSHIGSRPLLGKVFRQGFYWLKAASDAADLVQKCENCQKCARDQKQPSSLTQLIQPTWPLQRWGLDLLGPLPPAQGNLKYVVVVVEYFSKWIEAKSLATXTSVPVQKFFWQNIICRFGVPKAITVGNGTQFDAETFKEF

SEQ ID NO: 236629 - protein, 108 aa, Zea mays
  unsure (1)..(108): unsure at all Xaa locations
  Clone ID: MRT4577_14738C.1.pep
MSPAMLSSSYKHCSAREPMHQRMVSVVENPNMEPYMIPQAFSNGIIPLXTLEXQQFSPPIQXIPLVHXLAHNIKTQQLPQLVLAKLAGYSQQQHVFTFNQLAAYNYAC

SEQ ID NO: 236630 - protein, 59 aa, Zea mays
  Clone ID: MRT4577_147390C.1.pep
RGFPCRFLNGPSFEMFEGILWLSKFAMPCWKFNIARGGYNESLPWGGGGFIQPCVAAVF

SEQ ID NO: 236631 - protein, 230 aa, Zea mays
  unsure (1)..(230): unsure at all Xaa locations
  Clone ID: MRT4577_147391C.1.pep
MADIDAGNLFNVKGLVAVVTGGGTGIGLMIAQALEANGAIVYILGRREEVLKEAAATAKHGNIHYFKADVTSKPDLAAAAEHIAAKTGYVNVVVANSGIIGPTMRYLKDDATLKETQDYLWNWDSDKFNQAYNVNVNGAFFTAIAFLELLDKGNKAKNVEQDSQFICVSSAGAFSRVLMSGFAYAGSKAAVIHITKQLATRLVPFGIRWNXSLEPGLYPSEITADMNFKE

SEQ ID NO: 236632 - protein, 145 aa, Zea mays
  Clone ID: MRT4577_147392C.1.pep
FFFFFFEQELFFFFFFLHFSFFYKRKLVAKLQNRANYAQSPSSRGPFISVVSSRLSQLCQPAKPLLFFFLAMPLWAFVVADCLVPTVAKKKKAHEIRSTFLPCVSGRLYSRASYYVFVPAGSVTSEMPCFFLAVCASFLPFRRFG

SEQ ID NO: 236633 - protein, 75 aa, Zea mays
  Clone ID: MRT4577_147393C.1.pep
MAGPSVPVAALADLLAVAALTCCAVSEPPPSERSALLAFLTATPHERRLGWNAFTRVCVWVAVTCDYANFTVDEV

SEQ ID NO: 236634 - protein, 81 aa, Zea mays
  unsure (1)..(81): unsure at all Xaa locations
  Clone ID: MRT4577_147394C.1.pep
KYLFQKIIYNYNKLXFKRGKGAQTYQIIKHITVPPYSHSTSPLFTNFATFLIPSVPKLKHLSPHISFFLQLKYLLGPHLFT

SEQ ID NO: 236635 - protein, 102 aa, Zea mays
  unsure (1)..(102): unsure at all Xaa locations
  Clone ID: MRT4577_147395C.1.pep
LIKRLTSSSKGVKTDYSVKVQELQRQLALDREEADKIQDDRDNFLNLALQGXQRSIXVGGKYDLQVGFSVVSVXFSLFSRHQVVKAMLKTTKRXVQNYKCHT

SEQ ID NO: 236636 - protein, 57 aa, Zea mays
  Clone ID: MRT4577_147396C.1.pep
KVRPFFVFTKQTNPNYNVLLPKNLKNNKTLSPSRSMKPQRFRQLNPYPYLPGTGIKL

SEQ ID NO: 236637 - protein, 51 aa, Zea mays
  Clone ID: MRT4577_147397C.1.pep
GSLIWVVYKNSTLLIQNPVPQKIWGLRSSRGKIFKRTTPGKQRIRAPGKHS

SEQ ID NO: 236638 - protein, 115 aa, Zea mays
  Clone ID: MRT4577_147398C.1.pep
ASTPTKTSRGPKTKDQSTHSGGHGGITRKRGPTQTTFRHITQPRGRDKGPRIKGEKGPVFQTKLSFPTTNQRVRRGNMRGGPAHSKKGKYATFWVGHQTPWEEKGHWFSPLGELG

SEQ ID NO: 236639 - protein, 109 aa, Zea mays
  Clone ID: MRT4577_147399C.1.pep
TAAGAGQTAWPVTSPASHQLLSRLRRRCCIHSRLKRPVSRRLRWLLHQVPRHVRLGVPLVSEALWCRLAYPRSHGQSVGPPRHWPWSQASESSRKRPADFSSKRILATS

SEQ ID NO: 236640 - protein, 120 aa, Zea mays
  Clone ID: MRT4577_14739C.1.pep
SLSLHTNTVCDNVWTFIVTEASFNSAYIQETLSLMGFNVLFAFLLTFSITCIHSHYSFIIHSVAHMPTICNVCSLTNLRILIVSSFFFDIIFIYCFIYIIHIFFLFYYLLYSLLLYFYII

SEQ ID NO: 236641 - protein, 68 aa, Zea mays
  Clone ID: MRT4577_1473C.1.pep
SVGAPSFHILTDPVCPPAAFPKVSVFLYRKSSPSTGCDSSRIVQGFVVGAHLGGEFSQLLRGLFRFAM

SEQ ID NO: 236642 - protein, 61 aa, Zea mays
  Clone ID: MRT4577_147400C.1.pep
GSRVIHTEVSLPGHIICTKDICTQLHHIIISTFSISLMPDDSKISNASRTQMQSQYRCASW

SEQ ID NO: 236643 - protein, 138 aa, Zea mays
  Clone ID: MRT4577_147401C.1.pep
GGSGARGRSPLSAEGVVEGVLVRGAGEAPDEAAVLNVRRRHLDPLTHETEPRRASRTRNRSGGGGEASPPLRIALVVVGASAAVVRRRVLVRPRPALLHGSSSSWSCGDSLARVSQVASTSAAVSNWDERAGLVCKLV

SEQ ID NO: 236644 - protein, 93 aa, Zea mays
  Clone ID: MRT4577_147402C.1.pep
SLKPPKKKKGGKTETAKLQKKKRGKNQFWGPPSLQKKKNGLKKKFFDPFLRGALNRGRKTSPTYPKKVPFPHKQFGNLKTLFKENEKLVFCWE

SEQ ID NO: 236645 - protein, 80 aa, Zea mays
  Clone ID: MRT4577_147403C.1.pep
DLGPASTMLCPSVPPNILKECACCCSQTKLLVPNSFPSSKKSSKAPTNLLFPPPVLTVTLALQLPPKEKRKLPNPKKKST

SEQ ID NO: 236646 - protein, 495 aa, Zea mays
  unsure (1)..(495): unsure at all Xaa locations
  Clone ID: MRT4577_147404C.1.pep
YRSMEDAKSRLEXELAKAKKEVEXMNAQYIYNEKRLDSLKTASQPKADELRRMQELDGIISSEQAELDRLTKCSSKLKDQASELQQKVENAGGKKLKDQKTKVGNIQSELDKTSSEINRHKVNVTSGEKLVKRLTKGIEESKKDREKLSAETEKMMSMFKEIEKKAFVVQEEYKKTQEMIDNHKVELDKTKEEYTKLKKAMDELRATEVDAEYKLQDTKKLAKEWEMKVKTFKKRLDEIQINVVKHMDQIQKDAVDPEKLKATLGDEQLNDTYDMKRAMEMVALLEAQIKDLNPNLDSIAEYRTKACLYGERVDELNATTQERDDLKKLYDGLRKRRLDEFMAGFNIISLKLKEMYQMITLGGDAELELVDSLDPFSEGVVFSVRPPKKSWKNIANLSGGEKTLSSLALVFALHHYKPTPLYVMDEIDAALDFKNVSIVGHYVKDRTKDAQFIIISLRNNMFELADRLVGIYKTDNCTKSITINPGSFAESMKVV

SEQ ID NO: 236647 - protein, 51 aa, Zea mays
  Clone ID: MRT4577_147405C.1.pep
PKRAFFHWYVGKGIKKGNFSKAPKDLPPLKKDYKKVPPKGGNNSAPKKKKN

SEQ ID NO: 236648 - protein, 42 aa, Zea mays
  Clone ID: MRT4577_147406C.1.pep
NLTLFFRTKNLVWLKSQNIESFFLHVPGTCRGEESLGNRWTP

SEQ ID NO: 236649 - protein, 104 aa, Zea mays
  Clone ID: MRT4577_147407C.1.pep
NTLFNNPFNSFGQPNFFKCCFFRKTVSCFFWSLNVPGTQFPKFEEQPVFGCIIFRDQMRVNFFLLLLFGPGLKKKNPCFFPWGPLFFFWRPPINKAKYLMFLGP

SEQ ID NO: 236650 - protein, 102 aa, Zea mays
  Clone ID: MRT4577_147408C.1.pep
PAAATSSTLSSDPPATQHLPRRRHILPYQHTPDCGESFHPQQGGRRRLHHHQETHNCHALTVAKRHPLSPSRHNPLPPPSSQTNQHLPELPHPHRRHHEPHL

SEQ ID NO: 236651 - protein, 87 aa, Zea mays
  Clone ID: MRT4577_147409C.1.pep
EDILLYIRGKVTNIDRKRRTNLLKAPGHMLAGSYLNSAISMHWYSHGHQRSGTTYENRPPGGSYPPEREKRALNSTGGKYVTKQWNI

SEQ ID NO: 236652 - protein, 135 aa, Zea mays
  Clone ID: MRT4577_14740C.1.pep
PIGNLPQEKGAPMVRSRFNSLRYMVCWYPTRYRCAFGWSDFRVLFIDRGPFSFFFFFAGYLWGFFFGLWKCSFCLGFPKFRLDFFTGDTVFNQAVCIKRFGSPQVWFPSRGSLLGKRMSFRVSMSTISFVGRRFR

SEQ ID NO: 236653 - protein, 83 aa, Zea mays
  Clone ID: MRT4577_147410C.1.pep
NNAPGFFSFFGGGRSLALFGVWGWFPPFVPVFFGGMLFSPPRVGGLYPRGGVLFGAPLFVLMGGGFYPNVFPLWLWKLFVSVS

SEQ ID NO: 236654 - protein, 119 aa, Zea mays
  Clone ID: MRT4577_147411C.1.pep
SWPGIKMCISCQFLTMVDVSDLSNVQCFVSKVSTSIMLVVLFFSICRKFLIMHAKNSMVQHFLSGACRRGAFSKTCEEAVSLNRVFEQVLLQRKPISFVYYDRWNLLFFTLFVLIVQPS

SEQ ID NO: 236655 - protein, 95 aa, Zea mays
  Clone ID: MRT4577_147412C.1.pep
KIESKHNVVCSMSSRGDPASVRIAGEALGIWQSSCMRNAMLGSLWNDSLLLFRGGFCIMLGWFVSFLAAIMLGSFAFFPFQYLALGCRGFLFLSC

SEQ ID NO: 236656 - protein, 370 aa, Zea mays
  unsure (1)..(370): unsure at all Xaa locations
  Clone ID: MRT4577_147413C.1.pep
PFLEFFFFFFFFFDPGNNNGLHTLIKANHPPYGMDMLNHEATGRYSNGLIPTDLIXCYAMLCLRRRLVCLMHIIYIINKQTNIKHMHASCXAQQLGVKQLLPPYLGVDLSPDDLLTGVSFASGATGFDPLTPVVVSVISMDQQLAYFDEYRGRLVDIAGEAETARIIEGALFLVCAGTDDVANTYFTTPFRSAEYDIPGYVYLLVGHAEEFLRELVVSSRGARRIGFVGMPPVGCVPSQRTLGGGLATRACEPKRNEAALLYNARAQEMIAAFNNNNTDADADVLVVFLDIYRILDHLMERGEEYGFSETTRGCCGTGTIEVTGLCDSRFVSVCDDVSQHVFFDLPPNSERAYRIIVNDIFQNYGHVLFS

SEQ ID NO: 236657 - protein, 37 aa, Zea mays
  Clone ID: MRT4577_147414C.1.pep
RPLLYEPTFVLLTHHGSVLSYVRDALPPSVLVYIKNT

SEQ ID NO: 236658 - protein, 189 aa, Zea mays
  Clone ID: MRT4577_147415C.1.pep
RPWGNRGFSQPRRRRARQPPWECGTRLPASVRCRLSPLRPQPRRTRPERRRPPPRLHAAAPATIHAATPHASTLSCVPACRLPPAACSAPPLLLLGCSVVPDPWRRRRRRLRGCGDDKLILRGLQFHGFHGVLQEERTLGQKFVVDIDAWMDLAAAGESDCIADTVSYTDIYSIAKDDVEAFWTTCAWR

SEQ ID NO: 236659 - protein, 134 aa, Zea mays
  Clone ID: MRT4577_147416C.1.pep
MAEKEAAATWGGDDKLILRGLQFHGFHGVLQEEKTLGQKFVVDIDAWMDLAAAGESDCIADTVSYTDIYSIAKDVVEGTPRNLLESVAHSIAEATLLKFPQISAVRVKVGKPHVAVRGVLDYLGVEITRHRKKE

SEQ ID NO: 236660 - protein, 163 aa, Zea mays
  Clone ID: MRT4577_147417C.1.pep
FPRGGREKKKLKKKKKKKKKKKKKKKKKKKKKKKKKKKKKKAFRIGKASPIKVAGKFSRFPLVSPVARFRLRKRTQWRASPTAEEEPEKFTQMEAGGQSLFGISQSVPEVGGPVVSPPRGGRGMDENGHKDVREGRYRGNFFSFSNQSPEGGPKRGPRKKGAA

SEQ ID NO: 236661 - protein, 134 aa, Zea mays
  Clone ID: MRT4577_147418C.1.pep
MAEKEAAAMWGGGDKLILRGLQFHGFHGVLQEEKTLGQMFVVDIDVWMDLAAAGESDCIADTVSYTDIYSIAKDVVEGTPRNLLESVAHSIAEATLLKFPQISAVRVKVGKPHVAVRGVLDYLGVEITRHRKKE

SEQ ID NO: 236662 - protein, 134 aa, Zea mays
  Clone ID: MRT4577_147419C.1.pep
MAEKEAAATWGGGDKLILRGLQFHGFHGVLQEEKTLGQKFVVDIDAWMDLAAAGESDCIADTVSYTDIYSIAKDVVEGTPRNLLESVAHSIAEATLLKFPQISAVRVKVGKPHVAVRGVLDYLGVEITRHRKKE

SEQ ID NO: 236663 - protein, 174 aa, Zea mays
  Clone ID: MRT4577_14741C.1.pep
MGRHSCCYKQKLRKGLWSPEEDEKLMNHITKHGHGCWSTVPKLAGTTIKIKIKSCTLCSTFSIVHLHCFLLLLQGLQRCGKSCRLRWINYLRPDLKRGAFSEEEEDLIVELHAVLGNRWSQIATRLPGRTDNEIKNLWNSSIKKKLRQKGIDPHTPQPLLVEVERSAAPTTSTE

SEQ ID NO: 236664 - protein, 136 aa, Zea mays
  Clone ID: MRT4577_147420C.1.pep
SNSTIGIRGSVGYVAPEYAEGSTVSTIGDVYSLGILLLEMFTGRSPIDDMFGDTVDLHNYAKHALSERILDIVDSTIWLHVESTDSIIRSRIKDCLVSVFRLAISCSKLRPGDRIVMSDAAAEMHAIRETYHMFCC

SEQ ID NO: 236665 - protein, 89 aa, Zea mays
  Clone ID: MRT4577_147421C.1.pep
LDWKSSAHPRFLNDLQISYEDLILSSDGKASCKFLPCSKCSFREYSVRLLAPLQILNPTDHGYGGTISAQQIPVARRKGLLKILLVLVT

SEQ ID NO: 236666 - protein, 80 aa, Zea mays
  Clone ID: MRT4577_147422C.1.pep
MMMMPTAASLMDDLVEEFLIRLPPDDPASLVNASLVCKRWSRLIAGRVFRRKFRKIHRAKLLHMARGQVYRQRRRRRQRQ

SEQ ID NO: 236667 - protein, 66 aa, Zea mays
  Clone ID: MRT4577_147423C.1.pep
NPTCSRCGDRAPPRRPPPARPMRTLATASSCSLSVTTRTHGCYRPMITLSIDPGFRRQARSVGLCS

SEQ ID NO: 236668 - protein, 273 aa, Zea mays
  unsure (1)..(273): unsure at all Xaa locations
  Clone ID: MRT4577_147425C.1.pep
EYSEAVLNYTRVINQQHVEPRVRRVALNRGAEYLERYLKLIAFSAYLGSEAFDGFCGQGQTKISFKGWLQQRPEIQTMKWSIRLRPGRFFTVPHEQKATYPPPQGDVTMETIVKARSGSVLGKGSILKMYFFPGQKRSSSVNFRGAPHVIKVDGYPVYSMATPTIDGASDVLSYLGSKDTTGRNIAQKVVVTDLREEVVVYIKGSPFVLRELDQPVDTLKHVGISGPMVENIETRXKEDILSEVKQLGGRXLLHQEXFNAATNQCSVVGYWEH

SEQ ID NO: 236669 - protein, 72 aa, Zea mays
  Clone ID: MRT4577_147428C.1.pep
LSTKYVLEFLCIIFTHINLCHCSILCPVRFLGRWSAERTYLFIFPNEVKGYLLSSELSWRIHEGFLILWRCK

SEQ ID NO: 236670 - protein, 77 aa, Zea mays
  unsure (1)..(77): unsure at all Xaa locations
  Clone ID: MRT4577_147429C.1.pep
NLTKKKNLHYIEIYKAVAIDQVRGAPNPIMIHSQGTYLYHPVLLLYPKLSTIPHQLKGREVHPPKLCFAXTFLVSSS

SEQ ID NO: 236671 - protein, 51 aa, Zea mays
  Clone ID: MRT4577_14742C.1.pep
PSEQLLSPSNRNRRLNVDYFSVPNPVTALLSRTSDWDDTIHEHLVRDRRPL

SEQ ID NO: 236672 - protein, 314 aa, Zea mays
  unsure (1)..(314): unsure at all Xaa locations
  Clone ID: MRT4577_147430C.1.pep
KLQRVCETELGLITQCCAPKNVRKGGNQYLENLSLKINVKVGGRNTMLEDAFNRRIPLLTDCPTIVFGADVTHPSAGESSSPSIAAVVASMDWPQVTKYKCLVSSQGQRVEIINDLYTEVEDPQKGIVKGGMIRDLLMSFFKSTGQKPSRIIFYRDGVSEGQFSQVLLYEIDAIRKACASLQDNYLPRVTFVVVQKRHHTRLFPENHRSRDQTDRSGNILPGTVVDTKICHPSEFDFYLCXFWFLWTYSPGSLSSSSGEMLLIPDAVPPASLIFTXSHSGIKGTSRPAHYHVLLDENGFSADALQTLTYNLCYT

SEQ ID NO: 236673 - protein, 118 aa, Zea mays
  unsure (1)..(118): unsure at all Xaa locations
  Clone ID: MRT4577_147431C.1.pep
TVTHYINKGGGNISRISPNPTEHAYRLRNTTFHPIALEDLLGKDEPNYENKYLRLKSTFMYYNSDKLISXTAKTSRPLTTLSTDSXDRVETLQEAGTAKDDTXISNRYAXTKLILQKL

SEQ ID NO: 236674 - protein, 57 aa, Zea mays
  Clone ID: MRT4577_147432C.1.pep
TQLCTRNLHDRLHLRPWQSTTFCTHSRTIGIHLTISILRKDYCKRRLHQLRHRLGLA

SEQ ID NO: 236675 - protein, 93 aa, Zea mays
  unsure (1)..(93): unsure at all Xaa locations
  Clone ID: MRT4577_147433C.1.pep
MSNQIETTXVVHSEGVHTKEDVAWNPGKRMVYIYKVKTKCMETRYRCIWGKDTRPYGNLSVDRAKVKTILTPVLITQKVRVFMYPHRIKSLAG

SEQ ID NO: 236676 - protein, 216 aa, Zea mays
  Clone ID: MRT4577_147434C.1.pep
NSARGADVLKCLGDNKKHMRECTLTALDSWIAAAQLDKMVPYIIVSLGDQKTGSEGRKDLFDWLSKHVSKMSDPSEALPLLKPSASSLMDKSSEVRKAAESFMNEILRICGQEVVGRNLKDLPSPTLAIVSERLKLSTVHEGFSESVKMVTTSMSLPSKAGLKNNKHGLNDRGSNVGKPVSQRGLPARASVSMVSTQDPAQSQALFNIKDSNKEEL

SEQ ID NO: 236677 - protein, 94 aa, Zea mays
  Clone ID: MRT4577_147435C.1.pep
GPSQWFISRGFPTKTALWETFLHFSFGSAPASKNMRGVFSYGNWNPTLFLQNSFNPKGPLDRDPLSGAGPRAKENQKLARHPIREGRNPLFFGD

SEQ ID NO: 236678 - protein, 48 aa, Zea mays
  Clone ID: MRT4577_147436C.1.pep
MANTPRILSLCLLTLLCAANGPFTSHNCGCHPNFCYTKFGYCITTDTY

SEQ ID NO: 236679 - protein, 87 aa, Zea mays
  unsure (1)..(87): unsure at all Xaa locations
  Clone ID: MRT4577_147437C.1.pep
QFFPFNQFAALNPFDYFQQHIVLPFGQYXTTSPVSFLTQQQLLPFYQQFVANPATLLQLQQLLPFVQLVLTNPAAFYQQHIIGGALF

SEQ ID NO: 236680 - protein, 96 aa, Zea mays
  Clone ID: MRT4577_147439C.1.pep
PSDTITSMHSTNYNNKLDTQKVGLFGLPIHDIIINAFYKHTIRQMTLTTTHNQISIDNRSSTSYEDLTPTFHLKPPVQLSATTNLSLNYHERNNVH

SEQ ID NO: 236681 - protein, 204 aa, Zea mays
  unsure (1)..(204): unsure at all Xaa locations
  Clone ID: MRT4577_14743C.1.pep
MGRHSCCYKQKLRKGLWSPEEDEKLMNHITKHGHGCWSTVPKLAGXPSKSKSNPARFALPSQLSISTVSCSFSKVTSFSHSSPSRTCSIDYLINXNXVAGLQRCGKSCRLRWINYLRPDLKRGAFSEEEEDLIVELHAVLGNRXKLSPKSSQTHNFAQTDCFQASFLFNQAFFFFFQHPWXWSQIATRLPGRTDNEIKNLWNSS

SEQ ID NO: 236682 - protein, 380 aa, Zea mays
  Clone ID: MRT4577_147440C.1.pep
MNMHVPAARVYSCFDSLCLLFPQRMLPAFAACCTDLVERWEGLVADGQQPCEVDVWPEMQNLTGDVISRAAFGSSYLEGRRIFQLQGEQVQLVVQAMHKLHIPGYLYLPTKTNRRMKRIASEIQELLKGIIAKRENALRTGGGAASDDLLGLLLESNMEHCRGDGGKSKASGITTDDVIGECKLFYFAGMETTSVLLTWTMVVLSMHPEWQDRAREEVLHVFGDRTTPDYDGLSRLRIVTMVLYEVLRLYTPLTALQRQTYKPMELGGVRYPAGVMLMLPLLCIHHDKDVWGPDASEFRPQRFAEGVSRASRDAPAFFPFGWGPRTCIGQSFALLEAKMGLSMILQRFAFELSPAYTHAPFAHGMLQPEHGAQVMLRRLP

SEQ ID NO: 236683 - protein, 211 aa, Zea mays
  Clone ID: MRT4577_147441C.1.pep
PLEHSRCNRQAQQFIYLEILQVAKSGVVGMQSYWAPLFPNTAVEKQGVHSLYSDYAHIFDLSSENTSLGSYIVPKVGHLAVLLKRSALLTGSAFFTIAIRYRALLDRWILQKCAVSHSQGAPVQSTMMLRSCWQCRSLPLFVGIGVLMARLCSYITIQSHNNNRQVIRGIEANLQGDSIIESNKLCNQQSVLPSLLGSKHELCPFAASFYL

SEQ ID NO: 236684 - protein, 33 aa, Zea mays
  Clone ID: MRT4577_147442C.1.pep
GRGPLITPVLFKTKKKPLHQRINILKTFRRNGL

SEQ ID NO: 236685 - protein, 49 aa, Zea mays
  Clone ID: MRT4577_147443C.1.pep
LDNICQKKQKCYNAPKNFRVGTKQGLHQKLFKISVTSNLAAHDSVLNIN

SEQ ID NO: 236686 - protein, 41 aa, Zea mays
  Clone ID: MRT4577_147444C.1.pep
ILNFETLNCGNCNGIAHYSIHYTGGLNNLDTTHGRFFGANK

SEQ ID NO: 236687 - protein, 68 aa, Zea mays
  Clone ID: MRT4577_147445C.1.pep
RGKTGAPFFYIKGSNSLFHKNPPGLKRGLPPPMVYLFNILPGFFPPIRGIFFKVPPGPCLKSPTQTLD

SEQ ID NO: 236688 - protein, 83 aa, Zea mays
  Clone ID: MRT4577_147446C.1.pep
NIFKHGYKLCKAIYLQYEYHFCPGSRRFLGPPPVFTSLGYRATVNILFVALLLHMALCYIFTDMAYLGPMATFELSQFVCFAL

SEQ ID NO: 236689 - protein, 51 aa, Zea mays
  Clone ID: MRT4577_147447C.1.pep
HCYRKIYQGHCFYYCNQARLKCWITPPRTNVTPFKSLVYITKMRNRTPYLF

SEQ ID NO: 236690 - protein, 96 aa, Zea mays
  Clone ID: MRT4577_147448C.1.pep
SSKTLFCLNLGMVMDKLMQSSFHLPKEQLSIISMSYALVNSNTVRVGWGGVWVLNTLGEQRRSCSCHPTELGHTCIGMDQKNIAPYPYVRAVTVSC

SEQ ID NO: 236691 - protein, 143 aa, Zea mays
  unsure (1)..(143): unsure at all Xaa locations
  Clone ID: MRT4577_147449C.1.pep
LGLTSLSYCATGXSSSIRIIDELALSLSLSVPSYFQQDGEHADAHSEVAPYFEPYAVAYHGXPVHTGPGGVNYELNTILSLNMVIAFLAALQLDNTDAEGHXYGDCMIGHEXEAARREPTFKKDHELTFKIGRPIIWAKSAEL

SEQ ID NO: 236692 - protein, 90 aa, Zea mays
  Clone ID: MRT4577_14744C.1.pep
ILSFSMISYFFSEVHDPILSLSVKHYAVTTSSLGPEILLGRVSSLGYTVRVHLCCTARIPASLCLSQPGRFSCGRAIGSLPHAGLHGRAA

SEQ ID NO: 236693 - protein, 171 aa, Zea mays
  Clone ID: MRT4577_147450C.1.pep
QQQKGLSPDLLRYKGPIHCARTIVREEGLFGLWSGALPTVMRNGTNQAAMFSAKNTFDIVLWKKHEGDGKVLLPWQSMVSGFLAGTAGPVCTGPFDVVKTRLMAQGRTGDAKYKGMVHAIRTIYAEEGLRALWKGLLPRLMRIPPGQAIMWAVADQVMGLYERTHLQPVHI

SEQ ID NO: 236694 - protein, 101 aa, Zea mays
  unsure (1)..(101): unsure at all Xaa locations
  Clone ID: MRT4577_147451C.1.pep
MLVYYSLFFFNKHFKNVTVRVLLQLCSGLKHMHSFDPPYAHNGVKPDNVLITQRKQSHLAILMDFESAXPARKTIRSQAEALQLQVPLYSNMQRILLVHLN

SEQ ID NO: 236695 - protein, 90 aa, Zea mays
  unsure (1)..(90): unsure at all Xaa locations
  Clone ID: MRT4577_147452C.1.pep
FIERAKHLFDEVLHALHMISDKKVQGSSINMEFSNYIADLEIMLRKEKSEFEGCLNKVLRRDMQKGQPDILEINRLRRQLLXHSYLGDKK

SEQ ID NO: 236696 - protein, 77 aa, Zea mays
  Clone ID: MRT4577_147453C.1.pep
ILASPSPFLEKSRTGVRWPNFLTRMRWSVKARASAIRAHWLASYQPLAGGSISCAAAHCYGWLLMQRLALPLMRGTK

SEQ ID NO: 236697 - protein, 80 aa, Zea mays
  Clone ID: MRT4577_147454C.1.pep
GQRQRPRVVRPPHNPFKHIRRLELLAPTHLRMCAACSSVCSIQQRLTMASGVNISCAFGGLSCELPLRGPGRGCAGAHGY

SEQ ID NO: 236698 - protein, 173 aa, Zea mays
  unsure (1)..(173): unsure at all Xaa locations
  Clone ID: MRT4577_147455C.1.pep
KKKKKKKTPSNPQAPLVQVGASLCLASRHGPSLAAVSVKXPVAIKGXXAGSXSSSGRKXLAVARPXSPRSIPQXPRACRAVVAXKYGGARAVYFXDLDDXIGNTXTGQXWDLYGXSTPPSPYXPLQSKXYFETFAAPFTKRGLLLKFLLLGGGSLLAYGSAMATPDLLPIKKG

SEQ ID NO: 236699 - protein, 388 aa, Zea mays
  Clone ID: MRT4577_147456C.1.pep
MKQVWGRSSKDMTTMPPPRHRGAAKKPMWIIVLLSLVCVALMGAYVYPPRHYSACYFFASSVCTPFKDWLPAVARERTDEEIVSSVVIRDLLSMPMAMSKNPKIAFMFLTPGSLPFEKLWEKFLQGHDGRYSIYIHASREKPVHSSSLFVGREIHSEKVVWGRISMVDAEKRLLGNALEDVDNQFFVLLSDSCVPLHTFDYIYNYLMGTNVSFIDCFFDPGPHGTGRYTMEMLPEIEQRDFRKGAQWFAITRRHALLILADNLYYNKFKLYCKPAEGRNCIADEHYLPTLFNMVDPGGIANWSVTHVDWSEGKWHPRSYRAADVTYQLLKNITSVNENVHITSDDKKVVTQTPCMWNGTKRPCYLFARKFYPESLNNLLKLFSSYTSA

SEQ ID NO: 236700 - protein, 61 aa, Zea mays
  Clone ID: MRT4577_147457C.1.pep
MNAMIPCLLNNSLHHGSILNTSERSQAAEHLKITEEASLTSRGRSWWCRDKPCRGRDRYCG

SEQ ID NO: 236701 - protein, 377 aa, Zea mays
  Clone ID: MRT4577_147458C.1.pep
MTAMPHPRHRGAAKKPMWIIVLLSLVCVALMGAYVYPPRRYSACYFFASSVCTPFKDWLPAVARERTDEEIVSSVVIRDLLSMPMAMSKNPKIAFMFLTPGSLPFEKLWEKFLQGHDGRYSIYIHASREKPVHSSSLFVGREIHSEKVVWGRISMVDAEKRLLGNALEDVDNQFFVLLSDSCVPLHTFDYIYNYLMGTNVSFIDCFFDPGPHGTGRYTMEMLPEIEQRDFRKGAQWFAITRRHALLILADNLYYNKFKLYCKPAEGRNCIADEHYLPTLFNMVDPGGIANWSVTHVDWSEGKWHPRSYRAADVTYQLLKNITSVNENVHITSDDKKVVTQTPCMWNGTKRPCYLFARKFYPESLNNLLKLFSSYTSA

SEQ ID NO: 236702 - protein, 168 aa, Zea mays
  unsure (1)..(168): unsure at all Xaa locations
  Clone ID: MRT4577_147459C.1.pep
MKQVWGRSSKDMTTMPPPRHRGTAKKPMWIIVLLSLVCVALMGAYVYPPRHYSACYFFASSVCTPFKDWLPAVVRERTDEEIVSSVVIRNLLSMPMAVSKNPKIAFMFLTPGSLPFEKLWEEFLQGHDGRYSIYIHASREIPVHSSSXFVGREIRSEKVVWGRISMVD

SEQ ID NO: 236703 - protein, 100 aa, Zea mays
  Clone ID: MRT4577_14745C.1.pep
NKRVRPAPPRPNKPPPPQRPQSLQTPPPIRQKPLPPSRSRHLRPANNRGGEPHPTEEALTNTQAPCSLALSARARLTSRIHTCATIPFDLAPSTFLLPPP

SEQ ID NO: 236704 - protein, 80 aa, Zea mays
  Clone ID: MRT4577_147460C.1.pep
ETKAWTIFSGMTAPQAAGVIHSDFQKGFIRVETVSYDDFVAAGSLGVAWEKGKHFENIRSRSSGSTFISSLLQCLHSRQN

SEQ ID NO: 236705 - protein, 50 aa, Zea mays
  Clone ID: MRT4577_147461C.1.pep
FHLNLYIHLKCMHNPITNDLKVYSIILPLDNKIFFLKIFYFELLYVQNLY

SEQ ID NO: 236706 - protein, 70 aa, Zea mays
  Clone ID: MRT4577_147462C.1.pep
MLDWAPVVVGVVLFVLLSPGLLIELPGMHRWVDFGSLRVTGKAATVHTIIFFVLFLIVTMACKLHIYTGA

SEQ ID NO: 236707 - protein, 157 aa, Zea mays
  Clone ID: MRT4577_147463C.1.pep
MKQVWGRSSKDMTTMPPPRHRGAAKKPMWIIVLLSLVCVALMGAYVYPPRHYSACYFFASSVCTPFKDWLPAVVRERTDEEIVSSVVIRNLLSMPMAVSKNPKIAFMFLTPGSLPFEKLWEEFLQGHDGRYSIYIHASREIPVHSSSLFGGREIRSE

SEQ ID NO: 236708 - protein, 293 aa, Zea mays
  unsure (1)..(293): unsure at all Xaa locations
  Clone ID: MRT4577_147464C.1.pep
MQCNTGSQPIDLSHISQALAHQFGDRVETLSRMVPDTVRVAVGILGNAASMLLYTTPILTFRWVIRKGNVEEFSCVPYILALLNCLLYTWYGLPVVSXGGRTCPWPPSTAWASCSRSPSSPYTYGSHXEKKRFALQLVLPALALFGLTAALSSFAAHTHRSRKAFVGSVGLVASVSMYTSPMVAAKRVIATKSVEFMPFSLSLFSFLSSALWMAYGLLGRDLFIASPNFIGVPVGVLQLLLYCIYRRDHGAAAGAEAHAHGPAAAADQEKGMKAAAPVAVQPQEVAARVSEYK

SEQ ID NO: 236709 - protein, 34 aa, Zea mays
  Clone ID: MRT4577_147465C.1.pep
LPARITDGLIQRRCKLGSSSPRWWRGCNCTRWVE

SEQ ID NO: 236710 - protein, 154 aa, Zea mays
  unsure (1)..(154): unsure at all Xaa locations
  Clone ID: MRT4577_147466C.1.pep
NLWLGPNDDPCRSLLQKRVIATKSVEFMPFSLSLFSFLSSALWMAYGLLGRDLFIAXQQNHLGRLVLSIPFACLLLSFDPVGAVQSPNFIGVPVGVLQLLLYCIYRRDHGAAAGAEAQAHGPAAAAADQEKGMKAAAPVAVQPQEVAARVSEYK

SEQ ID NO: 236711 - protein, 49 aa, Zea mays
  unsure (1)..(49): unsure at all Xaa locations
  Clone ID: MRT4577_147467C.1.pep
GGWVPVVWLXPRCWXLWGGVRGXPQLXFVGIRPCWAFRSQCXGSGASPV

SEQ ID NO: 236712 - protein, 117 aa, Zea mays
  unsure (1)..(117): unsure at all Xaa locations
  Clone ID: MRT4577_147468C.1.pep
MNIILRRMEYICMYIFDSELYILITCTHMLRLTFRWVIRKGNVEEFSCVPYILALLNCLLYTWYXPPGGELPGGRTCPWPPSTAWAFXCSRSPSSXYTYGSHPAEKKAVQVKDLGIS

SEQ ID NO: 236713 - protein, 53 aa, Zea mays
  Clone ID: MRT4577_147469C.1.pep
AFIIWIILSCHLRLGLCTLDLNCTVLQINMCFCKSLYNILLICLFLCGSCIEL

SEQ ID NO: 236714 - protein, 102 aa, Zea mays
  Clone ID: MRT4577_14746C.1.pep
VPQGPRRGTSAQVFAPGHFLKKWGENIDFPGFIVWPPFNFNGVTGETPIGVSPPILGAIDLPPYPPLGGIGVFQPEPCPRGPFFKTIPKNPFFFKSRFGLGP

SEQ ID NO: 236715 - protein, 100 aa, Zea mays
  unsure (1)..(100): unsure at all Xaa locations
  Clone ID: MRT4577_147470C.1.pep
MMQNEGMGTPSVQQSESSGSGPYRFRTLTDLFDATEQVHDFEYSGVCMLAADEPACVEHALSQDCWKRAMEVELKSVQENQTWEIADLPRDHXKAIGLKW

SEQ ID NO: 236716 - protein, 107 aa, Zea mays
  Clone ID: MRT4577_147471C.1.pep
MARHIKNITQKLYFSFSAKHKIGEDGAFIHRKIHMSYYTSLNKAHSDSMTHKSHTYITKDGPISLANLCQSNIDDLADAIIYSIHNANHAYVRTLMVNLLMIYIRKL

SEQ ID NO: 236717 - protein, 90 aa, Zea mays
  unsure (1)..(90): unsure at all Xaa locations
  Clone ID: MRT4577_147472C.1.pep
FGSWXGXWGVCFTXGAFFSVXGFVASGRACMICPCFRXXCXFXLSRLLSAGGWGESXVGVWGEVCVSLRGGRAHAVFAAWALLALVYAGL

SEQ ID NO: 236718 - protein, 199 aa, Zea mays
  unsure (1)..(199): unsure at all Xaa locations
  Clone ID: MRT4577_147473C.1.pep
RFIAGGETPSELIIGGXGDHLLXPFVKDTGDAKLTPHAVFVDVSSPVIXETXCASHRQVFNTYNTSRVNEKTRYHFPLGPYTITMQIADLCLDPISKLAYCRTGLQRFLXLTHSSRKNDTAIDSLLLEQLSVQYVYINHFDVTCVSSSHVSXSVVEPYNSVLAHHSLLEHTDADVLLHNEVIYDICRRSLEIDRPCYTN

SEQ ID NO: 236719 - protein, 175 aa, Zea mays
  Clone ID: MRT4577_147474C.1.pep
FRPRTTSRPLLILPSDAARGRHSPILPRRAVRRPAAPILPCRRRPPSSPPVSPAACPHIMVRHGCHPDRARALPSSAAAEFFSSVEQRRRHGTQRDRPATGSSPPSSSGVRVGHSRLGAVMDFSCGSFETADVPTIPHLCSSICSCEKLKEPWFSLYIKKSSQFNASRTQGSEST

SEQ ID NO: 236720 - protein, 54 aa, Zea mays
  Clone ID: MRT4577_147475C.1.pep
SNIEFIFSRMHGKYYFTVASSNKFETWFAPRSRIILICNKAMRGGILMFKERSP

SEQ ID NO: 236721 - protein, 231 aa, Zea mays
  Clone ID: MRT4577_147476C.1.pep
MACPAQSMLSASGCILLRSKPRASSSHVRGGIIGGGCSSRPFQLTCNASSSPSPPSPAPAQEDPDCNDEECAPEKEVGSLRAEWLAEERTQVVGTFPPRKRGWTGLVEKDTAGQTNIYSVEPVVYVAESAISSGAAGMSAEGAENTAAIAAGLVLITVAAASSILIQVNKSQPQVPEAAYNGPPLSYYVAKFQPAQTLEAPAPAEAVEAQDGAATVQDSAAPEAQEAVLIS

SEQ ID NO: 236722 - protein, 67 aa, Zea mays
  Clone ID: MRT4577_147477C.1.pep
MAEHHPDLIICRKQPGIVIGRVCEKCDGKCVVCDECNYGSFQGRCVICGGVGISDAYYYKKYGFKKR

SEQ ID NO: 236723 - protein, 246 aa, Zea mays
  unsure (1)..(246): unsure at all Xaa locations
  Clone ID: MRT4577_147478C.1.pep
MACPAQSMLSASGCILLRSKPRASSSHVRGGIIGGGCSSRPFQLTCNASSSPSPPSPAPAQEDPDCNDEECAPEKEVGSLRAEWLAEERTQVVGTFPPRKRGWTGLVEKDTAGQTNIYSVEVIILALFLHSNALASLRCLAYRFCDHWCPAVXTTSSGLTPCVLIMHQPVVYVAESAISSRRGGXPAEGAENTAXXIXAGLVLITVAAALSILIQVNKSQPQVPEAAYNXPPFSYYVAKFQPAPDP

SEQ ID NO: 236724 - protein, 526 aa, Zea mays
  Clone ID: MRT4577_147479C.1.pep
MDAEKASRVVQSLFGALSSRYENSKGGKLMSNAAPEKMPTENEQIVNEILHDIHGSFADISDGAGTVEGDFKVKVKETMEKAFWDVVADSMRGDMPDYCYLVSLVKEIREALEELSPTGWKEEISDNINLEILTQLLESGSQDRQYLGQILQYSLDKLRKLSSPVKEHEMKKSHDTLLGELVEDSKSNYKDPNSFVLCVIKGLRFTMEELQALKTEVTRARIQLLEPLIKGSGGVEYLQKSFAGRCGSPSDALASLPSTARWIFSLKDVVEEQWNEHVSSLSILPEADHVQTLVATLRTGHAVAGVQSVIPAADNTGLPECRGEILGKLIRIGLLQLISSMEGVERESVPETFMLNWLRLRSVQSKFQQVIVIATSMLVLHQVLASENPKITSSELENATSELFNVLTRLLDNFPDVGTEKIIEAMMYSSTSRSLSDHERMNARKEILTRVFLSLQTDDTTHSLLLLSCAGVNNLRLRNEGGTPSPGRKEEQQYLLLRGALLVVAVGVFLRRRRRGRRRGRESVAG

SEQ ID NO: 236725 - protein, 43 aa, Zea mays
  Clone ID: MRT4577_14747C.1.pep
QTRLKSPCNLTLKASKPEKPIQAHTYIFYHTDKKKTKKKSLAP

SEQ ID NO: 236726 - protein, 134 aa, Zea mays
  unsure (1)..(134): unsure at all Xaa locations
  Clone ID: MRT4577_147480C.1.pep
GSQNKRARLTPQSVLTNHMSYSQQQQFIPFNHQFALNXTFYLQQKKQLFNQLSSVYPKKFLPFNQLSALNSPAYLQQQQLLPFRQLAGVSPVTLLTQPQXRRYYQXLTPNXGTLLQMQQXLPFNQLARAQQNDL

SEQ ID NO: 236727 - protein, 88 aa, Zea mays
  Clone ID: MRT4577_147481C.1.pep
GRGRRGQANEGEGVGRRTFNSAMALFGLRWWHGGASHDREDHAQGLFMGSMARGMVNSSPEVGHRCEPIVHRGQHTARHNHRGEVTSI

SEQ ID NO: 236728 - protein, 41 aa, Zea mays
  Clone ID: MRT4577_147482C.1.pep
LSTYICKKKKKKKKKKKKKKKKKKKKKKKKKKKKKGAARFK

SEQ ID NO: 236729 - protein, 40 aa, Zea mays
  Clone ID: MRT4577_147483C.1.pep
NTKHTFLFQSPKRILTTGGSDKTKADTNQTLSPTREPSTL

SEQ ID NO: 236730 - protein, 65 aa, Zea mays
  unsure (1)..(65): unsure at all Xaa locations
  Clone ID: MRT4577_147485C.1.pep
FQTTNLXWICHXXGEHPQGTLPVHYPTNTYTNIFILFQPSIWSRPPIQLIAHFTSFNLPITLLTT

SEQ ID NO: 236731 - protein, 120 aa, Zea mays
  unsure (1)..(120): unsure at all Xaa locations
  Clone ID: MRT4577_147486C.1.pep
MSRXLEEEEXEKEDPLTSLSLSLPGTDQRFHHDRAHSQFQELPASPPSPSPPPPPVLSAYPFSPVFMEAMQELIRTEVQRYMASVGVRAGCGAAGGADLCMPQLVDGVMRAAAERVGRMQ

SEQ ID NO: 236732 - protein, 70 aa, Zea mays
  Clone ID: MRT4577_147487C.1.pep
KSPSVKLTPVMQYSFFFSAFDLCAYGMEIFQTPGIQISLSFLGIMLAFFIGPECGTPLCIHVMLRGMLAL

SEQ ID NO: 236733 - protein, 80 aa, Zea mays
  Clone ID: MRT4577_147488C.1.pep
DDYFPIRTRSSTLCCRTIAIIFMSLLVLRHTLPLVIGDNGEYSLALFSLLVLRTAGILFPILVMVRALASFHHRRRQQII

SEQ ID NO: 236734 - protein, 72 aa, Zea mays
  Clone ID: MRT4577_147489C.1.pep
MSHKHLFHTVILKQRSVSREPFLTRQGKTSLKPKHRISIRCTAAPSRFTSATCCRAGLLPRHADYSDIVKSS

SEQ ID NO: 236735 - protein, 89 aa, Zea mays
  unsure (1)..(89): unsure at all Xaa locations
  Clone ID: MRT4577_14748C.1.pep
PLQPPTPRXHSSPPFPYHAHPSYPSPNSHYHSTSELTHINTNTHRYSHSEHSLTYFLYSTNLNHSFFPPSLIFHLANKLCSSTLLFTLL

SEQ ID NO: 236736 - protein, 43 aa, Zea mays
  Clone ID: MRT4577_147490C.1.pep
TGSGGTQVHGPSSHVVAHQLGAGLGALQVMGATMGMAGGGLMT

SEQ ID NO: 236737 - protein, 269 aa, Zea mays
  Clone ID: MRT4577_147491C.1.pep
MRKRERENPCGICGHYHKYEEGEVCGVCGHRWKPSDGEGAPSRHESAFPTEVLKDFLFLGSYDNASRSEVLRTLSISHILNTVPDCHNLYKNSFTYHSLQRDRPLDFDEANQYLEKCERDKSRVLVHCMTGKNRSAAIVAAFLMKSRGWRLAQSFQWVKDRRPQVQLTDASQKELLEYELKLFGPSTQTLVPTESFASLGFGYTKPAGDMQTPVFNQTTMPSIFERFNPNDRPANFTFGVERKAEANPRDNNSDGRVNPTSTENLMDSS

SEQ ID NO: 236738 - protein, 94 aa, Zea mays
  Clone ID: MRT4577_147492C.1.pep
LKWSVLPSPRGCKRSSQLNVVKGNIYKDILGVHACGRKGWIILDRPPFFFFFFFFFFFFFFCEPQTSISHSHSKAKIGFQRTISHATRQNLPET

SEQ ID NO: 236739 - protein, 83 aa, Zea mays
  Clone ID: MRT4577_147493C.1.pep
RPHDQGPTNSASWRALTSLSPGARPGVSLAHCSANTQEDHSCRVPEGARAQSAGSNRAIRGRGYGDLALREEREDGRDHRGRQ

SEQ ID NO: 236740 - protein, 80 aa, Zea mays
  Clone ID: MRT4577_147494C.1.pep
HPLIITNIYLSPQNTPLGVGALYHHAATQISILHYYSITIIDTFLFILTLYFFSFHLNYHPYLSYLLHFLSNYSNTFNFT

SEQ ID NO: 236741 - protein, 85 aa, Zea mays
  Clone ID: MRT4577_147495C.1.pep
VVLKCSSRPPHGRSPSVLSRQRLGRLPARCVSCRVGVRVAAQDDGWVPLHGRPAGLVAMPIVPMHATGPLNARSAQSEQLRLWGQ

SEQ ID NO: 236742 - protein, 110 aa, Zea mays
  unsure (1)..(110): unsure at all Xaa locations
  Clone ID: MRT4577_147496C.1.pep
KGSTTCFQSYARQVDNCECFIVLNDLNISPYCITLAFYDNDNVYSQTFDADLISCDTCMTXSATKDALHLRIRVHPFHVLRINKMLSCAGADXLHTGMMGAFGKPYGTCS

SEQ ID NO: 236743 - protein, 505 aa, Zea mays
  Clone ID: MRT4577_147497C.1.pep
MATLVRHDSRQYSWWWVSHISPKNSKWLQENLSDMDTKVKAMIKLINEDADSFARRAEMYYKKRPELMKFVEEFYRAYRALAERYDQATGALRQAHRTISEAFPNQMPSMSDESPSSFSQEMEPHTPDMSTFTRAAFDSDDLQKDGVGMSPQRFTSKRNGTHPEETSALSSRKGLKLFNDLSSSSENAPRAGFDGKVRKGLTFESPEVKGKDGISNEMANLQQEVARLLSESQNLKQQMLSESERANKAENEMQMLKATVLQLSADKDTSLTQYNHSSERISTLESELLKAQADLKKLTDEMAADVQKLINAETLNIAILSEAEGLDQKMKMQQQELEQKLKELESFRSSFQEEHEKRMQAESALLSQGKELAQSHEEVQRLTIEIKMANEKLNELKQTKEDLHDTVCELKRDVERLTEQNQSSEVLIRELGDEINTLKDSKNELQSEIKSLKSTISQLNTEKNAAALQHQQSVEQVSVIESQLSKLQSELDETEQKVQLLTQDL

SEQ ID NO: 236744 - protein, 130 aa, Zea mays
  unsure (1)..(130): unsure at all Xaa locations
  Clone ID: MRT4577_147498C.1.pep
MGSLRGAAASSGAPRAGDLVTTQVSLGGFDAPVKGLDLADFLKLKAGSVWRSPLKPSWTPPDAYPDFFFPPVTSAAGPPPQXDGGPPHALVPFGGPEGGRPAPFRSGVVTGPLTPVRVGRWGKGHQLFGV

SEQ ID NO: 236745 - protein, 33 aa, Zea mays
  Clone ID: MRT4577_147499C.1.pep
MATLVRHDSRQYSWWWVSHISPKNSKWLQENLS

SEQ ID NO: 236746 - protein, 80 aa, Zea mays
  Clone ID: MRT4577_14749C.1.pep
DREGTRRCQRRSSSSCVTAEVASRLGLLRMDHAFLGVSTDGNPSLRHKSRCNAAMRLSELLTDDGGVDVPRQTQAWRSRA

SEQ ID NO: 236747 - protein, 55 aa, Zea mays
  Clone ID: MRT4577_1474C.1.pep
AACIVCERNTCVQYSTALTCVNRHFTHIYARPGTSMGATTPRLCNVYRNTTTGLW

SEQ ID NO: 236748 - protein, 51 aa, Zea mays
  Clone ID: MRT4577_147500C.1.pep
LANSQVTMAMQTLHCALCTVTCTILVLHNNLVCLIYNNTICSNGCLAHIRQ

SEQ ID NO: 236749 - protein, 177 aa, Zea mays
  Clone ID: MRT4577_147501C.1.pep
MSSSTVSVSAATPTQHHPFQRKVDDVKPSKTDINFVIMDYLVSEGYPRAAEKFAKEANIQLPLEEESIQSRVEIRRAIHAGDIDTAITKINDLNPQILDTDPALHFDLLRLQLIELIRVCTSSASSDITPALSFASSQLAPRAATNPDFLRDLELTMSLLIFLPAAPGTLQRELSEL

SEQ ID NO: 236750 - protein, 136 aa, Zea mays
  Clone ID: MRT4577_147502C.1.pep
MATLVRHDSRQYSWWISHISPKNSKWLQENVSDMDSKVKAMIKLINEDADSFAKRAEMYYKKRPELMNLVEEFYRAYRALAERYDQSTGALRQAHRTISEAFPNQMPSMSDESPSAFSQEMEPHTPDTSTLTPVGI

SEQ ID NO: 236751 - protein, 384 aa, Zea mays
  Clone ID: MRT4577_147503C.1.pep
MDAFLHRLKRLDAYPKVNEDFYKRTLSGGIVTLVAAVVMLLLFISETRSYFYSSTETKLVVDTSRGERLRVNFDITFPSIPCTLLSVDTTDISGEQHHDIRHDIEKRRLDSHGNVIEARKGGIGGAKVERPLQKHGGRLDKGEQYCGTCYGAEESDEQCCNSCEEVREAYKKKGWALTNPDLIDQCAREDFIDRVKTQQDEGCNVLGFLDVSKVAGNFHFAPGKGFYESNIDVPELSLLEGGFNISHKINKLSFGTEFPGVVNPLDGAQWTQPASDGTYQYFIKVVPTIYTDIRGRGIHSNQFSVTEHFRDGNVRPKSQPGVFFFYDFSPIKVIFTEENRSLLHYLTNLCAIVGGVFTVSGIIDSFIYHGQKALKKKMELGKYR

SEQ ID NO: 236752 - protein, 116 aa, Zea mays
  Clone ID: MRT4577_147504C.1.pep
QHLASMHLVSAAQYSWSIIYKVKPRNIRDLVQQHQIPSNVTPITPFVARRKGKMRRMKTPFAAEGACGGAAVSGFAPAAIASGWYGKIEDDRADVWERGGKTTASLSLLTPFRSKD

SEQ ID NO: 236753 - protein, 317 aa, Zea mays
  unsure (1)..(317): unsure at all Xaa locations
  Clone ID: MRT4577_147505C.1.pep
CNFYFNILYPCYALLLNFELLQPTWKAQSDEQCCNSCEEVREAYKKKGWALTNPDLIDQCAREDFVERVKTQQDEGCNVHGFLDVSKVAGNFHFAPGKGFYESNIDVPELSLLEGGFNITHKMNKLSFGTEFPGVVNPLDXTIYVSLSEHKIALIVFQALLLTXYVFSYSKTHSAQWTQPASDGTYQYFIKVQSFFVHECFSSMVXLHKELTEFSVQVVPTIYTDIRGHNIHSNQFSVTEHFRDGNVRPKPQPGVFFFYDFSPIKVIFTEESRSLLHYLTNLCAIVGGVFTVSGIIDSFIYHGQKALKKKMELGKYR

SEQ ID NO: 236754 - protein, 85 aa, Zea mays
  unsure (1)..(85): unsure at all Xaa locations
  Clone ID: MRT4577_147506C.1.pep
CXIDLVKRGGKFSNXRKGPRQGRTGVYTLHRACCFRAAWGVFGPNDNNCYFSQRTGGFCHKHLILGPLNEKGNQGLHPGFLRTPL

SEQ ID NO: 236755 - protein, 349 aa, Zea mays
  Clone ID: MRT4577_147507C.1.pep
MLSEPTVATSADMNWCCVPRAKREENPYSNSIGGIYSEKNIRLFSYAELRSATDNFNRTNKVGRGGFGTVYKGTIRSGREVAVKVLSAESRQGIREFLTEIDVISNVKHPNLVELIGCCVEGSNRILVYEYLKNSSLDRALLASNSEPADFTWSVRSAICLGVARGLAYLHEEIAAPIVHRDIKASNILLDRNYVPKIGDFGLAKLFPDNVTHISTRVAGTTGYLAPEYAWHGQLTKKADIYSFGVLVLEIVSGTSSSRSILMDDKILLEKAWELYEAKRLKELVDPALVDCPEEEAIRYIMVALFCLQAAAARRPTMPQVVTMLSKAGRRCPRSSPCCPSPSGSTRAS

SEQ ID NO: 236756 - protein, 34 aa, Zea mays
  Clone ID: MRT4577_147508C.1.pep
GAVLTKGQLYSTRQPKRLYAFITRNRSLAVNFLT

SEQ ID NO: 236757 - protein, 66 aa, Zea mays
  Clone ID: MRT4577_147509C.1.pep
VHCYKQIKRFTINRNKIYERLTKKTTIRPPKVIKREVLAYILMTFVWWADFMHIIYMHPEKSTERL

SEQ ID NO: 236758 - protein, 53 aa, Zea mays
  Clone ID: MRT4577_14750C.1.pep
NMWVIVFLKFKLLIRNCIQGITFGWYLFICLGLPPNKILPRYLSFKVCSHFCE

SEQ ID NO: 236759 - protein, 146 aa, Zea mays
  unsure (1)..(146): unsure at all Xaa locations
  Clone ID: MRT4577_147510C.1.pep
MLSEPTVATSADMNWCCVPRAKREENPYSNSIGGIYSEKNIRLFSYAELRSATDNFNRTNKVGRGGFGTVYKVPAKLDHIYYIDGPRVTWIISCLLAXGNIRSGREVAVKXLSAESQQGIRESLTEIDVISNVKHPNLVELIGCCV

SEQ ID NO: 236760 - protein, 98 aa, Zea mays
  Clone ID: MRT4577_147511C.1.pep
MNVKGGSRIPVPPPGASALVKVAVFGGAAVYAAMNSLYNVEGGHRAIVFNRIQGIKDKIVGGGRKMGEWRGDAGPWLPTGHVQGRLAAALEEGSVQGG

SEQ ID NO: 236761 - protein, 163 aa, Zea mays
  Clone ID: MRT4577_147512C.1.pep
APEYAWHGQLTKKADIYSFGVLVLEIVSGTSSSRSILMDDKILLERAWELYEAKRLKELVDPALVDCPDEEAIRYIMVALFCLQAAAARRPTMPQVVTMLSKPVRINESELTAPGYLQEYSRRSPLSKATTSTDSRFKNLASEEDSNMFSTVVPPTVTEMSPR

SEQ ID NO: 236762 - protein, 49 aa, Zea mays
  Clone ID: MRT4577_147513C.1.pep
KISLKTKTKLHASTETLYNLKISLPCSPLLVYYSFVHIYFPVLTFTVFG

SEQ ID NO: 236763 - protein, 63 aa, Zea mays
  Clone ID: MRT4577_147514C.1.pep
QLLQCWQLLQQVMRTLCRSSICGPYQVIGLAVINVQLECNTSQHLKALEVFHTKDKRYARAHS

SEQ ID NO: 236764 - protein, 33 aa, Zea mays
  Clone ID: MRT4577_147515C.1.pep
SWGRMILASLLYHPHTWKAYTILQNDILPKLLI

SEQ ID NO: 236765 - protein, 83 aa, Zea mays
  Clone ID: MRT4577_147516C.1.pep
VPNFRGHPSLPELKGVGLVAFGKTSVHSLKKPGALDLDPWTPWSIAVNSLKLTVLLGTSGVGKPFTKKVVEALVSLIERPLFF

SEQ ID NO: 236766 - protein, 48 aa, Zea mays
  Clone ID: MRT4577_147517C.1.pep
PPDAPLRDLDRRFSPAIRELNVRLFQDPRVEVCQLAIAEGVTICPRVV

SEQ ID NO: 236767 - protein, 76 aa, Zea mays
  Clone ID: MRT4577_147518C.1.pep
GRLDETSDSIFAKYHGLMCSLRISLALFVYFQDYIIQLRACSVSSKSMWIEWVWVGSNPKQVKIVLNFFQSRPIHS

SEQ ID NO: 236768 - protein, 80 aa, Zea mays
  Clone ID: MRT4577_147519C.1.pep
ERHLHPYKWGMRLLTQRVDIIYHRQGIGHLRLTCHLAATSATRLTPGNTSSPNTSGPCGLHKINCRRHHNSTLLPHSCLS

SEQ ID NO: 236769 - protein, 60 aa, Zea mays
  Clone ID: MRT4577_14751C.1.pep
LFDCSLTSLSVTLAAFLVFPLSSESFSMPATPGRRRVRTPPGGSPSHEPFEARRHRGGGP

SEQ ID NO: 236770 - protein, 79 aa, Zea mays
  Clone ID: MRT4577_147520C.1.pep
NDSVKTNHNLKTQISIKKIPFYTPTKAIEITVYRMCSYTPSAREHFYSGNRHLQQYVIFTSSGRVGRPGNSGPVPAGVP

SEQ ID NO: 236771 - protein, 45 aa, Zea mays
  Clone ID: MRT4577_147521C.1.pep
MRMMKGKKLWKATLMLEWWNEPHAGMIESYREKHGQKKLNALFGL

SEQ ID NO: 236772 - protein, 143 aa, Zea mays
  Clone ID: MRT4577_147522C.1.pep
RPPQVPAGSVRGAGRGLPPAVPRAWCWAPSSCWSRPSSSWRSLRVCPRAGSGSLACSFVAVVSAFLTALCCPVPPSSSGRLVLGSSWALLALCGALLSSLLWDFWSCPPRPGGLCFKLIFSLSVGGGASFSLFEPPPAFFFSL

SEQ ID NO: 236773 - protein, 47 aa, Zea mays
  Clone ID: MRT4577_147523C.1.pep
SYPVLEYFKERKEAPTSRALARLLYDFCGRTPYKYMSSGIPMRDPGD

SEQ ID NO: 236774 - protein, 140 aa, Zea mays
  Clone ID: MRT4577_147524C.1.pep
RSPSGSTTAFRRRRARWTARRPVGGATATPSEASGSGSWRRWRPRARCPAPAPPPRRGCPSRGARRGWRYRSSRAAGGAPPVCAAARCPAGPAAAVERRSAWRSSSRAATCAAGRWTGRTSSCTAGSAPSAAWSAGTTPS

SEQ ID NO: 236775 - protein, 94 aa, Zea mays
  Clone ID: MRT4577_147525C.1.pep
PHASAKEAGRLLVMDLIAAWGGQCRAMAQLLVDHPKKLIKVGFLKGDVAKGKEVTAAYKVGGMPTFNLVKNGRTVGTFGGARKDKFWAQIEKYA

SEQ ID NO: 236776 - protein, 95 aa, Zea mays
  Clone ID: MRT4577_147526C.1.pep
SVFLELLTGRKPVDHTLPRGQQSLVTWATPRLCEDKVRQCVDSRLGVEYPPKSVAKFAAVAALCVQYEADFRPNMSIVVKALQPLLNARASNNPG

SEQ ID NO: 236777 - protein, 357 aa, Zea mays
  Clone ID: MRT4577_147527C.1.pep
MSCLACCGGEDTQRTPDNGGPYPGGYPPRDDAYRTADPTPRGAQPLKMQPITVPTIPVEEIREVTVAFGDEALIGEGSFGRVYFGVLKNGRSAAIKKLDSSKQPEQEFLAQVSMVSRLKHGNVVELLGYCVDGNTRILAYEFATMGSLHDMLHGRKGVKGAQPGPVLSWTQRVKIAVGAAKGLEYLHEKAQPHIIHRDIKSSNVLLFDDDVSKIADFDLSNQAPDMAARLHSTRVLGTFGYHAPEYAMTGQLSSKSDVYSFGVVLLELLTGRKPVDHTLPRGQQSLVTWATPRLCEDKVRQCVDSRLGVEYPPKSVAKFAAVAALCVQYEADFRPNMSIVVKALQPLLNARASNNPG

SEQ ID NO: 236778 - protein, 132 aa, Zea mays
  Clone ID: MRT4577_147528C.1.pep
KLWGEKGGGPTKIGKKTWGPFWNFFKHSPNWGGKNTRKKVGKKYRFKPQTKRPPGKTPTKKRDFLVTFFFANHAKKRGRPGPPPKCFLGRPKKRKPQNFGLGRAQGGAPPLPRGVTPGPWAQTGYKLGGQIE

SEQ ID NO: 236779 - protein, 74 aa, Zea mays
  Clone ID: MRT4577_147529C.1.pep
PRATARAWALIVCQGMACSLKHACSAAEEASLLSMQSTGLASLSAVCTAMGLARSEEVVKSGGAGLAICICCLS

SEQ ID NO: 236780 - protein, 147 aa, Zea mays
  unsure (1)..(147): unsure at all Xaa locations
  Clone ID: MRT4577_14752C.1.pep
RAVAPVSQFFLCFPWLLGCWVXFPFFXXXXFARPRALXXXXXCFXFGFVXAFFCFAAWCXXLLVVWXAAPFLXFCFLWCCVXRFCXGXPXXAVSFLXSRXSCXXXXXFPRFASPPXXXPSXGLXLVSXXXXLPXXPLLXXXXCXXPG

SEQ ID NO: 236781 - protein, 85 aa, Zea mays
  unsure (1)..(85): unsure at all Xaa locations
  Clone ID: MRT4577_147530C.1.pep
MVSSTMALSSQPSRKAVNLPSSLFCEARVTXMPKTVANVKTEASSGSPWYGPDRVLYLGPLFGVLPSYLTVYVAGYYGWDTALLP

SEQ ID NO: 236782 - protein, 78 aa, Zea mays
  unsure (1)..(78): unsure at all Xaa locations
  Clone ID: MRT4577_147531C.1.pep
FLRSFKGVCFTYLSQTRSSRAHAVSTLPSSCSLTHGQGKFLAEVGFLWDLAARVSCNFLPCKSDWLIFLLECIXEACG

SEQ ID NO: 236783 - protein, 75 aa, Zea mays
  unsure (1)..(75): unsure at all Xaa locations
  Clone ID: MRT4577_147532C.1.pep
AXXKIQKKKKKKKKTRLFPFLYGSGESRGSRQEAIEADASFCCSLGFWGPGQQWLLANLNASLPKWGKNLLGGFF

SEQ ID NO: 236784 - protein, 73 aa, Zea mays
  Clone ID: MRT4577_147533C.1.pep
TANIAMHSSQSNLGKYLCANKCAIVNSCTANENCARRASNYDIPRARVDSLYVSAHACAVDWSAAAFVPPFLP

SEQ ID NO: 236785 - protein, 233 aa, Zea mays
  unsure (1)..(233): unsure at all Xaa locations
  Clone ID: MRT4577_147534C.1.pep
RGRPGRDSYSHPSIHPPKLLGRQAAARESKQGRGSCVAGRSVHGAQETSVGGGGGGAXPRLRGVRKRPWGRYAAEIRDPVRKARVWLGTFDTPEQAARAYDAAARKLRGPGAATNYPAPEPTAEALAEAPAASGSGSAVVYESSSASASASSCSLPLAAPSLDLSLALPAAAAAAEPYQLFADPAAAAAVTPALLHFLPPSEEQQSYSGSSLSSSSASVFDAAPPVGLRLDLN

SEQ ID NO: 236786 - protein, 35 aa, Zea mays
  Clone ID: MRT4577_147535C.1.pep
CSHHKWTRLHHGRPPKRKRAYPAIYSGPAHAGVPA

SEQ ID NO: 236787 - protein, 67 aa, Zea mays
  Clone ID: MRT4577_147536C.1.pep
QRTCDIYADHYTKTTKLFYGEGLKNGTEGNTDFKAGQGCTLATKVKVTTAGISVGARCCDSCCSWRT

SEQ ID NO: 236788 - protein, 76 aa, Zea mays
  Clone ID: MRT4577_147537C.1.pep
VSSFCPALSGVSVAHWYQVRMVLINVGCSLPSGHSHGYPHWVLDNPRLHGQRDGPIAMPVSPNVIIFCHYLHLKVG

SEQ ID NO: 236789 - protein, 117 aa, Zea mays
  Clone ID: MRT4577_147538C.1.pep
PSGPSWILLLFFSKPSTVRSWSLLFVVFLCLVFLSTSFFCLRCLCQKCGYLHSFFCLVSPLYIRGFRFLVFFYIFHPLGVFFWSFSDVPFQVPRPNKHMKNKKKNKKKKKKKKKKLL

SEQ ID NO: 236790 - protein, 408 aa, Zea mays
  Clone ID: MRT4577_147539C.1.pep
MTSQYSQPHHSLKRPFVQPLSLTCRAGSWEKMSCFGCFKPDKKVPPRRTESREVTVVNKAPSQNEAPPRESGSIRPPPVASKHKHRPSSETAASIEPPKGSCSVAKTAKAFTFRELATATKNFRSDCLLGEGGFGRVYKGRLENGQLVAVKQLDLNGYQGNREFLVEVLMLSLLHHPNLVNLVGYCADGDQRLLVYEYMALGSLADHLLDSTPDQVPLSWYLRMKIASGTAKGLEYLHEKANPPVIYRDLKSPNILLDEKYNPKLSDFGLAKLGPVEGKTHISTRVMGTYGYCAPEYIRTGQLTVKTDVPHFWDFLNEIITGRRAVDTSRPASEQILVNWVKPMLRDRKRYNELVDPHLRGEYPEKDLCQDVGGAALCLQEEASIRPYMSNSVVVVLFHARWPAGYKH

SEQ ID NO: 236791 - protein, 122 aa, Zea mays
  Clone ID: MRT4577_14753C.1.pep
PPLAPSHCSCSGAKKQSCSLRQGRQQRRRLRVARAVEVDAPSAGAPEPEEAEEPSVDFAFVSSRLLPDGTPDVHYRTARGGQKLRDIMLDGYIDLYGPYDKVAAWVDDGGSGTARGMTVERG

SEQ ID NO: 236792 - protein, 179 aa, Zea mays
  unsure (1)..(179): unsure at all Xaa locations
  Clone ID: MRT4577_147540C.1.pep
GCGLVKQLVLISADLMHDFKTAHLTLTSPRSMLAAQAVGAAMGCVVTPLTFLLFYRAFDVGNPDGYWKAPFALIYRNMALLGAQGFSALPTHCLPLSAGFFALAVLANVMNDVLPPRYARYVPLPTAMAVPFLVGASFAIDMVVGTVVVFAWHWIDXHETTLLVPAVASGLICGDGVWT

SEQ ID NO: 236793 - protein, 143 aa, Zea mays
  unsure (1)..(143): unsure at all Xaa locations
  Clone ID: MRT4577_147541C.1.pep
AKAFTFRELATATKNFRSDCLLGEGGFGRVYKGRLENGQVHTTQKKNIQTFYVYTSLLIHLQSLVADLFPVCXQLVAVKQLDLNGYQGNREFLVEVLMLSLLHHPNLVNLVGYCADGDQRLLVYEYMALGSLADHLLGKRTRG

SEQ ID NO: 236794 - protein, 60 aa, Zea mays
  Clone ID: MRT4577_147542C.1.pep
PHRGFKYLYSVFKDSVFKDDVNYRICLVHHWTGYQTCYLERFVIILLIDVFGMHIGYYVQ

SEQ ID NO: 236795 - protein, 91 aa, Zea mays
  Clone ID: MRT4577_147543C.1.pep
TKKPGSQGIFSCNLFFNTTLRARLLVHKVTLQNLDLRCPYARPLGHAFLQGTMQWGTQFKILGEPIDHVRKGLLTIVHCGGQLELVSHPPS

SEQ ID NO: 236796 - protein, 75 aa, Zea mays
  Clone ID: MRT4577_147544C.1.pep
TLYISANPFFIVKKKKKKKKKKKKKKKKKKKKKKKKKKKKKKKKKKKKKKKKKKRGGPFKGTKFNSRGMERKNFF

SEQ ID NO: 236797 - protein, 125 aa, Zea mays
  Clone ID: MRT4577_147545C.1.pep
KNKLASFDPRRLNATTRIEPTRRSHRGLRSRQRWTSSGTAAPLRTSSGAPSAPTPRRSTTLDLTNQRRQSHHGPDRVRDRRGSRQGVAETAAWLLPPVARGVADSPAACGGVLRATDMIKDAIFL

SEQ ID NO: 236798 - protein, 54 aa, Zea mays
  Clone ID: MRT4577_147546C.1.pep
PHINDGPTKILKKVKINSIDIHYKVHRPSIQTEGPLKPIVFPNKIHLAEIHIFN

SEQ ID NO: 236799 - protein, 85 aa, Zea mays
  Clone ID: MRT4577_147547C.1.pep
VVRLQEQVYSFSHKAFVDPDVVMVKVARDIGTSGGNIRCLTQAARPCPCLMLDPGDVSTERQRAYHGVVLCMLLPSLARSPRRSL

SEQ ID NO: 236800 - protein, 449 aa, Zea mays
  Clone ID: MRT4577_147548C.1.pep
MATTLRQRTAPATQSKKERRDSDVLSTSSDEDTSPVSHLENTFPPFEVPNFTTKEVLGAIPAECFERSAAISFAYVARDFAFVAALGYAASFIEPALGSNGHVLNGWAGFAAKWAAWAAYWTVQGWVMTGIWILGHECGHQAFSTSKTLNNTVGLFLHSFVLVPYHSWRISHAKHHAATGHLTRDEVFVPRTLSERKFKENPKKVEVAPGIVLDELLEDAPIYRLGWLIVQQLFGWPAYLFTNASGQLSYPAWTNHFDPKSLIFDARHRADVLITDAFLIGMLTLLTLFGQKVGGFGEVVKYYGIPYLAVNHWLVCITYLQHTDPSLPHYDATEWNFVRGALCTMDRNLLGPVGPYLMHGICETHVAHHLCSRIPHHNAYAATEALKKFLGPHYASTDESMFVSLWKSYKQCRYVDDEGSVRMYRDAYGRARRTVAPVEVPSDSGVDFE

SEQ ID NO: 236801 - protein, 115 aa, Zea mays
  unsure (1)..(115): unsure at all Xaa locations
  Clone ID: MRT4577_147549C.1.pep
MRELLVALARLALGVSVTSTHIKGGMCCSTPPPSHLPPSSDQPPPEXLPSTTYLPPAGQLTDGVHLXVESIVTALKSLVPPPPCHXPTQTPRAQDLPRPQPXPRQQSDPNPRQLR

SEQ ID NO: 236802 - protein, 53 aa, Zea mays
  Clone ID: MRT4577_14754C.1.pep
TWESAPIFFIHFYLVILEPKAIRTHTTLNLDSKRNILFLATKFFTLYYNSSQS

SEQ ID NO: 236803 - protein, 80 aa, Zea mays
  Clone ID: MRT4577_147550C.1.pep
PCSAYRVLVSLRVGGEFVARSLSRAHYLHGGRGPGVNHSKVFTPKKIRTLGSYRCYDPASCILYVRWTPGKTWGVWYFRL

SEQ ID NO: 236804 - protein, 169 aa, Zea mays
  Clone ID: MRT4577_147551C.1.pep
RQGPFRVLVFSLLSAADTYALDIADDALFATCVRYSGPDQQLGAPPGAVPPAEPMFPGADARWAALIRGGSHYWPAHTKSRNARTTNTPDYPYLRSQEARGIATTTSCGPAHLPGLRPSTPSLRRCISSTRDLPPSSSTSTWAEARLPRAGCPPSAVRPTHSLTRRATT

SEQ ID NO: 236805 - protein, 111 aa, Zea mays
  Clone ID: MRT4577_147552C.1.pep
VDFFFFFFEALGAFFFFFFANKKNKTLSDRWYHNIHMMITERRERSRCNNHSTSSTKRQDSPKHPHNAAPRRCLLLLLLLLSLAMASRAALLFSTQLASRSNSRSRFVAHC

SEQ ID NO: 236806 - protein, 61 aa, Zea mays
  unsure (1)..(61): unsure at all Xaa locations
  Clone ID: MRT4577_147553C.1.pep
IGLKPGNENRPKLGAGVATAAALGPGVXGYQKHRKQKEAHYENSQQEPRVPHGQGHGHGYS

SEQ ID NO: 236807 - protein, 42 aa, Zea mays
  Clone ID: MRT4577_147554C.1.pep
QHPQIDSQLMAQAPTKYPQLSQTILFYNTTKLHKILLLHSPT

SEQ ID NO: 236808 - protein, 110 aa, Zea mays
  unsure (1)..(110): unsure at all Xaa locations
  Clone ID: MRT4577_147555C.1.pep
HLLLQLLCHNSFADTDALRVTGAIKHMVVEGFMIGTVICVLGAPRASCRTVYARYFLSVVCPPTASIVVRSLCAGPDTAASSGAAPPRPTXPVAPVGARLNRVNFGVYDP

SEQ ID NO: 236809 - protein, 49 aa, Zea mays
  Clone ID: MRT4577_147556C.1.pep
LGGARCREPAHSTVAWSKLLAPLSIPADAAPDVPGKKKPSASPPQSRRH

SEQ ID NO: 236810 - protein, 116 aa, Zea mays
  Clone ID: MRT4577_147557C.1.pep
HTHFTVEIRLLSSFSTKLAFSGRPFDDLKQLAPRALPVVPFSVPERIWSLAFALLHSVILKYRHRLQRSRAIIGDLGPVAARRPWRGSWRDGRWRGRARAWSPPPGEGLSITLGKS

SEQ ID NO: 236811 - protein, 71 aa, Zea mays
  Clone ID: MRT4577_147558C.1.pep
WVGFFFFGGFFFFFFFFFFFFFFFKKTGGKNKNWYRKGGGFHPKRGGKTQTLKGGTPPWGLKKKNPGGPRN

SEQ ID NO: 236812 - protein, 92 aa, Zea mays
  Clone ID: MRT4577_147559C.1.pep
ATGFKISKTQSVLQQIMVKDPRPKCSIAVSTFQLPLDKQVLFFWDTYYEMDILSLSLSLSLSLFTIQFGADAVYKYSHIRAKKKKKKKKKRR

SEQ ID NO: 236813 - protein, 186 aa, Zea mays
  unsure (1)..(186): unsure at all Xaa locations
  Clone ID: MRT4577_14755C.1.pep
MRAAAAQIDPSPSPSPAALAKSRLKRLFERQVLRVSPAERLPPVSAGGEKDKEKDDLEPSSVCLDGMVRSFLEDGGGTVGERAPTARCCNCFNGGDASDDEDGPAAAEASAISDAAETIKGLVHCASLRERTFLADVXHARGAXXXXAXGAQSATSSXLLGGSLRAMXHDAALWLSRWXDKSSSHP

SEQ ID NO: 236814 - protein, 106 aa, Zea mays
  unsure (1)..(106): unsure at all Xaa locations
  Clone ID: MRT4577_147560C.1.pep
PPRDTQGDPRVRLYKKRKKKNRTNXFXREPEXFEKGERRQSPWSSQAPRSGDTRCRRRPRWPLWFLGGGYQPGWPASGAEGSRRKGTSYTTKRPRERKRWKPWLRT

SEQ ID NO: 236815 - protein, 62 aa, Zea mays
  Clone ID: MRT4577_147561C.1.pep
VSLIMPLYGFHMLWSVRDLHRAYVFCWRALIIGVYEACVRLSWSWRNALKQLKQLQPAVIFR

SEQ ID NO: 236816 - protein, 64 aa, Zea mays
  Clone ID: MRT4577_147562C.1.pep
PPPHPWISCHNKKAAPLVPRFINRPVRAVHAAPFPVFPALKKVRPAATFPLLLPHPQGGPAFHL

SEQ ID NO: 236817 - protein, 135 aa, Zea mays
  Clone ID: MRT4577_147563C.1.pep
MEDVGKLSVDQTSSLVLLDYEDEGSRQYLVEKGQTEYRDMNSNEEHTPTGIQPNEYSDVEHHQQKGQTETTSQEIEMEDYPIQQENPLFLQLRASLFPSNWSSTFRGRHSLFRPRRRAPVKASPLHVAMAAIMKR

SEQ ID NO: 236818 - protein, 109 aa, Zea mays
  Clone ID: MRT4577_147565C.1.pep
MGVVSAAADAIVAVFSLTIVVAAPLLDAQSVLPHTLYPAPLLELKRWYAAEFGDYLVAQSPGFFRGLVCLELAFQWPLAVATLYGILTRRRWAATTSLMAGVGTLTSMQ

SEQ ID NO: 236819 - protein, 93 aa, Zea mays
  unsure (1)..(93): unsure at all Xaa locations
  Clone ID: MRT4577_147566C.1.pep
QAARSAASYMLFDPKDSVMQQNLVYYRFHRARWGLEEEDFQPREEAMLXHNQTAELRELLEFTHMYLQSDDEMELEETEPPLEPEDALSDAEF

SEQ ID NO: 236820 - protein, 166 aa, Zea mays
  Clone ID: MRT4577_147567C.1.pep
MGVVSAAADAIVAVFSLTIVVAAPLLDAQSVLPHTLYPAPLLELKRWYAAEFGDYLVAQSPGFFRGLVCLELAFQWPLAVATLYGILTRRRWAATTSLMAGVGTLTSMSAILGEMLGSGKSTPKLLQMYVPYAVFAVIAILRGLCSCSGRTTAGSSLGPSARKKRV

SEQ ID NO: 236821 - protein, 83 aa, Zea mays
  Clone ID: MRT4577_147569C.1.pep
FGPWEIILVTIYRILVPEYGQTYLSREQGIADFKLKLSSFDTQFSCLAVILIYLSAMILLHTKSFFYEMLPKHISHVQYATVN

SEQ ID NO: 236822 - protein, 49 aa, Zea mays
  unsure (1)..(49): unsure at all Xaa locations
  Clone ID: MRT4577_14756C.1.pep
QEGQFGHVATGHVDQYGNSVSCVXHGTCGLRHCTGTTAGICHLSEHGGS

SEQ ID NO: 236823 - protein, 80 aa, Zea mays
  Clone ID: MRT4577_147570C.1.pep
PWLENVPASRVFQQRLMLQAHVGSGVSSVHALKVSVSKHVRQLGVVLPVRIRGLEQAPVSIGPVILSAAEHPQWSSVAAS

SEQ ID NO: 236824 - protein, 104 aa, Zea mays
  Clone ID: MRT4577_147571C.1.pep
CKCAPKKLEQDQCDCRKIVLKSLFCRASDLGLLQPLSDGRSIQRLSLYADDVVLFLKPSDGDLQLSRAILSKFGEASGLHTNQYARHGCLDDLIIITSFLLNQN

SEQ ID NO: 236825 - protein, 79 aa, Zea mays
  Clone ID: MRT4577_147572C.1.pep
AMIFCELTLEIYKSSKEKKRWLRRSFIRKSTSLFRWGLLVSFRKKRLMFSLVYCFNLFLVRLLLCNNDICEIYLYTHCD

SEQ ID NO: 236826 - protein, 130 aa, Zea mays
  unsure (1)..(130): unsure at all Xaa locations
  Clone ID: MRT4577_147573C.1.pep
THSYADKVKRTSSFPTPTATKILSLVALIAVLESSSNAFIIPQCSLAPSAIITQFLLSVTSMGFXFSRVSLLXLHLALSESALQQPIAQLQQQSLAHLTLQTIATQQHQHQQFLPLLSHLPVVNHVTYLQ

SEQ ID NO: 236827 - protein, 134 aa, Zea mays
  Clone ID: MRT4577_147574C.1.pep
AHSSVFLGPEVKQVSPFFARQGWFPSLCGDCHFKRLSRGGFWFWHPGQWEGDDPGQVWRPAGASSVWLSRAQGWRMARGLVELSLPKAGFFHLLLCHQEVSISPPVLAPCESGSFGALSIWWLEKDLRFALVLI

SEQ ID NO: 236828 - protein, 54 aa, Zea mays
  Clone ID: MRT4577_147575C.1.pep
PCRLMKCMCGPPRRPSRAMTEIGIGWGIARMTTSQALRTASITIGPVQDMDRLV

SEQ ID NO: 236829 - protein, 75 aa, Zea mays
  Clone ID: MRT4577_147576C.1.pep
ATLKVVLHITPPMAYNHPRVQALSHVEHIFRPLLPFAWTNEIPFRVNQYMEEVPPVINSNVFRNGDFALNPPLRK

SEQ ID NO: 236830 - protein, 72 aa, Zea mays
  Clone ID: MRT4577_147577C.1.pep
NSARGLFFFFVSVVGKPIYGLLTALTNLGLHNRVISTKTLSIEQVHSFFMTRTPDHEPRAYPNRALYYHNEL

SEQ ID NO: 236831 - protein, 136 aa, Zea mays
  Clone ID: MRT4577_147578C.1.pep
GLFPAKNLYPPFLDFWSFLPPNPHGGLGGNSKHPPPPPKGAPPPQVEGPNPSCFAPPLLTQRGPAFQNAGSPPPSWRRKPKTLLVLGSTEKTGPGGFLSLGNFFWGGGPFSTPAWDFKTGAFWGGKTAVFFPPLVY

SEQ ID NO: 236832 - protein, 103 aa, Zea mays
  unsure (1)..(103): unsure at all Xaa locations
  Clone ID: MRT4577_147579C.1.pep
CFRFLPPFFTGNXGRXAPKAMRIKEELLDSIAPVDRDSEVTPEDKERVQQIVHDLEAVNQVKEPIKVDLLNGKWELVYTXSSSVLQAQRPKYLEPFGKIYQLI

SEQ ID NO: 236833 - protein, 503 aa, Zea mays
  Clone ID: MRT4577_14757C.1.pep
MKSCGGGGADGQQCPCDYCGEAAAALHCRADAARLCVACDRHVHAANALSRKHVRAPLCAGCAARPAAARVSPTPSPGGADPAFLCADCCEGCAAASAARVSVEGFSGCPSAAELAASWGLDLRRAAVAVGDDGDGGDDDDPFLSVLDYSVLGVGVADTDLRDLYVPCDPPRVPVPDAGARPLRGEALCDQLAEMARRDEADTSHAHPHSDLSPRTPRRTSAASSGRLPSGKMAPPAALPVPAHPPPAAPQEVPLPYTSLLMMASANCSDLIGGGDRVGDTDEQLLWDCAAPSVPPTQIWDFNLGRSRHHDEKSALEVGYGSNHGGFMIKSYSDMLKDISSGTTKDLEDIYDSRYCSTAEDIMSSNICQLSSKNVSTGSNKRKVRSCAASTMDGPTTSGNHNHVPASASGPGAALTREISFGDQTVSAPAAETERPAAVRIDSETLAQNRDSAMQRYREKKKNRRYEKHIRYESRKLRADTRKRVKGRFVKSTEALNAARYNG

SEQ ID NO: 236834 - protein, 145 aa, Zea mays
  unsure (1)..(145): unsure at all Xaa locations
  Clone ID: MRT4577_147580C.1.pep
ASEHDVGVRSGGGGGRPXGRTPTWKERENNKRRERRRRAIAAKIFTGLRALGNYKLPKHCDNNEVLKALCREAGWVVEDDGTTYRKGCKPPPGMMSPCSSSQLLSAPSSSFPSPVPSYHASPASSSFPSPTRLDHGSGSNSYTCS

SEQ ID NO: 236835 - protein, 79 aa, Zea mays
  Clone ID: MRT4577_147581C.1.pep
AVVLPEPQFPRKVKRFARGPAPQVLATTERCLRHVRWGTERTCIDEATKAGDIPRRHGFASAIWSEASEVHVRGSIRHG

SEQ ID NO: 236836 - protein, 89 aa, Zea mays
  Clone ID: MRT4577_147582C.1.pep
GSQVPHRALVPSNAPFFFPKRGGRFAGGGFFIKLCPPPLFILGPHVGAPFLWYPLVCQMFCQPPWAFLVGLGPVKAKSYIKGLAGPPFF

SEQ ID NO: 236837 - protein, 61 aa, Zea mays
  unsure (1)..(61): unsure at all Xaa locations
  Clone ID: MRT4577_147583C.1.pep
TQISACIVSCNSGFTIRLSSVLFVINLSVLGSLLMVDSEPVFRLPRFLISXXCIQFKIVNI

SEQ ID NO: 236838 - protein, 239 aa, Zea mays
  Clone ID: MRT4577_147584C.1.pep
QPLFEAFCTGARASLAALLAELAASHRRVVVLYDRMAAFAAAEAARLPNAEALGVHCLAASYNVGWADPGHALLRRHGLVFHPPDACATPEFVALARRMGQERRRAPGAGMVVNTCRALEGDFLDALRGIPSSDGPRLFAVGPLSPVLPLPGASGTRHECLGWLDAQPPSSVLYVSFGTTSSLRPEQVRELAAALRDSGARFVWALRDADRAGMRGGEGDTTTEALHAAASELGPDGAG

SEQ ID NO: 236839 - protein, 110 aa, Zea mays
  unsure (1)..(110): unsure at all Xaa locations
  Clone ID: MRT4577_147585C.1.pep
MVSPITTAYDEGLLPSLCVANFKNYQQCVSHIEAAWDLAYSIGSYVFSSGSDPKSQLFDGHNESGATIYARENLLNNVLHAIRTCVXMEEWLVVLPRALVAAFIKTDKDF

SEQ ID NO: 236840 - protein, 48 aa, Zea mays
  Clone ID: MRT4577_147586C.1.pep
RALLIRLQAFLLIIVPTFSLFYSYAQYQPLILVLIYFREIYFIQKGIH

SEQ ID NO: 236841 - protein, 97 aa, Zea mays
  Clone ID: MRT4577_147587C.1.pep
THCQVPNAFLRPFPLIYLQEENQFIFSFTKTCFSSYALNSQPRVVIRSMEGIAPWPRTNQMRIQYFGSNKNTPTTTMVVITLQRTPHVKIVMFQCIQ

SEQ ID NO: 236842 - protein, 133 aa, Zea mays
  Clone ID: MRT4577_147588C.1.pep
GKGGFFAVVFIFFFFKEEKMPFVFFTVLYTYGTTRCFSTGKKNNEGPQHILSNSCNKKQKNGRIAHLWNPSGARTGKKIKNTPTEGGASGNSNPRVSNFKKKCGHPNYFHNTPRGTRPELKHPIHQESPEEKT

SEQ ID NO: 236843 - protein, 61 aa, Zea mays
  Clone ID: MRT4577_147589C.1.pep
RYTDSHASLVSVLLHVRPETKPRVPFVICCPPPAPRPPPTGRRAPSSAGPGTAATGSAGRR

SEQ ID NO: 236844 - protein, 88 aa, Zea mays
  Clone ID: MRT4577_14758C.1.pep
RSYSTSMPLTNFYCYILPPLRLFYLTSASTKLNYMATNKKTEVVYVSVTTLQIGCEMPADIFLKWKAQPPPACLIVCCCSSDNFLARI

SEQ ID NO: 236845 - protein, 86 aa, Zea mays
  Clone ID: MRT4577_147590C.1.pep
TLSQTLNHFKLFKIIHSKIINYLLTFLSFTLLNIIPSPPITLHILTTILCLIPTLTFFSPQHSFLIISFILFATISIIQPLMTTLF

SEQ ID NO: 236846 - protein, 138 aa, Zea mays
  unsure (1)..(138): unsure at all Xaa locations
  Clone ID: MRT4577_147591C.1.pep
MSRLAPVVIDNGTGFTKMGFAGNNDPSFIQPTVIATREGGSGASGGPSVPSKPSFLNSSASSNIASKRGIEDLDFYIGDEAVANSKTYALNYPIRHGQIDNWDHMERYWEQSIFKYLRCETEDHSFLLTEPXTQPPEN

SEQ ID NO: 236847 - protein, 71 aa, Zea mays
  Clone ID: MRT4577_147592C.1.pep
KRVLKKNWMLPLGTPPKVLFGFFKVKSLHPVECGQLKIKRFVCFYVKTSRKSPGVAKLDRKLVATYEPCFI

SEQ ID NO: 236848 - protein, 46 aa, Zea mays
  Clone ID: MRT4577_147593C.1.pep
EALKDNVYIGYVQNFFRHLYLSTAFFTKYLSLTCHHHPLNLTCDSF

SEQ ID NO: 236849 - protein, 41 aa, Zea mays
  Clone ID: MRT4577_147594C.1.pep
METKIFSLLMLLALSTCVANATIFPQCSQAPMAPFFPQSLQ

SEQ ID NO: 236850 - protein, 55 aa, Zea mays
  Clone ID: MRT4577_147595C.1.pep
APFQSGNGVTSFFVYQSVSAMRLVVSQSELPQRCLLLLFHDCRRPCQSVRADSVL

SEQ ID NO: 236851 - protein, 126 aa, Zea mays
  unsure (1)..(126): unsure at all Xaa locations
  Clone ID: MRT4577_147596C.1.pep
PPTPHATGVFCVVQMGSTIDQLGGGGSCAVLLLXSHPTGLSSATVNIYASLRSLATEGQLSQTTCNDSIERIKRIXDVQDLKDTDLAIEDLVKKEHGSKNLFEKLDNATNPWGMLACNNICKGATR

SEQ ID NO: 236852 - protein, 108 aa, Zea mays
  Clone ID: MRT4577_147597C.1.pep
RVAQRSLAVASACLGGSVGSAHRLLRGVALTACVTGAPLTYFPPLSHDRFIGNVLRLLQLLLTSGWGLHYASLCLFWGLLLVRWLLLCAVWLIVPHCSGDMLSHRALS

SEQ ID NO: 236853 - protein, 198 aa, Zea mays
  Clone ID: MRT4577_147598C.1.pep
KKLIASTAITVHYLDLSLNPSGEVTKQIGDALPVSCTISASRNATVVWMKDNIRLRSSPSFSSLQYQDAGNYVCETALQEVEGLKKRESLTLIVEGKPQIKMTKKTDPSGLSKTIICHVEGFPKPAIQWTITGSGSVINQTEESPYINGRYYSKIIISPEENVTLTCTAENQLERTVNSLNVSANENREKVNDQAKLI

SEQ ID NO: 236854 - protein, 93 aa, Zea mays
  Clone ID: MRT4577_147599C.1.pep
WQAVMQTTPHPFDQAKSKLQPPSEWPPVIPRSCGPSVVINNSIYRLAHPQINNQSSCISLKHYVFLWRGSISIWPMEPMCVQITMILLSCICM

SEQ ID NO: 236855 - protein, 68 aa, Zea mays
  Clone ID: MRT4577_14759C.1.pep
LHSSIHLYHQSPPRLGTSTNLQPMLASNILSYHHPIIIPCSHRNNTELHDFLLPHPHDTQFSHVLQCP

SEQ ID NO: 236856 - protein, 498 aa, Zea mays
  Clone ID: MRT4577_1475C.1.pep
MRPPPQGPRTTMSMGSPVQLRRLKPLYQLVVNNILAIVAVPLAAAVLLKASSLGPEEILARARALRPAHMFLAAFLPAAATVLYLMLRPRAVYLVDYACFRTSPNCRVPFATFLEHSRVWPGFDERSVRFMTRLLERSGLGEETCLPYAQHYIPPSRDLESSRAEAELVIFSAIDDLLAKTGVSPRDIDILVVNCSLFAPTPSFADMVAHRYRLRGDVRNVHLAGMGCSAGLVSVELARNLLQVAPRGARALVVSTETITPNYYMGEERAMLLPNCLFRMGGAAALLSTDGAGARFRLARVVRTLRGASDGAYRCVYQEEDERGNVGINLSKDLMSIAGDALKANITAMGPLVLPASEQLLFALSFIARKVLNNRIRPYIPDFRTAFEHFCIHAGGRAVIDELQRSLTLSDEQVEASRMTLHRFGNTSSSSLWYELAYVEAKGRMRRGDRVWMIGFGSGFKCNSAAWECIRPAANADDGPWANCIHRYPVHIPDVLKH

SEQ ID NO: 236857 - protein, 233 aa, Zea mays
  Clone ID: MRT4577_147600C.1.pep
FGSSFPPLFLTKAAVLTLVLVQDTIKAPPPSESKVMQKATRLSVATTTIFYMLCGCMGYAAFGDKAPDNLLTGFGFFEPFWLIDIANVAIVVHLVGAYQVFCQPIFAFVERRAAAAWPDSAFVSQELRVGPFAVSVFRLTWRSSFVCVTTVVAMLLPFFGNVVGFLGAVSFWPLTVYFPVEMYIKQRRVPRGSTKWICLQTLSVSCLLVSVAAAAGSIADVIAALKVYKPFSG

SEQ ID NO: 236858 - protein, 82 aa, Zea mays
  Clone ID: MRT4577_147601C.1.pep
TCGRGIEREDQRVGRPGIRTSLPGSSAPFWAAARRTAAAPSPAGPGTAPGSNLVMKSTLSGPDQPSGSIRFFTRIGLNRRGG

SEQ ID NO: 236859 - protein, 409 aa, Zea mays
  unsure (1)..(409): unsure at all Xaa locations
  Clone ID: MRT4577_147602C.1.pep
MAAPAQAQAQVLPLLRWSRSAXSSAPXSRRLFSALQRPSAAARCEAGSKAMLKGMDYSELENWVQAQGFRPGQAMMLWKCLYGNNVWAHCYDELAGLNKDFRKMITEHADLKALTMKDIHIASDGTRKILFSLEDGSVIETVIIPCARGRTTICVSSQVGCAMNCQFCFTGRMGLRKHLSTAEIVEQAVFARRLFSDELGSINNVVFMGMGEPFHNIDNVIKASAIMVDEQGLHFSPRKVTVSTSGLVPQLKRFLQESNCSLAVSLNATTDEVRNWIMPINRKYNLNLLLGTLREELNLRQKQIVLFEYVMLSGVNDSMDDAKRLIELVQGIPCKINLISFNPHGGSQFKPTPDDKIIEFRNVLIQGGLTVFVRLSRGDDQMAACGQLGEPGGYQLPLLRVPEKFQVAL

SEQ ID NO: 236860 - protein, 73 aa, Zea mays
  Clone ID: MRT4577_147603C.1.pep
CSRVGDAFGEGIVHGFGLYGLKRAGVVLLLRGPADDAQDGMPTSSRQPRQGAYGTDATECCTWAHCAARRLAT

SEQ ID NO: 236861 - protein, 36 aa, Zea mays
  Clone ID: MRT4577_147604C.1.pep
FVIMTCAPSQHSKLIYSVFGGYECAALTFVSEQGSQ

SEQ ID NO: 236862 - protein, 131 aa, Zea mays
  Clone ID: MRT4577_147605C.1.pep
RPGRAHTPKIAIPREKVPPSSTFFASVVVRSPRLGFWGLRCVPGHVRCGAGCDCWWDGGEFLAAVHVQPPRSAVTPLWRGRSHHHPVTRRSIGGSSGATSRSSIRSRWHLPIDFLAPRMDFRSCYIYILFL

SEQ ID NO: 236863 - protein, 112 aa, Zea mays
  unsure (1)..(112): unsure at all Xaa locations
  Clone ID: MRT4577_147606C.1.pep
ANGSGQHKTRHSXVGHKSLLKSHDLYQYILDTSVYPREPDSMKELREITAKHPCNLTTTSADKVQCLNMLIKLIGSENTMLIAVYXTGYSLLATAFVLPXDAPNLLMNINRQ

SEQ ID NO: 236864 - protein, 100 aa, Zea mays
  Clone ID: MRT4577_147607C.1.pep
VPAPPLRIFFFFFFFFFFFFFFFFFFFFFFLDNSNGAFPYTLYKIYRGPLLLFAKQPALKGPKEGLDPFKEFKGSKFTWFVKTKFGPMSWGKNMGEFQPP

SEQ ID NO: 236865 - protein, 152 aa, Zea mays
  unsure (1)..(152): unsure at all Xaa locations
  Clone ID: MRT4577_147608C.1.pep
NNFFFFFFFFWFFLIFFWFFSFFWANKKNNISSKPKKTKKKKKKKKKKKKKHKKKQKKKKKKKKXKKKKKKTHKNTPKNKQIPKNSXNSQSRKKKPTNKPTKPEAKTIKNKTRXKQKLTLQQKKSPPPQNPINTKNRPHVPKTNQYPKKYRK

SEQ ID NO: 236866 - protein, 75 aa, Zea mays
  Clone ID: MRT4577_147609C.1.pep
IPIYDLDSFAAPSRFSTIPTARDPIFWPDSQFYINNDARSYNFNILTSLIGYIITLMANPTEMTTHCTVNSGLMF

SEQ ID NO: 236867 - protein, 80 aa, Zea mays
  Clone ID: MRT4577_14760C.1.pep
MADQFEDSANNVIIEEVNKGLNPGMVVLLVVASFLLIFFVGNYALYVYAQKTLPPKKKKPVSKKKLKKEKLKQGVSAPGE

SEQ ID NO: 236868 - protein, 50 aa, Zea mays
  Clone ID: MRT4577_147610C.1.pep
ITAAALWPDIEHISVFEFIVAPSLAPRLHSQLLSSRASPKSSCLIKAVRG

SEQ ID NO: 236869 - protein, 82 aa, Zea mays
  Clone ID: MRT4577_147611C.1.pep
VAVLFIIVRWIASGSYPYATAIFPLMCMAIGRVFGMLSRVSPSRVMSARFRSFRRKMRGVPPEPVKKPPMILEIKGGLKKVC

SEQ ID NO: 236870 - protein, 117 aa, Zea mays
  unsure (1)..(117): unsure at all Xaa locations
  Clone ID: MRT4577_147612C.1.pep
LFDELGRVAGNLPVDRLIRLGRLPYMGPSDGKWGGHKXDYLLCMGRDLKLTRDSEXVGDFEYDNRDQVMELLMKAXDAGEDGVTMFSTIMLVEDNFHMGWRDHLEHGTLQVAADMKT

SEQ ID NO: 236871 - protein, 70 aa, Zea mays
  Clone ID: MRT4577_147613C.1.pep
QTHRGTKQKGQGVLRQHAVVPDSLTTERGHPRLPVHVEYMYTRNASAYRLIDERALATTDIRISLNPYPH

SEQ ID NO: 236872 - protein, 116 aa, Zea mays
  Clone ID: MRT4577_147614C.1.pep
IYIREGAKLGQIFFPPDLPRKHTLLHDCHPIQGRVCFVLATNKNLGAGRAIFSGWEIETPPSLIKPQPVLGGGTNGVMRRTPTQGPRLDISRCFLSHPLALTVWDPKKEGFYSPSL

SEQ ID NO: 236873 - protein, 57 aa, Zea mays
  Clone ID: MRT4577_147615C.1.pep
SGSGAGGRRPFYRVRCPILRARVLSFALSWGFKKFYWSFLSLGILSFLGFLVDIVDV

SEQ ID NO: 236874 - protein, 100 aa, Zea mays
  Clone ID: MRT4577_147616C.1.pep
SSLPKKKPTTPLFRWERGANQTTGGRKSRPPEHYGGTGQKGFIPPESAIWGARENLRDPISGILDPTPTGSPDHRLKGTCPNRENPLEKEFMPPPGRERG

SEQ ID NO: 236875 - protein, 52 aa, Zea mays
  Clone ID: MRT4577_147617C.1.pep
IRHEAQTGFVPRGRPRLARGSNLFYLRPGLTNEDRLPCFVSALLLRCLTNFC

SEQ ID NO: 236876 - protein, 68 aa, Zea mays
  Clone ID: MRT4577_147618C.1.pep
TKNLPKGHFLLGPTGIWIIYEQDIFPAGKQYVGKIRGKGWSFRGKVTPKVTGGNSWDMEDLVQISPQR

SEQ ID NO: 236877 - protein, 162 aa, Zea mays
  unsure (1)..(162): unsure at all Xaa locations
  Clone ID: MRT4577_147619C.1.pep
VPGFPPRVFFFFFFFFFFFFFFFFFFFFFFFFFFFWKTXKGFYGVPKKGTGNPPQTMGFLKKESPNSFWGPFFGKKKAFQKFLFFGAPFQEKKGFKDLKFKKKKARGFGKIYPPFLGKGFKKAFLGSFTFNPFKILGGEKIPPPPGGTPLFHWESRAKKKAG

SEQ ID NO: 236878 - protein, 74 aa, Zea mays
  Clone ID: MRT4577_14761C.1.pep
ILRSRPKKKKKKKKKKKKKKKKKKKKKKKKKKKKKKKKKKKKKKKKKKGGAVLRDQIFFPGVWKEIFFFWGPQN

SEQ ID NO: 236879 - protein, 86 aa, Zea mays
  Clone ID: MRT4577_147620C.1.pep
VSKKINEFVRFQLLLFPAFYLVILVAAVACMLSWTRRIPDLRIKNVCSGIQYLVLYYPGGRLHPVDMGDKRASGKSSSSRLLLSFA

SEQ ID NO: 236880 - protein, 67 aa, Zea mays
  Clone ID: MRT4577_147621C.1.pep
AILTYFVFKTTDFDCKCKHYSSLASDDGRKHPNITQRARTQTKVFKHHNLVRQANRCMQADQYFYCL

SEQ ID NO: 236881 - protein, 83 aa, Zea mays
  Clone ID: MRT4577_147622C.1.pep
SLDCRSDQASEALHATPQSIGIEELPSFGRFYFQPAPSTTRTFHVPRNMLALASPEIDRWLLAGFEDEKTYIAKRLRELRKPS

SEQ ID NO: 236882 - protein, 107 aa, Zea mays
  Clone ID: MRT4577_147623C.1.pep
LFLLSAFSLFLLSAFLCYRRRQASGTPLPHEYFVYCQLAQWLRLFGEMCFPLYPSSCVSIRWISFSIFLCGLDPGFSSRDPLAFYRDENWDRKGKYFSLIALACADI

SEQ ID NO: 236883 - protein, 133 aa, Zea mays
  unsure (1)..(133): unsure at all Xaa locations
  Clone ID: MRT4577_147624C.1.pep
RNLSRCTSYKQTIIALSTIHVEFVTMYETTGQTMWLKKYVPELSVVDSIERPLKIXCDNQTSVFYSYNKKSSGIAKYIDXYVVKEKIHDQTIKVEHIRTXYQNHKISADLFTKGLLPRVFIGHVAXLGLKETL

SEQ ID NO: 236884 - protein, 88 aa, Zea mays
  Clone ID: MRT4577_147625C.1.pep
PTNSILGFLKVFPSLGQKKTGNLGLQPPFGKTPPLLCLSLRKHFFKNRQFPKSYFLGPTKKFFRGPKIPFPPNWGVIFRENFGPKKKF

SEQ ID NO: 236885 - protein, 181 aa, Zea mays
  Clone ID: MRT4577_147626C.1.pep
NQTLTPCLSLTLCLALSLSILSSASRLHAQRSSHKQPRHPIRQPPAARKAKPGPAAVVHSCRGPWCVRRSCVATSLRGCRGPGPAAVDPWCVPADCRPGPAVVQRSRSGVPARSEAATLCGCVLQQPAATASELVSRCLRPCVYCLVQFKCKRCDPIYCLVQFKCKRYVQKKKKKGGPDAW

SEQ ID NO: 236886 - protein, 66 aa, Zea mays
  Clone ID: MRT4577_147627C.1.pep
ADHSLTYPLFHDQHSQASHWEPPPLHGHSNRYVDDAVDRCLRCILTTLHNSQRRLTLASHAHQRAP

SEQ ID NO: 236887 - protein, 77 aa, Zea mays
  Clone ID: MRT4577_147628C.1.pep
PPLNDLGSKNPSTGPPKRGGTPGGGSGKTPGPRKTPPEHPVSPKKTSPGVVPHPPGVPPPPLPFWGLESFQGPPFPF

SEQ ID NO: 236888 - protein, 111 aa, Zea mays
  unsure (1)..(111): unsure at all Xaa locations
  Clone ID: MRT4577_147629C.1.pep
PSRRARSRSAESSWQPRRXTMSRARCRLVRSSTXGRLVPARRTRAGARRLWRSTCRAPDPPASWRRRPSCPRSRRRTPGRWSSNPPGAPARSCSRRRRRRSRIRTTSPAGY

SEQ ID NO: 236889 - protein, 88 aa, Zea mays
  Clone ID: MRT4577_14762C.1.pep
EEPLSAPPGDVCSYYGLIVIDDEVVITTDEIGTIVQGRKHHGRVLLVGALLQPPAEEERRRGHPLLWIWWCRCCSSSLPSLLVVLRSI

SEQ ID NO: 236890 - protein, 43 aa, Zea mays
  Clone ID: MRT4577_147630C.1.pep
MYCKSHSVHLHVHVAGLCYAEQSSEHQVCCSRHAAVQLDVKEP

SEQ ID NO: 236891 - protein, 54 aa, Zea mays
  Clone ID: MRT4577_147631C.1.pep
LAPVSRYFSTSHSFHHIPITTLPNGIRVVTESKPRQTAAIGVFVNTGSAHETEH

SEQ ID NO: 236892 - protein, 73 aa, Zea mays
  Clone ID: MRT4577_147632C.1.pep
MGRPPCCDKAGVKKGPWTPEEDIVLVSYVQEHGPGNWRAVPVSTGLMRCSKSCRLRWTNYLQPGIRRGNFTPH

SEQ ID NO: 236893 - protein, 150 aa, Zea mays
  Clone ID: MRT4577_147633C.1.pep
DSRAKADQLGESILFWFCHTKGPYYFEDLVDMMYDKISESFNAYFEDNSIEEVAEQFLIIHEECLQNNYSSVEKLRNSHVPGNAVSQSRQIVGDDDDDSDSSDDGDDTSMADEEAGPEEMAVDRPRPPKPTPDADGWTVVPPRRGGRSKK

SEQ ID NO: 236894 - protein, 48 aa, Zea mays
  Clone ID: MRT4577_147634C.1.pep
LSEILNVLVAFVLEAMWLLSVIGSVACLSSLSDTSQFGVLSIYCVKAD

SEQ ID NO: 236895 - protein, 37 aa, Zea mays
  Clone ID: MRT4577_147635C.1.pep
LPLPNLFSTTFTTRTCILLLLLSITTTIYLIFSAIHY

SEQ ID NO: 236896 - protein, 197 aa, Zea mays
  Clone ID: MRT4577_147636C.1.pep
MAASNGGGGPGPISAEAEAALGEAIRLVFGRWTALQMAVENQWGGRDSRAKADQLGESILFWFCRTKGPYYFEDLVDMMYDKISESFNAYFEDNSIEEVAEQFLIIHEECLQNNYSSVEKLRNSHVPGNAVSQSRQIVGDDDDDSDSSDDGDDTSMVADEEAGPEEMAVDRPRPPKPTPDADGWTVVPPRRGGRSKK

SEQ ID NO: 236897 - protein, 139 aa, Zea mays
  unsure (1)..(139): unsure at all Xaa locations
  Clone ID: MRT4577_147637C.1.pep
RVGPSRPVPPSLPPSPAPRSSSFRSAAAGTPSSPLRRRASAAPTTRHNSQLKCSIKPSQFELRHRAAGLAPARALLPDRVTPFSFDADGDDHPREECGVFGVIGDPDASSLCYLGLQKLQHRXEEGAGIVASDADGKLN

SEQ ID NO: 236898 - protein, 79 aa, Zea mays
  Clone ID: MRT4577_147638C.1.pep
EVDFPTPKRFLEGDRGRVLAQKNVIFVGKFALFPPNKKWFVQNAGVKGVLVGEPPPNRGDPGKPTVGLFGKKISHAGAP

SEQ ID NO: 236899 - protein, 92 aa, Zea mays
  unsure (1)..(92): unsure at all Xaa locations
  Clone ID: MRT4577_147639C.1.pep
FLKKSPFPQLXKYLLXPNXXPFQTYXQPQCQMYSPFIGPLHPTFYLVTPNLTVTLSNXLNPPLXPLFPSFXXTFPFFPPKALNXGLPFNFSN

SEQ ID NO: 236900 - protein, 98 aa, Zea mays
  Clone ID: MRT4577_14763C.1.pep
ILATMFKLAALPHHQSSYEHSCSLFCSQRQHEQLSSDHHQFRVYMNTLASGAMQSVVHISWVTMSHVEMFLSALSSSTIMEACQPEGSRYWSFFAQDS

SEQ ID NO: 236901 - protein, 196 aa, Zea mays
  Clone ID: MRT4577_147640C.1.pep
MASTTSTAVLLVSTAILVAAATYFRHGTLSGGGGTAGTHLHFFMHDQYTGANPTAALIVPGRPPLSNATATATATGSGDDDEHPRRFGDIAVMNNALTEGPGRGSARVGTAQGFTVRVAERGSVNALSMHLVLEAGEHAGSSLVVSGRVDTDLAVRESVVVGGTGRFRLARGYALSRSYDYDLAKGGVVEVDVYLQ

SEQ ID NO: 236902 - protein, 180 aa, Zea mays
  unsure (1)..(180): unsure at all Xaa locations
  Clone ID: MRT4577_147641C.1.pep
ICVQLLLGFPSIILPLAHVNKDIRASAIKCIDGLSLVWQRLSTSVPRNGNTTKLPQCLSSPTFGSFLELLVNQKTMICSDAKFXFPAYISSMLSPCKDILVPENLHERFDPHTKDTILTFILRSALRLPPYGKFMVLSVLKGVGSILFHAEDVKSLFFDLLDRRDQYQNRHNCNADPRQQ

SEQ ID NO: 236903 - protein, 42 aa, Zea mays
  Clone ID: MRT4577_147642C.1.pep
LSVVVVEFEFELRFFGSGRLLFLFLSSPGIIRSCRCRRIRTR

SEQ ID NO: 236904 - protein, 83 aa, Zea mays
  Clone ID: MRT4577_147643C.1.pep
VLSRMTHLRCNLAFIPAMGIASQWGYCCCRRDAVAAVLARLQPCYVVFTVSYSPRHWHLWTCTYKGAYKVIIDKTPYICGNVL

SEQ ID NO: 236905 - protein, 45 aa, Zea mays
  Clone ID: MRT4577_147644C.1.pep
LLSVLIGLNLALCVYDSFAYSKLCSDSRDMLLKCRLNQIISLLKI

SEQ ID NO: 236906 - protein, 122 aa, Zea mays
  unsure (1)..(122): unsure at all Xaa locations
  Clone ID: MRT4577_147645C.1.pep
QRRPAVFSILMRXALSSSIANSTIIPQCSQAPIAWLLHPYLPSMIASVCENPALLPYTLQQAIASGNIPLSPLFQQSPNLSFVQSLVLTITAQHLQLLVLSMINQVTLSNLSAYSHQQQFLP

SEQ ID NO: 236907 - protein, 88 aa, Zea mays
  unsure (1)..(88): unsure at all Xaa locations
  Clone ID: MRT4577_147646C.1.pep
FGAHGPAHSFTPKNVXYSLKGKAVNTSIILEAVRLLKRSINPSKASTHPEYRISLPVSFLFPFLSSLASSXLNESAKVIGTNEPSPDK

SEQ ID NO: 236908 - protein, 66 aa, Zea mays
  Clone ID: MRT4577_147647C.1.pep
MQSGYGGVSEFQQFIMDGGFAMSAPPPPQQQQPQTATVQELGGPFRYQAVYHHALAAEVHHHAPDM

SEQ ID NO: 236909 - protein, 122 aa, Zea mays
  Clone ID: MRT4577_147648C.1.pep
MPTPHTTIEEPDPPLLTVAQLTPAHSSRQGREGGEGWQRRERRATMHARAPNCHRRNRHRPPAPAAEGRSGLHATNPTPGGARPPASSRPTTPCVRRRNGAAPPPPVDAANPSPGCTCRTRC

SEQ ID NO: 236910 - protein, 109 aa, Zea mays
  unsure (1)..(109): unsure at all Xaa locations
  Clone ID: MRT4577_147649C.1.pep
ALNEAKLKVEQERKXREQLDKKLEEQRKKAEXALMKQALEQQQKELERYQXLKRLQKEREEAMTRKKMEEEQQRQNQIKLLGKIKSRPNLSFAFGIKERSIRQTKLVLE

SEQ ID NO: 236911 - protein, 80 aa, Zea mays
  Clone ID: MRT4577_14764C.1.pep
MADQFVDSANNVIIEEVNKGLNPGMVVLLVVASFLLLFFVGNYAMYVYAQKTLPPKKKKPVSKKKLKREKLKQGVSAPGE

SEQ ID NO: 236912 - protein, 58 aa, Zea mays
  Clone ID: MRT4577_147650C.1.pep
RRLTSLPKVGCQRAPLLGTRLRGSAAACAPPRSGDQTIIQICHYRNISVLFCTPGVAI

SEQ ID NO: 236913 - protein, 124 aa, Zea mays
  Clone ID: MRT4577_147651C.1.pep
WMWQLWLYASWRNRRYKHTHFVFFFVELLCSVFAAESRSNVVVVVLLLLATRMWIAAFVVLECLPRKVGGGRERERGVLLSSRLVYLCVLFSLASSDGMALHVSFLEKRLPRPFLGDVDAPPAP

SEQ ID NO: 236914 - protein, 337 aa, Zea mays
  Clone ID: MRT4577_147652C.1.pep
MSWFGHHHHNQPAPPASGPNQVFKIFCRANENYCLAVRDGAVVLAPVNPKDDHQHWYKDMRFSTRVKDEEGMPAFALVNKATGLAIKHSLGQSHPVKLAPFSPDQEDASVLWTESKDVGKGFRCIRMVNNTRLNFDAFHGDKDHGGVHDGTGVVLWEWCKGENQSWKILPWGPEANSAAAHAGGPHAVRVFCKAGGEDYSLTARNGTACLAPTNPRDEYQHWVKDMRHSTRVRDEEGYPAFALVNKVTGEALKHSTGQGHPVKLVPYNPDYQDESVLWTESRDVGNGFRCVRMVNNIYLNFDAFHGDKAHGGVHDGTEIVLWKWCEGDNQRWKILPW

SEQ ID NO: 236915 - protein, 111 aa, Zea mays
  Clone ID: MRT4577_147653C.1.pep
AFMPPPMRQGITALMEYISQEVAMSYDLSIGYIQDGKSQPESAGRSGVMFDVLTLTVERVVDNPVRLVLGAVETALDVASRRRTGLLGQTEAEALHVALRKHSWEYQLGDW

SEQ ID NO: 236916 - protein, 56 aa, Zea mays
  Clone ID: MRT4577_147654C.1.pep
FVLVAIMFTKPGPIALLGWWGPLIRSSSYPTPLYVQVLCVGPVLVVISSCVRHAPL

SEQ ID NO: 236917 - protein, 338 aa, Zea mays
  unsure (1)..(338): unsure at all Xaa locations
  Clone ID: MRT4577_147655C.1.pep
MSWFGHHHHNQPAPPASGPNQVFKIFCRANENYCLAVRDGAVVLAPVNPKDDHQHWYKDMRFSTRVKDEEGMPAFALVNKATGLAIKHSLGQSHPVKLAPFSPDQEDASVLWTESKDVGKGFRCIRMVNNTRLNFDAFHGDKDHGGVHDGTAVVLWEWCKGENQSWKILPWGPEANSSAAPRXGGPHAVRVFCKAGGEDYSLTVRNGTACLAPTNPRDEYQHWVKDMRHSTRVXDEEGYPAFALVNKVTGEALKHSTGQGHPVKLVPYNPDYQDESVLWTESRDVGNGFRCVRMVNNIYLNFDAFHGDKAHGGVHDGTEIVLWKWCEGDNQRWKILPW

SEQ ID NO: 236918 - protein, 452 aa, Zea mays
  Clone ID: MRT4577_147656C.1.pep
AGRVHLRACLEGAYHVMEEPTMYASDTRPAARQLWRPPIGVLEVGVLGAQGLTPMKTVDGRGMTDAYCVAKYGQKWVRTRTVVDSCSPRWNEQYTWEVYDPCTVLTLAVFDNCHLGSASAGNGALRDQRIGKVRIRLSTLEMDKARTSAHPLVVLHPSGLRKNGELCLAVRLTCLTLGSVVRMYGQPLLPKAHYVQPLTVVQLDSLRRQAMSIVAARLSRAEPPLRREVVEYMLDADSLVWSIRRSKANFFRVTALLSGAASTVRWLADVCRWKNPATTVLVHVLFVTLMCFPELILPTMFLYMSTAGLWNYRRRPRRPPSMDARLSCAEATHPDELDEELDTFPTSRPNAVVRLRYDRLRSVAGRIQTVVGDVATQGERIRSLLTWRDPRATALFTAFCLVAAAVLYVTPVRVVSLVVGLYVLRHPRFRGRMPSAAGNFFKRLPSQADTML

SEQ ID NO: 236919 - protein, 36 aa, Zea mays
  Clone ID: MRT4577_147657C.1.pep
NTNLAPNFLFQTTFSGSKPPYILKQGPEANTQTNST

SEQ ID NO: 236920 - protein, 77 aa, Zea mays
  unsure (1)..(77): unsure at all Xaa locations
  Clone ID: MRT4577_147658C.1.pep
EVKVKIPEELKPWLVDDXTRQKQLFYLPAKKNVDSILEDYANYKKSRGNTDNKEYAVNEVVAGIKDYFNVMLGTSYP

SEQ ID NO: 236921 - protein, 109 aa, Zea mays
  unsure (1)..(109): unsure at all Xaa locations
  Clone ID: MRT4577_147659C.1.pep
FIEPAGKKKFTKKKKKNKLKKKNKKKKKKKKKKKKXTKKKKKNEKKKKNNEKTKKKNRKIFLSPPLPLIASGGGYNPFSPRTRKKFGGVCFFGAPHRDFWVKGPPPDPY

SEQ ID NO: 236922 - protein, 107 aa, Zea mays
  Clone ID: MRT4577_14765C.1.pep
KKKKKKKKKKKKKKKKKKKKKKKKKKTKKKKKKNFFPLAGPPLRGIFGNFLPIGGRFTFLLEGPFPLLGGEFTINCPFFYNVEIGKTLGFPNLMGLEQIPFSKIGVL

SEQ ID NO: 236923 - protein, 200 aa, Zea mays
  unsure (1)..(200): unsure at all Xaa locations
  Clone ID: MRT4577_147660C.1.pep
VHDEGRITMRHCXHSTPKNIKQXPDRPKNLEPIANNIPPDLTGELHEYYRCDTTGLSCEPQHYMADNRXELEMIHSLRSKLSTMGCVXPISCTKNHLRXGKYSWVNDSEQIFSENEMDYLGNTNLVXSQTILAHSAXHVMLMLFIQAYPIGGPPLNXRLNEVYYGGSLDALLLPDDSDNAADIQVNELKNDRLVMICMNS

SEQ ID NO: 236924 - protein, 92 aa, Zea mays
  Clone ID: MRT4577_147661C.1.pep
HGSAHASGHAFDSEIGSHIGLGRAIRQPLYKVPNPRGKHLPSANRGPAFCGFNFGFCPFASSISPPTMGKEKSHINIVVMGHVDSGKVDTTG

SEQ ID NO: 236925 - protein, 73 aa, Zea mays
  Clone ID: MRT4577_147662C.1.pep
GGKTSPNPVTWPNGTIFTTTWGLGLPYYKNLGKKNYSKHGGLKKAIFFTNWNNWDPAALGNLWVPMNPKIVLP

SEQ ID NO: 236926 - protein, 37 aa, Zea mays
  Clone ID: MRT4577_147663C.1.pep
GRVGLFTLTNDLLLRSRAGGFQRWRLCLTSGRRRRWW

SEQ ID NO: 236927 - protein, 49 aa, Zea mays
  Clone ID: MRT4577_147664C.1.pep
TFGPTSKSRSIIIRLITQRLLCFHSISEEKAFAKSVMNFSMVTPLLFSH

SEQ ID NO: 236928 - protein, 49 aa, Zea mays
  Clone ID: MRT4577_147665C.1.pep
HLWRPISSYDIDHGGEATKANKKIQYLKKPTIKPLIRTTKLITLTNLTR

SEQ ID NO: 236929 - protein, 77 aa, Zea mays
  Clone ID: MRT4577_147666C.1.pep
QKALISLLKILCQHYGKLRSSFGADPSQDGIDGPEMAVTKLFSSCKSRANMKGYGAVVHCMRNISSKSQIQTTAQEG

SEQ ID NO: 236930 - protein, 111 aa, Zea mays
  Clone ID: MRT4577_147667C.1.pep
LCCPTVFIVFLFLFLVKDDPSSGPALRLSIILRPTPAADGGLLTPSSWEAPPAAACESGWSSTKMLFLFLLSMAMKRRAAASLALSLGDGQGCLAHARMDHLALAAAAPLH

SEQ ID NO: 236931 - protein, 80 aa, Zea mays
  Clone ID: MRT4577_147668C.1.pep
MGLPLLSLLLAAGGLLFLEDACVGIGRGEVPASLALSLGDGQGCLVHGRMDQLALAAAAPLHSHGNGRHAAAGAATGDGT

SEQ ID NO: 236932 - protein, 73 aa, Zea mays
  Clone ID: MRT4577_147669C.1.pep
ARETFSSMVKPATVRIMLTLALLNSGPPIHQLDVKNTFLHRTLTETIYCCQPTGFVDSGLLDHVCHLNKSLYG

SEQ ID NO: 236933 - protein, 109 aa, Zea mays
  Clone ID: MRT4577_14766C.1.pep
CWKNPGKRTRAGQFGRGFAFDPSGERTQEESKRRISSRASGDATGRPQTDRQAAGRGMKHRHHRTERGKTTALEPMSLVHAHKRLVGGQVKCFLSANPRLNERMGIKCW

SEQ ID NO: 236934 - protein, 105 aa, Zea mays
  Clone ID: MRT4577_147670C.1.pep
RGGVFRFQGRKGARDAKQLEKKKKHAPPRPPALYVLRCGVCMLWGGETRYTNFTRGNTLFTRERPERPPIHADKESEIVEPLVSFFFFFFFKFFFFFFFFFFFFF

SEQ ID NO: 236935 - protein, 119 aa, Zea mays
  unsure (1)..(119): unsure at all Xaa locations
  Clone ID: MRT4577_147671C.1.pep
MAAFLERFNWKIPGVSQLKXLGNPCPFPLWGXGERAPSDGRSKRGKARTGEGPXPFGGPLWPRGGPFTGTLTAPFAGALPPVPFAFSRSFLPRFSGFSRXVLNGGLLFGFRFLAWGPLL

SEQ ID NO: 236936 - protein, 102 aa, Zea mays
  Clone ID: MRT4577_147673C.1.pep
NIQTKTNYNQNPKKKNTHTKTLHKKNRKKTHTLKKKIHQTKNKNYSKLNTTSPIKRGEAQPNLLQTLQFTSHFLSPPKNNTSQPKQIQQNGITKPQFYMPSH

SEQ ID NO: 236937 - protein, 72 aa, Zea mays
  Clone ID: MRT4577_147674C.1.pep
IFVIYCIEKLKSKPGALVRAVSLSHQVTGLKQPLSICGRRLALVYPFSRPHSCGSFVIGSVLFLLYQKLQCC

SEQ ID NO: 236938 - protein, 95 aa, Zea mays
  Clone ID: MRT4577_147675C.1.pep
DGTFKNKFETENGIKQEEVGYLKAGPDGTPISVVQGAGSYVAPDGSVISTGYISDENGYRPVGAHLPTPPPIPAEIQEFLRLLAFLPSTPEPVYQ

SEQ ID NO: 236939 - protein, 223 aa, Zea mays
  unsure (1)..(223): unsure at all Xaa locations
  Clone ID: MRT4577_147676C.1.pep
XEDQDRIFQNLYGRLPVNLQSAKKMGDWHKTKEILLKGDEWIISEIKASGLRGRGGAGFPSGLKWSFMNFKGWEKDTKPRYLVVNADEGEPGTCKDREIMRKDPHKLVEGCLVAGRAMNATAAYIYIRGEFYHEAAILQNAINEAYADGLIGKNACGSGYDFDVYIHRGAGAYVCGEETSLIESIEGKPGKPRLKPPFPAAVGVFGCPSTVANVETIAVAPTI

SEQ ID NO: 236940 - protein, 76 aa, Zea mays
  Clone ID: MRT4577_147677C.1.pep
RECRECLWSDAFGAEGSTMNEVGNSLEEYLVWLRLLYTYVGLCLHQFCGACSLFCWAGLGGQVPSVGRAHASRQQG

SEQ ID NO: 236941 - protein, 89 aa, Zea mays
  Clone ID: MRT4577_147678C.1.pep
SGNGVKWSWNTMVKGTQCSGSNNQWYRRRYRMKYCLLVSTSTRSQNSSLGVCFGTMQSLKSLNGTGTERVTGKKALSAMGVTFGKNEKS

SEQ ID NO: 236942 - protein, 125 aa, Zea mays
  Clone ID: MRT4577_147679C.1.pep
LAGVPKMDFPPVEAWLQWTAPRPGSPEVPKAAGPVPGGGPVEPPGKKLGDQVKPGVKGHGLPEGELPGVLVHGQLHPPKALLGIGPQDHEGQVHPVAWHRVLVKLPSKGLVQTIQRKMFFLNIKK

SEQ ID NO: 236943 - protein, 169 aa, Zea mays
  Clone ID: MRT4577_14767C.1.pep
PGIAGSPPLGEVKPLPAPESPRPGGQWSGKGKGAQSPNPPPPRVGGFINPYGRRGFRFGNGAVGPTPLTLVGCPLRPPGPQALRFRLPGCVEWGTVTGFPLDPGMPFVPPSSGPGPGPRAPAAGGLGFALSPGRRARGKEKKKKKKKKKKKKKKKKKSLSKKKKKKKLV

SEQ ID NO: 236944 - protein, 79 aa, Zea mays
  unsure (1)..(79): unsure at all Xaa locations
  Clone ID: MRT4577_147680C.1.pep
KPTHSFPRGVVIFFFEATPDGNSPGLYRGFKGTEQNIFEVWAFLLRPKPMYVLLVLESKMLCYLQRKVCHCFLFVPRAX

SEQ ID NO: 236945 - protein, 77 aa, Zea mays
  unsure (1)..(77): unsure at all Xaa locations
  Clone ID: MRT4577_147681C.1.pep
MKLGLVAIALIALVSSVYCTHTIHCSXSQQQTHEQQHNSQLHHPQKQQHETPPQHFQHHHTQLQQVHIQTQKHSAQP

SEQ ID NO: 236946 - protein, 37 aa, Zea mays
  Clone ID: MRT4577_147682C.1.pep
FLRLTPCSGDGAVHGRISASSELSGTRRKCSVVRTNE

SEQ ID NO: 236947 - protein, 53 aa, Zea mays
  Clone ID: MRT4577_147683C.1.pep
TANPELQNPYCSFKLMVNYELKGCCQSRCQYVTCHWRSPVQFRCCFGTCYSFG

SEQ ID NO: 236948 - protein, 42 aa, Zea mays
  unsure (1)..(42): unsure at all Xaa locations
  Clone ID: MRT4577_147685C.1.pep
VSTASXXIGILFFSIASLIICPDELSXVYYAVYDDGHLHNNI

SEQ ID NO: 236949 - protein, 50 aa, Zea mays
  Clone ID: MRT4577_147686C.1.pep
WKVNIKPTIKVLGYCFWLAVNHGFALINGGPSVPGLSGIPVPLFTASYIK

SEQ ID NO: 236950 - protein, 47 aa, Zea mays
  Clone ID: MRT4577_147687C.1.pep
TKPGSYVSFIMCGLYPSYRRLKFSIFGARDFLQLILAHKPCAVMSRK

SEQ ID NO: 236951 - protein, 158 aa, Zea mays
  unsure (1)..(158): unsure at all Xaa locations
  Clone ID: MRT4577_147688C.1.pep
NSARGPNVLDVAIVGGGMMGLAVACAMCRDCCSCALTCXANMPLTKHLRVAIIDSNPALKSRSYLGKNSIPDSRVSTVTPATISFFKGMILNQLCASSYLISVVFQLSTIFGFKFELVCSGVISSSRVCCLHIYLHILFDQLYHVTTLDVHEKQLNHL

SEQ ID NO: 236952 - protein, 70 aa, Zea mays
  Clone ID: MRT4577_147689C.1.pep
INDCLQIISWGASNSGLPASTIGFVRWFAKASNVHRLHVLDPSCLYSALLYDQLTIHYLRLMALINNSKS

SEQ ID NO: 236953 - protein, 29 aa, Zea mays
  Clone ID: MRT4577_14768C.1.pep
KTVREFLKEMRGNPFAKSSWNVYHKKTVF

SEQ ID NO: 236954 - protein, 68 aa, Zea mays
  Clone ID: MRT4577_147690C.1.pep
RFGSCNVSSLRSRVLGQCVEFLKHQCSPGATPYGWAQCQALQEQCCHQIKHVQQLHRYHATYSLGLQS

SEQ ID NO: 236955 - protein, 122 aa, Zea mays
  Clone ID: MRT4577_147691C.1.pep
DYDGYIVTGAQFEETDEEEEENIAMGVDEQGEGDDVPRIDYDRDNPSLKEGSAFASMTEFRNALATYCIKGEYDYVIDKSEPTRINVHCAFERCQWRIHDSCMRNSTIIQVKVNPSPHTCPG

SEQ ID NO: 236956 - protein, 40 aa, Zea mays
  unsure (1)..(40): unsure at all Xaa locations
  Clone ID: MRT4577_147692C.1.pep
YNVMVIDRLGXSLEDLFNEGSXKFALXTVRMLADQMISRV

SEQ ID NO: 236957 - protein, 174 aa, Zea mays
  Clone ID: MRT4577_147693C.1.pep
RLYDHGADLQTTHVVGTTGYMAPELSRTGKASPLTDVFAFGTFLLEVTCGRRPVVDTVRHGRKMLVDRVLEYWRRGSIEETVDSRLRGDYNLDEARMVLTLGLMCSHPFPAERPTMRQVMQYLDGDAPLPELTPAGISLFSLMQSQTSFDQFVLQYPWSGTSMGPMTSGISVGK

SEQ ID NO: 236958 - protein, 112 aa, Zea mays
  Clone ID: MRT4577_147694C.1.pep
LGKNAQAPLSSCRHRISSSAAAAAAGTTAGGIASPPRATAAIVVPVSGDAGHGPRLRCAIAGSLRSSRVWWSGVGWLPNPNSDLWSSWLSLPRRRARRVSQPGAWERREGTA

SEQ ID NO: 236959 - protein, 66 aa, Zea mays
  unsure (1)..(66): unsure at all Xaa locations
  Clone ID: MRT4577_147696C.1.pep
RVIGSSGVRSVIRDDLEIGLXCSAVINVVVEITKGSNIKYELDKKTGLIKVDRVLHSSVVYPHNYG

SEQ ID NO: 236960 - protein, 55 aa, Zea mays
  Clone ID: MRT4577_147697C.1.pep
ASGLTRAIKGCPAGPPRHRPLVRALTGALTHYASAVRKGVEYWYSHQMRPFLMGL

SEQ ID NO: 236961 - protein, 169 aa, Zea mays
  Clone ID: MRT4577_147698C.1.pep
NLAESTGPLLAQFTVVVVPEEPVLRQRDFDAVERQTIGEIHFTFGACILNRFREVAGAPSVSAAVADSPQNSRFRPSDVTGFQFWFRRHTTEMIFLTFPTLSSHCTFHVQWRVVVMHCTGCYAGGGARLVESQGSEGVQRNLGAVRCEESVSVSVVTSWTRVVRAVSRP

SEQ ID NO: 236962 - protein, 132 aa, Zea mays
  Clone ID: MRT4577_147699C.1.pep
DVVVVADICRTTMSVGGGCLSGADKINNESLFHVITKAAGSFMPVGSSQKSRIMREKRSSSRSVMSSKTTCLVKGNRSMNSSNTCPKRSKDILTLAVKMLASDVPLLPTSAPLRRRARKYGQNEEVCGVPGR

SEQ ID NO: 236963 - protein, 62 aa, Zea mays
  unsure (1)..(62): unsure at all Xaa locations
  Clone ID: MRT4577_14769C.1.pep
QGGREEAQGRAQRRERRRGSARTRPRSAPAEGPREDQTSKREAPPPRAKSAHEQEQXGAGPG

SEQ ID NO: 236964 - protein, 69 aa, Zea mays
  Clone ID: MRT4577_1476C.1.pep
KVNPPDIKKKKYTDPLEAGSRVAHLVLKTAKEGVQGTYGPPSQFEGKLKNFFFLSPGFNLQVNQSIRLL

SEQ ID NO: 236965 - protein, 54 aa, Zea mays
  Clone ID: MRT4577_147700C.1.pep
ADQSKFLRPWGVCVIPSTVLKWGPPGAVTPGRCPLVETHLAQGKVSPALKKPTP

SEQ ID NO: 236966 - protein, 84 aa, Zea mays
  Clone ID: MRT4577_147701C.1.pep
ASLIAAGAFYTRSLASFRLRSVNDRISRDHRGRAVSIVGLHRQRESRLLRERGSLVSSRDGSDAVSAKHRVGVENEYGWRGGDV

SEQ ID NO: 236967 - protein, 144 aa, Zea mays
  Clone ID: MRT4577_147702C.1.pep
AICKGDSPDLSEVRRIFQAPLKIPAPPFKTRRVVVKVWDIVPRKAAPLTPPGIVGILKKLGRDGNGLSSSGRTRGHLRRPVVAIKGGLYKGYPGFREFLNKALVEIFGEEVARTVPLEVPVDGFGAGPALLPPVHLLNRQQGSL

SEQ ID NO: 236968 - protein, 56 aa, Zea mays
  unsure (1)..(56): unsure at all Xaa locations
  Clone ID: MRT4577_147703C.1.pep
VAYISLGDFNLTLLDHLIVDPGLRMVGCNNKLNAGYAANRYTHVXGVGAYVVGHFH

SEQ ID NO: 236969 - protein, 53 aa, Zea mays
  Clone ID: MRT4577_147704C.1.pep
KCRQKRVNRQYASKAAECVGIKTPMYLSKSVPACRSVSPVSPPCYKCEASLEP

SEQ ID NO: 236970 - protein, 37 aa, Zea mays
  Clone ID: MRT4577_147705C.1.pep
IQFSLHYIRSITSHIRVPNPGCFISRTRGRYAWSYAW

SEQ ID NO: 236971 - protein, 92 aa, Zea mays
  Clone ID: MRT4577_147706C.1.pep
QCWNQGNIGFNKLLNNQSNPPISKSYLLIARCTVGDKRNELTDKKHDYLYSTRLPLVEASLINSFHSIISLGDFNLTLLDHLIVDPGLRMVG

SEQ ID NO: 236972 - protein, 104 aa, Zea mays
  unsure (1)..(104): unsure at all Xaa locations
  Clone ID: MRT4577_147707C.1.pep
MTVLEPRKHRVQQTSQQPEQSTYFISLGDFNLTLLDHLIVDPGLRMVGCNNKLNAGYAANRYTHVXGVGAYVVGHLHHGSDIINFSLKWIQLLKRFETQVPVSI

SEQ ID NO: 236973 - protein, 75 aa, Zea mays
  unsure (1)..(75): unsure at all Xaa locations
  Clone ID: MRT4577_147708C.1.pep
VAYISLGDFNLTLLDHLIVDPGLRMVGCNNKLNAGYAANRYTHVXGVGAYVVGHLHHGSDIINSNNEINQQKLDA

SEQ ID NO: 236974 - protein, 513 aa, Zea mays
  Clone ID: MRT4577_147709C.1.pep
VSHSPCSSPTTLQSTRATPSTRLPPHPIPNLPPPPPTSLPNRIYDAVIKTGTESNAGKAALDALGAELTTPLVADVLHRLRYEEKLAFRFFAWASQQDGYNHEPTTYNDIIDILSGTRYKSRQFGVLCNVLDHMKRHGSRSVPVEDLLEILRAYTEKHLTHMRKLAKKRRVRMRTPPETDALNVLLDAFCKCGMVKEAEAVFGRVKRKLLGNAETYSTLFFGWCRARDPKKAMKVLEEMIQMKHTPESFTYVAAIISFCSAGLVSEARELFEFMRTEGLTISSPTAKTYSIMIVALAKADRMEECFELLSDMRSCGCMPDVTTYKDLIEGMWLGGKLDAAYRVLDEMGRAGFPPDIVTYNCFLNVLCSLRNADDALELCERMIEAHCEPSVHTYNMLMMMFFEMGEAHRALDIWLEMDKRRCQRAIDTYEIMIYGLFDCGETEYATALLDEVINRDMKLSYKKFDAIMLRLSDVVNLGAIHRLSEHMRKFYNVAMARRFAITQKKKSIGLRRK

SEQ ID NO: 236975 - protein, 66 aa, Zea mays
  Clone ID: MRT4577_14770C.1.pep
PPGTWMYLVKSKPPPIKPGLVCLGQFSDRTRFRFNLGIAPKQFSVFVSLPIFYSLAVVLIKKKPFQ

SEQ ID NO: 236976 - protein, 110 aa, Zea mays
  Clone ID: MRT4577_147710C.1.pep
LHLTRCHQLYYAKSEQKRILLFIPFWMNPHLIYTAPRPLLFFSLNKDWYKGNANLITRTKRGTREVKLASTPLGPKLKFVLSFYSIHTSNECKLKQLYQVGIMLLHFWSY

SEQ ID NO: 236977 - protein, 38 aa, Zea mays
  Clone ID: MRT4577_147711C.1.pep
IKECLLTDLASKTVVYGTHQIEFLAAADLILVMKDGRI

SEQ ID NO: 236978 - protein, 151 aa, Zea mays
  unsure (1)..(151): unsure at all Xaa locations
  Clone ID: MRT4577_147712C.1.pep
TLSIPQRNQLIPQMISNPLYERERRQKDSRVCVPTTHYHXHHVVLNLTPPSVPHVRVLLPMGWQCFNNTGNDTGIHSPHAYFNQNRVYRISHTQNNLFYLRCDTYTVTRSVNVHKYNPHFPYTYYCRMYTRKCILERIASRSLQTSSTGGS

SEQ ID NO: 236979 - protein, 243 aa, Zea mays
  Clone ID: MRT4577_147713C.1.pep
MGRDGGDGELKLLGLWASPFVARAKLALQIKGLSYEYVEEDLGNKSELLLSSNPVHKTVPVLIHNGTPVCESTVIVQYIDDAFAGTGPSLLPADPYQRALARFWAAYLEDKIVTPWRRVFMVKADEEKAEAMRQAVAAMDALEGGLKECSSGGGGQSPFFGGDSVGYVDVLLGGMVSWVKASEPLSGAKIIDAARTPLLAAWMERFCELDAAKAVLQDVHAVVEYARTMQMQARVAAATASNQ

SEQ ID NO: 236980 - protein, 56 aa, Zea mays
  Clone ID: MRT4577_147714C.1.pep
NTKVLIHSFLVKKKKKKKKKKKKKKKKKKKKKKKKKKKKKKKKKKKKKKKKRGGPF

SEQ ID NO: 236981 - protein, 78 aa, Zea mays
  Clone ID: MRT4577_147715C.1.pep
YIAHPENYKLVNQTISGRGGRPGKPGPAPEGDPTFPNRGETKAGGNQWENGESPGEKCNPLKHPPKQRTGKLKEKTRG

SEQ ID NO: 236982 - protein, 52 aa, Zea mays
  Clone ID: MRT4577_147716C.1.pep
GEARAAQRQGFDPSFSVLCAWSGYCHLDLRPIRFSSCSTVLTRSTSSHTLQP

SEQ ID NO: 236983 - protein, 74 aa, Zea mays
  Clone ID: MRT4577_147717C.1.pep
PRVRPRVRPRVRSGTSGAKSASAAAGVGVAVGEHLLGDAQAFRCCCCFLCCGVEVPLGHWASQVRVVLFFQGVL

SEQ ID NO: 236984 - protein, 536 aa, Zea mays
  Clone ID: MRT4577_147718C.1.pep
MTRIFVQRGTAGSSSSSGRSGSQSAQQPAAAAREELPLQPQPQLPELLAIDDVTEHLNEGNENNSSRIKFLRTDDTISESSSYAEERAAREKPPKDDSNVINPTSLVEEPIVLHTPDQIEHGNSVPSGTNSSQMVGAASHPPPPPAPPPKSLLGNSGLWRMGPGSSNSVRIGSPRRPVAWPPVAARTSASGSRPSSPRSLVDGEGYNSADEQGPCYASSYDDSERERMFEHDLRRVKGLEIRKTAEDGNCLFRAVADQVYGDAEAYDMARQMCVDYMERERDHFSQFITESFTLYCKRKRRDKVYGNNVEIQAFAEMYNRPIHIYSYSTEPINIFQGSYNTDTPPIRLSYHHGNHYNSVVDPRRQTIGAGLGFSSFRGTNVDRDQVKAAIKAQQDQQIDNALMAEGRFYSDLELTEREIERMVMEASRSEYLAKEKKLNIRESSTSGAEPSSSAAISGSSRSVAGADRSSEDYFVLPDTVLTRSMQLLLAMGFGYNQVMEAYSIFGEDVDSMVCYLVETGGASAGGSNRRKGKAAE

SEQ ID NO: 236985 - protein, 48 aa, Zea mays
  Clone ID: MRT4577_147719C.1.pep
RCFQTQGSFKSVERAAIFMSLYMRYILSVCVVCVIVSSYRGRSRYIFI

SEQ ID NO: 236986 - protein, 20 aa, Zea mays
  Clone ID: MRT4577_14771C.1.pep
MAEADSCLESFELYESESDW

SEQ ID NO: 236987 - protein, 611 aa, Zea mays
  unsure (1)..(611): unsure at all Xaa locations
  Clone ID: MRT4577_147720C.1.pep
ENLWRLEDSGSDDWMVVSFEITFPQLLEMARDLGLDVPCDEPSLLAIYARRDAKLARIPKELLHASPTTLLLSIEGMPGLDWERLLKLQCSDGSFMSSPAPTAYALMQTGDTKCLEFLDGIVSKFSGGVPFTYPVDLFEHLWVVDRIERLGIGRHFTGEIKECLEYVHRYWGDEGLPATRDGPVSDVDDTAMGFRLLRLHGYDVSPSXYAAVFKHFEQDGAFYCYPGQSNKSVTAMYNLYRASQVAFPGEDELRRAEAYSREFLCRRRASGELKDKWVIPKDLPGEVAYALDVPWKASLPRIETRMYLEQYGGADDVWIGKVLYRMSLVNNELLLRTAQADFRSFQRQCKLEWHGLRKWASRRNLQAYGVTSNSTLRSYFLAAASIFEPDRATERLGWARTAVLAEAVSSCLRDGRCSRADGMLRELTSGIHLRNDDNPAASLVHALHELIGLLAFDNASYNSLLDAWKQWLAMWTAQGHEGSVALLLVRTVEICSGRRRSASATDDGQAHSLSEYSQLEQLTSSVCSKLAAGAGDGDDLSPASVEDAADRLRVDLEMQTLARCVLRSRSSIDAVTRQTFLHVARSFYYVAHCSARTVDAHISKVLFEDVV

SEQ ID NO: 236988 - protein, 64 aa, Zea mays
  Clone ID: MRT4577_147721C.1.pep
GCMGEINWAACTGPVQVMFRVGLVVRPVVARLGCGGALLRAHCPTWLGSRVEFISLVYSQLMGL

SEQ ID NO: 236989 - protein, 128 aa, Zea mays
  Clone ID: MRT4577_147722C.1.pep
LKLQCSDGSFMSSPAPTAYALMQTGDTKCLEFLDGIVSKFSGGVPFTYPVDLFEHLWVVDRIERLGIGRHFTGEIKECLEYVHRYWGDEGLPATRDGPVSDVDDTAMGFRLLRLHGYDVSPCEYISWI

SEQ ID NO: 236990 - protein, 57 aa, Zea mays
  Clone ID: MRT4577_147723C.1.pep
NEDPGWFFVSCAQFMFVSDKGGNLKGWIGVRKKCILLGETSLGLNEFTLLPREKLFP

SEQ ID NO: 236991 - protein, 179 aa, Zea mays
  Clone ID: MRT4577_147724C.1.pep
RPERARLVARVGLCCGAALGLVACAFAVSVRGVWARMFTTDAAILRLASAALPILGAAELGNCPQTAGCGVLRGSARPGKAARINVYAFYGVGMPAALALAFWPARLDFTGMWVGMLAAQLVCAALMLHAVQRMDWTEQAVRASVLTGSVKVVADVKSGHADAAKVKAEDAMLVVTVIT

SEQ ID NO: 236992 - protein, 88 aa, Zea mays
  unsure (1)..(88): unsure at all Xaa locations
  Clone ID: MRT4577_147725C.1.pep
GTVTGYESDDGVPHKKLWLFKVQAAVVEEYFEVRFNVSRMQKAAVFNSLALLMRQLXLWFHXRRARTELXHTEVNFEYLRXWCQQLHD

SEQ ID NO: 236993 - protein, 95 aa, Zea mays
  Clone ID: MRT4577_147726C.1.pep
VVAAIFPAAHSSALPHALTEKDQQNVVIRENREAQLLGDAGKLSLDGQQGNNVVQVAVLGSSSTVGASYLQNGDKGGGLLVAEELGRCGSSDVGQ

SEQ ID NO: 236994 - protein, 180 aa, Zea mays
  unsure (1)..(180): unsure at all Xaa locations
  Clone ID: MRT4577_147727C.1.pep
DRLLAQTVEDGSRCXLMPWLXQPSAYDIRTVPVESLPPNRYTKEQRMLRXLSAELLSRPELHXIATIFASLDVQHIITWVPSVNDYVVKVVDAQCDADLFLSDSTHICXFTEDDLIRRTRHYILILDHLAITHLSYGIEMSLAVDSKKVVYDDXTRSILLVNNEEQRHAVRSCVSVCHIE

SEQ ID NO: 236995 - protein, 58 aa, Zea mays
  Clone ID: MRT4577_147728C.1.pep
RTRASMESAATAATLYTAGRGIKDIVNHMSHVCMITETKDALKLWKKRALLTQNIKVK

SEQ ID NO: 236996 - protein, 48 aa, Zea mays
  Clone ID: MRT4577_147729C.1.pep
DLVHGNVVVHPVEEQDVDDHYVECYVVIARGSLQLERDLATVDHLSTD

SEQ ID NO: 236997 - protein, 93 aa, Zea mays
  Clone ID: MRT4577_14772C.1.pep
PFFFTETSRCSLYYYCRVGAIDFASDVQSTLRLSLTTLRQASRMRTRRRYTARLHPCPPVCTFPLRSKTLRRLLHFSERMVRIFLFTCLVLFP

SEQ ID NO: 236998 - protein, 41 aa, Zea mays
  Clone ID: MRT4577_147730C.1.pep
LCLRMAWQPDESHEHKLAGIHTGVDNGPIRTPKEHDEEKGG

SEQ ID NO: 236999 - protein, 65 aa, Zea mays
  unsure (1)..(65): unsure at all Xaa locations
  Clone ID: MRT4577_147731C.1.pep
HIDISSYRYQSVHSMHASFPFHLPPQVSQHPACALAYAATTRAKWLRIILCIXRAFHASXXAWVG

SEQ ID NO: 237000 - protein, 105 aa, Zea mays
  unsure (1)..(105): unsure at all Xaa locations
  Clone ID: MRT4577_147732C.1.pep
IRLEHGLLKDLAGIDTYSTVTXKATDDDGDFAELPVFKWATLLIPCTTELVINLVGIVPGVSCAIHRGYHSCGSLLGKLLSGIWVITHLYPYLNGLMGKRIRTRT

SEQ ID NO: 237001 - protein, 86 aa, Zea mays
  Clone ID: MRT4577_147733C.1.pep
SLNTSTFINPASSSYSYHPQGLSTIQPLNMSNLSHFSNIFQHQINTFYIYYNVKLPFYSTFKPYPTNLRSTITHYTALILCSTSFI

SEQ ID NO: 237002 - protein, 82 aa, Zea mays
  Clone ID: MRT4577_147734C.1.pep
GLRAKLQACLNLGHMCLLRETVIRSRHPPTILTLSYKCIALQGLMKVLTYHYCQELTDTPTSLLPVPLPKLRNSGNLRLEDI

SEQ ID NO: 237003 - protein, 75 aa, Zea mays
  Clone ID: MRT4577_147735C.1.pep
TPSWLALLMWRRLAPRRNLARRRPLIRSPIPPTPRGGPCGGTGSDRHASNGKRIITLVLSTCSILIAYTMFWRFA

SEQ ID NO: 237004 - protein, 72 aa, Zea mays
  Clone ID: MRT4577_147736C.1.pep
AQLAYHSGDCGGGGAPLRMCSADGLSRFSRAPYGAPVNQAFSATLPSLAPRTSCGSPSVSDHHHATVAHHVS

SEQ ID NO: 237005 - protein, 88 aa, Zea mays
  Clone ID: MRT4577_147737C.1.pep
TRTARRVSSIWCIWLVLPSPPKIGSFIYCTPGWVSIIPFPRIIMVTTHEATMLINVRSHAGLQRLQIVPTLHNFKGLGFTEKNVHLPM

SEQ ID NO: 237006 - protein, 136 aa, Zea mays
  Clone ID: MRT4577_147738C.1.pep
APPSSLTPQKKLISSLLREGGEFVLPHVMTQMETKRIPKAIKPSHQVIFQLRPKHPLHRARSATQEGRQQIIQKEEKTEGIEEHLLPPQAILRSYPPLDLYCGCSRSRVISPMSYGCDSGIRGSHPRHWCDGSAVA

SEQ ID NO: 237007 - protein, 124 aa, Zea mays
  Clone ID: MRT4577_147739C.1.pep
MESYREELSIFSKEVIRFGNLCKDPIWHNLGRYFDKYASEKLATDNTPHDHSKESMEAIVQQLINLAQNTSADEELLSDLGTDVKDECTKFGLGDNVKVHNVCSPHRLEPCEGSAWRFVEACCS

SEQ ID NO: 237008 - protein, 126 aa, Zea mays
  Clone ID: MRT4577_14773C.1.pep
MQQGDGTEAQVTWEDQQNINRFGRLNNRLHELQDEIKLAKETNENLDDAGNELILSDEDVVRFQIGEVFAHMPRDDVETRLEQMKEDAAKKLERLEEEKESVLAQMAELKKILYGKFKDAINLEED

SEQ ID NO: 237009 - protein, 195 aa, Zea mays
  Clone ID: MRT4577_147740C.1.pep
RFQVPSANARQSLRQPAHDALASSGRHESQQVLCLDARGRRRRPPVVLLRRQSSLLLLLASSRCCGRWGRREGRRARAMRRGRCRLPWPEGDLEQQAVFGWQVVVVPAVAAVELAQDDARAPAAAGVMSSCRAGRLDSAAATCDCEEFPVECVVVPECLASSFWRGMPYACFRIAYVRCFSCPSTNVLPTCVIEV

SEQ ID NO: 237010 - protein, 128 aa, Zea mays
  Clone ID: MRT4577_147741C.1.pep
VSCRSCAAPPQAPPASTAGREKELAIPSVAPPASTAGRRRSLPSPPSWAPLANIIKWVSAPLQAGSNVGVFVFPPALPRRPGHSPTCAGDDDTTPQPLRSTILGRTNAGSDRQRRRERGKGDEATWRT

SEQ ID NO: 237011 - protein, 47 aa, Zea mays
  unsure (1)..(47): unsure at all Xaa locations
  Clone ID: MRT4577_147742C.1.pep
SXGXXTFXKXXPXVXPCDEVAYHGMXRAWXYVXXFCQSXSSAPSCVA

SEQ ID NO: 237012 - protein, 73 aa, Zea mays
  Clone ID: MRT4577_147743C.1.pep
INASVTFFLIPLISILVIVLMLLIALVLLLLVLVLIMLVLVLFPLTAVLVSLVTLLYLILVLVLLAPLITITT

SEQ ID NO: 237013 - protein, 975 aa, Zea mays
  unsure (1)..(975): unsure at all Xaa locations
  Clone ID: MRT4577_147744C.1.pep
MDVSALCPGGWSPSSIPHPARSLPLPTPLSTSPSPVTTLVLVTTSLSSTPSATGSSLSRRLHSQDGRSKAQRWCGDSSAGGSLPSPRSIKDAAPTSSVCAASPSPSASHCAASPSPAALPVDEEGWQVVGRRQRSRGVHLPRRGSRVDLRGRCYNCLSTSHLVASCRRPTQCLQCFSFGHRGAKCSSLPVEAQKRTVWQRLGYVKTRPPVRQETSQRAPVWSRFPVRPPVWQRLSNMDMVPSPEGKFQEPPRSKVSVWKRLAASHDHATSEANAEEDKMSPRPMRKKRRSKHEKGTVAHDLGPTQACPPPSPHLDSFSSEVARPPSASSCVLDFSEVLAREEIALRRALFVSVAGTRPGVSGSDVLKEVRHCFGVKLEDMKIHQTYPEDFLLFLPDEDTTTKVLNEGRPLRGPRFSLMLKRWSRFAHASSSSMAELVDVKLIGIPQHAWCRSTVEHLLRDSCWVEALHSETMEMRDFSALVVKAWCFHPEKLVRKMDLHILEAGIDDQEKRFLTYKISIDILPPKTLQLSSATPPPPPPPPSGREPDDDDPDDQDPQQWRRPVPVDLRQPVQLRLGPRLPLGRAHAVNVPGGDPRVEETAPGVEETTGRYEDQLLLSTGAKEILSQPPDPYDETITLDGPLGSIGPSSPHHNSLDEPLEMTNLNSPHQLSPILKDTVIGTLGLKYLSSPPHDQPEATLERFVSGSPHKITTDSEAPPCVSYSSVTFGKKQTATTLKVYTRKMPRERGYQDTEVVQETKMQNISYLTILSMLGSNFSEYIFFPSVGVSGGILVAWRHNLKSTGQSRIDNHRNDEKLLFMQELRDIRTACLGPWMLAGDFNLIYRTTDKNTNHFNRAMMNRFKRLIEDLALKEIPLHGRQYTWSNQQVNPVLVKLDRVFCSVDWKILFPNVHLQSTASQDSDHCPLILDLXDNRTGRRRFHFEAFWTKLDDFQDTVVDVWNSVQATTCPFITLDRKL

SEQ ID NO: 237014 - protein, 96 aa, Zea mays
  Clone ID: MRT4577_147745C.1.pep
SHSINNRTRYEMVCAPVVLPHSVGPPETQITVPASHHSLLEELNRDGDQAIQSASTVDPSSFPGQADLWSIHQPSLAGSTRGLHIFFQRLGLNRGT

SEQ ID NO: 237015 - protein, 89 aa, Zea mays
  Clone ID: MRT4577_147746C.1.pep
VLNLSTGPWRETSPAPRLRMANGLPDPRCVVLMADTARSLDKSVEAVLFDCYDFMCDGDMLSGWVPSTNERRRNLGSNLIFVSNDSRPV

SEQ ID NO: 237016 - protein, 78 aa, Zea mays
  Clone ID: MRT4577_147747C.1.pep
PADVCARFSAPVDNLYFAGEAASAEHSGSVHGAYSSGIAAAEECRKRLLTLKGIPDLVQVAAWEEMAGAVAPLQICRT

SEQ ID NO: 237017 - protein, 113 aa, Zea mays
  unsure (1)..(113): unsure at all Xaa locations
  Clone ID: MRT4577_147748C.1.pep
PFTYHLGXPTSRDVTTTRGELVTFXRDMCLMRSMEIGADSLYKAKLIRGFCQLYYGQEXAVVCMEADITRSDFIITVYRDHWTYLARGGDLVCDFYELMCRYAGCYRRNGSSM

SEQ ID NO: 237018 - protein, 44 aa, Zea mays
  Clone ID: MRT4577_147749C.1.pep
GLGCSPCNYRLTLTVMGLTHLLSLLIPLPTLFRVMCSHSNMGSA

SEQ ID NO: 237019 - protein, 126 aa, Zea mays
  Clone ID: MRT4577_14774C.1.pep
MQQGDGTEAQVTWEDQQNINRFGRLNNRLHELQDEIKLAKETNENLDDAGNELILSDEDVVRFQIGEVFAHMPRDDVETRLEQMKEDAAKKLERLEEEKESILAQMAELKKILYGKFKDAINLEED

SEQ ID NO: 237020 - protein, 326 aa, Zea mays
  unsure (1)..(326): unsure at all Xaa locations
  Clone ID: MRT4577_147750C.1.pep
MRGSPCHAACPRRSLRRCRRRPAGCRAPPRRRRRRPPPRGAHASGAAATRARGPCRPRASEGEVQQQEAEADQVVDSNMLPYCSINRKEKKSIGEMEQEFLQAMQAFYYEGKAIMSNEEFDNLKEELMWEGSSVVMLSPDEQKLLEAAMAYVSGNPIMTDDELXQLKLRLKKDGSDIVQEXGPRCSLRSRKVYSDLTVDYFKMLLLNVPAAVVALALFFFLDDFTGFEITYLLELPEPFSFIFTWFAALPLIFWVAQAITNVIVKDFLILKGPCPNCGNENLSFFGTILSVPSGGSKNSVKCASCGTELEYDSSTRLITLPEPAEA

SEQ ID NO: 237021 - protein, 107 aa, Zea mays
  Clone ID: MRT4577_147751C.1.pep
DSLGCLKGGFEMRKEIVAFPSVQQRLFTVTCSRVKRIIVRIFLFKHRMVGTLAQIIWEAVIEIMCDPFARPVGTMKIFSKQVLSILCETMVIFFFKKKTQKKKKNPN

SEQ ID NO: 237022 - protein, 122 aa, Zea mays
  unsure (1)..(122): unsure at all Xaa locations
  Clone ID: MRT4577_147752C.1.pep
MAANISNLLALIAXLIVNATNAIIKSQYSLAPRAIIAHLLPPVTSKGFQHPTKQAYRLQLAHAAITLQQPIAQLQQQSLAHLTLQTIATQQQQQQQHLPPLSQLALVNQVTYLQQQLLAYKP

SEQ ID NO: 237023 - protein, 73 aa, Zea mays
  Clone ID: MRT4577_147753C.1.pep
IQSSFIFFFLGGAKPFLPPVGILKKNLLFAWGFPFFFGGIFRKHTAPHVFFPPIFNFTEPSSSTQGKYCPWNI

SEQ ID NO: 237024 - protein, 58 aa, Zea mays
  Clone ID: MRT4577_147754C.1.pep
QCSQVSISRWLSLFIQSYIIHPRVSFIQYLSVGIGKPTIVGWQIFSFAWTCSGRRGSH

SEQ ID NO: 237025 - protein, 128 aa, Zea mays
  unsure (1)..(128): unsure at all Xaa locations
  Clone ID: MRT4577_147755C.1.pep
KGIPGRSSMTSARPSRRQXMEYSESEREESEYETEEEEEEKSPARGRGKDSEDEYEEDAEEDEEERGKSNRYSDEDEEEEEVAGGRAEKDHRGSGRKRKGIESDEEESPPRKAPTHRRKAVIDDSDED

SEQ ID NO: 237026 - protein, 47 aa, Zea mays
  unsure (1)..(47): unsure at all Xaa locations
  Clone ID: MRT4577_147756C.1.pep
MQQVVVLKISQYLPGYMVIVVAANNHQGPVXRVDARVGERVGRAGNS

SEQ ID NO: 237027 - protein, 77 aa, Zea mays
  Clone ID: MRT4577_147757C.1.pep
RASRLLVQQSGSRSGEGRMRLLLKAKKRVSRLLPTLFFRGGAREYHVVLLAHRRMEEAEVLLHALNLAVLVEHGEKV

SEQ ID NO: 237028 - protein, 112 aa, Zea mays
  unsure (1)..(112): unsure at all Xaa locations
  Clone ID: MRT4577_147758C.1.pep
FKLSKGAFSLIKKDFSKXKQIGDNMNLLEKXKGSPEVGLCNKNFGFWGANFGPEQAGVLFQKLGALGFAPKASXFXIFIFHTPKERKLKFAQVIFPEGFFRQIKPGVFFFFA

SEQ ID NO: 237029 - protein, 218 aa, Zea mays
  unsure (1)..(218): unsure at all Xaa locations
  Clone ID: MRT4577_147759C.1.pep
GAPDPPRTPTQSHEPGRARGEPCSRRACPFPLPPYGHRADSPARRPRGATGDRRHSRPFPSAGGSRGHIRLSEARLYLDXSIISALRTPISWVMSSIMNGTDSYRATTGLXATYHRRTKEGGTLQMELIRFLNAXGAFCTGADRHVLPAEATRAAMLMRVNTLLQGYSGIRFXILEAIAKLLNANVTPCLPLRCTITAXGELVPLYYIDVLITDRQNF

SEQ ID NO: 237030 - protein, 59 aa, Zea mays
  Clone ID: MRT4577_14775C.1.pep
MQQGDSTEAQVTWEDQQNINRFGRLNNRLHELQDEIKLAKLQWEHCKRSDWRRVEGRSR

SEQ ID NO: 237031 - protein, 80 aa, Zea mays
  Clone ID: MRT4577_147760C.1.pep
FLKRRCFVCYSAAHLRRSTDCCYYGPRCVSFNLLNCIHLCSEGLLCGAKFAAVYSRAADTPMIVQCLYPTVGVRCFREVA

SEQ ID NO: 237032 - protein, 165 aa, Zea mays
  unsure (1)..(165): unsure at all Xaa locations
  Clone ID: MRT4577_147761C.1.pep
LCSKLQEQPEGYXILRNQISSIPIGTWSQHTGRASTRQLRTSGLSAPLITCLDFLLEDRISSIPIVDDNGSLLDVYSLSDIMALAKNDVYACIELEQLTVENALELQYQVNGRRQCHTCLSTSTLLEVLDQLSVPGVRRLVVIEPMTRFVQGIISLRDAITFLLG

SEQ ID NO: 237033 - protein, 69 aa, Zea mays
  Clone ID: MRT4577_147762C.1.pep
ARSVFPSAERLGVETGSGWRAVFFSILTKNLDQKWVLETLVDALSWIFQLQKHRITVQNFQLLSIYLVK

SEQ ID NO: 237034 - protein, 87 aa, Zea mays
  Clone ID: MRT4577_147763C.1.pep
MQAALKFHSDSQTRLQGNSGNLHIQHWLFLTGQTFEFSQEVARTWKVEAMPTFVLVKDGKEVGRVIGAKKDELERKIRMFVTSSSSS

SEQ ID NO: 237035 - protein, 135 aa, Zea mays
  unsure (1)..(135): unsure at all Xaa locations
  Clone ID: MRT4577_147764C.1.pep
MGSFFSTLVTPPPPAADDPNCAVVAAHSKATYDEQWAAHKSSSKLMVIDFSASWCGPCRFIEPAFKELASRFTDAIFIKVDVDELAEVARTWKVEAMPTFVLVKDGKEVGRVIGAKKDELERKIXVRHVIFLVLT

SEQ ID NO: 237036 - protein, 33 aa, Zea mays
  Clone ID: MRT4577_147765C.1.pep
LKLLPMQLALPHNRLRVVLQCPSENHLAAADPA

SEQ ID NO: 237037 - protein, 84 aa, Zea mays
  Clone ID: MRT4577_147766C.1.pep
KSSPPRKSPPKSFFPPFKNRGPHNVGAAHKNCVVWNPKFFLFFFPPKGSLEANFPAPWLKTGCSNSVWPFHASNKKREGFPCFL

SEQ ID NO: 237038 - protein, 52 aa, Zea mays
  Clone ID: MRT4577_147767C.1.pep
MANSASGMALTDNCKLNFKKLRSKRSFRFITFKINEQTQQVVVDTLGQPGHT

SEQ ID NO: 237039 - protein, 50 aa, Zea mays
  Clone ID: MRT4577_147768C.1.pep
PGMIIINLDLKKVGNGRYLKTTAFGHFWKCDPYFPWEVVKPLKTEKPSFA

SEQ ID NO: 237040 - protein, 99 aa, Zea mays
  Clone ID: MRT4577_147769C.1.pep
GQKAPDGIPHLRLGWVPICTCIQESDEPVKVQSKPSPTPKCICMICCFLELCPGDGFNPELCPAQLGINDLLYPMDPFPREEGASLVWRSNPMPVFCCC

SEQ ID NO: 237041 - protein, 39 aa, Zea mays
  Clone ID: MRT4577_14776C.1.pep
PVDAQLSRYRAAGACSFTAWSHWATYDCGDCPCDSTHLG

SEQ ID NO: 237042 - protein, 54 aa, Zea mays
  Clone ID: MRT4577_147770C.1.pep
RLRECVGDGSYKPNETTLSLMQCGTDVSLSRTTYIMVVPILMRVRVLYICEFGY

SEQ ID NO: 237043 - protein, 82 aa, Zea mays
  Clone ID: MRT4577_147771C.1.pep
THAYETLTRKPRFLIEPQFTHNDLVFYKMRDGSYISPDEQHLIKHPTLSYYITICDQHIMESVIDQTLTPFSALQTNTHYHQ

SEQ ID NO: 237044 - protein, 101 aa, Zea mays
  Clone ID: MRT4577_147772C.1.pep
YVFCPHPCSPLPCPRGRGPRGWGPIPLAVETMPTDCPISPRPRWLREGPACMTLVPRSAKQGLGSTSTTVRPSLTQLRTKASPGACNPLSWVFKYFVHTYV

SEQ ID NO: 237045 - protein, 50 aa, Zea mays
  Clone ID: MRT4577_147773C.1.pep
VLTHYSVIQHSTTNTAGNDKTGSIKLGLLVQLKFQINNNVLILKNYLLYI

SEQ ID NO: 237046 - protein, 36 aa, Zea mays
  Clone ID: MRT4577_147774C.1.pep
ALGRSITGVTVFLLVLWVVGSVVTWIVGLVFGAAKS

SEQ ID NO: 237047 - protein, 135 aa, Zea mays
  Clone ID: MRT4577_147775C.1.pep
MVAISAHLIATLPSLPTLRPCPRRLQPSAFAASEAPHRAPAPGVALRGCSRRCSPSVRRFHGFQNAISFGKEHNRQALFASGRGSPSSSDDGSSSPDGPPVLTILAGVTVFLLVLWVVGSVVTWIVGLVFGAAKS

SEQ ID NO: 237048 - protein, 601 aa, Zea mays
  Clone ID: MRT4577_147776C.1.pep
TWFHWNVFLVILLCHDQCTALFSSKERQGFQSEVVRLAHSEMKHLVPLDVSSLITFAGNAGPPLELCDGDPGTLSVAVWNGFPDDITLESLSLRLSASSSADEGIKAIKSSDSHVLVPGRNIISFDIPRQKPGSYVLGALTGQIGKLSFRSHGFSQDGPVETDEFMSFEKPTRPVLKVRKPRALVDITPAVSSALLMNELQWIGLIVKPIDYSLKGGILHIDAGAELKIEESQMIEIEIYVSDMECANSANSSIKAGKVEKVPIENGKIELPDWASDVTTLVWFPVRAIDDTIARGESLVSQKQSVVDGMRMIALKLEFGVFRNQVFERTIAVHFTNPFHVSTRVVDKCNDGALLLQVILSSGVKATLHVKDVRLDLQSGFDHLGKGDGRPALSLFPLVIAPSSKAGILFMLRLSGTKDVDDAENADSTLNITYGISGDRKTGAHSPIPVKSGDSEELVFKIALRLKRPVLDPCVAVGFLPFSTDCLRVGQLVNMRWRVERLKTPEDASISIDEILYQVEANPQNWMVAGRKCGHVSLSNEQGSRMEITVTCVPLVSGYVHPPQLDLPEVGEANISCNPAGPHLVCVLPPAISTSYCIPAI

SEQ ID NO: 237049 - protein, 200 aa, Zea mays
  Clone ID: MRT4577_147777C.1.pep
ATLHVKDVRLDLQSGFDHLGKGDGRPALSLFPLVIAPSSKAGILFMLRLSGTKDVDDAENADSTLNITYGISGDRKTGAHSPIPVKSGDSEELVFKIALRLKRPVLDPCVAVGFLPFSTDCLRVGQLVNMRWRVERLKTPEDASISIDEILYQVEANPQNWMVAGRKCGHVSLSNEQGKNHGTRCFNPCLWQKMTTSNPI

SEQ ID NO: 237050 - protein, 207 aa, Zea mays
  Clone ID: MRT4577_147778C.1.pep
MAMQPTKKKRVASLPQDIIELVLVRLPVSNLLRCRVVCKQWDGIIRDPQFTMAHLRHAQPRPLLFFQRGETYGKSFPSEAVLFDEAWLPSTRGVPVIEPDDFMCASCNGLVCLYSDKSTIKIANLATGESMHLAKPVKYKHSMDDHSSFYSFGFSPATNEYKVLHFLPGEERHHVGGSFSVIQVYTLGDEKWRDVRTETALSLCVKQ

SEQ ID NO: 237051 - protein, 100 aa, Zea mays
  unsure (1)..(100): unsure at all Xaa locations
  Clone ID: MRT4577_147779C.1.pep
GSKEEVQGFGNIKFFRGQGKKIXVLXGPREGGGIVGFFKKEVGPGLKGFXSXEDGVGVFDEKKFLIVGFLGEFSGGEFFCFFGVGEKLKKKKSPPKNNFV

SEQ ID NO: 237052 - protein, 82 aa, Zea mays
  unsure (1)..(82): unsure at all Xaa locations
  Clone ID: MRT4577_14777C.1.pep
HNTXSSSSISPIIFRVNSXXXGLDPNQQWRGPPXPHLLLNVFIFPLPISASPLCSAYFFFFSSRTPPNLPIPRSSINTFIIA

SEQ ID NO: 237053 - protein, 124 aa, Zea mays
  unsure (1)..(124): unsure at all Xaa locations
  Clone ID: MRT4577_147780C.1.pep
LLFSMQTASGLRAVISGRAQHATEEVRRRFYKTWCKSKTKAMTKDALKYENDAGKKEIQLQLEKMNKYASVLRDIGHTQIRKMTGLXQKKAHLMGNQASGGTLADKADCGFNIFGREAPGDGCL

SEQ ID NO: 237054 - protein, 83 aa, Zea mays
  Clone ID: MRT4577_147781C.1.pep
SVRHHPRIFILPGLQEHGSLWEESTLSTTSSNSRSTFLEQKGLPGGSRSSKERTVIICLPQGIRGLTSSSYLNLFTMHARFIN

SEQ ID NO: 237055 - protein, 45 aa, Zea mays
  Clone ID: MRT4577_147782C.1.pep
ASSLMQSSRHVSSLVVSTTPLMYVNHVKVSQCKRPLYDCSNLISH

SEQ ID NO: 237056 - protein, 375 aa, Zea mays
  Clone ID: MRT4577_147783C.1.pep
MGQQEKEVIPLMTPYKMGQLELSHRVVLAPMTRCRAIGDVPQPHAAVYYSQRASRGGVLITEGTGVSATAQGFPGSPGIWTQEQVAAWKPIVDAVHRKGALFFCQIAHVGRASTNDFQPDGQAPVSSTDAQLPPDAESGTVFSRPRRLRADEIPGIVDDFRRAARNAIEAGFDGVEIHGAHGFLLEQFMKDGANDRADEYGGSVENRCRFVVEVVDALVREVGASRVGIRLSPFADYLDCADSNPLALGHYMVEQLNRHEGFLYCHMVEPRMAIVDDRRQIPHRLLPFKAAFNGTFIAAGGYDREEGNKVVAEGYADLVAYGRLFLANPDLPKRFEVDEILNKYDRSTFYTQDPVVGYTDYPFLREDSEDLAAQA

SEQ ID NO: 237057 - protein, 181 aa, Zea mays
  unsure (1)..(181): unsure at all Xaa locations
  Clone ID: MRT4577_147784C.1.pep
EYAKFADEIDQKVQIVQDDDLVANLPRVAKAINEKPCNLLLLKVNDMGSVADSIQSVWMSXRRXWGVMASFMSGEPQDTFSGDVXLGLFTGQIKMGSLCRSELHGQXSTLVRIEEDXGDASVFAGAKFRAPVXEPYLQKKIISMFFCVDIVAHFCLVLQCLDGGNLCMVVFDHRSTQVILS

SEQ ID NO: 237058 - protein, 465 aa, Zea mays
  Clone ID: MRT4577_147785C.1.pep
MGGCLSQEEHRLQSRPAEAAGADGLRKSKSDSKAVASVLAPPKDVVDLQVEGYGNVNIFTYDELRAATKNFRPDQILGEGGFGVVYKGVIDENVRAGFPSRQVAVKELNPEGFQGDKEWLAEVNYLGQLSHPNLVELIGYCCEGSHRLLVYEYMACGSLEKHLFRRVCLNMPWSTRMKIALGAARGLEYLHGAERSIIYRDFKTSNILLDADYNAKLSDFGLARTGPSGDQTHVSTRVMGTYGYAAPEYVMTGHLTARSDVYGFGVVLLEMIIGRRAVDKSRPSREHNLVDWARPLLVHNRKLFRIIDPRMEGQYSTKAATEVASLAYRCLSQNPKGRPTMSQVVETFEAVQNMPECQDILLQNSITGAVTLYEVPKEPADRVELEKAKQEPAVKSAAMPPMNGKPVPQSRRTRPGNGRSKSEPSLECKMYIPSPDSDGHQLGLEAVASPDGSIRDPPDEDLYKI

SEQ ID NO: 237059 - protein, 45 aa, Zea mays
  Clone ID: MRT4577_147786C.1.pep
HATHALRTATAITARATTARVLLCHAGAGASAGVVAATSCATRVI

SEQ ID NO: 237060 - protein, 54 aa, Zea mays
  Clone ID: MRT4577_147787C.1.pep
PTRPKRRRLHRLSKDFGWNLHRVDATEAFFCKSIGTLSDAYAFSVATHNLPLIF

SEQ ID NO: 237061 - protein, 64 aa, Zea mays
  Clone ID: MRT4577_147788C.1.pep
QKPTQPKWMCMYQSLNTYFFNSSFEIQCFKVWNLLGANILEPSNLIFPITKLNSTNNILATLKP

SEQ ID NO: 237062 - protein, 121 aa, Zea mays
  unsure (1)..(121): unsure at all Xaa locations
  Clone ID: MRT4577_147789C.1.pep
MPLIFLRVAHPRNSIPYNRVSAFISRFYLHQGQXLPIIQLGGVCHATFLPQPQLWPFNVRVAPTAGXVFQLPHFLPFTHRVFTVRAVFYQLPIIDGALPYIYYGLQPVLKVPCRILETSHQ

SEQ ID NO: 237063 - protein, 64 aa, Zea mays
  Clone ID: MRT4577_14778C.1.pep
FFFFFYSPSRRLHHHTSWLMSSLLLHHSMTCGDLLLELLFLCFISPCPGDGAIAIPTETINSQV

SEQ ID NO: 237064 - protein, 74 aa, Zea mays
  Clone ID: MRT4577_147790C.1.pep
SEQTSEGSSLVVRTGATNHLVRCVSLVNLELACRSGCSICDSEFSNFYVSPRLLAFVVWNCVFNSVFARCTFFY

SEQ ID NO: 237065 - protein, 119 aa, Zea mays
  Clone ID: MRT4577_147791C.1.pep
FFFASYAAASASSSTSTSATSSSSACPSVSCLRLCIGRRLLTYSRYVFLLRHRLLLLVGFSYLPLHLVCLRPRCVFLCLPLPARTHRLHGGVWDSLSDPVVRLAHAPEMPDGKRTQQSA

SEQ ID NO: 237066 - protein, 163 aa, Zea mays
  unsure (1)..(163): unsure at all Xaa locations
  Clone ID: MRT4577_147792C.1.pep
NPETGPSPPHPPXGGGRGSGPKQPSLERPRPRPHNGATDNGPPVVPRKGPVPNQGAPGLHPPXPGPPPPAPEXTKPLPVAPEPQPPGXAPPRCPPGGPGPTRGTPPSRPPRGPPPGKRGSNLPPPPPPPRGPKTGGTGTGIWGSPXGPGPRAPGKPPGPPGTA

SEQ ID NO: 237067 - protein, 98 aa, Zea mays
  Clone ID: MRT4577_147793C.1.pep
MVVSTFNGPGIGIGFGVGCGFGVGWGFGGMPLNMFGLGIGGGCGFGLGLGWGFGNAFGCQYRSSRVQFQGIEFQKKAEGDDAPKVVSPELAQKSRPYG

SEQ ID NO: 237068 - protein, 134 aa, Zea mays
  Clone ID: MRT4577_147794C.1.pep
MDPGLGSVSEPKFSFQAPRSDLDVALSDFSLLIWFVEFFSFCLMRYCGAGFGVGCGFGVGWGFGGMPLNMFGLGIGGGCGFGLGLGWGFGNAFGCQYRSSRVQFQGIEFQKKAEGDDAPKVVSPELAQKSRPYG

SEQ ID NO: 237069 - protein, 42 aa, Zea mays
  Clone ID: MRT4577_147795C.1.pep
GLVRLHRIAPGIVPVNQSLYKLEKQSGSESFRPTNPTQTNKA

SEQ ID NO: 237070 - protein, 76 aa, Zea mays
  Clone ID: MRT4577_147796C.1.pep
SVCIMLHLFCDSPKAACERIGDTHTDTCTPLQSSLSRRMMDPCLKCIVARPVRSNACYLSEPRVPYLLQGTPHRRS

SEQ ID NO: 237071 - protein, 74 aa, Zea mays
  Clone ID: MRT4577_147797C.1.pep
QFSSPSEEWAPAMDPPQKWSRSLSRESFRRSLRCGLYGRPTSVIQDAPVCRSFGSEKQGGHHSGGFSLARSARG

SEQ ID NO: 237072 - protein, 98 aa, Zea mays
  unsure (1)..(98): unsure at all Xaa locations
  Clone ID: MRT4577_147798C.1.pep
ITRTWNRHLQTRIQGISILQRASFXIISKITYAFKIHWFYIITTPNPVFSHLAGNTSVWNAIFPDVLQAFFNTTPEMDKLFRFKMLDSXIFFAPFSFN

SEQ ID NO: 237073 - protein, 102 aa, Zea mays
  Clone ID: MRT4577_147799C.1.pep
MSMLRLQKRLASSVLRCGKKKVWLDPNEPTDRPAALARHQVRIPIADRRILRLPVPVHPRARGRRNPLARREGRLCRARSGKGPADARSPRFSGVRDLEMPH

SEQ ID NO: 237074 - protein, 178 aa, Zea mays
  unsure (1)..(178): unsure at all Xaa locations
  Clone ID: MRT4577_14779C.1.pep
RRFGPAMPFAHRLLHAASPDLVLGLVPCAVGXTRIWMWAKGEPLYEAAVARGRAAVAAGGGTLGAVLWFQGESDTIELDDATAYGGRMERLVNDFRADLGMPNLLVIQVGLASGEGNYTDIVREAQRNIKLPNVVLVDAIGLPLRDDQLHLSTEAQLRLGDMLGQAFLKFNSSMDSRQ

SEQ ID NO: 237075 - protein, 83 aa, Zea mays
  Clone ID: MRT4577_1477C.1.pep
VSVWLVFHSVRIVLSSKQLSLIMIVKEILEKAYINAIVIFAPRHNVFHLISHTPFGHYAFVLFLLVSKQITSQQACDKYAQPM

SEQ ID NO: 237076 - protein, 93 aa, Zea mays
  Clone ID: MRT4577_147800C.1.pep
PRRPGPMGPPTMGVLGGPQADPVAPVCTAAAAIQREKNPVEPPPPPGLQPQQAAGNKRWWFRDSDPPPLLCLKKKKKKKKKKKKKKKQKKKKK

SEQ ID NO: 237077 - protein, 78 aa, Zea mays
  Clone ID: MRT4577_147801C.1.pep
GPTKRWGFGFSLVQPPPRLKYLPQFFRVLGIPSKKWFLFTPQIPHPPFFKTGKKVETPMEGGYFKKPFFFPQRPLALK

SEQ ID NO: 237078 - protein, 74 aa, Zea mays
  Clone ID: MRT4577_147802C.1.pep
TQNIQPSKKINNKLKVEIYQKDFLEHETHKIDSDDANVQVTDHDLVATDRYCYRRNTMCSMTNLMNVMENMIVD

SEQ ID NO: 237079 - protein, 434 aa, Zea mays
  Clone ID: MRT4577_147803C.1.pep
DAWAPMMRRTVMGTYVIAKIKKEDGNIYVLLNGMGATPEGNVPFLDLFDINTGSKERIWESDREKYYETVVALMSDKTDGELLLDQLKILTSKESKTENTQYYLQTWPEKNQVKITNFPHPYPQLASLYKEMIRYQRKDGVQLTANLYLPPGYDSSKDGPLPCLVWSYPGEFKSKDAAGQVRGSPNEFPGIGATSPLLWLARGFVILSGPTIPIIGEGDEEANDRYVEQLVTSAEAAVEEVVKRGVAHPDKIAVGGHSYGAFMTANLLAHAPHLFCCGIARSGAYNRTLTPFGFQNEDRTLWEATNTYVEMSPFMSANKIKKPILLIHGEQDNNSGTLTMQSDRFFNALKGHGALSRLVILPFESHGYSARESIMHVLWETDRWLQNYCVNGTSKVDSVSEADSKNKTLSASGGSAAREGLNPEELSSLPRSLL

SEQ ID NO: 237080 - protein, 71 aa, Zea mays
  unsure (1)..(71): unsure at all Xaa locations
  Clone ID: MRT4577_147804C.1.pep
KKAKGKGLSHFFHKFGGNVXGIKPIFQEDXWFPPGKVLVGGPPGFFFWAVPLSGILGGGALFVLNTRALSG

SEQ ID NO: 237081 - protein, 59 aa, Zea mays
  Clone ID: MRT4577_147805C.1.pep
TIFKRGFPFLLRNQWGGGAGFFFHPHFIPGYKGSQRGKGGLAKFSPGGKTGAGAPFYLK

SEQ ID NO: 237082 - protein, 152 aa, Zea mays
  Clone ID: MRT4577_147806C.1.pep
MSCTRTAPLHSPRVQDGSTLVAGTALIGLSSGFIFAAAVSVTSELFGPNSVGVNHNILITNIPLGSLLYGQIAAKVYDANGQKMTVVDNRTGIVDTMIVCIGVKCYSTTFVVWACITFLGLASSIVLFIRTKPAYATAASRSSCKHLHQVSS

SEQ ID NO: 237083 - protein, 103 aa, Zea mays
  unsure (1)..(103): unsure at all Xaa locations
  Clone ID: MRT4577_147807C.1.pep
EAHALTLFLGGAWRANICCWHGNPDATFGGSTFGNITLKRGLQNXGAATVXTTVESFLLRFXTSGQAKGTYRLTGVSEXEALXMDIVKTSGLVYTVYATAVDP

SEQ ID NO: 237084 - protein, 162 aa, Zea mays
  Clone ID: MRT4577_147808C.1.pep
TVGSSTTLPLPPAFRRSTISSERMARRAHHAASDMTYQHRVTFRPAAALCVTGVADSGAGGQKAFRLFSFLFASFSRADELNEVCLAGVGYRSDAHFLLGSTPSFSFYVSLDGVFLHYSVTHTEHRRQYQESREPKSSADAPPPRLSCYFHKNEMFWLFQAR

SEQ ID NO: 237085 - protein, 33 aa, Zea mays
  Clone ID: MRT4577_147809C.1.pep
TGSMNSCDQLQSTQADSISGTHSTIREIPNPFG

SEQ ID NO: 237086 - protein, 303 aa, Zea mays
  Clone ID: MRT4577_14780C.1.pep
MRALLADGGMALAMAPEVNESSGGAALSQGLLWWASECHGVLYSLAVMLPSLAFVGFLAWQARRSFRRISYGRSHVVVVAYYALLWVVAVLNLLWCFLQAWQCMPDRAFSWNVLSLFTKSGMLFLEVSLIAFLLQGNDASGFESLARTFVISGAVVAADALLKTIYVFGFGVPLFIDADQGTGGKWGLWILHKLVLTGVYGLIVFMHHSRWRNRLPAKPAYYNYVCAMLLLNGVSLFGCFLVASGAGFGLWLYNLTIVCYHSLYLPLLYVTFLADFFQEEDMLLESVYYSEMKDAGFFDADWD

SEQ ID NO: 237087 - protein, 165 aa, Zea mays
  Clone ID: MRT4577_147810C.1.pep
RWAAWQSVTLHTNLGDIKCEVFCDQVPRTAENFLALCGSGYYDGTVFHRNIKGFMVQGGDPTGTGKGGSSIWGAKFADELREPLKHNARGIMSMANSGPNTNGSQFFITYAKQPHLNGHYTVFAKVIHGFEVLDLMEKAQTGPGDRPLAEIRLNRVTIHANPLAV

SEQ ID NO: 237088 - protein, 235 aa, Zea mays
  Clone ID: MRT4577_147811C.1.pep
AAKRDSEGPGRAPEAHRPPTRCVPLTKSPLTSLAARVLPPAARSHGEPSLPPPDLCAILSYSYPVLTASTRGWLWQPVTLHTNLGDIKCEVFCDQVPRTAENFLALCASGYYDGTVFHRNIKGFMIQGGDPTGSGKGGSSIWGTKFADEFRESLKHNARGIMSMANNGPNTNGSQFFITYAKQPHLNGHYTVFAKVIHGFEVLDLMEKAQTGPGDRPLAEIRLNRVTIHANPLAL

SEQ ID NO: 237089 - protein, 211 aa, Zea mays
  unsure (1)..(211): unsure at all Xaa locations
  Clone ID: MRT4577_147812C.1.pep
MAKKKKKKKKKKKKKKKKKKKKKKKKKKKKKNTARSFIRFPKKGPLTLGTASVRLIPGGSFISAKGGNRGPDPEPKMTESLGGKKPGRATIKEMPGGQDGPPPGGFAPGGFPRRIPTWGPRATAIFLTTLGVFAYGMNQAGQGNKVRRGFKKKKIVARRVILPMLQAKKDERFVKKGKKGLEEEARILKDVPGXKAGKSVNNSGKGMLPVT

SEQ ID NO: 237090 - protein, 113 aa, Zea mays
  Clone ID: MRT4577_147813C.1.pep
PGCLLWGYALWFSMKGLRGKRGWGLVVLGLFLGCLAPGCVSFLVPFFWLVVSGSGGFPLFSPPPPPRFFKGVLALVPWLVKFAKKKKKKKKKKKKKKKKQKKKKKKKIKKSLS

SEQ ID NO: 237091 - protein, 54 aa, Zea mays
  Clone ID: MRT4577_147814C.1.pep
RRSKPYDDPTNLLRPSFLVPILVTYWNIKHFKLQVPGNHRPGQVTFFFASQLIF

SEQ ID NO: 237092 - protein, 281 aa, Zea mays
  Clone ID: MRT4577_147815C.1.pep
MMHAKSESDVTSLAASSPPRSPKRGVAAAGTGGGGGGYYVQSPSRESHDGGGGGRKVLNDKGWPECSVIEEEGPYEGLGAGDSGLSRRCQIVLGFLTFVLLFTVFCLVIWGAARPYEPEVVVKSLVMDDFYAGEGTDHSGVPTKLVTTRPPPRGSVYNPATMFGIHVTSGPIRLIYSEISIAVGQVRRYYQPRKSHRTVTAVIHGEKVPLYGAGGGLTLSTSAGGGAVPLTLDFDLTSRGYVIGRLVRVTHRAHVTCPVVVDARRTKPVRFSKKACAVYKA

SEQ ID NO: 237093 - protein, 86 aa, Zea mays
  Clone ID: MRT4577_147816C.1.pep
PNHQLNIITRNFETCVLIPSNFYCNCQEIKLYNNIYSAIKKKLMTNCPCAVPSKKQRTSRRNTWAVTPGPFRTKSSPIDSVSIATI

SEQ ID NO: 237094 - protein, 260 aa, Zea mays
  unsure (1)..(260): unsure at all Xaa locations
  Clone ID: MRT4577_147817C.1.pep
AGRNRGGGXTDMMHAKSESDVTXLAASRPPRSPKRGGGAGNGGYYVQSPSRESHDGGYKSSSMQPTPVYNSPNESPSHPSYGRHSRSSSVSRFSGNLRKGAAGDRKVLNDKGWPECNVIEEEGPYEDLAGDSGLSRRCQIILGFLTFVLLFTVFCLIIWGAARPYEPEVIVKSLVMDDFYAGEGTDHSGVPTKLVTTNCSLHIAVYNPATMFGIHVTSGPIHLMYSEIPIAVGQSLVMDDFYAGEGTDHSGVPTKLVTTN

SEQ ID NO: 237095 - protein, 35 aa, Zea mays
  Clone ID: MRT4577_147818C.1.pep
KLLVLIDKPFQERHFFLTFQISIATLGHGNCSGMI

SEQ ID NO: 237096 - protein, 262 aa, Zea mays
  unsure (1)..(262): unsure at all Xaa locations
  Clone ID: MRT4577_147819C.1.pep
SCVLLLVLVLVWLGKEXRGGGSGXMMHAKSESDVTSLAASSPPRSPKRGGGGAGNGGYYVQSPSRESHDGGYKSSSMQPTPVYNSPNESPSHPSYGRHSRSSSVSRFSGNLRKGAAGDRKVLNDKGWPECNVIEEEGPYEDLAGDSGLSRRCQIILGFLTFVLLFTVFCLIIWGAARPYEPEVIVKSLVMDDFYAGEGTDHSGVPTKLVTTNCSLHIAVYNPATMFGIHVTSGPIHLMYSEIPIAVGQVYPSSVLGLFNSRF

SEQ ID NO: 237097 - protein, 42 aa, Zea mays
  Clone ID: MRT4577_14781C.1.pep
LSHIQNSLIFMILILIYSQLILQKFISWVQTNLETKLLTGLS

SEQ ID NO: 237098 - protein, 66 aa, Zea mays
  Clone ID: MRT4577_147820C.1.pep
LPMENRAAHGQCQINDAAMLAMAQQKQFYKLGWSRKKFIYAELETATRMDHETLTTKGAGESHHLR

SEQ ID NO: 237099 - protein, 63 aa, Zea mays
  Clone ID: MRT4577_147821C.1.pep
ALRKDKHCVMFTLERQRWLNAKKNATDKVQDCRCLHKIMSMTTHITLPCAELKAYPSVLKKCS

SEQ ID NO: 237100 - protein, 157 aa, Zea mays
  unsure (1)..(157): unsure at all Xaa locations
  Clone ID: MRT4577_147822C.1.pep
GHRKRNTAATLQQQCAVNIFSILMLLALSTSVANSIIFSQYXHSPIAALLPAYLXSMTVPVCDNPSLLPYXLQQALATCNLPLSPLFFQQSPGLSLVRSLIQTIKPQQLLQLELPRISPVALGHLCLYSQLPQSIPFNQLLTLNPADYVHQRHLLLF

SEQ ID NO: 237101 - protein, 66 aa, Zea mays
  Clone ID: MRT4577_147823C.1.pep
NGGPILRSKKVKNKLILGGKRVGFVFRSPALLNQKGLVKKKEIRKFLGGFYLIAKGVFKKDQCAQK

SEQ ID NO: 237102 - protein, 132 aa, Zea mays
  unsure (1)..(132): unsure at all Xaa locations
  Clone ID: MRT4577_147824C.1.pep
VRAAGEVGVKDARPAQVGDIAQXGVDDRVHREAVRAIEPRGLQCLRHRGPRHRPPELVPAAAAASVHISAASPLPRFPATHATEAPSSSPARVSDTDGARIQIPPTTPPPSTNRLLRLSDAANRAPPSRTRG

SEQ ID NO: 237103 - protein, 58 aa, Zea mays
  Clone ID: MRT4577_147825C.1.pep
KRISLDYVDIPRLSGCRGFMAIFLLSLQTGQVHRCTSSPASTVCWPSEASIPSQSQQA

SEQ ID NO: 237104 - protein, 555 aa, Zea mays
  Clone ID: MRT4577_147826C.1.pep
MARKRQAPPPPPPPPPPQEEEDESSSEESGSEEESPRLPELRRPSQAAAANNADSSDADSDSDADVQAFQMRQVPRFPTKQTHPVSHPESGAEEEEGELSESEHENPVPVVQKKAVAAAGMSKTGQERKRPASDPAPSGKAKKTKAEATPPAKAKKGEKLAPDATPAGKAKKGKTELETLAPDATPAGKAKKGKVEKTAPEATPSGKGKKGGDKLEKPAALDRSPSDSKSEKLAHFSRTWEKDDEMKILEALAAHVKSEGVLPKTDFLLASVRDRLVRKNCNYTDIYEKVRRLKERYEKLVSTGTVPSKEDELQMYNLSKTIWGEKSKEATAAITSQKGGAVTKRKKGQANKEKMDGNAKSGVAKEAAHSTANQSGDSHKGSKKGQARLSEDATTTVSPSKSKKQESRNEELDKDGGNLAKGKKGKTDKGKMDRDTDNLTPKETINENQNGDILIRSKEGEIHDDETGDANVQGVRRGFDKLQKLYSNLAFYVEEIEAHHPCGETLKRAFEFIADEKAEGLESKIKKQRVAEAKAEVRQGDVKKEVLNLLLSLVD

SEQ ID NO: 237105 - protein, 125 aa, Zea mays
  Clone ID: MRT4577_147827C.1.pep
MDIYMDRLTPKETVNANQNGGIVIRSKEGEINDEGTEGDANVQGVHRRFGELQKLYSNLAVYVEEIETHHPCGETLKRVFEFIADEKAEDLESKIKKLRVAQAKAEVRQGNIKKEVLNLMLSLVD

SEQ ID NO: 237106 - protein, 69 aa, Zea mays
  Clone ID: MRT4577_147828C.1.pep
KQISARHSASDAAYFGMFAETKQVSFRRFRAVDSRSSKARVMYVCCCPMTVDSFPFNSKGKVSLFTDAK

SEQ ID NO: 237107 - protein, 77 aa, Zea mays
  Clone ID: MRT4577_147829C.1.pep
TPSWVVSPNSFHTADPFFHFPLWLGFALGAARKKGQYFKKKKKNKKKKKKKKKKKKKKSKKKKKKKKKKLVPARAAA

SEQ ID NO: 237108 - protein, 303 aa, Zea mays
  Clone ID: MRT4577_14782C.1.pep
MRALLADGGMALAVSPEANESSGGAAVSLGPLSWASECHGVLYNLALMLPSLAFVGFLAWQARRSFRRLSYGRSHVVVVAYYALLWVVAVLNLLWCFLQAWQCMPDRAFSWNILSLFTKSGMLFLEVSLIAFLLQGNDASGFESLARTFVISGAVVAADVLLKTIYVFGFGVPLFIDTDQGTSGKWGLWILHKLVLTGVYGLIVFMHHSRWRDRLPAKPAYYNYVCVMLLLNGISLFGCFLIASGAGFGLWLYNLTTVCYHSLYLPLLYVTFLADFFQEEDMLLENVYYSEMKDAGFFDADWD

SEQ ID NO: 237109 - protein, 54 aa, Zea mays
  Clone ID: MRT4577_147830C.1.pep
SPSRNPGGDSNSAADYVGGDSGGDDGIVGGGYGRAIQNYKALGGQDPIKCIIFQ

SEQ ID NO: 237110 - protein, 79 aa, Zea mays
  unsure (1)..(79): unsure at all Xaa locations
  Clone ID: MRT4577_147831C.1.pep
LNPLSSAYKDADNFYVYGHNTHXPTTSFTLICIFGINDPLRPEINDAVEASKYTGILMRMVTGHNINTAKAIAKECGIL

SEQ ID NO: 237111 - protein, 49 aa, Zea mays
  Clone ID: MRT4577_147832C.1.pep
PVYKVDDRCYLGHSVCVNSLSCLFHLTQYFAQRFSVLEFIINNKRTYAL

SEQ ID NO: 237112 - protein, 98 aa, Zea mays
  Clone ID: MRT4577_147833C.1.pep
PQRVRLSWCDSICDKHSPEQLSSSSTRRYERLRLLRYNALPDDRENECHALGTLQSNHHTRRPPYVHLLGADTPESIHPVSMMRGITSAKDVELLVTH

SEQ ID NO: 237113 - protein, 32 aa, Zea mays
  Clone ID: MRT4577_147834C.1.pep
NPTQTMTFLFSGNHIHITNNFMADLSLIKNLG

SEQ ID NO: 237114 - protein, 105 aa, Zea mays
  unsure (1)..(105): unsure at all Xaa locations
  Clone ID: MRT4577_147835C.1.pep
DTAXRTMXXQVRAHXRVVVLPQLRRHAGGGCRERRQERRQDPDPGALLWAGRPGSSSSCAFGSQPRWCLCWFSGVVLDGTRFSIPSRAVAGVGCGCGCAVGGGGV

SEQ ID NO: 237115 - protein, 75 aa, Zea mays
  Clone ID: MRT4577_147836C.1.pep
RPCRLAPLLGMNSAGAEPRRTAAPARSPNPAGAQPPGHSRAAALFSSCLALADLDAGPSCAFFAASGAYFDCLFR

SEQ ID NO: 237116 - protein, 62 aa, Zea mays
  unsure (1)..(62): unsure at all Xaa locations
  Clone ID: MRT4577_147837C.1.pep
SRLXREKKKKKKKKKKKKKKKKRKKKKKKKKIKKKKKRRPFFFFFFWMGPNGGLLPSLGPSG

SEQ ID NO: 237117 - protein, 199 aa, Zea mays
  Clone ID: MRT4577_147838C.1.pep
EGSDTEINVPNYSDLEALILDLDLIPWDQESDFIQPEVSRFQYPESRKDLIRLEKGVCSYMNRSIMSKGAFAILYGQRTKYYIREPEVSLGRETEEVHVDIDLSKEGKANKISRRQAVIKMDDGGSFYINNTGKFSIFVNSKEVPCSKRINLMSDSLIEIRNLKFIFHVNHEAARQYIVRKRRGSSQGGITAFDWSQNP

SEQ ID NO: 237118 - protein, 61 aa, Zea mays
  Clone ID: MRT4577_147839C.1.pep
PRVRPRVRGLVGGRVGGRVTSFLTNLHVQQVFFSIARDIKHRLSETDSNPEDLTMKIKAEG

SEQ ID NO: 237119 - protein, 61 aa, Zea mays
  Clone ID: MRT4577_14783C.1.pep
GLGFFFFFPSHKHKSPTFFFSQKHHNYNPIPNFIIYRWVARSFKRVHRGAIPIGFSFQGTI

SEQ ID NO: 237120 - protein, 111 aa, Zea mays
  Clone ID: MRT4577_147840C.1.pep
VCASSTVSVALVLDGAFAHVSDAAGENRVEHVILGHGGGSDHPFIIVVLHLVASEVVVDSDVFFLSEGAICRHPAFWNAVMAHFGSLFPPFFPLGGVVGSKRVVGWRYCGV

SEQ ID NO: 237121 - protein, 103 aa, Zea mays
  Clone ID: MRT4577_147841C.1.pep
TSKITHHYSSTTLTNYLINTHTTILNLTLPPSLQHLHLLSSTPLFLFSLLLHTFSSSFFPFNLPLLTPLTIFNPSFYFLHLLSFFSLSLFISFSYLLLLQFFL

SEQ ID NO: 237122 - protein, 285 aa, Zea mays
  unsure (1)..(285): unsure at all Xaa locations
  Clone ID: MRT4577_147842C.1.pep
LCLQSNQKASGRHHTSVECLSLEALRQHREERNGTDRPPLYKHTRRATLPKRASRLVSSYCRGQSTAGRSEHSCGRAGGTWTAGTPXAPGPAVNGTXARRRRGRGGARGXDATFDTNTVILLAALFLALLLAIALNSLARFALWCGGRAAAGGGXGGGVXSVAASSCAGVRGGIKKRALRSIPVEVYVGGDAKDDEEEGAGSGDVCAICLGEFADGEKVRVLPRCGHAFHVPCVDAWLLSRGSCPTCRRPVMDAKPASASATGGRGVAQQSARRPDSDTVAVVIA

SEQ ID NO: 237123 - protein, 209 aa, Zea mays
  Clone ID: MRT4577_147843C.1.pep
MATAISFPRAPLVTPRACTPRRLVHLSAARASPPRGGGRVGRRSPTVPAVAGASSSGLAPDTSVPAWDALGGVSVLAAGTGNAVALTDLWDSAEGVAVVALLRHFGCFCCWELASVLKDAMAEFDSAGAKLIAIGVGTPEKARILADRLPFPMDSLYADPERKAYSVLGLYHGLGRTLFSPASAKIYSRLDYIKKATENYTLEGTPADL

SEQ ID NO: 237124 - protein, 205 aa, Zea mays
  Clone ID: MRT4577_147844C.1.pep
LSPGDGHLVPARAAGHSPRVHPPPACPRVGGARLSPARRRARRSPLPDGPRCSGSLLLLLRLGSGHKRAGVGRSRRRLRPRRGNRQRCGADGPVGLRRGTTVFLRDLRPVSGHTAGRPCPGLPSLPSYADAALRLRAQGVAVVALLRHFGCFCCWELASVLKDAMAEFDSAGAKLIAIGVGTPEKARILADRVCGLVLNPLYVKA

SEQ ID NO: 237125 - protein, 229 aa, Zea mays
  Clone ID: MRT4577_147845C.1.pep
VLVPEIETEVVKVISKIREAGQRARHEAGGSHSKQRRDSSTNPPVPYVAVHMRIEKDWMIHCKKWEQRSKSHEICSSKEEIIHKVSQITDLRRPVVVYLAVADSLLEDDSITSGWRVGMVAYEKKKLGVTDIYDRQPYLIKSAIDFEVCSRADVFVGNSFSTFSNLVVLSRTERLYNLGKASSCGENIGLSSYAYNVMGDDGGPQRWMTDMSDTSLQRLSYGTNNVSCH

SEQ ID NO: 237126 - protein, 61 aa, Zea mays
  Clone ID: MRT4577_147846C.1.pep
RGKHVSSWLCLMSCHTLVRWVGTSFMCLLPCSTDMLVRSIMYFSPVPYNRPPVGSFLSQYY

SEQ ID NO: 237127 - protein, 442 aa, Zea mays
  unsure (1)..(442): unsure at all Xaa locations
  Clone ID: MRT4577_147847C.1.pep
MNILLELKHLKLFSMPARPVICKGLLIVIALILLRAIVSPFLAIDSSEKKEFYESTAPDLLPRIRRDKFLEVPQIIWGLNNQKIAFARACLTARFLNRSLLMPSLSASLFYKEVDLLQPVSFDKVFDFNKFNARCHGFVRLAQYSEVSNRTEPFKLQKGTGRRWTADRDLDXLQQSIGSNVDDSEVIEIVGKNPFLWPDHWPVKDYAKIFDCLVLVPEIETEVVNVISKIREAGQRARHEAGSSHSKQRRDSSTNPPVPYVAVHMRIEKDWMIHCKKWEQRSKSHEICSSKEEIIHKVSQITDLHRPVVVYLAVADSLLEDDSITSGWRVGMVAYEKKKLGVTDVYDRQPYLIKSAIDFEVCSRADVFVGNSFSTFSNLVVLSRTERLYNLGKASSCGENIGLSSYAYNVMGGDGGPQRWMTDMSDGSLQRLSYGTNNVSCH

SEQ ID NO: 237128 - protein, 128 aa, Zea mays
  unsure (1)..(128): unsure at all Xaa locations
  Clone ID: MRT4577_147848C.1.pep
SSAPAGGAAAASSSTAASCSTAGVSSGPAGAQASACLSGSAASGSSAAAVAAASAWRAACCSTTGSSSGSXSSSXASASTGAYSSGSSSGDGVSTTGASSAASTVGVWTSAVAIGGEELGWWIREGVA

SEQ ID NO: 237129 - protein, 120 aa, Zea mays
  Clone ID: MRT4577_147849C.1.pep
RRYNSTGNEIRQFNTEQDSLTNGGLPAPAYLMLKYGFKPAGWRAQNDGEGNDDGFLKYISRRVIAIFLKVLSFLRFFIRRRQHLANDHPHTATAPSNLADLQTFKEDRVNPCLERLDRLE

SEQ ID NO: 237130 - protein, 130 aa, Zea mays
  Clone ID: MRT4577_14784C.1.pep
MTRSRAVVTLVLLLAVATASCRLSLAADETIAAILGRDLRGFIARAGNLFRSDGGAWRAANLTAAEAKNLRAARKSSSGGRAGCVSAAACGKRRVFCGKRCSDVASSRAASLSHVPSRCVVKCRECVPTC

SEQ ID NO: 237131 - protein, 395 aa, Zea mays
  unsure (1)..(395): unsure at all Xaa locations
  Clone ID: MRT4577_147850C.1.pep
MLLFIMRQVAQHHQNQGLQNATGASDIAEDNDVALALAPGRDTRPKIVLQSPRKRRVHSRCAQLTLPSPASGDRRHPSDGSPIHVMDPTAPSPAPPAGDGAQPSDQNRQRPRSALRGALGVAFPIVVSFLFSFLVGLAGLALGGLSSTASVSMPSTCRILSSGVDLRSSKVCELGLLNYRAKHVFYPSSKRRFRCHDDYYWASVLQVEYTEYFSGQLSYAVAEAPKEALPHNCRPDFGAAWSTTLKFKVNESYSCRYMLGSNKADIHSNKLFNCTAEEPSTGELFKRILILFSEMYVSEDFSSGRMLADIXAGVVLGMLSSMFITALFRGMYGLLLAAARWAVRKHCIRVFASRLKRACLLVAYVSAVGWITLQYSKFIGLKELLSDSEVMERFF

SEQ ID NO: 237132 - protein, 100 aa, Zea mays
  Clone ID: MRT4577_147851C.1.pep
PQLTHLQVIDCYINLIKAQKHLKCRSGGRVHIENAFQFNFLKRDGDVEIKTEELYPNKDMTQICSAERRVLLYLDHDMVHMSLQSEHLVYICILFLCKYL

SEQ ID NO: 237133 - protein, 95 aa, Zea mays
  Clone ID: MRT4577_147852C.1.pep
VSRTILSEDDKTPFDGPPLPLKKRFKLPFFLSTGLVLQPSQKLPRRCCWAKGKEAKVLGTFLNRKQGVRRTLAAIIASIKTGLVMLRSCTRIRLG

SEQ ID NO: 237134 - protein, 380 aa, Zea mays
  Clone ID: MRT4577_147853C.1.pep
MAASSCIACNNGSTDEKEEKRKCDLVGYEALPEWLKDNEFIHGYYRCEWPMKETVLSIFSIHNETLNVWSHLLGFLLFLCLAIFTAMVIPRNGSSRSSNSAAYQLGDLVEMANMTVALRHEALAACFLLPPSAAALSEDGQQQIPTSCPPNTSSSHHHAIQIQSSTGTAATVDAGTAADPITRWPLFAYLVGAMVCLLTSSVCHLILCHSGRTAYVTLRLDYAGIAALIVTSFYPLAYYSFLCNPALQRLYMGSITALGAAAVTASLVPAFQAPELRPLRAALFSCMGASGAVPIAHKLLLYGGTAPGAVASAGYEALMGVLYGLGVAVYAARVPERWAPGRFDLVGHSHQLFHLFVIAGAYAHYHAGVEYLKWRDVDKC

SEQ ID NO: 237135 - protein, 64 aa, Zea mays
  Clone ID: MRT4577_147854C.1.pep
RIASQSPILICVYEICSTSKEGSGTRTNQLTRFLFFRRSNSFLDTLPRPCISWLCDRHLHRHCY

SEQ ID NO: 237136 - protein, 109 aa, Zea mays
  Clone ID: MRT4577_147855C.1.pep
SHSMLNITEQASLIVLLDMVALLYDDLLTQPLHKDREGSEHDDTVYPYIACICSITPFQEVYTFTAMRDTCNYAIIDNLARLNNHLDTFSIRTAQARMHVARPITTIPT

SEQ ID NO: 237137 - protein, 51 aa, Zea mays
  Clone ID: MRT4577_147856C.1.pep
SRVFFFPLLPRLKNNTLDYCTGLVQEAEACAIVRGLLLSRGSRGKKILLTI

SEQ ID NO: 237138 - protein, 283 aa, Zea mays
  Clone ID: MRT4577_147857C.1.pep
MLMNEMFLYEKKKKKIAISSSRPNPRSVLRPSSVRRSSRFPSPWLPIKIGINGFGRIGRLVARVALQSPDVELVAVNDPFITTDYMTYMFKYDTVHGQWKHHEVKVKDSKTLLFGEKEVAVFGCRNPEEIPWAAAGAEYVVESTGVFTDKDKAAAHIKGGAKKVIISAPSKDAPMFVCGVNEKEYKSDIDIVSNASCTTNCLAPLAKVINDRFGIVEGLMTTVHAMTATQKTVDGPSSKDWRGGRAASFNIIPSSTGAAKVRNWTFLFPAAKGHLAELVRWSE

SEQ ID NO: 237139 - protein, 93 aa, Zea mays
  unsure (1)..(93): unsure at all Xaa locations
  Clone ID: MRT4577_147858C.1.pep
MRKTDVQTPSQRRSSGSPRYGPDRVLXLGPLCXEAPSYLXGEFXATTAGTPRVCRLTHETFGKNRELXEVIHSRXVQLGALGCVCPELLAPQR

SEQ ID NO: 237140 - protein, 291 aa, Zea mays
  Clone ID: MRT4577_147859C.1.pep
HAPRAAASARRRLPIVVQFHGGGFVTGSNTAAANDAFCRRVAKLCDAIVVAVGYRLAPESRYPAAFDDGVKVLKWIAKQANLAMMTKVGGGVDTFGASTVEPWIAAHGDPARCVLLGASCGANIADYVTRKVVEDGKPFDPVKVVAQVLMYPFFIGSVPTHSEIRLANSYFYDKSTCLLAWRLFLSDKEFNLDHPAANPLAPGRGGPPLKCMPPTLTVIAEHDWMRDRAIAYSEELRKVNVDSPVLDYKDTVHEFATLDVFLKTPQAQACAEDIAIWMKKYISLRGHEFSY

SEQ ID NO: 237141 - protein, 51 aa, Zea mays
  Clone ID: MRT4577_14785C.1.pep
VKHAVTYYVSEFERISILHRKQISPSPRQKIILLPIGKSVTLARTGPELRG

SEQ ID NO: 237142 - protein, 103 aa, Zea mays
  Clone ID: MRT4577_147860C.1.pep
YRPGLNYRLRQHFFRRPTVLRGLTVFFEWHPKAGPMSKGGHTFPALKSKTPRFSPLAPSIGPPIWWPITTKYLPPPAETSLTTSPWPIHRSHCDRSPTCSLPL

SEQ ID NO: 237143 - protein, 75 aa, Zea mays
  Clone ID: MRT4577_147861C.1.pep
KTPRDSPIGGKVWGTQKGRGVPKIQLGNPGFVPPEKKNYFGTKIGFQNCFKPTFNLTPLKGKGAFQNLIQKGWAP

SEQ ID NO: 237144 - protein, 119 aa, Zea mays
  unsure (1)..(119): unsure at all Xaa locations
  Clone ID: MRT4577_147862C.1.pep
DKSTCLLXXRLFLSEKEFNLDHPAANPLAPSRRAPPLKCMPPTLTVIAEHDWMRDRAIAYSEELRKVNVDSPVLDYKDTVHEFATLDVFLKTPQAQACAEDIAIWMKKYISLRGHEFSY

SEQ ID NO: 237145 - protein, 42 aa, Zea mays
  Clone ID: MRT4577_147863C.1.pep
NDNILSDKYSFIHITTLSYFMLFHLAKDTTMNPVLITLSNTI

SEQ ID NO: 237146 - protein, 87 aa, Zea mays
  unsure (1)..(87): unsure at all Xaa locations
  Clone ID: MRT4577_147864C.1.pep
TWSCEKLLDDFQVCCCVTKVLGFHKNHKGLDPINVIALLSAGLCMGLWHMCCACSTLLQNKIIDNVHLLHNSDNXKKXKKXKKNKKC

SEQ ID NO: 237147 - protein, 27 aa, Zea mays
  Clone ID: MRT4577_147865C.1.pep
SASASPDLLPIKKGPQQPPQPGPRGKI

SEQ ID NO: 237148 - protein, 172 aa, Zea mays
  unsure (1)..(172): unsure at all Xaa locations
  Clone ID: MRT4577_147866C.1.pep
MGRRCLALRRRVSPATAKRRGSPLKSIASAPTDVDASFDRSIRSCRRRLLKLFARLDDLGSSRELRAASEAVLRLRSSSAPATPPMPLTLPSQNHEDIVASXAHDPEYRHYDDIKELPPHRLAEIMRFFEDYQKNENKEVAVNDFLPASAAYEAIQHSMDLYATYIVEGLRR

SEQ ID NO: 237149 - protein, 30 aa, Zea mays
  unsure (1)..(30): unsure at all Xaa locations
  Clone ID: MRT4577_147867C.1.pep
YIMTCNYAHTYCSNHLFRPLSLLAXKKSLL

SEQ ID NO: 237150 - protein, 52 aa, Zea mays
  unsure (1)..(52): unsure at all Xaa locations
  Clone ID: MRT4577_147868C.1.pep
PCRYDECRRXLMHDVPNIXNXMRRKQAHAAQEAYEEDQEIPGPPQRVQCALQ

SEQ ID NO: 237151 - protein, 121 aa, Zea mays
  Clone ID: MRT4577_147869C.1.pep
EITRLMRCSHVISCSYEPYCQAGDACYWHRRPDSCVVKEEILQPRVSLSLFEDIDQTDYLDVDRRNPGIGAGLITYVLTMTGSTRFETPRCCRIIRRAACVVTRSDRPTAPSSGDFRLLMP

SEQ ID NO: 237152 - protein, 140 aa, Zea mays
  Clone ID: MRT4577_14786C.1.pep
MARLLAQSLARPSPATASLLPLRGLSTKVELIEIDLAEEDPSSVEVVGIRRMEEAIHGVMVRRATPEWLPFVPGGSFWVPPVRRPRGVAELVGRIAASGVGEVSYEADPYVPMTEEEVLSLSTARGWPSAAYFVEGERDE

SEQ ID NO: 237153 - protein, 107 aa, Zea mays
  Clone ID: MRT4577_147870C.1.pep
NKGDTILQVFGFHFFMFIIYMIMTHMAQVMLSIVASSCLPRHCPSASLRLACAVGSLVSPLFQPWPIVSIAGFATTFPCQGKPLHFEHVPNPNFTLPSFESYVRIQI

SEQ ID NO: 237154 - protein, 98 aa, Zea mays
  Clone ID: MRT4577_147871C.1.pep
KKRAGFPRRGSTGGDWATEGNNRVRGPPGPGIENLEKALPPPPPLVGSFGRNPHPPSGVGVFFRGGTGKVFPSFPKKTFLTPPLKRKRGAGALFFFFS

SEQ ID NO: 237155 - protein, 95 aa, Zea mays
  Clone ID: MRT4577_147872C.1.pep
WWFPTLLVAVSVFLRLFCPGFHCAPQLSPRCGLPFRFTEGCCSRFRVPSVLILLLFFVCVGVFAPPCGFSPPRSFPFCLPKPNFGYGLSSRYSVL

SEQ ID NO: 237156 - protein, 56 aa, Zea mays
  Clone ID: MRT4577_147873C.1.pep
AYAKIVEGHKRVPPRCVTTEHLVVRKPNPMAKLLPVIPKHKLTQIINTHGTGPIRG

SEQ ID NO: 237157 - protein, 35 aa, Zea mays
  Clone ID: MRT4577_147874C.1.pep
KNVSVVDLKKHNKHEGYLKLGHKLTSHSPLKGLLA

SEQ ID NO: 237158 - protein, 97 aa, Zea mays
  unsure (1)..(97): unsure at all Xaa locations
  Clone ID: MRT4577_147875C.1.pep
MGGKILSLLALLALFASATYASIIPQCSLAPSFIIPQFXPPVTLMSFEHLSVQAYRLQLAIAASVFQQPISXLQQQFLAHLIILTIASLHFNFLYYL

SEQ ID NO: 237159 - protein, 81 aa, Zea mays
  Clone ID: MRT4577_147876C.1.pep
RVTIQDNSDPMRAYTTMDQSDSTAVPSYGSSATAWRCNQSSRHLTDFTSPYSLNRAVSSPTHVVNISVAAYKDAIPKQGSR

SEQ ID NO: 237160 - protein, 122 aa, Zea mays
  unsure (1)..(122): unsure at all Xaa locations
  Clone ID: MRT4577_147877C.1.pep
SNNGGREVTILMLLALYAXVANATIFTDYXQAIIAVLIXPKRCMNDRCSSDENPDLQPYRLHQALATSNLPVSPLYIQQLSAISLQQTLLQTMTTLQLDQLVLALIRRICLAQLNAYYQQQR

SEQ ID NO: 237161 - protein, 230 aa, Zea mays
  Clone ID: MRT4577_147878C.1.pep
MDPEMLRLAQEQMRRMSPDDIARMQQQLMSNPNLMRMASESMKNMKPEDLRRAAEQLNQTRPEDMRDMTEKIANTTPEEFAAMKAQADAQMSYAMSGAKMLKKQGNGLHNQGKYSDAASKYKLAKDNLKSIPSSTAHTLQLQCTLNLMACYLKTGQFDECISEGTEVLSYDSNNVKAYYRRGQAYKGLGKLEAAVADLSKAHEICPEDETIAEVLRDAEEKLARERGEES

SEQ ID NO: 237162 - protein, 222 aa, Zea mays
  Clone ID: MRT4577_147879C.1.pep
VLLLVDPMDELAIQNLSSYKDKKFVDISKEDLDLGDNNEEREKEIKQEFSQACDWIKNRLGDKVARVDISNRLRSSPCVLVAAKFGWSANMERLMRAQSMGDTTTLDFMRSRKVFEINPEHEIIKALNAACRNNPDDPEALKALDVLFETAMISSGLSPDNPAELSGKIYEMITTAIAGKWSSQSQAQPDNTTLQHAAPGRSDEPLEGEVVEPEPVEADQHK

SEQ ID NO: 237163 - protein, 382 aa, Zea mays
  Clone ID: MRT4577_14787C.1.pep
MEDHLFTPSRCSQEGIHKSSQPPTPQQDKVHRNRQQAVVARHITVGRPLTTPMQINSVDGKVQTYNICLNVGVEIRGIEFPANLIVMGTYGMDVILWMNILMRYQADISCDKRTMRLISPFREEIINDSKEANPLETIKVVSEFPYVFPKELPGMPLDRKVEFAIELIHILFVEKKDVTKRMCIDYRALNEVTINNKYSLPRIENLFGQLRGASVFLKIDFEIRTTFITKYGLYEYTMMSFGLANASTFFMYLMNNVIMDYMDKFVIVFIDDILIYSQSEEEHVEHLKMVLQRLREHQLYAKLSKYALSRKSQVNMMVAHPMSYELAKKFDRPGLDFLNSTQGVTMELEPTLEREIKEGQKDDENFNKIQEMILEGRCKDFR

SEQ ID NO: 237164 - protein, 76 aa, Zea mays
  Clone ID: MRT4577_147880C.1.pep
KKSTAKLQDSTSVRKIVNLDDHIALACAGLKCDARVLINRARVECQSHRLTVEDPVTVEYITRYIAGLQQKYTQSG

SEQ ID NO: 237165 - protein, 747 aa, Zea mays
  unsure (1)..(747): unsure at all Xaa locations
  Clone ID: MRT4577_147881C.1.pep
MIVSLKLMGGALTGRRYESSAAAVDSTDPPAEKHEYQAEVNRLMDLXIVHSLYSNKEVFLRELVSNASDALDKLRYLSVTDSELLKDGPQLDIRIQTDKDNGIITITDSGIGMTKQELIDSLGTIASSGTAKFLKALKESQEAGMDNNLIGQFGVGFYSAFLVSEKVVVSTKSPKSDKQYVWEGQADSGSYTIREEKDPEQLIPRGTRLTLYLKCDDKGFAHPERIQKLLKTYSQFVSFPIYTWEEKGFTKEVEVDEDPAEAQKKGDDSAETKTEPKKKTKTVIEKYWDWELSNETQPIWLRNPKEVSTEEYNDFFKKTFNEYLGPLASSHFTTEGEVEFRSILFVPATRKEDVTADSRKTKNIRLYVKRVFISDDFDGELFPRYLSFVKGVVDSNDLPLNVSREILQESRIVRIMRKRLVRKAFDMILGISCSENRDDYERFWENFGKFLKLGAMEDKENHKRIAPLLRFFSSQSNNELISLDEYVENMKPEQKDIYFIAADSMSSAINAPFLERLTEKDYEVLLLVDPMDELAIQNLSSYKDKKFVDISKEDLDLGDNNEEREKEIKQEFSQACDWIKNRLGDKVARVDISNRLRSSPCVLVAAKFGWSANMERLMRAQSMGDTASLDFMRSRKVFEINPEHEIIKALNVACRNNPDDPEALKALDVLFETAMISSGFSPDNPAELSGKIYEMMTSAIAGKWSSQPQAQAQPADPIPQHDAPVRSDEPLEAQVVEAEPVEAGQQK

SEQ ID NO: 237166 - protein, 54 aa, Zea mays
  Clone ID: MRT4577_147882C.1.pep
VAGITFCESTELCFQITLGHSVHAWGLCCLVQHALSQLWCGSCVYSTPRVCPPV

SEQ ID NO: 237167 - protein, 158 aa, Zea mays
  unsure (1)..(158): unsure at all Xaa locations
  Clone ID: MRT4577_147883C.1.pep
MDADTSRQVRVRFVTKLPPPLRAPPTAIAVPAELSRMGLSEIVNSLLLSADPDHQAQPFDFIVDGELVRMPLHQFLLAKGISAERVLELEYIKAVAPRKQEPPLPHDDWVSAVDGSNPSFILTGCYDGLARIWKDAAECTQVXLEGHSGAITSATFIN

SEQ ID NO: 237168 - protein, 138 aa, Zea mays
  Clone ID: MRT4577_147884C.1.pep
MDENAQKLKENYLQKLNALESQVHELKKQKSDEAAKRLQEDIQHIKSQKDQLQQKAKQESEKFMSWKAAPEKEVIQLKKEGRRNEYDMHKLLALNQRQKMVLQRKTEEAAAATKRFMELLEAKNSSLETYGSGNASGM

SEQ ID NO: 237169 - protein, 126 aa, Zea mays
  Clone ID: MRT4577_147885C.1.pep
EGCNDDAVLNTVQTHDVLPNCTLVPSSSQLNTEVPKNNAVGLASYTEAGIAQVIDKAKSYSGQIKHANQTEGAYIISTSKACVDKSLNESNMSHAVEELHASRDHGVGDDVSDKKQVMVEEQLLEE

SEQ ID NO: 237170 - protein, 107 aa, Zea mays
  Clone ID: MRT4577_147886C.1.pep
PNCARQRRPRKNRRKSAIQLVPGPLLPSEPVATEAAPRDIANIPPKLPRAMSSVTPAESNPPLTDRNAAKPDESVSTGSKNSTGAAATRAPSQLRKNATTEKENQLR

SEQ ID NO: 237171 - protein, 673 aa, Zea mays
  Clone ID: MRT4577_147887C.1.pep
MKQFAKSDTSVLKQHYEKKLTDLEQEKKALQKEIENLRHALTNISSSMDDNAQKVKENYLQKLNALESQVHELKKKQEAQQQLLRQKQRSDEAAKRLQEDIQRIKSQKVQLQQKIKQESEQFRSWKAAREKEVLQLKKEGRRNEYEMHKLLALNQRQKMVLQRKTEEAAAATKRLKELLEAKKSSRETYGSANGSGMQALIRAIDDELEVTVRAHELRSYYERQMQERAAISKEIAKLKEESKHKISDCPQAMSPSARSSRISALENMLSSSSSAMVSMASQLSEAEERERVFNGKGRWYNVRSLPEAKNIMNYLFQLASSARSQVLDKEVICNEKEHTITELKEKVVVLNGGIRQLETQVRDLRSQNTQLFTALNNAKKSARSNGTGFAQRKSVRSSQHFGYSKDNFNWVDDMDISDSEHSDELENMSDGSDSDWVQSTRKAKKHQRRVSSHSNPNLDCQNTQGNAEPEKPSDEKCILPKYISSDGCSCSKSSSCKTNKCECRGSGAQCGAGCGCKDSKCSNRDSSTIEKANQGAMLLQNAFSEKDSQDAKPRKPLINIGNNMVNQTAETKKPRKNWRKSTIQLVPGPLLPSEPVATEAAPRDRADIPLKLPRAMSSVTPVESNPPPLTDRNAAKPDESVSTGSKNSTGAAVTRAPSQLRKNATTEKENQLR

SEQ ID NO: 237172 - protein, 121 aa, Zea mays
  Clone ID: MRT4577_147888C.1.pep
MATKALSVSSLTSTAFASFSLPRPRRPSPSPPLLRLLGPRPRASTLSAAAPGDEDGVDTVEQLLHPRPPETSAPAGSRGRIDRLMKLQRRADGDAVPGGRRRWFPYLDAFRPAGGAELSSG

SEQ ID NO: 237173 - protein, 259 aa, Zea mays
  Clone ID: MRT4577_147889C.1.pep
MDISDSEHSDELENMSDGSDSDWVQSTRKAKKHQRRVSSHSNPNLDCQNTQGSAEPEKPSDEKCILPKYISSDGCSCSKSSSCKTNKCECRGSGAQCGAGCGCKDSKCSNRDSSTIEKANQGAMLLQTAFSEKEAQDAKPRKPLTNIGNNVVNQTAETKKPRKNRRKSAIQLVPGPLLPSEPVATEAAPRDIANIPLKLPRAMSSVTPAESNPPLTDRNAAKPDESVSTGSKNSTGAAATRAPSQLRKNATTEKENQLR

SEQ ID NO: 237174 - protein, 154 aa, Zea mays
  unsure (1)..(154): unsure at all Xaa locations
  Clone ID: MRT4577_14788C.1.pep
QRPVRSRAAAATDDDAVLRRAMSAADPXELKRAGNDQYXKGCFEEALRLYDRALALCPDNAACRGNRAAALIGLHRLGEAVKECEEALRIDPSYGRAHHRLASLHIRVGHIEDALKHLXLAIPQPDLLKLDKLETVEKHXLGGCLDARKGWDWK

SEQ ID NO: 237175 - protein, 93 aa, Zea mays
  Clone ID: MRT4577_147890C.1.pep
EALLLLGTSCGHAVRRTELQRCDSCGGAVPRSHTDGQLGVAIRGVLKSVALAQQSRVDDGLPAYLLQLPLEHDGPARMSRKNEQRHEHLPKTA

SEQ ID NO: 237176 - protein, 63 aa, Zea mays
  Clone ID: MRT4577_147891C.1.pep
CHEWILQITYPEAIDMHDQYERGSYRRCSKIHIESEWYRCNLLYPLWSYDEYLSETCIGRHRS

SEQ ID NO: 237177 - protein, 95 aa, Zea mays
  Clone ID: MRT4577_147892C.1.pep
SLNCMSVSELLNQFLFQPPIALIAKYRMKTYKPQHRCSYFFTGNSLKVPKYFIYVCQWNADFLNHSFRRHAQTCSYLFCLQLPAIIQSFLNIISA

SEQ ID NO: 237178 - protein, 246 aa, Zea mays
  Clone ID: MRT4577_147893C.1.pep
MASAKQSEKMRILLIPFFATSHIGPYTDFAVRLAAARPGAVEPTVAVTPANVAVARSALERHGPAASGTVRIVTYPFPRVDGLAPGVENLSTAGDDAWRIDAAAIDEALSRPAQEALLRERSPDAVVSDYHFFWTSSIAAELGLPCVVFSVIAPFSGLVMRILAGAVVSGSRDVTVPGLPGPEIRIPVSELPEFLRRPAKDQGTFSPCNAAQARCLGVAYNTFAGMEQEYREANVRAKSLKRCYFV

SEQ ID NO: 237179 - protein, 83 aa, Zea mays
  Clone ID: MRT4577_147894C.1.pep
RLIMQQQKPESSKSDSSGSEFGSESSSSGSSFEFESKSSPYERAKRRSNKRRKRPLKPFQQCFLEFKNLVLFKWASSENMSSM

SEQ ID NO: 237180 - protein, 485 aa, Zea mays
  unsure (1)..(485): unsure at all Xaa locations
  Clone ID: MRT4577_147895C.1.pep
MASAKQSKKTRILVIPFFASSHIGPHTDFAVRLAAARPGVVEPTVAVTPANVTVVRSALERHGPAASGTVKIVTYPFPCVDGLAPGVENLSTAGADAWRINAAAIDEALSRPAQEALLREQSPDAVVTDFHFFWNSIIAAELGLPCVADAWADAWAXSSCISSAAPPSSVTAAXESESREVAVPGLPEPEIRIPVSELPEFLRRPAKGQGTLNPCNAAMARCLGVAYNTFAGLEQEYXGEHARRVLXKRSYFVGPVSLPLPPAAAGVTEPPCIRWLHSKPSCSVVYVCFGTYAAISGEQLRELALGLEASGKPFLWVVRAGDGWAPPDGWDERVGERGMLVRGWAPQTAILSHPAVGAFLTHCGSSSLLEAAAAGVPMLTWPLVFDQFIEERLVTEVLKIGERVWSGTRSTRYEEQKVVXAAEVVARAVARFLEPGGTGEAARSKAGVLAAKARSAVAEGGSSFCDLRRLVNDLIEARTAAGPPA

SEQ ID NO: 237181 - protein, 80 aa, Zea mays
  Clone ID: MRT4577_147896C.1.pep
SDSYPKTIKHTWSSYKYVRLSELLQPMFITPTAQATTHYSNLTNTARPTILTDSLSVTTTGISIALILSTSTSNGSNSFT

SEQ ID NO: 237182 - protein, 138 aa, Zea mays
  unsure (1)..(138): unsure at all Xaa locations
  Clone ID: MRT4577_147897C.1.pep
PWGXLGGDMLFESSGGLTXTTDKTSTHLKGGAKKGGIFGPSTGAPIFGFFXKENNFGGGGNFFSKARWTNKCGGCLSTGGEEEFCIVEGLMTTVLATTGTQKRTDGPSFKNLREGRSAAQNIISSYTVASKDVGKKHA

SEQ ID NO: 237183 - protein, 348 aa, Zea mays
  unsure (1)..(348): unsure at all Xaa locations
  Clone ID: MRT4577_147898C.1.pep
ELGHHSSRTQQVAFCIHNIAYQGRFARADFDLLNLPDSFLPSFDFIDGHVKPVLGRKINWMKTGIVESDLVLTVSPHYVKELTYGPDKGVELDGVLRTKPLEIGIVNGMDVYEWDPSTDKYTSVKYDATTVTEAKALNKERLQAEVGLPVDSSIPVIVFVGRLEEQKGSDILIAAIPEFVGENVQIIVLGTGKKKMEEELMQLEVKYPNIARGIAKFNVPLAHMMFAGSDFIIVPXIPICSSPGGLVDTVEEGXVTGFHMGSFNVECETVYLADVTAVASTITRXLEQYGTPAFQEMVQNCMAQNLSWKGPAKKWEEVLLGLGVEGSQAGIDDAEEIAPLAKENVATP

SEQ ID NO: 237184 - protein, 71 aa, Zea mays
  Clone ID: MRT4577_147899C.1.pep
EKLDIYVFLGGMLVRTVISKTANVKLMEARLFYCQFGQLPAKLVMSSAIGGICLQNWECHQHLGALFEKKS

SEQ ID NO: 237185 - protein, 59 aa, Zea mays
  Clone ID: MRT4577_14789C.1.pep
NLWLSSLNNGAQGNLSCGSKSGSHNNKVWGALSLPCHNLRLPRSIVMLCVCGKKLKNDE

SEQ ID NO: 237186 - protein, 483 aa, Zea mays
  unsure (1)..(483): unsure at all Xaa locations
  Clone ID: MRT4577_1478C.1.pep
MLLRENEEYNFKILCSSRGAFIAAMAVSMILHLRSSLLATEINTLCPQRLLNLPNKVDVHKLXIEKAKSLQSTAIDANTLSPSLLSKKDSCDYDRVYSNHATSTPPRTPLHPLAESYWEEQWRNLHNDGTALKESDNKGLSYKRSLKQSLSQRLGLSRTESDPSPVKVVSVNNDAKNSVRRCLLNSYSDKVVQSNEVIGKFEQDKFPIVSIHKETILSSERSSQLKLKAASENLTVSPPPSVAKFNPLIDSPVKPADESSAKRTEDCSSGENSPVFYTARAGNEHDNCHDNDSEKSSITSNSCAGDDYRDEVLPDESSSCNCEDKTVSEAIESGANVGQARPLEKTMVPNERKPFINKLQWLLRFGRPSAEXCGGEGQCSGIXDDKHDVVPPCPSPADASSDNSCSGINLAYGDNKKVMGTLKNIGQNMLENIQVIETAFQQDRAQPSAMENLSNNILGGKGQVTAMAALTELRKISNLLREM

SEQ ID NO: 237187 - protein, 112 aa, Zea mays
  Clone ID: MRT4577_147900C.1.pep
AQITIHIVCALTSWIHGALSPTVRLKVPSSCIQHLNPPIYGKEVEQTKELYLHKGPTDGIVARCIASSEKEQTFSGLGCSAPSAAGAAQPRSRSCGGRRATSACAPSRASRP

SEQ ID NO: 237188 - protein, 73 aa, Zea mays
  Clone ID: MRT4577_147901C.1.pep
LILALRLSGWNFYHQDKQERLHLSYPTGPRPRCLSICSVMPPDRAAGHRLQDTGRGQDDTGKERLAEPQPQPA

SEQ ID NO: 237189 - protein, 93 aa, Zea mays
  unsure (1)..(93): unsure at all Xaa locations
  Clone ID: MRT4577_147902C.1.pep
PSTIQSSFASIVWVAFCIHNIAYQGRFARADFDLLNLPDSFLPSFDFIDGHVKPVLGRKINWMKTGIVESDLVLTVSPHYVKELTYGPXKGVE

SEQ ID NO: 237190 - protein, 352 aa, Zea mays
  unsure (1)..(352): unsure at all Xaa locations
  Clone ID: MRT4577_147903C.1.pep
MWRGYASDAEIQGCQDLELRQGRGDLLCVLGRQPTPPISSFPKAAPVSLHYFKKLTSDPDKGVELDGVLRAKLLEIGIVNGMDVYEWDPSTYKYISVKYDATTVTEARALNKERLQAEDGLRVDSSIPVIVFVGCLEEQKGSYILIATIPEFVGENVQIIVLVCFNLQVVSILSHGTVHDLIVAEKKNCSSGHEKEEDGGIAKFNVPLAHMMFAEADFIIVPSRFEPCGLIQLQGMRYGVIPICSSTGGLVDTVEEGXVTGFHMGSFNVECETVYLADVTAVASTITRXLEQYGTPAFQEMVQNCMAQNLSWKGPAKKWEEVLLGLGVEGSQAGIDDAEEIAPLAKENVATP

SEQ ID NO: 237191 - protein, 119 aa, Zea mays
  Clone ID: MRT4577_147904C.1.pep
NGEDLPPPDSKAIRDICVLPGGHVVIASLSRKFPFHVYKESVQVLFFTVFLLHLLKYDLCSYDLLVILRPFNFTKLATIFMLCILPKVYIVFLLLRPKYEQVCCISILSTTYTCTALCI

SEQ ID NO: 237192 - protein, 151 aa, Zea mays
  unsure (1)..(151): unsure at all Xaa locations
  Clone ID: MRT4577_147905C.1.pep
GLSASNVKAFLCVVTGMHDLVTIRFIIQYHDLLCNNDDAAHXSNIRVLIYNLIKDKTCDXLSLRSQEXTDSSLTGRIYXKLXMQNDIHTILDRATLETTLHDIYVIQFKLRSSYMHDKDYLWLYXYEGLPLXELTLLVHPSPSQNIVKRNC

SEQ ID NO: 237193 - protein, 45 aa, Zea mays
  Clone ID: MRT4577_147906C.1.pep
NDVLICDRIIILHRKELCQCLSLSIIRLYIGTAGKLGGPRVELEG

SEQ ID NO: 237194 - protein, 36 aa, Zea mays
  Clone ID: MRT4577_147907C.1.pep
CGVARKLARLGYLPHQQSDVPGDAKLAKSLSEQWAG

SEQ ID NO: 237195 - protein, 76 aa, Zea mays
  unsure (1)..(76): unsure at all Xaa locations
  Clone ID: MRT4577_147908C.1.pep
IPTVXHPPPPFFSRHTQPPLPPALLQNQHTQPILHQQHGTPLRSARQHHVTPILAHDDLFPIITRPHNDLIYTLIH

SEQ ID NO: 237196 - protein, 71 aa, Zea mays
  Clone ID: MRT4577_147909C.1.pep
RQARHIGQQNWEKFISTHVTEMTALLVKYDVSIDYRVKVHRLSVCNSFPDLGGNMVKPLSTIHSNVVNMTQ

SEQ ID NO: 237197 - protein, 105 aa, Zea mays
  Clone ID: MRT4577_14790C.1.pep
MAASMISSIALAVALEGLPHLVRRACCFAFFCSKKKIKTDMPYGIGCGLTGDLTANVRKDKGKGMYQFVYKYGANFDGYIPIYNQDYWSSTGDVYVGGSTGLTIW

SEQ ID NO: 237198 - protein, 65 aa, Zea mays
  Clone ID: MRT4577_147910C.1.pep
MFQSIMLYITLFRQLSSAGSYEVKKMLKAGTKNDIRLNVPRASLNWSTPKKKRKKKEGKKNKKKE

SEQ ID NO: 237199 - protein, 409 aa, Zea mays
  Clone ID: MRT4577_147911C.1.pep
MGGEAGMGLRVRASSLLLSLVLELAVALVSVSAQHKFGINYGQIANDLPDPAQVATLLQSMGVNKVKLYDADPRVLTAFANTGVGFTIAVGNENLQTMAGSPDAARQWVAANVRPYIPATRITCVTVGNEVFSGNDTATMASLLPAMKAVHAALADLGLGGQATVSSAHSVNVLAASFPPSSGAFREDLAEYMKPILDFHAQTGSPFLINAYPFFAYKASPGSVSLPYVLFEPNPGVRDPSTGLSYDNMLYAQIDAVYAAMKAMGHTDVGVRISETGWPSRGDEDETGATVQNAAAYNGNLMQRVAMSQGTPLKPNVPVDVYVFALFNENMKPGPTSERNYGLFYPNGSPVYALSAGSGGGSGPGGSLNPYYTSMFSSSSRSAVSATFLTERVMLLLLLQATVILRHYC

SEQ ID NO: 237200 - protein, 183 aa, Zea mays
  Clone ID: MRT4577_147912C.1.pep
ATRPRAPMLRSRVSPMATVRRQAPACAVLCRSSLLAFCALLAASPCSSRPARFSVQPWPRAGALPLPRPASCPPATARSPSHCEFAVPPTPRSPWYSSSSSRCLRSTSLNRLLLDAGDGRCGAPLRTPSVLALLQEISSAEQSSFCCDVRVRYSPHVVVFVCLCVWPVPSRHLQILPLVVMFS

SEQ ID NO: 237201 - protein, 403 aa, Zea mays
  unsure (1)..(403): unsure at all Xaa locations
  Clone ID: MRT4577_147913C.1.pep
MGGEAGMGLRVRASSLLLSLALQLAVALVSVSAQHKFGINYGQIANDLPEPAQVATLLQSMGVNKVKLYDADPRVLTAFASTGVGFTIAVGNEDLQAMAASPDAARRWVAANVQPYVPATRITCVTVGNEVLSGNDTAAMASLLPAMRAVHAALGDAGLGQPVAVSSGRDXPRAIERNYHPLSRRRRATEQTEEARRGGNGAPHPRLLASAIPGHRTRGRARLSVGAAEIRDQLRADREQSPGXTQVATLLRSMNVNKVKLYDADPRVLTAFANTGVEFIIAVGDEDETGATVQNAAAYNGNLMQRVAMSQGTPLKPNVPVDVYVFALFNENMKPGPTSERNYGLFYPNGSPVYALSAGSGGGSGPGGSLNPYYTSMVSSSSRSAVSATFLTERVMLLLLQAL

SEQ ID NO: 237202 - protein, 398 aa, Zea mays
  Clone ID: MRT4577_147914C.1.pep
KFRILPSANHERLACVKLAVSAQQKFGINYGQIANNLPDPTQVATLLRSMNVNKVKLYDADPRVLTAFANTGVEFIIAVGNENLQTMAGSPAAARQWVAANVRPYIPGTRITCVTVGNEVFSGNDTATMASLLPAMKAVHAALADLGLGGQATVSSAHSVNVLAASFPPSSGAFREDLAEYMKPILDFHAQTGSPFLINAYPFFAYKASPGSVSLPYVLFEPNPGVRDPSTGLSYDNMLYAQIDAVYAAMKAMGHTDVGVRISETGWPSRGDEDETGATVQNAAAYNGNLMQRVAMSQGTPLKPNVPVDVYVFALFNENMKPGPTSERNYGLFYPNGSPVYALSAGSGGGSGPGGSLNPYYTSMFSSSSRSAVSATFLTERVMLLLLLQATVILRHYC

SEQ ID NO: 237203 - protein, 67 aa, Zea mays
  Clone ID: MRT4577_147915C.1.pep
LDPALASHDLGVGRADEIPAPGVQFCIVPRHKWLVDQASSILLTLKSQKAPHSCSLKIKADYLYCNL

SEQ ID NO: 237204 - protein, 83 aa, Zea mays
  unsure (1)..(83): unsure at all Xaa locations
  Clone ID: MRT4577_147916C.1.pep
INHLYSWGGGDGDLTPRIDRAFKVSDLLVKRIDRFKMLPAAGXDSLTQAGLEFISQLARFADVELVALRSSFAALCAGLKRFA

SEQ ID NO: 237205 - protein, 125 aa, Zea mays
  unsure (1)..(125): unsure at all Xaa locations
  Clone ID: MRT4577_147917C.1.pep
GNTEGSTVRQRQHGLVVARVQSVADIEARCPDAHRVXMSGQRAIVRRPRERLLRVAPAVLVPHAVLIVLGNHVVVHDHRYHRTTMTEIHAAGSCLQYSVHAHASTELSKRHIVLMSLSRTPERIA

SEQ ID NO: 237206 - protein, 63 aa, Zea mays
  Clone ID: MRT4577_147918C.1.pep
KKKLWENLPPLKGVNFLVHQTGSEHLNEHDLHRMLYGRHHGGGCALSLALAAPSRSALCPREK

SEQ ID NO: 237207 - protein, 370 aa, Zea mays
  unsure (1)..(370): unsure at all Xaa locations
  Clone ID: MRT4577_147919C.1.pep
MATTALLLRTHHHPCKPPAPRASVLCRATAGMAGPASAAALRSLAPPTRPELLSLDLPRYDPAPARPVDLAVVGGGPAGLAVAQRVAEAGLSVCAIDPSPAVVWPNNYGVWVDEFEAMGLSHCLDTVWPSASVFIDDGGAKSLDRPYARVARRKLKSTMMDRCVAHGVVFHQAKVAKVVHNEASSLLICDDGVAVPATVVLDATGFSRCLVQYDKPYNPGYQVAYGILAEVDEHPFDIDKMLFMDWRDSHLPEGSAIKERNSRVPTFLYAMPFSPTRIFLEETSLVARPGLSMDDIQERMAARLRHLXIRIRSVEEDERCVIPMGGPLPVLPQRVVGIGGTAGMVHPSTXYMVARTLATAPIVADSIVRF

SEQ ID NO: 237208 - protein, 80 aa, Zea mays
  Clone ID: MRT4577_14791C.1.pep
APPSLSGRRIAGCRDPRPLVAQHLWVSLGPDLDRILPAPVAAWDLGPRSVGRVQLGLLAVRCAARAQMMEADGLCHRTVG

SEQ ID NO: 237209 - protein, 146 aa, Zea mays
  unsure (1)..(146): unsure at all Xaa locations
  Clone ID: MRT4577_147920C.1.pep
ICHLLDHWFCMRKGNGEGNNYNSIYPAPXHLSKLYLSAYIDTLMGTGWGICAGIGNFPNECPMETDSSNGCCQWFTHGDTRRITGCCTQLQTPPTAQAQDPVLAEQPEGMTERDMIADQNEEADQNAAIAASLMDTVVASASYSAT

SEQ ID NO: 237210 - protein, 84 aa, Zea mays
  unsure (1)..(84): unsure at all Xaa locations
  Clone ID: MRT4577_147921C.1.pep
LCVRPXALRSLXVPCXXVLXGVRLPXVPFPXPXPASCLXXXXVPPFWSAPCSFXFSLFXXXSSGLRXXXXXXXVGFVXLXAAFA

SEQ ID NO: 237211 - protein, 106 aa, Zea mays
  Clone ID: MRT4577_147922C.1.pep
RPFRQPPSQRRECSAAFPSSPFSLFSFSQTHQRALSQPPVFSLLALLLLSNAPESSPPTRELRLAREFLHPHPAAFPPPTLSRTGLKCAVSFSTPTQSVFWVLMFY

SEQ ID NO: 237212 - protein, 186 aa, Zea mays
  Clone ID: MRT4577_147923C.1.pep
RGGGDRLVQGGKQPGGRVPWWYLAANKMMSPFLTQRTKSKFVFASPAKSAATLFRYIAPEQVPVQFGGLFKEDDPEFTTSDTVSELTIKPSSKETVEIPVTENSTIVWELRVLSWEVSYGAEFTPDAEGGYTVIVQKTRKVPANEEPIMKGSFKAGEPGKLVLTVNNPASKKKTLLYRSKVKSTSE

SEQ ID NO: 237213 - protein, 255 aa, Zea mays
  unsure (1)..(255): unsure at all Xaa locations
  Clone ID: MRT4577_147924C.1.pep
NTLQEAQMAASKALKXAHGEWYEHCIREHAAIHALELEKSSSSTDAQTRATFSLIIGYLADHCNLPTRELLSRRFCQNIKKHRLRQLIDDTIGSVPADSSLINSVLEVCFGPSLLPKSISDVKYLVDFVETVMEALPANYRLGLAVGGFVAKHFTGYGAASTGTRFWASSVLINAIFRAVPVAPESVWLEGAGLLEKLHATEILKRFYQQAASVYPFSFKLWHAHLNYCKASGSNTESILESARQRGIELNLSPT

SEQ ID NO: 237214 - protein, 93 aa, Zea mays
  unsure (1)..(93): unsure at all Xaa locations
  Clone ID: MRT4577_147925C.1.pep
THDVRKSRPTPFSFYGQGTAIGRGWVWPQITGRPLGSLTTWTRXXLLTFCQRRRTISTSTTSASPIVCCCRDLGEALLRVREGAVLILTKVEV

SEQ ID NO: 237215 - protein, 74 aa, Zea mays
  Clone ID: MRT4577_147926C.1.pep
NTTWAQPRPHLIYIHATTPKRHYLGHITHILALHKDEILPHKHIDLAQSRADHAPSEVPRLMHNHCLNRFFRKM

SEQ ID NO: 237216 - protein, 93 aa, Zea mays
  unsure (1)..(93): unsure at all Xaa locations
  Clone ID: MRT4577_147927C.1.pep
RAQQQQLASAFLQLPQPNQPLXFAHLRGGXXAGLITQAKKSCPGGGRGALLFKDPGTSIPSLLYGSSEREGLHACRQYIWPLVARNSRKRPLP

SEQ ID NO: 237217 - protein, 64 aa, Zea mays
  Clone ID: MRT4577_147928C.1.pep
MNCWGTSSTGGCVLRKNSHRCSGHFTLLTWSMIQPVVAKNHHINCGLENGRHKTSGPIFFRLHN

SEQ ID NO: 237218 - protein, 113 aa, Zea mays
  Clone ID: MRT4577_147929C.1.pep
KQPQQIISCSNFAFFNYHRHDCGIFTLQYMEYWDIFVDMMLKIRTEDIPQIRITLAKDLYFSEKNTEDKSLVCNMFLQVFCDSICVVFWALLLFCFSSFSFFSWVVRAVLMVV

SEQ ID NO: 237219 - protein, 552 aa, Zea mays
  Clone ID: MRT4577_14792C.1.pep
MSYSYSVFSHNPSCSLTHNSTDIYAAGEGTNGSVHSRFNFRPMGDGSVAFAPAQLKEGTSSFFPTELPARMAAALSAGASFDASHGGMHSSRPHRILREIVSDPVPAMAQALQDFPSETLEVLRETVRGMVDAPEKRDELSSLQRKLERRSDLTAEVLGRANKTQLEILVAIKTGMATFVTGKGRVSSSELVEMFLMTRCRNLNCKSAVPVDDCECKICSTKKGFCSACMCPVCQKFDCAANTCSWVGCDVCSHWCHAACALEKNLIRPGPTLKGAMGTTEMQFQCLGCNHASEMFGFVKEVFNCCAQNWSAETQIKELDFVRKIFAASEDFEGKGLHAKAEEVLSMLVKKLISPSDATNTMLQFFKYGVTDCSVTGSKSKGILAAQTSKSTDMLHLQTPTITPPKSPFNFKPSTSILDSQIDVLKASPKPLPIEPHFSSSSKDDDSSSLETIVKCKEAEAKLFQKLADDARKEVDSYRQIVRTKTQKLEEEYATKVAKLCFQETEEKRRKKVEELKTLENSHYDYHKMKLRMQTEIQGLLERMEATKKMWV

SEQ ID NO: 237220 - protein, 225 aa, Zea mays
  unsure (1)..(225): unsure at all Xaa locations
  Clone ID: MRT4577_147930C.1.pep
MVSSVAAATSTFLGTRLADPAPQNGRIAPRFVIRLGXKAKXAPKKXANTSTSSDRPLXSPGAAGDPTYLXESLAXDYMFYPIGLRNPVXYLQIELDSMDTNLFNSEAGDIICTRTRVSSRMXVTPVPCYREVFLLYRIREXELILSGWAMLATLXALSVXWITAVSCNDATNAHLADGPKXVGRAAAFSISTLIWXIEVLVIAYIEFQRNAELXPEKKLYPGGSY

SEQ ID NO: 237221 - protein, 52 aa, Zea mays
  unsure (1)..(52): unsure at all Xaa locations
  Clone ID: MRT4577_147931C.1.pep
MVKMIPVXPMVVESFSAFSPHGRFAVRDMRHAVPAGVIDSVQNKDPACATVT

SEQ ID NO: 237222 - protein, 347 aa, Zea mays
  Clone ID: MRT4577_147932C.1.pep
MARLLIPLPFAAASASSLHLAVSRLPLAAVSAARRECLFGGRVVGGVVRAPARLSKRGLCAGAEAGDSAVTVEAMEWVKKDRRRLLHVVYRVGDLDKTIKFYTECLGMKLLRKRDIPEERYTNAFLGYGPEDSHFVVELTYNYGVESYNIGTGFGHFGIAVEDVAKTVELIKAKGGTVTREPGPVKGGKSVIAFIEDPDGYKFELIERGPTPEPLCQVMLRVGDLDRAINFYEKAFGMELLRKRDNSEYKYTIAMMGYGPEDKNAVLELTYNYGVKEYDKGNAYAQIAISTDDVYKTAEAIRVNGGQITREPGPLPGITTKITACTDPDGWKTVFVDNIDFLKELEE

SEQ ID NO: 237223 - protein, 69 aa, Zea mays
  Clone ID: MRT4577_147933C.1.pep
TFLHPSLTISHLYLYHSSQSFFRHLAICELFYSFLIVWMYISIQNITMMLISCRRRTLQCTSLRRQASF

SEQ ID NO: 237224 - protein, 61 aa, Zea mays
  Clone ID: MRT4577_147934C.1.pep
QGHFFSSGQNLRQKLVYFADCAGSDSSVRLHCRLTRRRSMGASESNVQWSQQQMLNMGEEG

SEQ ID NO: 237225 - protein, 491 aa, Zea mays
  unsure (1)..(491): unsure at all Xaa locations
  Clone ID: MRT4577_147935C.1.pep
PAAAARCGVAVVLSRRRSRRREAEDERKRKAAAVIEEVEQRLSTPTALLRGIADAMVEEMERGLRAEPHAPLKMLISYVDNXVQCLPRGDAHXTCSARRFFRVIRVQLGGRDRRVVLQQYEEVSIPPHLMVGTWRAGVDFIPFXFLSFPPFPPSIEKPPSCDSHLSIFFPFLRDIARIEPLSLXTLSLATSISXAAGKKWKRRXISRAMERQGLDMKVAALVNDTRGTLAGGRYADNDVVAAVILGTGTNAAYVEHANVIPKWTGLLPRSGNMVINMEWGNFRSDKLPRSEYDKSLDFESLNPGEQIYEKMISGMYLGEIVRRILLKLAHDASLFGDVVPPKLEQLFILRTPDMSAMHHDTSHDLKHLGAKLKDILGVPDTSLEARYITLHVCDLVAERGARLAAAGIYGILKKLGKDKLLGDFSQQRTVVAIDGGLYEHYKKFSACLEATLTDLLGEEVASSVVVKLANDGSGIGAALLAASHSQYAEAA

SEQ ID NO: 237226 - protein, 116 aa, Zea mays
  unsure (1)..(116): unsure at all Xaa locations
  Clone ID: MRT4577_147936C.1.pep
GTREARRTRCVRCQGPGRSRGRASAGVGGVQRVSVSEREKKENRSDWLSLCSLPSARDPALGKDFFFIFKIWFAECQIGGTRQRRLLCRVPSRDTRQRLLFTSLPRCHXRAELEGT

SEQ ID NO: 237227 - protein, 82 aa, Zea mays
  Clone ID: MRT4577_147937C.1.pep
IPAHTQVCLLPVTHAKLNNYHRGSMVMNTAQRCLRYRSFNQRQRLLLAVGLPWPTCSLATDAPAGALTKNILPCLLGAMSES

SEQ ID NO: 237228 - protein, 208 aa, Zea mays
  unsure (1)..(208): unsure at all Xaa locations
  Clone ID: MRT4577_147938C.1.pep
KPFPTYVLYLVVIIAMTELIGMVEIKWAGLTLLDWIRNEQFYIIGATAVYPLATLHIVLKLVLRGNGVSFKLTAKQAKSTVNEKYAEMYVVQWTPLLIPTIAVIAVNVGAIGAAIGKAVVGGWSLLQMAXTRSLGLVFNAWILLLIYPFALGVMGRWSKRPYILFVLFVIGFAVVAAVVVAIHAARTGSVRFHSGHSGGASFPTSWGF

SEQ ID NO: 237229 - protein, 224 aa, Zea mays
  Clone ID: MRT4577_147939C.1.pep
MGCSKTLVAGLFAMLFLALTVLATDPDPLQDFCVADLDGKAVSLNGHTCKPMSEAGDDFLFSSKLAKAGNTSTPNGSAVTELDVAEWPGTNTLGVSMNRVDFAPGGTNPPHIHPRATEIGIVMKGELLVGILGSLDSGNKLYSRVVRAGETFLIPRGLMHFQFNVGKTEASMVVSFNSQNPGIVFVPLTLFGSNPPIPTPVLTKALRVEAGVVELLKSKFAAGF

SEQ ID NO: 237230 - protein, 103 aa, Zea mays
  Clone ID: MRT4577_14793C.1.pep
LRHYTINLDVRYRGLGLVDHQRPTERDWPRSVGSLPVLLARAIDKPEISARRLGARLVAAEPDSRAIEHAGTTTNNGTACKRSHSRRRPERRITQEAMTPLTG

SEQ ID NO: 237231 - protein, 50 aa, Zea mays
  Clone ID: MRT4577_147940C.1.pep
LIFPQIAECYTILCLASMDPGCRVNNMAPMNTLFQAAVKTSGFSAERNYR

SEQ ID NO: 237232 - protein, 96 aa, Zea mays
  unsure (1)..(96): unsure at all Xaa locations
  Clone ID: MRT4577_147941C.1.pep
MYMSTHRQPPQPAAYQSQPNPARLSRAPATEPPKENLYQGLVKLKEKLMLVGFVLLVLGLFQELVQKNLIDHQLIEHLIPCPGSNXTASVNTGASS

SEQ ID NO: 237233 - protein, 84 aa, Zea mays
  Clone ID: MRT4577_147942C.1.pep
HTMVKENTTRDTLVTNNTKCEVLSCSSRVRQLLAGVYTRNIKLQPHELDHRSLCPHILWGYHPLEQALDCGLNTEHNLVVVSGA

SEQ ID NO: 237234 - protein, 54 aa, Zea mays
  Clone ID: MRT4577_147943C.1.pep
PKRSDLDMNHHVNNVKYVRWMLEVKKTNFLPCQNIAALTFYFWYNILRPTKDVV

SEQ ID NO: 237235 - protein, 37 aa, Zea mays
  Clone ID: MRT4577_147944C.1.pep
YLALLFSIFQQTQYGRGWVCSPSHYLIIEESCNRLSN

SEQ ID NO: 237236 - protein, 94 aa, Zea mays
  unsure (1)..(94): unsure at all Xaa locations
  Clone ID: MRT4577_147945C.1.pep
GAPPNRRMSKAXAEFVVSKVDDLMNWARKGSIWPMTFGLACCAVEMMHAGAFRYDFDRFGVIFRSSPRQSDCMIRAGTLTNKMGSALSKVYDQM

SEQ ID NO: 237237 - protein, 103 aa, Zea mays
  Clone ID: MRT4577_147946C.1.pep
EHLPQAQAGAQPFPFLFYGSVIVTQIGCLGPLLPAKKDESVFSAPPPNVFVFFGKRDEPLLLAWARRLFGPLSGSGRSLVVSLGLKVPSPGPLKDFAVAVMFE

SEQ ID NO: 237238 - protein, 71 aa, Zea mays
  Clone ID: MRT4577_147947C.1.pep
GPLTHARMRARMWRRRRLTTSPCILADQAWDLGNAVVILLSPGRGLSLVHSAHGCSSNPLLLYRSSSCLPE

SEQ ID NO: 237239 - protein, 47 aa, Zea mays
  Clone ID: MRT4577_147948C.1.pep
QTYQLSEAQILRSHRNTAQATYPFRSCHQTQLKLHQPGQLGIMHPQL

SEQ ID NO: 237240 - protein, 113 aa, Zea mays
  Clone ID: MRT4577_147949C.1.pep
CDRHVVLVGPVPSVEHNDFSHVRELRQAVQRATGATCQVLRHGLVSHVEVYEHRLHATVHSPAPPAPLSQAPHGLFPSRPTDECRRKARAPPRASPDTQCRHARTTRSAPTRP

SEQ ID NO: 237241 - protein, 123 aa, Zea mays
  unsure (1)..(123): unsure at all Xaa locations
  Clone ID: MRT4577_14794C.1.pep
KGWGKGGGRKKKKKKKEGRKKKRKGKAKPAHSDLKKNLKRLLKRAEKKNEKNFFIYLKKGTKNFFKQRPVDXERGKRPKKKGKKRXKKKREKGKEKGKKKGPQKRPTXKEKRDRKRAKKNNPR

SEQ ID NO: 237242 - protein, 99 aa, Zea mays
  Clone ID: MRT4577_147950C.1.pep
CFFFFFFFFFVCFFFFFFFFSLFFIFINAAGGHWCPRGLHFSTIIPPVRGPKGRKKKLPFLVLQRIWFPGEGAQRRISRGKKTSLASWGLNSCLTQEST

SEQ ID NO: 237243 - protein, 289 aa, Zea mays
  Clone ID: MRT4577_147951C.1.pep
MGAPKWVVAPLALLLLLQLAGASHDVRRSLEAEAASPSVPASILSPLLRTGYHFQPPMNWINDPNGPLYYKGWYHLFYQYNPKGAVWGNIIWAHSVSRDLINWIALDPAIKPSIPTDQFGVWSGSATILPNGTVAMLYTGIDRPGTNYQIQNIAFPKDPSDPLLREWVKPGYNPIAVPEAGMNATQFRDPTTAWHAGDGLWRMLVGGLKPGTLRGMAILYRSRDFKHWVRAKHPLHSALTGMWECPDFFPVREPGDPDGLDTSEFGPHYKYVLKNSLDLTRYDYYTVGT

SEQ ID NO: 237244 - protein, 213 aa, Zea mays
  Clone ID: MRT4577_147952C.1.pep
MPRDALPPQMLLSPPTNGALPSPAAEMSYGLQRGISPHGHQRRSSFPGCKDATTPPTATAPFLPHMLRAAFNAGSHPMSTNGVVPFPAARMRLPHQRQRCPSSPTCCARSRSRATLPPTASLLHQRRPSFPRLPRCRAAYNTRSRPMATNDTLPSPAAEMRPPPLLEEVVPMYLRPAPSTSSPFSENTANLLNLAPPPPYQPSPAWCLDVIPR

SEQ ID NO: 237245 - protein, 60 aa, Zea mays
  Clone ID: MRT4577_147953C.1.pep
FLRVSSRVCIRSPQREPNRLRHQPKLGNVDCACLASQLVPTQLGAFCWGMLVVASLAEFT

SEQ ID NO: 237246 - protein, 116 aa, Zea mays
  unsure (1)..(116): unsure at all Xaa locations
  Clone ID: MRT4577_147954C.1.pep
PLVCKTKCDSTLIVNACNESYALTQQPYLGHMCFQRMKTQQLQQHWLPTINHLCAANIADYFQQQQLIAFNQLAGVNPAVYLQAQQLLPXNQLVGSTDAFLLQQQIVPWHLQAVEN

SEQ ID NO: 237247 - protein, 81 aa, Zea mays
  unsure (1)..(81): unsure at all Xaa locations
  Clone ID: MRT4577_147955C.1.pep
IISREGQVIFEGGENFFKPQYFKSFMLGKFLWAIIETIFVSIPFFFFFRKLVVAKLXXFVFPKVHVEWFCSPEFIWQGCPC

SEQ ID NO: 237248 - protein, 154 aa, Zea mays
  unsure (1)..(154): unsure at all Xaa locations
  Clone ID: MRT4577_147956C.1.pep
MEEFQEADMLWPDVALAHNHGYHRHHRPADSHGRCRQHXSHRSAATTTXPGAAVVHPLQSSPVRIPSMPPTGPRPTSRGSWTRSYKEEEDDDDDGAEEVGVVPPHVLAARRCGEERRVASSVCVGHGRTLKGRDLRAVRNAVLHMTGPAGSSDK

SEQ ID NO: 237249 - protein, 93 aa, Zea mays
  Clone ID: MRT4577_147957C.1.pep
PKQHLRAQVVCFCPPVVRSIPSSFLYIEKQIVFGNKPIGSVNQKAKAPSMPRGVFYIRPDPSDLSLKFHLHVISFQKNNVDDVNKFNDVPGFF

SEQ ID NO: 237250 - protein, 204 aa, Zea mays
  Clone ID: MRT4577_147958C.1.pep
MAEEKSRPRLNERIMSSLSKRSVAAHSWHDLEIGPGAPAVFNCVVEITKGSKVKYELDKKTGMIKVDRVLYSSVVYPHNYGFIPRTLCEDGDPMDVLVLMQEPVIPGCFLRARAIGLMPMIDQGEKDDKIIAVCVDDPEYRHLTDLKELSPHRLNEIRRFFEDYKKNENKEVAVNDFLPPTTSLEAIQHSMDLYAEYILHSLRR

SEQ ID NO: 237251 - protein, 143 aa, Zea mays
  Clone ID: MRT4577_147959C.1.pep
RYRNPGLVLARGRRPFFFFFFFFFFFFFFFFFFFFFFLAQSKKFSKKKTPQKSPEQNRGAFAKPRGQGSKGRGAKPRNKGKAAKTSSPPPVSARGKDPSPKTPGALGGAITRGQTRTRGVFKDPRGKPPRNPLGKGPAPGTGT

SEQ ID NO: 237252 - protein, 302 aa, Zea mays
  unsure (1)..(302): unsure at all Xaa locations
  Clone ID: MRT4577_14795C.1.pep
QQLKXEQGELSSSXDEKKYKALKRAXTEREILQSADVICCTCVGAGDPRLSNFRFRQVLIDESTQATEPECLIPLVLGVKQVVLVGDHCQLGPVIMCKKAARAGLAQSLFERLVILGVKPFRLQVQYRMHPCLSEFPSNCFYEGTLQNGVTVNERHSSGIDFPWPVPNRPMFFYVQVASLTTNGNIDVFQTQTLIWMCCISILXLQMGQEEISASGTSYLNRTEAANVEKIVTTFLRSGIVPSQVFVHSLCVLSSRDLLFFTLYEVKIPDGVSHAFFTQIGVITPYEGQRAYIVITFKECSL

SEQ ID NO: 237253 - protein, 51 aa, Zea mays
  Clone ID: MRT4577_147960C.1.pep
HGAPPFWPIPVTTKTFPVRIEPSLSLWVGPSDPGPFGVRFPLGISKAPSCP

SEQ ID NO: 237254 - protein, 137 aa, Zea mays
  unsure (1)..(137): unsure at all Xaa locations
  Clone ID: MRT4577_147961C.1.pep
LSLLCCLRLLIVVLVSCSLGSSLLCVSDWYPWNMACGALGGCAYLQCGCRSSFLTLAQPSLFSFSIMVARAGSGPCSPSFSLLVGSSSAFAPPCRWLLRIAPSGGHPSGFGGGVRWWSCFQGVPSSACLPGGVGXPG

SEQ ID NO: 237255 - protein, 58 aa, Zea mays
  Clone ID: MRT4577_147962C.1.pep
RLRIHSHPNLPSTLSSRRLSIVAATTSDRISVMDRGRIRFPLHTPDVGGLGSTTAPGR

SEQ ID NO: 237256 - protein, 133 aa, Zea mays
  Clone ID: MRT4577_147963C.1.pep
GNFFLFSLPLGAALGGFSWPFCPLGRVFSGPFGPFFPSFSVEIPWLSPFYNLGKTLAFPGLFPFREVPLSPLFLKGVRPQRGAFPPFFAPFLARGVALSPPFSPLLLGGFWRGPLSFCPLLFAPFFRFFPLFF

SEQ ID NO: 237257 - protein, 72 aa, Zea mays
  Clone ID: MRT4577_147964C.1.pep
WAFGLICRLGAKFLFFFYLFLVFILNTFSNINIFYILTIFKASPHHTPYRLKGKKGVSRLTSPCRLDNYAWV

SEQ ID NO: 237258 - protein, 89 aa, Zea mays
  Clone ID: MRT4577_147965C.1.pep
VEEVIRRANTTPFGLGGGGFTRSLDAANTLSGALRGGPVGVNFFHVFGPPLPFGGSKINGVGRKKGIYAPPSYPQAKAGVPPLKNPPWW

SEQ ID NO: 237259 - protein, 31 aa, Zea mays
  Clone ID: MRT4577_147966C.1.pep
KSSLHFLTLKRSKRYKKSNIPFKTSHHSISP

SEQ ID NO: 237260 - protein, 49 aa, Zea mays
  Clone ID: MRT4577_147967C.1.pep
EAISSSAAEKSTYLLGVLLDSVVTHVTFEILDANGKKPFILLLHRLAHK

SEQ ID NO: 237261 - protein, 74 aa, Zea mays
  Clone ID: MRT4577_147968C.1.pep
AYIYRAATYFCRLCTSSSKMNMLELLVGYPGAPQNTEVVELYTDQFNKKELCSALYKMMHTQVDKALHSIIADQ

SEQ ID NO: 237262 - protein, 170 aa, Zea mays
  Clone ID: MRT4577_147969C.1.pep
SSPLHQVPHPPYRLHFKHVFSNSTSSSPSSIALHTAPNLSHHSLQQPPLHILVHPQTPAVHLCPLLHIFLLQLCHLHPGWHRWLRYRSLSPPPPPAVAAAEARVSAPPPRSSPPPPSVPPPPSGPPRRPSPPQQAPPSPPQPAPLPPQPAPSPSGPSSPAPSSRRQRHPS

SEQ ID NO: 237263 - protein, 86 aa, Zea mays
  Clone ID: MRT4577_14796C.1.pep
RPCELVPLSLVLALWVNAKSTLAHNTILEHRTVGAYCSNTIDELVPSDIFDGVRPIIIDFNTLGDHAVERAADSVGLQVTYSVVIN

SEQ ID NO: 237264 - protein, 51 aa, Zea mays
  Clone ID: MRT4577_147970C.1.pep
QGVLHLTTQNELFTSLAVVVVPDNAGPGETKDGGRVVEIINKLLWLASVCT

SEQ ID NO: 237265 - protein, 123 aa, Zea mays
  Clone ID: MRT4577_147971C.1.pep
LFRPPARSLQSRAGRSRIGHGWSPLRSPLCGGLIVGHSSPSFTWADAQAQCGRIQHPNSMPTVAIGWGRRLPPGGRTTTHTHALVYNNLQCSAVQCYRGNPRPPHAVPCSTTAGRRRHLTPTL

SEQ ID NO: 237266 - protein, 91 aa, Zea mays
  Clone ID: MRT4577_147972C.1.pep
FSAECVRASGASMFELSSGRHSQGGRARFYVHVPAPAASVTPSAAVRTPTCRSMLAWSRRWSCYRFHDCLVQGCDAIILLNHKSEGAEQAA

SEQ ID NO: 237267 - protein, 71 aa, Zea mays
  Clone ID: MRT4577_147973C.1.pep
SDRAGWRNFVCHGPPFAPWAGLRREQLPDTRRALHMHGRAHQVVARRTRATIHGDSTPWEQRGGWRLRTVN

SEQ ID NO: 237268 - protein, 157 aa, Zea mays
  Clone ID: MRT4577_147974C.1.pep
EEEHRLFLLGLKKYGKGDWRNISRNFVQTRTPTQVASHAQKYFIRLNSGGKDKRRSSIHDITTVNLTDDQPPSPSQSSLITSQSNAPAPSPAPAPAAGICQVPLAADVKRHGAGTLPFSSPNRTSAVPAYRMEFHDQQGLQCGPLHDQLLASQSVLF

SEQ ID NO: 237269 - protein, 77 aa, Zea mays
  Clone ID: MRT4577_147975C.1.pep
RVALFVEPSPFAYISGYKNRFQNFIKHLREMGDEVIVVTNHEGVPQEFHGAKVIGSWSFPCPMYGKVPLSLALSPRI

SEQ ID NO: 237270 - protein, 295 aa, Zea mays
  Clone ID: MRT4577_147976C.1.pep
MMRETYMDVLPPVDHIAARSNWFPAAARLWTAAENKQFERALAGLDLCRPDWEEVARAIPGRTVREVVSHFKHLEVDVQQIESGQVPLPAYGGGASSFTLQWDGYGPGPGDFRHGYRFAGGCGRRHHGRTPEQERKKGVPWTEEEHRLFLLGLKKYGKGDWRNISRNFVQTRTPTQVASHAQKYFIRLNSGGKDKRRSSIHDITTVNLTDDQPPSPSQSSLITSQSNAPAPAPAAGICQVPLAADAKRHGAGTLPFSSPNRTSAAPAYRMEFHDQQGLQCGPLHDQLLASQSVLF

SEQ ID NO: 237271 - protein, 78 aa, Zea mays
  Clone ID: MRT4577_147977C.1.pep
VTEPNEFFIRCAKFQTGCTRTIRGPRWHWHVLCIIEVCIEQFAERDLVNNLYKSIIKSFQPNSTCRFVLEVQAGTNRK

SEQ ID NO: 237272 - protein, 295 aa, Zea mays
  Clone ID: MRT4577_147978C.1.pep
MMRETYMDVLPPVDHIAARSNWFPAAARLWTAAENKQFERALAGLDLCRPDWEEVARAIPGRTVREVVSHFKHLEVDVQQIESGQVPLPAYGGGASSFTLQWDGYGPGPGDFRHGYRFAGGCGRRHHGRTPEQERKKGVPWTEEEHRLFLLGLKKYGKGDWRNISRNFVQTRTPTQVASHAQKYFIRLNSGGKDKRRSSIHDITTVNLTDDQPPSPSQSSLITSQSNAPATAPAAGICQVPLAADAKRHGAGTLPFSSPNRTSAAPAYRMEFHDQQGLQCGPLHDQLLASQSVLF

SEQ ID NO: 237273 - protein, 299 aa, Zea mays
  Clone ID: MRT4577_147979C.1.pep
MMRETYMDVLPPVDHIAARSNWFPAAARLWTAAENKQFERALAGLDLCRPDWEEVARAIPGRTVREVVSHFKHLEVDVQQIESGQVPLPAYGGGASSFTLQWDGYGPGPGDFRHGYRFAGGCGRRHHGRTPEQERKKGVPWTEEEHRLFLLGLKKYGKGDWRNISRNFVQTRTPTQVASHAQKYFIRLNSGGKDKRRSSIHDITTVNLTDDQPPSPSQSSLITSQSNAPAPAPGPAPAAGICQVPLAADAKRHGARTLPFSSPNRTSAAPAYRMEFHDQQGLQCGPLHDQLLASQSVLF

SEQ ID NO: 237274 - protein, 142 aa, Zea mays
  Clone ID: MRT4577_14797C.1.pep
MGRVRTKTVKKTSRQVIEKYYSRMTLDFHTNKKVLEEVSILPSKRLRNKVAGFSTHLMRRIQRGPVRGISLKLQEEERERRMDFVPEKSALEVEEIRVDKETMEMLAALGMADLPGVERQAEVSNAPAYGRPQYGGPRRDRV

SEQ ID NO: 237275 - protein, 125 aa, Zea mays
  Clone ID: MRT4577_147980C.1.pep
FQCNNGVVVHLEIFQSLGVFNHIPHTPHDHVLDARRLLYQPVQVMCHATKLSLLFPVELTTCGCCASLGYTCVQLQRIAGRYSSAVARTSEDGWRRTRAMSYLGAEDPGHGDEPRRIPAGLEVPN

SEQ ID NO: 237276 - protein, 105 aa, Zea mays
  unsure (1)..(105): unsure at all Xaa locations
  Clone ID: MRT4577_147981C.1.pep
PLKTLRPSTYGASPPPALVSSTTWHNRIGHTGPDVMSKITSSLDPSCSRXDIXGLCHAXQLGRQTRLPFTTSSSRAEQAFNLVHCDLWTSHVLSLSRHKNYLVVL

SEQ ID NO: 237277 - protein, 122 aa, Zea mays
  Clone ID: MRT4577_147982C.1.pep
KKGGAPLLGPETLNYPQFPRSIGGPSKRRKPCFLKKGLAGLKIFQQPGGKAQWHPKVPAPRPGLLKTQKKTIVFSKVWKPIPQKGLGGTPFNSGGLNLKRGGRKRPLEKQVLKSRTSEKKGG

SEQ ID NO: 237278 - protein, 69 aa, Zea mays
  unsure (1)..(69): unsure at all Xaa locations
  Clone ID: MRT4577_147983C.1.pep
YITSTRINYSLSNKTVLRITCPPLFSIMLFSRSSKKNISTLFFSPSFLCCAFCKLTNNSNNNPARPAXR

SEQ ID NO: 237279 - protein, 61 aa, Zea mays
  Clone ID: MRT4577_147984C.1.pep
YSFFLFFLIFYVFFNSKLFAFNSMVNVIFNFFKIEDTRKVFDEMIIKGLAHRYCHLQHLSA

SEQ ID NO: 237280 - protein, 52 aa, Zea mays
  unsure (1)..(52): unsure at all Xaa locations
  Clone ID: MRT4577_147985C.1.pep
MKSLSDETNRSSQFYLLGNLPXKKKKKKKKKKKKKKKKKKKHKKKKKKKKIT

SEQ ID NO: 237281 - protein, 65 aa, Zea mays
  Clone ID: MRT4577_147986C.1.pep
HPIYSWTDDIYFWQPSTIIDHPHKQKEYFVRTLSSLTHTREDFLVNHPSQDCSGPSTLNPEILSR

SEQ ID NO: 237282 - protein, 68 aa, Zea mays
  unsure (1)..(68): unsure at all Xaa locations
  Clone ID: MRT4577_147987C.1.pep
MASSELDCTYAVLILSDDGIAITDEKIDSIVKAANIKVESYWPALFAKLLEKRXVDDLIPPLDQWWRA

SEQ ID NO: 237283 - protein, 172 aa, Zea mays
  Clone ID: MRT4577_147988C.1.pep
MGRYKPSFLPEEPSTRSSLGASNSNNTIDENNPPRASLQNDVATCLRCVETTNLDKPSTPPRSKRLAFDNEFSVFEFEDFGEEDETLFPNLKLTPKAKKAKAASASKAEKGPCIDQNAVRLMRGMTSTRRKGLMDCIAQQTAKHESSRYPASDPLDKKKRKPVLQYYVNVKN

SEQ ID NO: 237284 - protein, 54 aa, Zea mays
  Clone ID: MRT4577_147989C.1.pep
TLLNYRPPPLPISISPPFFILVSPHTSGAPTHHHPLLILNAASSTYLRIIFISP

SEQ ID NO: 237285 - protein, 94 aa, Zea mays
  unsure (1)..(94): unsure at all Xaa locations
  Clone ID: MRT4577_14798C.1.pep
HPIPRPAVLTPGSSLGSYIVLTNQHKSLCALCPHSCAPEITSRSVTHPKLLQAKHXLTWRFFRNRLPKKKMHLVGMDTLLILLSLGLGYPHLRG

SEQ ID NO: 237286 - protein, 63 aa, Zea mays
  Clone ID: MRT4577_147990C.1.pep
KKNLRWSIFFWLCIQTRLRTPPGGSPYYKKRPPPGGMLFPVVTTLVLRGPIKHKRLVFLSKHV

SEQ ID NO: 237287 - protein, 139 aa, Zea mays
  unsure (1)..(139): unsure at all Xaa locations
  Clone ID: MRT4577_147991C.1.pep
MGLSASALETSIHQFTVNDCXNFKEVSLSSYKGKVLLVVSVASECCFTXPDYTHLTQLYHKKSDKNFEILPFPXDXLLRQEPGTDQFIQDFACTIFNREYPVFQKELVNAPDAPPLYKCLKDSKPGLPWVIKDPPATLP

SEQ ID NO: 237288 - protein, 245 aa, Zea mays
  unsure (1)..(245): unsure at all Xaa locations
  Clone ID: MRT4577_147992C.1.pep
MASGKHFKYIVLGGGVSGGYAAREFAKQGVQPGELAIISKEAVAPYERPALSKAYLFPQNPARLPGFHVCVGSGGERLLPEWYSEKGIELILSTEIVKADLASKTLTSAAGATFTYDTLLIATGSSVIKLSDFGTQGADSNNILYLREIDDADNLYAAIQAKKGGKAVVXVGGGYIGLELSAVLKMNDLDXTMVVPEPWCMPRLFTAEIAAFYESYYTTKGVKIVKGTVAIGFDADANGDVTAVK

SEQ ID NO: 237289 - protein, 78 aa, Zea mays
  Clone ID: MRT4577_147993C.1.pep
IFTGEVLNYLWFSLFHTNSFIIIGSVCRIFGATKKPGPKKKGGPEPEPQYHEHCRGGAEGGPKKKGGKSHTVNTPRGG

SEQ ID NO: 237290 - protein, 47 aa, Zea mays
  Clone ID: MRT4577_147994C.1.pep
NVVVTQSRQRSVNASGPPLHAHIVHPDIRISRAYQLRTTKISGLEYD

SEQ ID NO: 237291 - protein, 60 aa, Zea mays
  Clone ID: MRT4577_147995C.1.pep
ERAGIPLLRPLAAIFPHLVSECGDLKLGRPLKELRAAACPLGCRLYVRGEMPIKKTPILF

SEQ ID NO: 237292 - protein, 105 aa, Zea mays
  Clone ID: MRT4577_147996C.1.pep
KRGSAPKKISLVTPGFFHLLSFKKSGPLIEFMVSLIKMYIRCMPANENLCPFKSSALFFFFFFFFFFFFFFFFFFFFFFAKNKIQIFIVDSAFYLFTSDQRNQKI

SEQ ID NO: 237293 - protein, 89 aa, Zea mays
  Clone ID: MRT4577_147997C.1.pep
MSLVPNPRDIARSGAVIDVAPPRAHQAYEPGLINVMSLDPSSFYNSLNTSSDGSSLEPKDTSNEPSLYICYVIKGDGASTLLRAYLTKE

SEQ ID NO: 237294 - protein, 152 aa, Zea mays
  Clone ID: MRT4577_147998C.1.pep
FFLFLLSFSTMGLRKDSAFMWSRCAGASFYDERHFTSTHASARYRSIARLYGAANVVADAMPGRPPDARLRRRPRAADCVAMRWGLRATGAERACRGSRTRAAGASPVPSGRPRPSLAGIVRPRRGRVLPCPRRGRAVGPAPLCPHAVAGQV

SEQ ID NO: 237295 - protein, 71 aa, Zea mays
  Clone ID: MRT4577_147999C.1.pep
TLFVTHYHTNEGTKRHLRMRIRILASSGSRQLLIGFPVATRELTRAELYNQDNPVLNVFGQILHSPRERMR

SEQ ID NO: 237296 - protein, 67 aa, Zea mays
  Clone ID: MRT4577_14799C.1.pep
QPPQRSPLPPDHRGSPPSTPPLLFLSWLDHSFLRVTVTIQRTRSSACVLVVECVHTRVRTRGRTSGR

SEQ ID NO: 237297 - protein, 41 aa, Zea mays
  unsure (1)..(41): unsure at all Xaa locations
  Clone ID: MRT4577_1479C.1.pep
MHARLHSTKVLGTFGYHAPXYAMTGQVNTKSDVNRFGAVLL

SEQ ID NO: 237298 - protein, 169 aa, Zea mays
  unsure (1)..(169): unsure at all Xaa locations
  Clone ID: MRT4577_147C.1.pep
MYRAAGSHLRSLKHHGASRLASTSVAKQSSDFVEPSKTKVTTLPNGVKIASETSSSPAASVGLYIDCGSIYETPASSGVSHLLERMAFKSTVNRTHLRLVREVEAIGGNVSASASREQMSYTYDALKSYTPEMXEXLIDSVRNPAFLDWEVKEQLQNIXSEIADASANP

SEQ ID NO: 237299 - protein, 62 aa, Zea mays
  Clone ID: MRT4577_148000C.1.pep
NPIRRYNRTVRSVLMTCSTLGPFLKEGEPALRPYVPVRGLPCCKLSFERFHELRTALCYSVI

SEQ ID NO: 237300 - protein, 141 aa, Zea mays
  unsure (1)..(141): unsure at all Xaa locations
  Clone ID: MRT4577_148001C.1.pep
GFGKARPGRPTRSRGASHSVGTILYEIGRASLTGPPNFEHPQPALDPRSNDQARAAMKLTMPSSYGFPPTGGCAGHRRPLSGRLTVMYCXSPEDTSLMMADADADRLWEALAEELSYLFSAAVLVTGSGPLTGESSPDATD

SEQ ID NO: 237301 - protein, 150 aa, Zea mays
  unsure (1)..(150): unsure at all Xaa locations
  Clone ID: MRT4577_148002C.1.pep
MRLLHDPVSYRSVVMAADAFAIDDDNIFQYLEASPHTFDDLSTIFYTKVYRXEQEWFLYIFGGSENEDALSXHYELLIQRLCVPPLFYPEXGHPGLIGGCRHFLPSRRAXERRLHSHAIRFWTQAESTXGASTTNLMCFFRCSAYFLVCV

SEQ ID NO: 237302 - protein, 52 aa, Zea mays
  Clone ID: MRT4577_148003C.1.pep
LVLTIHHAHLLFINYSQVGADALTGAAPCSHPGAAFGGGATVFFHTPLARGA

SEQ ID NO: 237303 - protein, 71 aa, Zea mays
  unsure (1)..(71): unsure at all Xaa locations
  Clone ID: MRT4577_148004C.1.pep
MGYYQEVDYCSEEVRSVAPCGFGRHGGGVQQHVVKEKFVEVDSVVRSCANHHHXHFGDHGGHGFVVRETRV

SEQ ID NO: 237304 - protein, 577 aa, Zea mays
  Clone ID: MRT4577_148005C.1.pep
MKEKGEIAKEEQEVGKHNVCCTSEGTTRHETRRELSIKAKEFRIQTLERTLEKERDDNKKEKAKSRRNENTIFGALQKVQQDKKQVEESIDKHKQAVRELIENYPGLSSEVPPISALEEQLLSYFRAAKDMEESSSPFRDGAATQTPVVETAPVDAPTSAGVAGRPVDTSSRPAKAKMTEERAVPKPSSEVRRPGGRRPLVRPTLERTEEPHADTDISAVDASTVQDKGGPPAEQETSGILPVLQPLSRKRLITSSQTVDSASQGEANDVNPPSKKPKEEESSQGTSELKSGQPPLGDVAAQVNVLPATDDLDGQQPTEEIDTDQAPEPMVEVEATREEDGGDKDDSGDASTDIKGQDADANIDANAIPLEEEHVVAKSEAIIESFDDDRKTEDSKEDAQRTTATDVDDDMEEGELAEEPEDKSDVDMSEIEGEATAERAAVEPDQSPITQPGAADASPSRTADASPAREPSPSPVQAGASSRPQNTSTATEAREPSSNPAQAGASSEQRNTSTVVEAAETRSRTINLSERARQNRQTRFQRAQQPGTARGRGQQSVTLRKDATGRGSRGRGGRGQS

SEQ ID NO: 237305 - protein, 86 aa, Zea mays
  Clone ID: MRT4577_148006C.1.pep
HAFNVQAPSLQKHRLWLRPSTFRLRRLLRLSSESQQAGGQATARSQARASLSITLVAMFGTRTVWWNAVAMARQQERVVACRRAID

SEQ ID NO: 237306 - protein, 103 aa, Zea mays
  unsure (1)..(103): unsure at all Xaa locations
  Clone ID: MRT4577_148007C.1.pep
LHLVLQXASXXLQRXVGGGNPGSGTWCLFLLEPPSLLTLWQEVQAFGFTVYPHPPRWSNIRGWSPYPTVSCPPTSLPRAHXMXAVLARXMRPSMXICPPLPLT

SEQ ID NO: 237307 - protein, 181 aa, Zea mays
  Clone ID: MRT4577_148008C.1.pep
GNLNLKRKHDNLMKEKGEIAKENQSLVKQMEDLKSTQKTTSETTLEQAIKEKDFRIQTLERTLEKERDDNKKEKAKSRRNENTIFGALQKVQQDKKQVEESIDKHKQAVRELIENYPGLSSEVPPISALEEQLLSYFRAAKDMEESSSPFRDGAATQTPVVETAPVDAPTSAGGDSVLILF

SEQ ID NO: 237308 - protein, 119 aa, Zea mays
  Clone ID: MRT4577_148009C.1.pep
MLACVCMSCTSMQLDGEAASLCGGTAAASYAGLRDGNHSFTACASTTSASNSSSSPSPTPTCATYAWDTLSPRRRPCAGRRSRARPPPCRRSSPSPSPAPRGWIRLQRHLLASHRVRLR

SEQ ID NO: 237309 - protein, 139 aa, Zea mays
  Clone ID: MRT4577_14800C.1.pep
MGRVRTKTVKKTSRQVIEKYYSRMTLDFHTNKKVLEEVSILPSKRLRNKVAGFSTHLMRRIQRGPVRGISLKLQEEERERRMDFVPEKSALEVEEIRVDKETMEMLAALGMADLPGVERQAEVSNAPAYGRPQYGGSPP

SEQ ID NO: 237310 - protein, 56 aa, Zea mays
  Clone ID: MRT4577_148010C.1.pep
GRPSVRAGFLVYMALVELLTEDFMNPRVQSRGKLQLGINASMLVGAGLMSMLAKWA

SEQ ID NO: 237311 - protein, 104 aa, Zea mays
  Clone ID: MRT4577_148011C.1.pep
RIVAVRPLCHLQCPVNVIKSTGKDSVRRTGGKGFLRRTDCVPQSFGLEPLEPNPCGGNDKYLNLGEPRTDAPVANLNFDLEACTHNQAHGNCWPLDFQQSATSN

SEQ ID NO: 237312 - protein, 115 aa, Zea mays
  Clone ID: MRT4577_148012C.1.pep
WFIWMSMFDILVSSESVEFAISTIVLFNDLLVDVRVQARRIRDTCKTGSRRAYAVVIVPVKPRWREGCLGWVGQGVVLLLPLPISLRSLRFRNKGLYSRGDRPCTLALGEIEGRH

SEQ ID NO: 237313 - protein, 211 aa, Zea mays
  unsure (1)..(211): unsure at all Xaa locations
  Clone ID: MRT4577_148013C.1.pep
YRPNSRGFVVATNXIENGVTLXIDVVVDFGLKVSADLDVDNRAILYKRVSISYGERIQRLGRVGRNKPGTVIRIGKTMKGLQEIPAMIATEAAFMCFAYGLKVITHNVSTTHLAKCTVKQARTMMQFELSPFVMAELVKFDGSMHPQIHEALVKYKLRDSVIMLRPNAIPRVNLHNWLTARDYNRIGCSLELEDHVKIPYYIRGVPDKLYG

SEQ ID NO: 237314 - protein, 55 aa, Zea mays
  Clone ID: MRT4577_148014C.1.pep
FHPQPKALGGGVFVTVASTTSKGMGNPFQKESSGQYTQGLKSNVASGDRSSRMPK

SEQ ID NO: 237315 - protein, 51 aa, Zea mays
  Clone ID: MRT4577_148015C.1.pep
ITINHYLYTIPKYKHHLKRLTFALTQPPTQHTFNNQSFLSIQQSHNRPKQQ

SEQ ID NO: 237316 - protein, 77 aa, Zea mays
  Clone ID: MRT4577_148016C.1.pep
INRGQKCSIFTILHQFHKDNALHEWTRMTTYSANSHYIIPCSLYKVLLALTACPLHSSIQHSSLQAVIRIHALVCLY

SEQ ID NO: 237317 - protein, 89 aa, Zea mays
  Clone ID: MRT4577_148017C.1.pep
GCGSQLRSVCKSSPGLPAHQLHSSLHSAQLRGFLEPGWSCIAICWPRGTAGSWSQQESEAAGLEGLFTVPSREPSCRSIPAGTSGSLPR

SEQ ID NO: 237318 - protein, 200 aa, Zea mays
  Clone ID: MRT4577_148018C.1.pep
SMPAGPERLFSLLPPSMNASMAGPRSSLLDTLSSSLFSSINWTVVPMSSPSPNSLSLSRSPCSRHRSRPRRRMPSPELVPTTRELVRAAPRHPQQRHVPAVEPLLAPCLLAVVKLVAGPSTFPAGASPSAQLVAGPSTFPAGASPSAQHPVTVTTPFDNRLPSVETRRSSFTPLAVVPRHRNAHRRPCPFIPRLKITPTR

SEQ ID NO: 237319 - protein, 129 aa, Zea mays
  Clone ID: MRT4577_148019C.1.pep
PQVLPLTPRTQRRGRRRRSAIAHSVSAGVPPCWIFRPALLSRPSAPAHGTTLSPPLSVAAAGSQSGGGTLCSDRSPRSTPSWRPTPRWRRASTCRPCMIFFITLITSRSRLTLSCVTLTSLRLLRAQIL

SEQ ID NO: 237320 - protein, 176 aa, Zea mays
  unsure (1)..(176): unsure at all Xaa locations
  Clone ID: MRT4577_14801C.1.pep
SRRRAGNRPVNAHCSSTSGSPVRNPPLPIPRWPLHLIKFARAPTGDEERRAIRTDGGERETRLGGTTRAGSEGAENKGKKNATKTVXTYXIYIFLVLXSRSWTLCISSKAMSIMNSFIIDIFDRLSAEVVXLVRYXKKPTITSRDIHTSERLVVPGELAEHAVSEGTHDDAKFASS

SEQ ID NO: 237321 - protein, 95 aa, Zea mays
  Clone ID: MRT4577_148020C.1.pep
KWQSLKSCGLVSALRSGGEPNPHPRFAGSFMARPILLRITQTTAHLHRWRFVVLLATGTWVSRCPVLKDNQANSVKECQGLSSSQVQTPWVLSLQ

SEQ ID NO: 237322 - protein, 69 aa, Zea mays
  Clone ID: MRT4577_148021C.1.pep
LLCILMRPPSFFPIQANFLFIIDLLIPQDFPIFQNVILRLVYESLSNLYFLWFMAPQHFFCSPPVIIEF

SEQ ID NO: 237323 - protein, 223 aa, Zea mays
  Clone ID: MRT4577_148022C.1.pep
MLFLLPIYGITFCFIFCINYSLDVYNCQILFSNTMGKNIWLILSLCTTMITACSQEQMQEMASNAMVTQNRTPDKTWRVKPGSVHDGDTFRAVADVTNEEIKVRIACIDAPEIKQAGGIESRDYLRGMLTDNREIILMGAEKDQYGRSVVEVFAMTDTPGLEVGVNGEMVLAGMAHYYEGHKRSCPENAEQYEFLEQEAISNKAGVWANGDAERPWDWRRRNK

SEQ ID NO: 237324 - protein, 61 aa, Zea mays
  Clone ID: MRT4577_148023C.1.pep
NGDGGSISGDVEAAALVAPEGAGAAIIGLPQATGSWDLNLSFPLPGLASPAFRGFILRGMS

SEQ ID NO: 237325 - protein, 87 aa, Zea mays
  unsure (1)..(87): unsure at all Xaa locations
  Clone ID: MRT4577_148024C.1.pep
TQSYFNARXPSFAHYSIFMALDVYENYYLIKYRLPQDICFHLDNTSSAHIYVRLNKXSSMYDMIXGXLEDYSHFVEATSIHPNKLNH

SEQ ID NO: 237326 - protein, 117 aa, Zea mays
  unsure (1)..(117): unsure at all Xaa locations
  Clone ID: MRT4577_148025C.1.pep
AGTEDGSKEPQATPXAGXGAAXSRXHPTKXAGXPAEKRREDGATGGXXNTGGAGGRDGXGKRNRAPDTRKTSDATHXGERRTANHQKTEAGGQEXXTENNGAPPEXXDPNNTXTDKA

SEQ ID NO: 237327 - protein, 97 aa, Zea mays
  unsure (1)..(97): unsure at all Xaa locations
  Clone ID: MRT4577_148026C.1.pep
TEWVSYKNAGNAILCEXVETVMSIESTSGLRVLAINIFGRXLVVAXHNIGCVALNMLIKAIARYTQAVQRRKATIXERVEDADGHIRXQAQELLYLL

SEQ ID NO: 237328 - protein, 67 aa, Zea mays
  Clone ID: MRT4577_148027C.1.pep
KFELVERMSYSFVLYSTIKESYVVLCFERLGVRILNRHDHLIYIILRGWFYRSRKQTKNTFSYKRTN

SEQ ID NO: 237329 - protein, 113 aa, Zea mays
  Clone ID: MRT4577_148028C.1.pep
FLSLFSDRIQRNHYFTTMVLDSLSSPHRRSQNIFFVSSSKKPQSSRDDSWSALVERHRFLLTTLLVLAFLCSIYLYFAVTLGASDACSGLTGGAQKIECQARSVLQHGKLKFR

SEQ ID NO: 237330 - protein, 40 aa, Zea mays
  Clone ID: MRT4577_148029C.1.pep
ATARSKLHGDEFPAVCLCPRCSGAVTCSNFSHAILYATRS

SEQ ID NO: 237331 - protein, 52 aa, Zea mays
  unsure (1)..(52): unsure at all Xaa locations
  Clone ID: MRT4577_14802C.1.pep
DAWVREHDRTTIHEAMEQQTISIAKAGLVTTLSTRTTXFXATNXKGXYDXXE

SEQ ID NO: 237332 - protein, 50 aa, Zea mays
  Clone ID: MRT4577_148030C.1.pep
GNTAPRAHNIRNNDIDDPVQSPIPSAVSINGAKHVGPTNRRVGKISPYVK

SEQ ID NO: 237333 - protein, 130 aa, Zea mays
  unsure (1)..(130): unsure at all Xaa locations
  Clone ID: MRT4577_148031C.1.pep
MGGKGDGPGIGIDLGTTYSCVGVWXHDRVXIIANDQGNRATRSCGGCTDSERVIGDAAKNQGRMNPINTGFEAKRAMGRRGREAAVQSEIKVWAFKGISGPGEKPMSVXVXRKGEEXXVAAEKISSMGLI

SEQ ID NO: 237334 - protein, 61 aa, Zea mays
  Clone ID: MRT4577_148032C.1.pep
STRSPTRTPSRSESSITNRLARNCSMDACSSFTLKPIFFHSLHIYVDRSFLPTYIILTSFY

SEQ ID NO: 237335 - protein, 53 aa, Zea mays
  Clone ID: MRT4577_148033C.1.pep
RSAEVETEPARSLNGDSIDKVELEYAYAPRRRRLKGEDMVTGEPLEQKHRREE

SEQ ID NO: 237336 - protein, 67 aa, Zea mays
  unsure (1)..(67): unsure at all Xaa locations
  Clone ID: MRT4577_148034C.1.pep
GDYLITLWPEYRRAETNTKQSNVIPLVIECRFNKQTKRYQCFYYEGYGHHKPVKKPPVLAGVVLKXE

SEQ ID NO: 237337 - protein, 70 aa, Zea mays
  unsure (1)..(70): unsure at all Xaa locations
  Clone ID: MRT4577_148035C.1.pep
PWEKKRHWNRENRNAPTLYNKVHIFTFCPQPRNHVLKVVMHPGRCVATHTRGIGPTKTTSXKGNIDEGTT

SEQ ID NO: 237338 - protein, 86 aa, Zea mays
  Clone ID: MRT4577_148036C.1.pep
TKPTLTNLKKQMPKMIPPQCKKKTETLYKTDKTKTTMLLFHYTREHSNQNKTKAFQKTRYSPKPPPFKSLPPTPKDPKAPSPPDHC

SEQ ID NO: 237339 - protein, 74 aa, Zea mays
  unsure (1)..(74): unsure at all Xaa locations
  Clone ID: MRT4577_148037C.1.pep
TRGGCLPPLQRLFMVVVITPLTYLGRNSLIAMSCSLLVHLPLSGRPSVVTSPRRVSPPVGRFSGFPXCDSLVDD

SEQ ID NO: 237340 - protein, 95 aa, Zea mays
  Clone ID: MRT4577_148038C.1.pep
TAHAELGRAHALLDHSVRHVEAALLQVTGCSCRCKFRARVTGGGAMSSEVASYVSSVVTAEGGDAEVDDDDPYRHHRQLTADDDAPSHARMMDIN

SEQ ID NO: 237341 - protein, 72 aa, Zea mays
  Clone ID: MRT4577_148039C.1.pep
MEHYRKAGSVELPAPSPLPQLPPDILEMRVRDGSRIRNLLGLAQGRLEGGSALQVVLSGSGRAARNAVSFAE

SEQ ID NO: 237342 - protein, 133 aa, Zea mays
  unsure (1)..(133): unsure at all Xaa locations
  Clone ID: MRT4577_14803C.1.pep
GPKFFFFWGGKKRKIGPNTVYQCAGQFGGIDEGITPPPGETPEGMTPRQPGGAPLGSRXPRGKTAKGKRPPPGSPQPGVHPXREKGGGPPGVAPPFFRPKRCPCKPPTKRSSPPGGCRPHSPLHFLTGAPFNT

SEQ ID NO: 237343 - protein, 44 aa, Zea mays
  Clone ID: MRT4577_148040C.1.pep
ARYNKKPTITSRKIQTSVGLVLPEKLAKHAVSEGTKAVTKFTSN

SEQ ID NO: 237344 - protein, 29 aa, Zea mays
  Clone ID: MRT4577_148041C.1.pep
LATQRLFEVYFCFLKSRFIHKGFINLAGV

SEQ ID NO: 237345 - protein, 61 aa, Zea mays
  Clone ID: MRT4577_148042C.1.pep
HVCCYTVNRIFGGVPINMHSLSSICVSSHKTTYILGFSAILKRIICMGDELCGRVRRPGFS

SEQ ID NO: 237346 - protein, 134 aa, Zea mays
  unsure (1)..(134): unsure at all Xaa locations
  Clone ID: MRT4577_148043C.1.pep
KEKKSSEELRAIIKNIGDIGKEIEEDGRRINQLRSQIDDIRRRQQNKLTAFGGDRVPSLYKSVERHMSKFKCPPIGPIGYHLQLASDSWSVAIEYALXRLLDAFIVSCHKDSLVLRECAKEVNYRNLQIIIYDF

SEQ ID NO: 237347 - protein, 85 aa, Zea mays
  Clone ID: MRT4577_148044C.1.pep
NLAQGGPEFNPKKRVAPRAANFGGAFPVEFGSCQFPSNFPGGQALPQQKKVPFLNPALEIEWEGKEKFKWGSHVFWKWLNRGGFI

SEQ ID NO: 237348 - protein, 61 aa, Zea mays
  Clone ID: MRT4577_148045C.1.pep
DEGAVAEDPQHRRAACGVSDPPVEGEVEGEARPARTTSRRARAVEQEGSQSTWHCAPIVLR

SEQ ID NO: 237349 - protein, 74 aa, Zea mays
  Clone ID: MRT4577_148046C.1.pep
ACNFSFFVKGVILAQQKICLSHYSGPLWQGRRAPNGFGSGFSSFLVSLEKPEPFCNSFGKTASHEETVAETVIS

SEQ ID NO: 237350 - protein, 85 aa, Zea mays
  Clone ID: MRT4577_148047C.1.pep
MAVAWTSPLSAKPATSRSPRGPGCGVLAVGVRRAAGTAGWRRLRVEAIRTQRTEVPVEESATGRYASAGAPLDANGAGANGSVVR

SEQ ID NO: 237351 - protein, 146 aa, Zea mays
  Clone ID: MRT4577_148048C.1.pep
RGRPGSPIQDRRRPLCRRPPSSGRTSSRARRPPPAASSPRIPVTSWPYTSLLLLPLALLLLALPLPVVLCLRLLRSLTSRGSPRPARSVEVPTTHPTAAAQPRNGAPIPRRLLRSRSQRTSRVLRPPRIGTSPRSSQCQTQSSDSS

SEQ ID NO: 237352 - protein, 51 aa, Zea mays
  Clone ID: MRT4577_148049C.1.pep
RVCQSKALSITSSTTSRFRKSEGVVLCIVKDSLNNTSKKRIMKRTPRKTLL

SEQ ID NO: 237353 - protein, 147 aa, Zea mays
  unsure (1)..(147): unsure at all Xaa locations
  Clone ID: MRT4577_14804C.1.pep
QTRRCELDCLEHGIHDDGXMRGHQTIGAGDDALRTFFSXNAAGKXVPFADCGELAWSGVHEAKTEAYREVLHPEQGISGKEDADNNFDRGHXPIGKEIVDLCLDRIRKLDDNCTVLQSLLXIFNAVVGRMDFSLDSILLXRLSVDYG

SEQ ID NO: 237354 - protein, 74 aa, Zea mays
  Clone ID: MRT4577_148050C.1.pep
VLKTFNAMSDSYYPSNVLVSLYSRSCGQRLNHCPDVGHHHIVYTAPVDSLGLRQHALCAKQLHLAGRLSRTSWV

SEQ ID NO: 237355 - protein, 68 aa, Zea mays
  Clone ID: MRT4577_148051C.1.pep
RAVRRPSYHYRKSRRAASCRDESTRSIWSCSCFRNTVEPFKSHEHYLWDSTPDHFPPLHGILTMYLFM

SEQ ID NO: 237356 - protein, 94 aa, Zea mays
  Clone ID: MRT4577_148052C.1.pep
PMLAHLWVKNLRAQKKTGLLFKIRVGTDLIKPGKLGWSRTFEKKTFFLPFLPIKGLHYSLVLVRGKTSFYQKLVQRSKSKQDTGRVENVKKTGA

SEQ ID NO: 237357 - protein, 195 aa, Zea mays
  Clone ID: MRT4577_148053C.1.pep
IRHEGRPAWKVLHTASPPPIARQECRHPERCFSCRLTGHRAHVCPRRRSAPPTPLSAKVRRAVPHILPAMRALACIADGHEGGNITCSSGGTGGGGHRRTRRRHRRRRPTGAAGVEDTNEPAEVLPQPPPDAVRAISLPPPPFRGCFLKRSRRIAHAEDDLHSAIVICVVDMGRSGCAAEVSDALASRFDLDGNA

SEQ ID NO: 237358 - protein, 87 aa, Zea mays
  unsure (1)..(87): unsure at all Xaa locations
  Clone ID: MRT4577_148054C.1.pep
PSPATEKDTGQQETNPPQHRHHQGYSFFNPSYKGSHSTRDKLXRETTVLRDKYTICSTSPLHPTWKATWSSRREALLIGRPVYQKVD

SEQ ID NO: 237359 - protein, 75 aa, Zea mays
  Clone ID: MRT4577_148055C.1.pep
PQKELHNIAKCMYVSHSRHLPPIPCRQYAIGSRSKALTIDMELTICAIILPKAMNVFSCKCAWVGACVRATPAET

SEQ ID NO: 237360 - protein, 56 aa, Zea mays
  Clone ID: MRT4577_148056C.1.pep
SMPSRLSHYESDDIVICYVHYMIMYRGGIVYLAWGVSFLLCSYLYHIHALNVTRYL

SEQ ID NO: 237361 - protein, 65 aa, Zea mays
  Clone ID: MRT4577_148057C.1.pep
SISPSEEVGSSMTLVLLEQSTFYIEHVVDYVKASQSEWAFPFIFCEQTPCWIQIICGMAVNCTVD

SEQ ID NO: 237362 - protein, 182 aa, Zea mays
  unsure (1)..(182): unsure at all Xaa locations
  Clone ID: MRT4577_148058C.1.pep
MERVRRASHAGSWYTNNASKLEEELDGWLSAAALTKSPDVRAVIAPHAGYSYSGRCAAYAFGNIDPTNIHNVKVVPILVGAVNSQNEAMYGQLLAKYVDDPKNFFSVSSDFCHWGSRFSYTYYDKKHGAIHKSIEALDRLGMEIIETGDPDAFKQYLEEYENTICGRHPISVLLHXMLKHCS

SEQ ID NO: 237363 - protein, 255 aa, Zea mays
  unsure (1)..(255): unsure at all Xaa locations
  Clone ID: MRT4577_148059C.1.pep
MERVRRASHAGSWYTNNASKLEDELDGWLSAAALTKSPDVRAVIAPHAGYSYSGRCAAYAFGNIDPTNISRVFLLGPSHHYYTPKCALSRATVYSTPIGXLPVDLEVIEELKATGKFEFMDLNVDEAEHSMEMHLPYLSKVFQGHNVKVVPILVGAVNSQNEAMYGQLLAKYVDDPKNFFSVSSDFCHWGSRFSYTYYDKKHGAIHKSIEALDRLGMEIIETGDPDAFXQYLEEYENTICGRHPISVLLHMLNTA

SEQ ID NO: 237364 - protein, 45 aa, Zea mays
  Clone ID: MRT4577_14805C.1.pep
SFPGKPHKRGGLFIVLRGNPKKHLIYLKNNLKNKSRTGLLIFFIP

SEQ ID NO: 237365 - protein, 228 aa, Zea mays
  unsure (1)..(228): unsure at all Xaa locations
  Clone ID: MRT4577_148060C.1.pep
MAFSFANVNSEAGLXKKLDEYLLTRSYITGYQASKDDLAVYSSFSAAPSSIDINVAWWFTHIDALLRLSGVTAEGLGVKVESSAVPSASTPDVAEAPAADDDDDDDVDLFGEETEEEKKAAEERAAAAKASGKKKESGKSSVLLDVKPWDDETDMAKLEEAVRSVQMEGLLWGASKLVPVGYGIKKLQIMMTIVDDLVSVDTLIEDHLCAEPVSEYVQSCDIVAFNKI

SEQ ID NO: 237366 - protein, 101 aa, Zea mays
  unsure (1)..(101): unsure at all Xaa locations
  Clone ID: MRT4577_148061C.1.pep
RVAYPDKGQPPPPQRDAHPHXEKGRXTHEKDAQQRXKETSPRRTTPTPLRKPSPSRRAESXRRHPXPKTKRRTDHPPTPPRTTNLLLSARDDTHHKCFFFS

SEQ ID NO: 237367 - protein, 65 aa, Zea mays
  unsure (1)..(65): unsure at all Xaa locations
  Clone ID: MRT4577_148062C.1.pep
KNELIFYLSRLNLKMKPTVKRKAVTAETEAKLLYRASHIYPSPGGGGGNTXXXPXNGSGGGRPPL

SEQ ID NO: 237368 - protein, 63 aa, Zea mays
  Clone ID: MRT4577_148064C.1.pep
VPGRSIRGDPRVRSYGPEFRGTIGSGVMSPEGSQPNTLYDAMKYPVEMLRIDISLVDQDTCST

SEQ ID NO: 237369 - protein, 101 aa, Zea mays
  Clone ID: MRT4577_148065C.1.pep
THASTLLPNSSHIQSSNKLSKRKVEHFFIPLVLTCISNIHNSWLFDNYIKKNLLPFDFRPKKTRSIRRTRNQTPSILVDRELKEPLQAFYDLELQYHLLHQ

SEQ ID NO: 237370 - protein, 198 aa, Zea mays
  unsure (1)..(198): unsure at all Xaa locations
  Clone ID: MRT4577_148066C.1.pep
LKEIEYSKARIXQENEDLRSKLKEYQEAQIGGADAVVSLKSLREKFRALEQTHRSCTEKLRGKEEEWRLQMTKLVNDLDGCLSQLESKDILIVQLQNELLGSHRSLELQTVDNWEALIILTVVQTKFYESCSFVDTAKLNMQHHCEEIEKEISSAKKQLEEQSCIIAQSQAEQKQQSGVITKLHARIEELEHMEQEHK

SEQ ID NO: 237371 - protein, 81 aa, Zea mays
  Clone ID: MRT4577_148067C.1.pep
VAVLRVMDYSGFKVNDNISGHVLPSGSFNYVGVESIIRCVIWCCLRGLVTVSCECHGKGQSRLGSPLFGDLVLRLCSDVCW

SEQ ID NO: 237372 - protein, 74 aa, Zea mays
  Clone ID: MRT4577_148068C.1.pep
TLNSSSSWVSFLEDSLSLPSSLERLERMTETNRINLYTSPIDGLGLRIELLLVAGSRCGGSGARVQASFDGAGG

SEQ ID NO: 237373 - protein, 97 aa, Zea mays
  Clone ID: MRT4577_148069C.1.pep
QIDLGERTARHAKFVTRTINVVKRAAKIHLKDVSRACLYENSRRMQTPVHFLTTDTSPTTAFVNTPQFDTNACRGDLNAYSTVRPFHMIPRTVYDDS

SEQ ID NO: 237374 - protein, 139 aa, Zea mays
  Clone ID: MRT4577_14806C.1.pep
MRNPLRWLQNDDFAYVVQRLIEGLITLLLASLLSFAIVQLAPGSYLDTLQQNPKISPETLQQLKVQFGLDQPWYVQYWRWLTQVVTRFNFGESFVYNRSVASLLIERIPATLLLAITSIILTWAIAIPLGIVGAVQQNT

SEQ ID NO: 237375 - protein, 75 aa, Zea mays
  Clone ID: MRT4577_148070C.1.pep
FCSHLRCLCFPQLGTFFPSFFPFHFFRFRFKACSVIVCPKIVETCCPPVYLLIISVHAGLSNPPLKKPKKKIISV

SEQ ID NO: 237376 - protein, 447 aa, Zea mays
  unsure (1)..(447): unsure at all Xaa locations
  Clone ID: MRT4577_148071C.1.pep
STVQSSIAMKMXEMGTELIDQLTSEERDLLSRLNPELXDLKERFLMCKNSRIEIEARKEELETNLSTNLIRRQKELEAIISSADSRTLPLEAEAKEQELKSSKRNLDELTSLLKANVDAINNFTRKMDDLKRKRDDLKAREAILEQTVQDGAKDLEQLMNSRNTYLAKQEECTKKIRDLGLLPADAFEAYKRKNKKQLHKILYDCNEQLKQFSHVNQKALDQYVNFTEQREQLQRRRAELDAGDVKIMELISVLDQRKDESIERTFKGVARHFREVFSELVQGGHGYLVMMKKKDGDAVDDDEEEDGPRDPGPDGRIEKYIGVKVKVSFTGKGETQSMKQLSGGQKTVVALTLIFAIQRCDPAPFYLFDEIDAALDPQYRTAVGNMIRRLADMADTQFIATTFRPEIAKVADKIYAVRHKNRVSNIDVVSKEEALDFIERDQTYNAS

SEQ ID NO: 237377 - protein, 155 aa, Zea mays
  unsure (1)..(155): unsure at all Xaa locations
  Clone ID: MRT4577_148072C.1.pep
PRVRFTGKGETQSMKQLSGGQKTVVALTLIFAIQRCDPAPFYLFDEIDAALDPQYRTAVGSXLLFVLVSSYAHDQCLXCVSIVLLLSLSFIPDMIRRLADMADTQFIATTFRPEIAKVADKIYAVRHKNRVSNIDVVSKEEALDFIERDQTYNAS

SEQ ID NO: 237378 - protein, 112 aa, Zea mays
  Clone ID: MRT4577_148073C.1.pep
SFSSVDSDGSRRTRIGPTSPRRRRAVYEGRTRGQPGLVGSYLPRPDCVMQYLLRCSGGAIAVLWRILHNAYFDVASSSVAWRRPCLTSRIYYTVVMSQQLLANLVEIMDDRM

SEQ ID NO: 237379 - protein, 128 aa, Zea mays
  Clone ID: MRT4577_148074C.1.pep
AIDRKTGHLESVVNKLKDIDKKITDLVTKQQQMDAERDHAKSELEQFKADIARAMKQRGSLEKALVKKEKSLNNICNQIEQVQSSIAMKNDEMGTELIDQLTSEERDLLSRLNPEITDLKERFLMCKT

SEQ ID NO: 237380 - protein, 69 aa, Zea mays
  Clone ID: MRT4577_148075C.1.pep
SVWKKLTDAPKRRSKDPSQGTNRRYQYTALTPQTLILLIIPSGRLTRSRRRSADPLARARLYEVRERRR

SEQ ID NO: 237381 - protein, 83 aa, Zea mays
  Clone ID: MRT4577_148076C.1.pep
QQVVYCTQARHANRGRSGMNPVKASRAGPVKRASVRAFGPQAFCTSLPPLSCSHWRNLQFFCLRCTGPVRCATGPPVRCLHIS

SEQ ID NO: 237382 - protein, 69 aa, Zea mays
  Clone ID: MRT4577_148077C.1.pep
KRPWLRPYTAWWSTDRRSPSAASRRSTTAARCTSLVPPAWSSSAPALTRTYSLEQTKFACRNGCRLTPP

SEQ ID NO: 237383 - protein, 237 aa, Zea mays
  Clone ID: MRT4577_148078C.1.pep
GYLEAGRDVDRTPPRPDDAAWIQEDLTVLMWLHATLAGNLLDMVMDDDDGTAHQVWSQIANFFLGNKNSRAVQLEQDLHNLEQGDLSAAAFCHRLKTLADALADCDRPIDDRALVHQLIRGLHPKFHVLKQMLPAMPSFPTFMEARDHLIVAENTLGSSKASGNESALTATTTTDNSGGFTNSPSTRPDGDRSPFASRGRGRGGRWPLETARSRSWGPLWIQPPSSPTQPSCSSAAA

SEQ ID NO: 237384 - protein, 76 aa, Zea mays
  Clone ID: MRT4577_148079C.1.pep
LPLKFLDLSGNPPRDTKKTRFVPGQIQLPVGKKKEFPNLFGGPPFPRGGVMPKIPQPLLPKKVGWSKASPVDANAT

SEQ ID NO: 237385 - protein, 142 aa, Zea mays
  unsure (1)..(142): unsure at all Xaa locations
  Clone ID: MRT4577_14807C.1.pep
GDHVXLPAFTARVQGGAHDCKCGESNMGQLVTSNVDQGIMILDGNSQYXITPQSILDFVGTCKFTHYSSFHSGCLCNINXTAXLHKTSMLMCIIYIALGATLTMXNQSNGLTAIHIYSWGVYALIHKQSSRLRGASMIMLGD

SEQ ID NO: 237386 - protein, 60 aa, Zea mays
  Clone ID: MRT4577_148080C.1.pep
KARHTWNRSSLAVELVHHMESQFIGLTSEPSKFHVAGRASLMDRMSTFFLHHHNLLPCMS

SEQ ID NO: 237387 - protein, 110 aa, Zea mays
  Clone ID: MRT4577_148081C.1.pep
GQGQLSSLVVVQVRRLSNSLSCCSCPVSAVDACLLWVAVEVLGRRGLGVCGRLCLASTLRACVRACIARFVWDPFFRFLFDSWNYFRSPSVPRRKGEVSLLFSAFSSCDL

SEQ ID NO: 237388 - protein, 43 aa, Zea mays
  Clone ID: MRT4577_148082C.1.pep
DSLKRRCSVAETELRVAGSQWLSHVSFSVLGGFIKCSTWLADV

SEQ ID NO: 237389 - protein, 94 aa, Zea mays
  unsure (1)..(94): unsure at all Xaa locations
  Clone ID: MRT4577_148083C.1.pep
MLQADADCYHCEYILNMHIGRTVIDHQYECRSDRPILCMNHATRLTAIDYARDDDHLSLLMCVNPAVGGHSLIESQAENIAELXRRLCADYGVN

SEQ ID NO: 237390 - protein, 107 aa, Zea mays
  Clone ID: MRT4577_148085C.1.pep
LNICVFIFCCSIGIPAGDAKKRVDHFMIQSMPMTCAGFTPRATISSKIGSEAPHSVGYPHRSYASNVNHTHPCLLPGARNFIKLRTNKTKMGAKLFLRQYDPAPMDL

SEQ ID NO: 237391 - protein, 73 aa, Zea mays
  Clone ID: MRT4577_148086C.1.pep
WTLQVVGESEHVSADPKLKKKPCSSLKQTTTIHPPRIPCTCSIHTSKRRKRAKRKSQTNEKEREKKYRRIVSP

SEQ ID NO: 237392 - protein, 50 aa, Zea mays
  Clone ID: MRT4577_148087C.1.pep
LLYSGYSGSSTPGHSDGDSSNRTVYVGGLDPNVSEDELRKAFANMILLCE

SEQ ID NO: 237393 - protein, 157 aa, Zea mays
  unsure (1)..(157): unsure at all Xaa locations
  Clone ID: MRT4577_148088C.1.pep
MXSSRGRGGKAFLGSPLGDPAPQEXRIGARLWFAIAVTAKPAAEEVANTLISCDRTLRFPGAVAPDYLDGSXVGDYGFDPFGLXKPAVYLQLKTISVDQYLGKNEAGXLMGTRIXCSVVKGNQLHTYREVFGLHRIRQCELIHGRWAMLGSLGALYV

SEQ ID NO: 237394 - protein, 168 aa, Zea mays
  unsure (1)..(168): unsure at all Xaa locations
  Clone ID: MRT4577_148089C.1.pep
HGALPLHTCWGAGLCPTFIGGIIMSENLXAHEEGTRMSRRFPRYXTLISAWANISDAAFWHLHPWXTGYTVERYHIECLLVKXRMHMLSSLLVCTPMTFEMMXXRRMIERDLSIXEEVKWSQNQQVAISNPTLAAVNKKLGMIHGLRSLDNIMPFGSLSMHSWNLCSK

SEQ ID NO: 237395 - protein, 48 aa, Zea mays
  Clone ID: MRT4577_14808C.1.pep
WLRLLKSSASSEHSSSMHILKWHMCPLGPGYILDVTPELFDIMLLPSI

SEQ ID NO: 237396 - protein, 112 aa, Zea mays
  unsure (1)..(112): unsure at all Xaa locations
  Clone ID: MRT4577_148090C.1.pep
PGQPQRTGRGTTPGPRPRSGRHQGSSAXKTVRGRESRKMGKAAKTQVSANYPGPDRNQPALDRLRPGAAQPPGGQGRRQEQEQAVPPAEFVYVRGQVGAGSPRQHIIGGALL

SEQ ID NO: 237397 - protein, 76 aa, Zea mays
  unsure (1)..(76): unsure at all Xaa locations
  Clone ID: MRT4577_148091C.1.pep
FFPFSFXFFFIFIFRFQTQIQILLPNSYLDKIHQLKYAYEKFYLFIHVFSLCCIAFFLLFLQILNCKLGIKSKFGH

SEQ ID NO: 237398 - protein, 53 aa, Zea mays
  unsure (1)..(53): unsure at all Xaa locations
  Clone ID: MRT4577_148092C.1.pep
PRGHHGXXRLRQICDAKPMSXTFMYSLHTCGANCSSGLLGTGLGSGDCRNGVG

SEQ ID NO: 237399 - protein, 147 aa, Zea mays
  Clone ID: MRT4577_148093C.1.pep
MSSPLVIGSKPLLGPLVGLSFWTFAIEGLLYWRRTPALAKYNIDFDPEKVKQEKATKLPAFVQWPADNFNNLLEQPTQFYAAVLALTLLNVNDKVTTRMAWGYVGLRVIHSLIHVSVNKVTIRFGVWVSSSFVMKGITARLAQELWM

SEQ ID NO: 237400 - protein, 110 aa, Zea mays
  Clone ID: MRT4577_148094C.1.pep
RRQRAGVHRCRRQQHQHQHAAGSPRRRPPRDAKPQLRGGCGWGRSRIRAPGRAWPSASKSCMIRWLMALGWWWCTAAPPEPPKAKFHRPMASCIDSNGKVRITETLPWIL

SEQ ID NO: 237401 - protein, 78 aa, Zea mays
  Clone ID: MRT4577_148095C.1.pep
RRCTTLTYQNFYHYDCGRLCNNWSSLINVLDSSVPRTTVGIFVPDRAGEWQHGPYMYHTEAASRIRLRGPLEPMLHLQ

SEQ ID NO: 237402 - protein, 49 aa, Zea mays
  Clone ID: MRT4577_148096C.1.pep
AYEPYDAKYAILLECAHKGILFRLSIVTFFLILTLYYIFLLNFIAYIFS

SEQ ID NO: 237403 - protein, 63 aa, Zea mays
  Clone ID: MRT4577_148097C.1.pep
QILSANYSWLYNPASRTRQRARIKNTRRGHRVQTTAFNTAPKNVGTGRRLTDARLSNARILHT

SEQ ID NO: 237404 - protein, 48 aa, Zea mays
  Clone ID: MRT4577_148099C.1.pep
EPIEVTCGRISVITTQHSSKLCALVAPSVAPTRTARTKSRVNIVVPLL

SEQ ID NO: 237405 - protein, 161 aa, Zea mays
  unsure (1)..(161): unsure at all Xaa locations
  Clone ID: MRT4577_14809C.1.pep
GSSHASGDMHPATWGAAYGNSWRTTNDIADTWXVSLFVPCVAASPLSCPDSRPFASFTEXTCRRSSMIATADQNEVWSEYARPGGWNGLYCTVHMISXRPVHMIRWIRALTLRSGGLACADPDMLEVGNGGMTNSEYVVHFSLWAISKVSETAYRRTVPAL

SEQ ID NO: 237406 - protein, 49 aa, Zea mays
  unsure (1)..(49): unsure at all Xaa locations
  Clone ID: MRT4577_1480C.1.pep
EQKTGKTTEGMEASDAVTGEDGRALSVRALHPTTTLSNCLNXXAWVAPG

SEQ ID NO: 237407 - protein, 66 aa, Zea mays
  Clone ID: MRT4577_148100C.1.pep
EVWFLKLSVPDFHRLCLLMLLKYYKEKVTYATCKEAYKRGFLVYHDDKKEGQVQCAQRCWPRYLGK

SEQ ID NO: 237408 - protein, 83 aa, Zea mays
  unsure (1)..(83): unsure at all Xaa locations
  Clone ID: MRT4577_148102C.1.pep
SFLGCLALVLVFPFVGASXVVVLWASLLLGFLXPLSSFWXAXRGSPVCSVVALPCLXXXGALARCRQRNLGPRCLLGSGRXVG

SEQ ID NO: 237409 - protein, 50 aa, Zea mays
  Clone ID: MRT4577_148103C.1.pep
IFLNKYIVNPLVIIYRLLAISTLCTLHSITILLIFCLSFSFFPSLLLISP

SEQ ID NO: 237410 - protein, 510 aa, Zea mays
  Clone ID: MRT4577_148104C.1.pep
MERRRRRPPRLPLLVFVLVATTCPLGSSGIGSFGVGAESNGASSSFRTRSLLQIGDRNEDGLFHLPHTRALTHKSRSHRKVPTPAPAPESAPAPSPSMSPPDSSPSPSPHGSHPMPRQSTSHRHPSITPPHLVRPGPRQDGNDPLVYTPAHSRHKHFWTTYGLVAAGIAVFLLVSAASILCFRAKKMGTVRPWATGLSGQLQKAFVTGVPSLKRSELETACEDFSNIIGSTSTCMLYKGTLSSGVEIAVASSLVTSAKDWSKENESQYRKKITNLSKVSHKNFMNLLGYCEEEHPFTRVMVFEYAPNGTLFEHLHVREAEKLDWMARLRISMGIAYCLEHMHQLQTPAALRNFDSTTVYLTDDFAAKVSDLEFWNDAKGHNSTTNNELAFSPDMEDIVRKYGMVLLEILTGRVPSSEDDGPLENWVSRYFEGGMRLEELIDPSIGFFPEDTARALCEVVRSCIDRDPKKRPQMKEVAARMREITALGPDGATPKVSPLWWAELEIMTSES

SEQ ID NO: 237411 - protein, 123 aa, Zea mays
  Clone ID: MRT4577_148105C.1.pep
HLHIWSGLGLASIQMIRAKKMGTVRPWATGLSGQLQKAFVTGVPSLKRSELETACEDFSNIIGSTSTCMLYKGTLSSGVEIAVASSLVTSAKDWSKENESQYRKKITNLSKVSHKNFMNLLGY

SEQ ID NO: 237412 - protein, 523 aa, Zea mays
  unsure (1)..(523): unsure at all Xaa locations
  Clone ID: MRT4577_148106C.1.pep
MELRRRRPPRLPLLVFVLVATTCPLGSSAGIGSFGVGAESNGASSSFRNSRTRSLLQIGDRNEDGLFHLPHTRALTHKSRSHRKVPTPAPAPESAPAPSPSMSPPDSSPSPSPHGSHPMPRQSTSHRHPSITPPHLVRPGPRQDGNDPLVYTPAHSRHKHFWTTYGLVAAGIAVFLLVSAASILCFRAKKMGTVRPWATGLSGQLQKAFVTGVPSLKRSELETACEDFSNIIGSTSTCMLYKGTLSSGVEIAVASSLVTSAKDWSKENESQYRKKITNLSKVSHKNFMNLLGYCEEEHPFTRVMVFEYAPNGTLFEHLHVXNAFLISPXREAEKLDWMARLRISMGIAYCLEHMHQLQTPAALRNFDSTTVYLTDDFAAKVSDLEFWNDAKGHNSTTNNELAFSPDTEDIVRKYGMVLLEILTGRVPSSEDDGPLENWVSRYFEGGMRLEELIDPSIGFFPEDTARALCEVVRSCIDRDPKKRPQMKEVAARMREITALGPDGATPKVSPLWWAELEIMTSES

SEQ ID NO: 237413 - protein, 82 aa, Zea mays
  Clone ID: MRT4577_148107C.1.pep
LQGTISRRRAPSAWCSVFPVVVYPPVAVPVTVFGLSSVSPIPHGWCCPSKNLYGLCRESCLTWFHGPFVFSFPNFIVPPLRA

SEQ ID NO: 237414 - protein, 54 aa, Zea mays
  unsure (1)..(54): unsure at all Xaa locations
  Clone ID: MRT4577_148108C.1.pep
KHTPMQPIFDVXIMFINGMDRYEQDWSXIFSEAGYSNCRITPVLGVRSTIKVKP

SEQ ID NO: 237415 - protein, 133 aa, Zea mays
  unsure (1)..(133): unsure at all Xaa locations
  Clone ID: MRT4577_148109C.1.pep
PPGPAPWGPPGKSEPGPGGGPTFPKRRRKKTGGKKGKNGPPGKKGIPXKPXKNKPEKKKGKPGGPKXGQPKINAWAPLPPFQGGNPSSQMQKKKGQPPGKGGLPNGPQGGSSFNQKKGQKGMGLPPWPEKKEK

SEQ ID NO: 237416 - protein, 42 aa, Zea mays
  Clone ID: MRT4577_14810C.1.pep
IVLSCDAYLRSLNISHQLAGLVGEHRSASNVIDRVHSCHIVE

SEQ ID NO: 237417 - protein, 75 aa, Zea mays
  unsure (1)..(75): unsure at all Xaa locations
  Clone ID: MRT4577_148110C.1.pep
LFFFFFFVCVSCVRSALFCPSCGAWRVSSLLVVSPGGFRGFFTCLCCSVVVGVLXCALRRPVVSQVHVFFLWRCE

SEQ ID NO: 237418 - protein, 98 aa, Zea mays
  Clone ID: MRT4577_148111C.1.pep
QLAHGLHIGELGTVNVLIVALALLALAASAASSTSGGCVCQTPPFHLPSPFYMPTPFYLPSHQQPQPWQYPTQPPQLSPCQQFGSCVVCMLCSPILGQ

SEQ ID NO: 237419 - protein, 95 aa, Zea mays
  Clone ID: MRT4577_148112C.1.pep
DIMRCCFGWQLWRPEHVVDRSPSRVPIWSSSRTYLPSKVVGSSGGPVATSASRAAGEAPALPSHRPPIPRGASVAMTPPARCGARNIGHMQSHGA

SEQ ID NO: 237420 - protein, 59 aa, Zea mays
  Clone ID: MRT4577_148113C.1.pep
DKNDPHLCDFIETHYLNDQVESIKDLGDHVTNLREIGAPESGMAQYLFDKHTLPHGDQS

SEQ ID NO: 237421 - protein, 45 aa, Zea mays
  Clone ID: MRT4577_148114C.1.pep
FSPAPLILLMVSCMSFTWFPQPLSLFSPPPQVFNPLFPKIKKHYC

SEQ ID NO: 237422 - protein, 67 aa, Zea mays
  Clone ID: MRT4577_148115C.1.pep
RTRGRTRGVAAGCSLVPPTQAGVEMVDIQQEPGAPEPHFQEGVGHPGPKKVFNWPKGLRGRNRHRGR

SEQ ID NO: 237423 - protein, 44 aa, Zea mays
  Clone ID: MRT4577_148116C.1.pep
KFDDRGFTPRGLSGAMPRFLESRPCLSGPIQLKFGVRLEKFIGF

SEQ ID NO: 237424 - protein, 230 aa, Zea mays
  unsure (1)..(230): unsure at all Xaa locations
  Clone ID: MRT4577_148117C.1.pep
MAPLPPGPEMEVMSGWLWKTALMEVPRKHHSPPKWSVILWMLVTANLWIMCSSSTQKKVLMPGFSASEMDYIDNDGKFLLSNGYVFGFGFATISVSDSTYYVLAVVHLPTTSIVWSANANSPVSHSDNFVFDKDGNAYLQSGGSXRCGLPISPARGXHLYAAARLGQSXVVFGKDGSSPLWQSFSHPTDTLLSGQSFIEGMSLLSHSNAQNMTYTLEIKSGDMLLYAGFQ

SEQ ID NO: 237425 - protein, 110 aa, Zea mays
  Clone ID: MRT4577_148118C.1.pep
LIFAQPLEQASRPAAAAAAVLPSRSSRQLRPAAREQAAQLRLRPTAREQAAQLRLRPTAREQAAQLRPDARAASRPPSSASRSSSQQHEQPAARPVHSREQTTPASRPAA

SEQ ID NO: 237426 - protein, 61 aa, Zea mays
  Clone ID: MRT4577_148119C.1.pep
FFFFFFFFFFFFIFFFFFFFFWKPQIPSRDWRVLFLCLELALMVDVDVCTACMHASIDPGN

SEQ ID NO: 237427 - protein, 86 aa, Zea mays
  Clone ID: MRT4577_14811C.1.pep
FKKGLSRSRFSAPPMATTVRLQLVYRTTRCCFSLLTTSLIRSSDFETASRSPKIILVPTDPATALLQHRHPREQAASCDAEADVPG

SEQ ID NO: 237428 - protein, 455 aa, Zea mays
  unsure (1)..(455): unsure at all Xaa locations
  Clone ID: MRT4577_148120C.1.pep
MGNGGGTGDKTKTKATGGLTGREPSSSSHASKRRRGLRGESMADRFIPNDFPDFVAEAEASDGEGHRPAGHRGLLSLPYTRLSDHFVRAARRLKDKVVEETWVKAGRKVTDYTLYTGSLGTALLLFKSFQVTGDRGDLALAADIVRACDDASRGLPFLTFICGRAGVCALGAVIAKHCDDQLRVTQYLSSFDELXCDVVXTITEKVPNELLYGRAGYLWACLFLNKHLSEKTIPLDHINSVAKDIINEGRGFASKGSSPLMYEWHGKKYWGAAHGLAGIMHVLMHTELKPDEQDDVKNTLRYMIKNKFPSGNYPSSEGNESDHLVHWCHGAPGVALTLAKAYEVFHDDYFEQSAAEAAEVVWNRGLLKRVGICHGVSGNAYAFLSLYRLTGNVEYLYRAKAFACFLLEKADQLIAEGAMHGGDRPFSLFEGKAGMSYLLLDMVDPSESRFPAYEL

SEQ ID NO: 237429 - protein, 80 aa, Zea mays
  Clone ID: MRT4577_148121C.1.pep
VTLYGGVIFLRGGTATLIIDWEACNNKNRRHLHDVRNRRKNAHGQGKTCMEIGARDMTVEGWGQNDQNRHAETDTSWTLC

SEQ ID NO: 237430 - protein, 90 aa, Zea mays
  Clone ID: MRT4577_148122C.1.pep
SKTTSVYRRELLRECSGRLPPARHGLNDDDGAAAAAVRRLVQGGAGSGAAPHCEGSRVLEAILAVASKPWARRALDGSRLELPLLLRVAL

SEQ ID NO: 237431 - protein, 117 aa, Zea mays
  Clone ID: MRT4577_148123C.1.pep
WGSGIRAGRRASTPCVAHWHAHRLVGGREDRSTVRLEVDSAHGQVDDRCVGTLSAPGSSRVIPARRRGGNRCASSTCDRNSCWRPHGHRDLKSALPCLIWRMETPFFFSIYSTRPGR

SEQ ID NO: 237432 - protein, 179 aa, Zea mays
  unsure (1)..(179): unsure at all Xaa locations
  Clone ID: MRT4577_148124C.1.pep
MCWLAVVASTGWRTRSQGCDLPTPPPPLSPRRCTTTTRPPACRPTRSRSSPTIGAGASTASSTAPDHPSSPTTGADSSVARTSLRQATPRDSSSPSPPPTSPASXRASPXPSLKPQMTPCSLRSNLPATTNPSCTPPPVLDVLSRVHTLDKCMTSQDKFVIDLDPDDMETVIEVPFRRS

SEQ ID NO: 237433 - protein, 64 aa, Zea mays
  Clone ID: MRT4577_148125C.1.pep
DHLERKSWTLSASTPRTGSMQTSLIFSSVLQDVYQHDMITFKLRVVWTDTGVLFTRILVRIHHE

SEQ ID NO: 237434 - protein, 62 aa, Zea mays
  Clone ID: MRT4577_148126C.1.pep
SETRGRTRGKKKKKKKKKKKKKKKKKKKKKKKKKKKKKKKKKKKKKKKKRGGPPKGSNLIYP

SEQ ID NO: 237435 - protein, 80 aa, Zea mays
  Clone ID: MRT4577_148127C.1.pep
LIDFLQLLYIHVLWTDGHGQKKKSFIIIGTVATRPHHLFADDDRHHGRTLLLCSLLLASYCSCCPFFSGCMEIMHNILNK

SEQ ID NO: 237436 - protein, 93 aa, Zea mays
  Clone ID: MRT4577_148128C.1.pep
MGTRSQTGVPLAGVGCVALVDHLRAASWPPKFRPHLPEKYNETSNSSEFLQTWLMNLTPGSVYSWEELCARFVANFASAYQQHGVEAHLHAVR

SEQ ID NO: 237437 - protein, 48 aa, Zea mays
  Clone ID: MRT4577_148129C.1.pep
ITVLSSSRLYYLLATPVGRAQIISTADSSFSTSNANLVVRSRPIRAST

SEQ ID NO: 237438 - protein, 47 aa, Zea mays
  Clone ID: MRT4577_14812C.1.pep
VRHTRPPSLRRDVQHTQFGVRSKRIHFIINLSPDNTNDSNRCSRPHY

SEQ ID NO: 237439 - protein, 83 aa, Zea mays
  Clone ID: MRT4577_148130C.1.pep
GRSAHASGTRGKTAADSLAKTNEMLSQEVEKLRAQVDNLRRRCELQELELQKSAKKVQEAMSMVSEESAKSKAAKEVIKSLTS

SEQ ID NO: 237440 - protein, 68 aa, Zea mays
  unsure (1)..(68): unsure at all Xaa locations
  Clone ID: MRT4577_148131C.1.pep
IESAIVSXKFISAVSSTVRHSRQCMYHLGASCKIIAPTRMCSMNLNFFSAIAVYCCRVVPYCSICIGA

SEQ ID NO: 237441 - protein, 128 aa, Zea mays
  Clone ID: MRT4577_148132C.1.pep
MVPEPGAIPASWDPEHLRHSSQTLLQPWIPPTESGTVSPRVGVGPGGSYHTIVSVRMVTRGPGAQLLRYFVGPSECRCMEVTVTTLVELASLESRYIVKNNTKSHLTKATSAGPDILEDQDKTYNGGP

SEQ ID NO: 237442 - protein, 105 aa, Zea mays
  unsure (1)..(105): unsure at all Xaa locations
  Clone ID: MRT4577_148133C.1.pep
FGSRLETVFFQIGSKVIVLPSGQEATVKAIDRDSNECTVSRAXGDDETMXLQGMDGKQLIXGGLLCDPGFPVPVANHWELNVIVLDITTSILVGYQVEXHIHHVK

SEQ ID NO: 237443 - protein, 111 aa, Zea mays
  Clone ID: MRT4577_148135C.1.pep
PLLLSRLELPWPGRGIRPISSYPVALTLGVPLELEKAPIGPASPKANHWHPFVGLPQLIGLPFSGGPWPRGPRGGALPLRAHWAIRISLIPKAFQWSPPSQKELGPPCGFS

SEQ ID NO: 237444 - protein, 390 aa, Zea mays
  unsure (1)..(390): unsure at all Xaa locations
  Clone ID: MRT4577_148136C.1.pep
VPQKKTLAFFVVEHRAKPSTMASAPLPAAIEPGKKGNVKFAFACAILASMTSILLGYXEHTHTHFTLYCFLHGHRLMRYVRPDFADIGVMSGASLYIKKDLKISDVKLEILMGILNVYSLIGSFAAGRTSDWIGRRYTIVFAAVIFFAGAFLMGFAVNYWMLMFGRFVAGIGVGYALMIAPVYTAEVSPASARGFLTSFPEVFINFGILLGYVSNYAFSRLPLRLGWRVMLGIGAAPSVVLALMVLGMPESPRWLVMKGRLADAKVVLGKTSDTPEEAVERLADIKAAAGIPQELDGDVVAVPKKRDSEEARVWKELILSPTPAMRRILLSGIGIHFFQQASGIDAVVLYSPRVFKAAGITSDNQLLGTTCAVGVTKTLFILVATFLLDR

SEQ ID NO: 237445 - protein, 44 aa, Zea mays
  Clone ID: MRT4577_148137C.1.pep
RQMRFCHRGAGYLIKRTHDKRICRWRDRGLSKSAWALSKPYDNG

SEQ ID NO: 237446 - protein, 124 aa, Zea mays
  Clone ID: MRT4577_148138C.1.pep
RRLGLCHTGVFRPEKPYPSRLRDTFDAFIPDHAFRLLAMLLYLDPAARGTVVGDLNAEYFTTAPDACDPGSLPKYAPNKEMVAKFREGSRRRCNLRSQGGEVAKRLSWGHKSMQLQVTNQSHVH

SEQ ID NO: 237447 - protein, 113 aa, Zea mays
  Clone ID: MRT4577_148139C.1.pep
MASVSMAMPMTVASRSKEATLFNPLQKAGVSGSQKCRAPSRLQVKASLREKAVVAATSAALTASMMVPQVAEAADLAPSLKNFLLSIAAGGVVLAAIGGAVVGVSYFDPVKRG

SEQ ID NO: 237448 - protein, 84 aa, Zea mays
  Clone ID: MRT4577_14813C.1.pep
HPPSAWSGWRSQHCHLHWRTSRSRIRDAGNIIGLCRLVTGRGIGRVWSGHLISRLMMCGDGSFRLLKFHHLARRVHQSQSSPRD

SEQ ID NO: 237449 - protein, 68 aa, Zea mays
  Clone ID: MRT4577_148140C.1.pep
DMSWRSCTLAGSISRHVLLICILEKLIADVVRLFDIATLAALDPHDSKLTSMPIVLNVQLAMNKNPVM

SEQ ID NO: 237450 - protein, 43 aa, Zea mays
  Clone ID: MRT4577_148141C.1.pep
GKLGSSNLTKKKPLPCQRKNDGATNGGFNGEPGFHFLKLIGSP

SEQ ID NO: 237451 - protein, 210 aa, Zea mays
  unsure (1)..(210): unsure at all Xaa locations
  Clone ID: MRT4577_148142C.1.pep
PETVGNPWTICHRPNDIDLPRPRQDIIHWGFETPCDVSKKKSTVLKIVPAATGTFLLLITCIWLVCKSRGKHQRRNSQNNLLCLNPSSELGTENLDLPSVSFEDIITATNNFSEHKLLGEGGFGKVYKGVLEGGKEVAIKRLSXGSVQGIQEFINEVVLIAKLQHRNLVRLLXGFCIHEDEKVLIYEYLPNKSLDAFLFEATRQSLLDWP

SEQ ID NO: 237452 - protein, 56 aa, Zea mays
  Clone ID: MRT4577_148143C.1.pep
TIRKLNTNVMPISLYIEISYAQLYEKQYSCLGSRFMKKSVDLPRVRHGRPPSADVC

SEQ ID NO: 237453 - protein, 63 aa, Zea mays
  Clone ID: MRT4577_148144C.1.pep
NYPSMDLAYAAGRAGGTMTGVLSAANEKAVELFIDEKYDPFFCISTFTCFVLDKSLHIFHVIL

SEQ ID NO: 237454 - protein, 157 aa, Zea mays
  Clone ID: MRT4577_148145C.1.pep
VFGFWRGQVQSGPPPREILPPTQKFWVQPPIPGRKLDKFGLVKGARSWIKTAPLEKKSPPPLKNPPLIFLVFNLLLRLWFVFFFLGGPVFKPQKNPHVMVGVFKEFGDLLAYGCLNLSITPFFSIKKRKVFFFKKKKKKKKKKKKKKKKKKKKKKTR

SEQ ID NO: 237455 - protein, 65 aa, Zea mays
  Clone ID: MRT4577_148146C.1.pep
SCVCVRCGKMRAGNTVTQGTPMPTFPSSSLLSHSKGTQCCTNRPAQRKLMSSLLCKDSRRLEVPN

SEQ ID NO: 237456 - protein, 94 aa, Zea mays
  Clone ID: MRT4577_148147C.1.pep
GSVEDRDVYLASLSCYTRSNGCGTCFWKYKHITSELKSNYLVYGIWESRVGGISGLWAIDSCLLSALCLAVGEAAMRREVRGERNGETGPARPA

SEQ ID NO: 237457 - protein, 52 aa, Zea mays
  Clone ID: MRT4577_148148C.1.pep
KGRDYILGKRVFWKKKKKKKKKKKKKKKKKKKKKKKSLFKRKKKKKKKAWYT

SEQ ID NO: 237458 - protein, 47 aa, Zea mays
  Clone ID: MRT4577_148149C.1.pep
FKAFPHMKSGASWKAKEALLTMASEFTTLYRTIYQKTFAYPPRPAIY

SEQ ID NO: 237459 - protein, 307 aa, Zea mays
  Clone ID: MRT4577_14814C.1.pep
VHSISNGSPVSKADVSEQSITPQTPTHPSVAEEKLDSSTEAPASKVGDAEASETSQSAGHPSTVEENQHHQVSKHSDPSDEAEPNQLRESVRDLPDGSASSSPTKIHQSGDTETGESIHTGKEDTSDRNILQSQPAESALASSDDITEAEDNIAQEYDAPKELSGPQESSDMVDKGTHLEVKLHDSNINTEKSEEESNKMESGESSVVVQEDNAMEQPQDLTLKSLTAEHDSNSQNESVINSTDIPVGLGEGPPNDFTKEEKILESVRGTDSQTLDSVVSVDELEKLRRELKMMEAALQGAARQSQV

SEQ ID NO: 237460 - protein, 88 aa, Zea mays
  Clone ID: MRT4577_148150C.1.pep
PFNQLAALNSKTKTQHQQPPPYSQPAGVSPATFLKHPQLSPFHQHAAPNAGTLLQLQQLLPFNQLALTNPEAFDQQPIIGGGPLLDFL

SEQ ID NO: 237461 - protein, 116 aa, Zea mays
  unsure (1)..(116): unsure at all Xaa locations
  Clone ID: MRT4577_148151C.1.pep
ITSAKAETYEGSDIGHEGPRCNLRRRKAYSDXTVDYLKKLLLNVYAAVVPLALFLYVDDVTGFEMTYLXEMTEPFTIIFTWFVILPIIYGLAHAITTVILNDLLTLKGPSTNCWNE

SEQ ID NO: 237462 - protein, 111 aa, Zea mays
  unsure (1)..(111): unsure at all Xaa locations
  Clone ID: MRT4577_148152C.1.pep
MFRSSARQASLHGRTRISHSSTDKMVKLSFGCVGNSFSATTITAYVAEFIASLIFIFAGVCTSITKGQLTNARAXLDQWGLIXIAMAHAMVLFVSVSVTTNITGRHLNRAV

SEQ ID NO: 237463 - protein, 98 aa, Zea mays
  unsure (1)..(98): unsure at all Xaa locations
  Clone ID: MRT4577_148153C.1.pep
GNIGLTFPSYPGVPVGYMIPQVPYNNAVNYGPNNGYGGRYQNNKXLMETNFDSTSWRSRIXPSTPMRSPASNEAQESLTIGIADEHIGACVRRAGRNI

SEQ ID NO: 237464 - protein, 188 aa, Zea mays
  unsure (1)..(188): unsure at all Xaa locations
  Clone ID: MRT4577_148154C.1.pep
SFLXSASAPHRLHLRPPPPRSSSXPSEEGDDKEKPTHLRFLVSNTAAGCIIGKGGSTINDFQSQSGARIQLSRSNEFFPGTNDRIIMVSGLFDEVMKAMELILEKLLAEGEEFNEAEARPKVRLVVPNSSCGGIIGKGGATIKSFIEESHAGIKISPQDNNYVGLHDRLVTITGTFDNQMNAIDLILK

SEQ ID NO: 237465 - protein, 219 aa, Zea mays
  Clone ID: MRT4577_148155C.1.pep
MATANADAAEVERLYELGDRLSSAKDKSQHAADYEAIIASVKGQNVKAKQLAAQLIPRYFRSFPALGTFAMEAMFDLVEMEELAIRIQAIRGFPLLGKDAEFISKIADILGQLLTSEENVERDAVHKALMSLIRQDVKNSLQPLFKHVESGSEIREKIICFLRDKVFPVKAELLKPQAEMERYITDLIKKSVQDVTGLESKLFMDFLRSLSIFGDTAPR

SEQ ID NO: 237466 - protein, 344 aa, Zea mays
  Clone ID: MRT4577_148156C.1.pep
MEAPGSPYASSPESAPKRAPRSPPQQQPPSEEGDDKEKPIHLRFLVSNASAGCIIGKGGSTINDFQSQSGARIQLSRSHEFFPGTNDRIIMVSGLFGEVMKAMELILEKLLAEGEEFNEAEARPKVRLVVPNSSCGGIIGKGGATIKSFIEESHAGIKISPQDNNYVGLHDRLVTVTGTFDNQMNAIDLILKKLSEDVHYPANLSSPFPYAGLTFPSYPGVPVGYMIPQAPYNNAVNYGPNNGYGGRYQNNKPSTPMRSPASNEAQESLTIGIADEHIGAVVGRAGRNITEIIQASGARIKISDRGDFISGTSDRKVTITGTSEAIRTAESMIMQRVSASSERL

SEQ ID NO: 237467 - protein, 344 aa, Zea mays
  Clone ID: MRT4577_148157C.1.pep
MEAPGSPYASSPESAPKRAPRSPPQQQQSPSEEGDDKEKPTHLRFLVSNTAAGCIIGKGGSTINDFQSQSGARIQLSRSNEFFPGTNDRIIMVSGLFDEVMKAMELILEKLLAEGEEFNEAEARPKVRLVVPNSSCGGIIGKGGATIKSFIEESHAGIKISPQDNNYVGLHDRLVTITGTFDNQMNAIDLILKKLSEDVHYPPNLSSPFPYAGLTFPSYPGVPVGYMIPQVPYSNAVNYGPNNGYGGRYQNNKPTTPMRSPASNEAQESLTIGIADEHIGAVVGRAGRNITEIIQASGARIKISDRGDYISGTSDRKVTITGTPEAIRTAESMIMQRVSASSER

SEQ ID NO: 237468 - protein, 67 aa, Zea mays
  Clone ID: MRT4577_148158C.1.pep
EVQEWEAEIQGWHAQYCHGAGRSLNSFFLAPFPLYRLLFLFPEQSNLAISFFASRLLLIYLIFFYII

SEQ ID NO: 237469 - protein, 102 aa, Zea mays
  Clone ID: MRT4577_148159C.1.pep
VVTISVDTLQPSTPMRSPASNEAQESLTIGIADEHIGAVVGRAGRNITEIIQASGARIKISDRGDFISGTSDRKVTITGTSEAIRTAESMIMQRVSASSERL

SEQ ID NO: 237470 - protein, 80 aa, Zea mays
  Clone ID: MRT4577_14815C.1.pep
PRVRKKKKKKKKKKKKKKKKKKKKKKKKKKKKKKKKKKKKKNKKKKKKKKKKKYGGGVFRDLNFTSGCWEKLFFFFGHLN

SEQ ID NO: 237471 - protein, 106 aa, Zea mays
  unsure (1)..(106): unsure at all Xaa locations
  Clone ID: MRT4577_148160C.1.pep
MGLAFGKLFSRLFAKKEMRILMVGLDAAGKTTILYKLKLGEIVNTIPNIGFXNVKPVNTKTLTSLAWIVGVKNKTKXFWKHYFQNNQGLIFGGDKNDRDRVGETRN

SEQ ID NO: 237472 - protein, 85 aa, Zea mays
  Clone ID: MRT4577_148161C.1.pep
HHTLLLLQLISGYNISVGRDKAIDLKRFVLYITFFWGEKKEIKEFFFPSFDTSFYTAGSIQSSTLEQDDPNLPSRNILIRGIFRG

SEQ ID NO: 237473 - protein, 39 aa, Zea mays
  Clone ID: MRT4577_148162C.1.pep
TKQVIKYSDPCKRAHPTWLRRAPPPKYHPTQGFCALTKR

SEQ ID NO: 237474 - protein, 47 aa, Zea mays
  Clone ID: MRT4577_148163C.1.pep
SICGYVVGRKVDHKLLVKYTACLEHSMPFRCGYVVPLQKAAPGFAAH

SEQ ID NO: 237475 - protein, 51 aa, Zea mays
  unsure (1)..(51): unsure at all Xaa locations
  Clone ID: MRT4577_148164C.1.pep
WISSRGRVSRTICSLVISLSTSSKIFGCRQYRLIFRFNQLVXPPPPPSKVC

SEQ ID NO: 237476 - protein, 137 aa, Zea mays
  unsure (1)..(137): unsure at all Xaa locations
  Clone ID: MRT4577_148165C.1.pep
RGSKHHPPGSQEAGGAXQXXXASATXATXKPGHXPPXXPXXTXNPXTQXXKXQQGRASGRARTTXKQQQRGARPEKTKPXXXPQETTXNKXAPXEKPSKTAPRXXPSXKPQTXTPQRHRDAAPQNRPQQQGPRRPNP

SEQ ID NO: 237477 - protein, 46 aa, Zea mays
  Clone ID: MRT4577_148166C.1.pep
ACWTLHSLRAGQNWLWGKGCTVLPIPTRSSLLFSRGGGPFFTHSIT

SEQ ID NO: 237478 - protein, 79 aa, Zea mays
  Clone ID: MRT4577_148167C.1.pep
PPLFKINAPFFKTTPPPPHFCVPLRTRNACIKVPYHLFLFLGLSVHRGTQTPPLTGFGKKRLISNSMFSILFTKNWPPP

SEQ ID NO: 237479 - protein, 64 aa, Zea mays
  Clone ID: MRT4577_148168C.1.pep
FFKFLKFLTPGPGGPPGISGPVPGGVPFFLFGGLFKVWGNQGNSFFLGKIVFPSKFHKKYGPEV

SEQ ID NO: 237480 - protein, 191 aa, Zea mays
  Clone ID: MRT4577_148169C.1.pep
MPQMADRRPALTLPLPDREQSDFQRPQSSLQTPPIRSPRFREDFDAPFSVDIMNASRITLATDTMSYPSTGTNSRNSFGYDETPPQYLRNASWESETKRRSKVNDRILEWAKKSWGAVRTRSDSKFDYFDSHSAQSPTSDIMSPSSENITPSEPDGSQAANDYTRAVTVTVMASSKPGSKGWVDLNTGSPI

SEQ ID NO: 237481 - protein, 127 aa, Zea mays
  Clone ID: MRT4577_14816C.1.pep
MENLCCLRKKKKKKKKKKKKKKKKKKKKKKKKKKKKKKKKKKKKKKKKKKKKIKKCRKAKKKTFFKGKKKIKGPARKTRPKREKPGGPNFGREKKPPSQFAKPPSLPKIPPPKGLGTPLMLSYVKKS

SEQ ID NO: 237482 - protein, 183 aa, Zea mays
  unsure (1)..(183): unsure at all Xaa locations
  Clone ID: MRT4577_148170C.1.pep
SVIHSVIMLTTTFIMALAGLSTMIEASPLQARGGSKRGLAFPKQHNGVAGSQWTHKFSGSKVSWMYDWEAVIDGTPLDLEYVPLLHSNQQWCTEGWANNIANAKKNYKVSHVLSFNEPDQAGGWRIXXIDXCYWAVATHKKXRSARSPHRALKEIGSPSVTKTPTSPNKGHQTKPQELHEPXA

SEQ ID NO: 237483 - protein, 211 aa, Zea mays
  unsure (1)..(211): unsure at all Xaa locations
  Clone ID: MRT4577_148171C.1.pep
SXSAGFDMHGNLAFMVCDPMKIAPSTPNGYASASSTAMCTXKKDVPTQFGIPIPAVCEWLKQHWNGCLEDASKPMMTPARLTTCGERSGCSSLGRLRYIKTAEVEGGDVLSSSQMPPRPTWQHGACSSASAKISHGENDSIGSHSFHGQHEQSSKICKPHKEQATSLVDHSRSIRLPLPLKQMLPDDNKDEANSQAPHRTEPSNVQMNCGT

SEQ ID NO: 237484 - protein, 100 aa, Zea mays
  unsure (1)..(100): unsure at all Xaa locations
  Clone ID: MRT4577_148172C.1.pep
MFVLXAALARLALAVSATSTHTICCXCCQPPPPVHLPSPVHLPPTVHLPPPVHIPPPVHLPPPVHLPPSVHVPSPVHLPSTPCHYPTQPPLSXPHSQPHP

SEQ ID NO: 237485 - protein, 120 aa, Zea mays
  Clone ID: MRT4577_148173C.1.pep
ELDKISTANEDEKIGVQIIKNSLKAPLMTIAANAGIDGAIVIGKLIEQEDLSLGYDAAKGEYVDMIKAGIIDPVKVIRTALQDAASVSLLMATTEAAVSELPATKSRIASRMPQMSGMDF

SEQ ID NO: 237486 - protein, 149 aa, Zea mays
  unsure (1)..(149): unsure at all Xaa locations
  Clone ID: MRT4577_148174C.1.pep
GGGGQHQEAPPKGERTNPDRNSSRTATPPEPRTNTGRTDTERQKHRGATTNETNEDKPGPGETRRTGXXGRAGPTXQXXQNPPEPPXPPPREPTAEPAPPPPEPPAPPEPAAPPPXAGGXSARHRQAGGATGXPKGRPGRHGRGGRGTP

SEQ ID NO: 237487 - protein, 580 aa, Zea mays
  Clone ID: MRT4577_148175C.1.pep
MYRAAAVISRSSSALRRQLARGVAGELPRLLARGYAATAKEVSFGVGARAAMLQGVNDLADAVKVTMGPKGRTVIIEGSHKGPKVTKDGVTVAKSVEFEDSAKNVGANLVKQVADATNKAAGDGTTCATVLTQAILTEGCKAVAAGVNVMDLRNGINKAINAITAHLKSKAWKINSPEEINQVATISANGEKEIGDLISKAMEKVGKDGVITIVDGKTLDNELEAVQGMKLSRGYISPYFVTDQKTQKCEMENPLILIHDKKISNMDSLLPALEISIKNRKPLLIVAEDVEGDALSMLVLNKHRAGLKVCAVKAPGFGENRRHNLDDMAVMTGGEVISEERGLDLGKVQLQMLGTAKKVTVSLDDTIILDGGGDKQQIDERCQQLRESIDTSTAVFDKEKAQERLSKLSGGVAVLKIGGASEAEVGEKKDRVTDALNAARAAVEEGIVPGGGVALLYATKELDKISTANEDEKIGVQIIKNSLKAPLMTIAANAGIDGAIVIGKLIEQEDLSLGYDAAKGEYVDMIKAGIIDPVKVIRTALQDAASVSLLMATTEAAVSELPATKSRIASRMPQMSGMDF

SEQ ID NO: 237488 - protein, 88 aa, Zea mays
  Clone ID: MRT4577_148176C.1.pep
PICFMHGLLPQPFRAVTQVYDRIHLYIITAVQTWAAYINITQIDILDIHSYIANIELGTPSNHTTSCWYYKTVYLMIRSTLPMVRPPR

SEQ ID NO: 237489 - protein, 99 aa, Zea mays
  unsure (1)..(99): unsure at all Xaa locations
  Clone ID: MRT4577_148177C.1.pep
DGHPTTQSNTXSGLQXNPVIWHFFLVIQEAKXXIGEPRXPSTXASTGLKRSXSYPFSRXXFXXAWVISFXILRHAXXLRHGRHGAWAPSAGSNXAKPPS

SEQ ID NO: 237490 - protein, 105 aa, Zea mays
  Clone ID: MRT4577_148178C.1.pep
TRTKKIPAPGRVRSVTVRGKRKIQLLHEGKGQSEVRYMPNTHCPAFFSGFDSFCREGDLFLNHASCSLKHKADQPPLPTEFVQLKTFVVARAFFNTFFTRQGSGF

SEQ ID NO: 237491 - protein, 117 aa, Zea mays
  Clone ID: MRT4577_148179C.1.pep
SCSRLSERGLINACRPFHFCSKKKKKKVLVAVIIGQSALRLNGFPCKREANVTADDFFFGGLAAAADVYSGNPMGSAATAADLSVLPGLNTLGVSMARTDFAPSGGVSPPHVHPRAT

SEQ ID NO: 237492 - protein, 181 aa, Zea mays
  unsure (1)..(181): unsure at all Xaa locations
  Clone ID: MRT4577_14817C.1.pep
MENEFQDGKEEVVQAWYMDDSEEDQRLPHHLKXLVNLLDAKNCAYYKCPELGVVSWNLNADDWEKDENLKKIREARGYSYVDICDVCPEKLPNYEAKLKNFFEEHLHTDEEIRYCLEGSGYFDVRDQNEQWIRIAVKKGGMIVLPAGMYHRFTLDSDNYIKAMRLFVXEPIWTPYNRPHDH

SEQ ID NO: 237493 - protein, 60 aa, Zea mays
  Clone ID: MRT4577_148180C.1.pep
PNRTGAPFLLGKTNLTLKEKEFSNQMKGRILFRGPEKVYPIGGFAISVGGTRGTWGPLGS

SEQ ID NO: 237494 - protein, 111 aa, Zea mays
  Clone ID: MRT4577_148181C.1.pep
SGPSEIDRPSARPQQQTRQAGTREFFWRRGRSRECVALEKKKKTGREEGVPFPNPNYKPAQLLLPPPAQQEERGHCPAPSPSRRRRRRAAGRGGRRRPAWAGTSSSGATTR

SEQ ID NO: 237495 - protein, 87 aa, Zea mays
  Clone ID: MRT4577_148182C.1.pep
PTRPVKAQGNDCMRLKVKRVSMEHTHHTCQYIPLLMIFKEHGPIRRLDEPHLSSPSNTPALYTPSTLSHPPKPAAPPTLSESTPPYS

SEQ ID NO: 237496 - protein, 59 aa, Zea mays
  Clone ID: MRT4577_148183C.1.pep
AMKCRSHKECEVVCRLVEWIELVLAGAKPRVMFRAMYFCEKKTEKRGTCRLGLGCEYEC

SEQ ID NO: 237497 - protein, 51 aa, Zea mays
  Clone ID: MRT4577_148184C.1.pep
SLKEDILLAKKKKKKRAAAVPGGGQQLDNGQTWSIDVPAGTTGGRVWARTG

SEQ ID NO: 237498 - protein, 178 aa, Zea mays
  Clone ID: MRT4577_148185C.1.pep
MQFFGGSSLTSVAPEATPAPAAPPGTGTGASAQVLYVFNRNGVCLLYREWHRPLRTLDPTQDHKLMFGLLFSLRSFTAKIDPTTAEKGNLGVPLLPGQGCSFYSFKTNTYKLNFMESPSGIKLILITHPRTGDQRDSLKHIYNLYVEYVVKNPLYAPGTPIKCELFNKHLDQYVRTII

SEQ ID NO: 237499 - protein, 129 aa, Zea mays
  Clone ID: MRT4577_148186C.1.pep
MQFFGGSSLTSVAPEATPAPAAPPGTGTGASAQVLYVFNRNGVCLLPGQGCSFYSFKTNTYKLNFTESPSGIKLILITHPRTGDQRDSLKHIYNLYVEYVVKNPLYAPGTPIKCELFNKHLDQYVRTII

SEQ ID NO: 237500 - protein, 134 aa, Zea mays
  unsure (1)..(134): unsure at all Xaa locations
  Clone ID: MRT4577_148187C.1.pep
AKRARPSCCFPIPALLSLAEGTPDTFHFMASAPTTALVAMMKAKKEHASVXPFDDQSSILDKEDVXNASLENLNTYPFVAEGLXNGTLKLIGAHYDFVSREFLTWQKCETTPYENSHAAADSCVIIYISTLLYY

SEQ ID NO: 237501 - protein, 92 aa, Zea mays
  Clone ID: MRT4577_148188C.1.pep
CAERWAVPLGGDIFLKFYVAHKKYTNAFFSRSVNFSSRGRRNQTEFRWKERPNEGMFLWRNPFEGRNEDWPKGGKFALLASVKLKSRRAVQG

SEQ ID NO: 237502 - protein, 228 aa, Zea mays
  Clone ID: MRT4577_148189C.1.pep
QRRLHIGAWRTRSEEEDPHSPGKRITRLQPPFPAGDPTRVSATDPGKRRLMQFFGGSSLTSIAPEATPAPAAPPGTGTGASAQVLYVFNRNGVCLLYREWHRPLRTLDPTQDHKLMFGLLFSLRSFTAKIDPTTAEKGNLGVPLLPGQGCSFYSFKTNTYKLNFMESPSGIKLILITHPRTGDQRDSLKHIYNLYVEYVVKNPLYAPGTPIKCELFNKHLDQYVKTII

SEQ ID NO: 237503 - protein, 231 aa, Zea mays
  Clone ID: MRT4577_14818C.1.pep
MAGDAAQNTADKIKPSEDRLNRLDEPAEDNTWHDTSDLNRENLRNQAKNSLPFGNKNKDEAKSDLKEHAKDINQAANPDGSRDPQHTAELGAHEGQTGQSTGINARGALETAKQKVDANTSEEDKNMARARRDQMNNYLRGKMPEERREQTIWRLKKMVVEIQGHQDYQRAIETLLSLAEQYSGHGKNLGQQGKGSVQGFLSENKWLTNLKTLLERFANNTSFDDLIESIN

SEQ ID NO: 237504 - protein, 173 aa, Zea mays
  unsure (1)..(173): unsure at all Xaa locations
  Clone ID: MRT4577_148190C.1.pep
ICTRFLVTFLEFSQAEKDLQPWIARDDEQGQKMWRVNQRIVKLIAELMRNHDSPEALVILASASDLLLRATDGMLVDGEACTLPQLELLEVTARAVHLIIEWGDPGLSVADGLSNLLKCRLSTTIQPRGXQRNGIQSPSYXCVAAGILNWQADVXERCIEWXEAHXXRATGLT

SEQ ID NO: 237505 - protein, 178 aa, Zea mays
  Clone ID: MRT4577_148191C.1.pep
MQFFGGSSLTSVAPEATPAPAAPPGTGTGASAQVLYVFNRNGVCLLYREWHRPLRTLDPTQDHKLMFGLLFSLRSFTAKIDPTTAEKGNLGVPLLPGQGCSFYSFKTNTYKLNFTESPSGIKLILITHPRTGDQRDSLKHIYNLYVEYVVKNPLYAPGTPIKCELFNKHLDQYVRTII

SEQ ID NO: 237506 - protein, 158 aa, Zea mays
  Clone ID: MRT4577_148192C.1.pep
WIARDDEQGQKMWRVNQRIVKLIAELMRNHDSPEALVILASASDLLLRATDGMLVDGEACTLPQLELLEVTARAVHLIIEWGDSGLSVADGLSNLLKCRLSTTIRCLSHPSAHVRALSMSVLRDILSNGSVNPNKTIQGEQQRNGSNLSITCYYLVFP

SEQ ID NO: 237507 - protein, 1160 aa, Zea mays
  Clone ID: MRT4577_148193C.1.pep
MSDSNVKWIDGLQFTSLYWPPPLDAEQKQAQILAYVEYFGQFTADTDQFPEDIAQLIQSSYPSKENRLVDEVLATFVLHHPEHGHAVAHPILSRIIDGTLCYDRHGPPFSSFISLFSHNSEQEYSEQWALACGEILRVLTHYNRPIFKVERQHTEAECSSTSDQATSSDSTDKRSNNSPGNESDWKPLRPLTPWITDILLAAPLGIRSDYFRWCGGVMGKYAAGGELKPPTTACSRGSGKHPQLMPSTPRWAVANGAGVILSVCDEEVARYETANLTAAAVPALLLPPPTTPLDEHLVAGLPPLEPYARLFHRYYAIATPSATQRLLFGLLEAPPSWAPDALDAAVQLVELLRAAEDYASGMRLPKNWMHLHFLRAIGTAMSMRAGIAADTAAALLFRILSQPTLLFPPLRHAEGVEVHHEPLGGYVSSYKKQLEVPASEATIDATAQGIASLLCAHGPDVEWRICTIWEAAYGLLPLSSSAVDLPEIVVAAPLQPPTLSWSLYLPLLKVFEYLPRGSPSEACLMRIFVATVEAILRRAFPSETPEQSRKPRSQSKNLAVAELHTMIHSLFVESCASMDLASRLLFVVLTVCVSHQALPGGSKRPTGSDNHSLEEATEHSRLTNGRSRCKRRQGPVATFDSYVLAAVCALSCELQLFPCISKNGSHSNLKDSMKIIIPGKNNGINNELHNSNSSAILHTRRILAILEALFSLKPSSVGTSWSYSSNEIVAAAMVAAHVSELFRRSRPCLNSLSALMRCKWDAEISTRASSLYHLIDLHGKTVSSIVNKAEPLEAHLTLTPVKKVNQHRCEENSTNSSDSAKLENKNGSTHKKNGFSKPHLKCAEEVLNGNVASTSGKSIASLQVEASDLANFLTMDRNGGYRGSQTLLRSVLSEKQELCFSVVSLLWQKLIASPEMQMSAESTSAHQGWRKVVDALCDVVSASPTKASAAIVLQAEKDLQPWIARDDEQGQKMWRVNQRIVKLIAELMRNHDSPETLVILASASDLLLRATDGMLVDGEACTLPQLELLEVTARAVHLIIEWGDPGLSVADGLSNLLKCRLSTTIRCLSHPSAHVRALSMSVLRDILDHGSVSPNKISRGEQQRNGIQSPSYRCVAAGILNWQADVERCIEWEAHSRRATGLTLAFLSTAAKELGCPLPC

SEQ ID NO: 237508 - protein, 71 aa, Zea mays
  Clone ID: MRT4577_148194C.1.pep
DAWAAIRLRLRLLQYFSLYGLQLQQSKQLQQCRLAASRTRIYLLGACSHDAILFQSDVRCFTSIFNCLSCT

SEQ ID NO: 237509 - protein, 46 aa, Zea mays
  Clone ID: MRT4577_148195C.1.pep
WSDLLSKGIISPCSIFSIADQSVEPGDSPPQVINGAYLEFIFVLLT

SEQ ID NO: 237510 - protein, 273 aa, Zea mays
  unsure (1)..(273): unsure at all Xaa locations
  Clone ID: MRT4577_148196C.1.pep
EKQELCFSVVSLLWQKLIASPEMQMSAESTSAHQGWRKVVDALCDVVSASPTKASAAIVLQXDIATFAEKDLQPWIARDDEQGQKMWRVNQRIVKLIAELMRNHDSPEALVILASASDLLLRATDGMLVDGEACTLPQLELLEVTARAVHLIIEWGDPGLSVADGLSNLLKCRLSTTIRCLSHPSAHVRALSMSVLRDILNHGSVSPNKISRGEQQRNGIQSPSYRCVAAGILNWQADVERCIEWEAHSRRATGLTLAFLSTAAKELGCPLPC

SEQ ID NO: 237511 - protein, 45 aa, Zea mays
  Clone ID: MRT4577_148197C.1.pep
LVMVKGEMSQYYPDMSSASSNIEAKLVKVAVLEAMCLELECLDPN

SEQ ID NO: 237512 - protein, 102 aa, Zea mays
  Clone ID: MRT4577_148198C.1.pep
QSGGTGAPVYLAAVLEYLVAEVLELAGNAAKDNKKTRIIPRHVLLAIRNDEELEKLLYGATIAHGGALPTIKPVLLPTKTAETAAAQDAKPPNKAVPPPKKA

SEQ ID NO: 237513 - protein, 187 aa, Zea mays
  Clone ID: MRT4577_148199C.1.pep
MSESNVKWIDGLHFTSLYWPPPQDVEQKQAQILAYVEYFGQFTADSEQFPEDVAQLIQSSYPSKESRLIDEVLATFVLHHPEHGHAVVHPILSRIIDGTLCYDRHGPPFSSFISLFSHTSEQEYSEQWALACGEILRVLTHYNRPIFKVERQHSEAECSTTSDQATSSDSTDKKSNNSLGNESDRKP

SEQ ID NO: 237514 - protein, 198 aa, Zea mays
  Clone ID: MRT4577_14819C.1.pep
MENEFQDGKEEVIQAWYMDDSEEDQRLPHHREPKEFIPLAKLSELGVVSWNLNADNWEKDENLKKIREARGYSYVDICDVCPEKLPNYEAKLKNFFEEHLHTDEEIRYCLEGSGYFDVRDQNEQWIRIAVKKGGMIVLPAGMYHRFTLDSDNYIKAMRLFVGEPIWTPYNRPHDHLPARKEYVDKIINRGGNQTVEAR

SEQ ID NO: 237515 - protein, 66 aa, Zea mays
  Clone ID: MRT4577_1481C.1.pep
AATARNFRETILNHPASTRPTADSCHMNMISRRTTQASQAQIAKPPDIKQLFVFLSIDFEVVYSIN

SEQ ID NO: 237516 - protein, 738 aa, Zea mays
  Clone ID: MRT4577_148200C.1.pep
WLCIIYKKQLEVPASEATIDATAQGIASLLCAHGPDVEWRICTIWEAAYGLLPLSSSAVDLPEIVVAAPLQPPTLSWSLYLPLLKVFEYLPRGSPSEACLMRIFVATVEAILRRTFPSETSEQSRKPRSQSKNLAVAELHTMIHSLFVESCASMDLASRLLFVVLTVCVSHQALPGGSKRPTGSDNHSHEEATEHSRLTNGRSRCKKRQGPVATFDSYVLAAVCALSCELQLFPFITKNGSHSNLKDSMKIIISGKNNGMNNELHNSISSAILHTRRILGILEAVFSLKPSSVGTSWSYSSNEIVAAAMVAAHVSELFRRSRPCLNALSALMRCKWDAEISTRASSLYHLIDLHGKTVSSIVNKAEPLEAHLTLTPVKRDNQHHREESNTSSLDSVKLENKNGSTSHKKNGFSRPLLKCAEEVLLNGDVASTSGKSIASLQVEASDLANFLTMDRNGGYRGSQTLLRSVLSEKQELCFSVVSLLWQKLIASPEMQMSAESTSAHQGWRKVVDALCDVVSASPTKASAAIVLQAEKDLQPWIARDDEQGQKMWRVNQRIVKLIAELMRNHDSPEALVILASASDLLLRATDGMLVDGEACTLPQLELLEVTARAVHLIIEWGDSGLSVADGLSNLLKCRLSTTIRCLSHPSAHVRALSMSVLRDILSNGSVNPNKTIQGEQQRNGIQSPSYRCLAAGIINWQADVERCIEWEAHSRRATGLTLAFLSAAAKELGCPLPS

SEQ ID NO: 237517 - protein, 149 aa, Zea mays
  Clone ID: MRT4577_148201C.1.pep
MGSTKPLRLIQHKKEALWFYSFIFFGYDHVFNPGQYTEDMRDISLEHARLHSRALKVVDVGGGTGFTTLGVVRYVDPENVTLLDQSPHQLDKARKKKALRGIKIMEGDAEDLPFPADTFDRYVSAGSIEYWPDPQRGIKEAYRVLSADG

SEQ ID NO: 237518 - protein, 371 aa, Zea mays
  unsure (1)..(371): unsure at all Xaa locations
  Clone ID: MRT4577_148202C.1.pep
NKNGSTSHKKNGFSRPLLKCAEEVLLNGDVASTSGKSIASLQVEASDLANFLTMDRNGGYRGSQTLLRSVLSEKQELCFSVVSLLWQKLIASPEMQMSAESTSAHQGWRKVVDVLCDVVSASPTKASAAIVLQAEKDLQPWIARDDEQGQKMWRVNQRIVKLIAELMRNHDSPEALVILASASDLLLRATDGMLVDGEACTLPQLELLEVTARAVHLIIEWGDSGLSVADGLSNLLKACPVFICLRSHSFKRHPCILRNSAGXEYCDLQCRLSTTIRCLSHPSAHVRALSMSVLRDILSNGSANPNKTIQGEQQRNGIQSPSYRCLAAGIINWQADVERCIEWEAHSRRATGLTLAFLSAAAKELGCPLPS

SEQ ID NO: 237519 - protein, 144 aa, Zea mays
  unsure (1)..(144): unsure at all Xaa locations
  Clone ID: MRT4577_148203C.1.pep
QRPGYYIHGQCAIIMFDVTSRLTYKNVPTWHRDLCRVCENIPIVLCGNKVDVKNRXVEAVALKVKAKQVTFHRKKNLQYYEISAKSNYNFEKPFLYLARKLAGDPNLXKPPEVTIDMAMQQQHEAELAAAAAQPLPDDDDDLIE

SEQ ID NO: 237520 - protein, 62 aa, Zea mays
  unsure (1)..(62): unsure at all Xaa locations
  Clone ID: MRT4577_148204C.1.pep
MVVPERRTFDLEEGWAFMQEGIIKLNNILRGQXEPQVTXEDYMMLYTTNYNIFTEMSSKDYL

SEQ ID NO: 237521 - protein, 92 aa, Zea mays
  Clone ID: MRT4577_148205C.1.pep
MALANQGTADYPSFKLVIVGDGGTGKTTFAKRHLTGEFEKFGGLRDGYYIHGQGAIIMCDVTSRLTYKNVPTWHRHLCRVCENIPIVLCGNK

SEQ ID NO: 237522 - protein, 119 aa, Zea mays
  Clone ID: MRT4577_148206C.1.pep
MALPNQGTVDYPSFKLVIVGDGGTGKTTFGKRHLTGEFEKKYEPTIGVEVHPLDFTTNCGKIRVYWWDTAGQEKFGGLRDGYYIHGQCAIIMFDGTSRLTYKNVPTLHRDLGKVCENIL

SEQ ID NO: 237523 - protein, 129 aa, Zea mays
  Clone ID: MRT4577_148207C.1.pep
SGSSRYHRHICSIFISACARSLRAVLSFRYRRPHAISRTRTGSRHVCFWRSQNYKVDASASISQSAQDMTQSGGRTPWVSAYALVMKTRGFATRGCLSVDAQTTLEVIFGACTVGSIRLQEAVCRGRRI

SEQ ID NO: 237524 - protein, 78 aa, Zea mays
  Clone ID: MRT4577_148208C.1.pep
ETKSLKCCGLGPLKIFLQEDNLLVLLPPPKPVKVFLLHWSWGGLGCHHFPPKFGHNGLPVFWTFACLAPQKQVHSLVA

SEQ ID NO: 237525 - protein, 119 aa, Zea mays
  Clone ID: MRT4577_148209C.1.pep
MALPNQGTVDYPSLKLVIAGDGGTGKTTFVKRHLTGEFETKYEPTIGVEVHTLDFTTNCGKIRLYCLDTEWQEMFGGLNAGYYIHGQGAIIMFDVTSRLTYMNGPTRHRDLSRGCELIL

SEQ ID NO: 237526 - protein, 162 aa, Zea mays
  Clone ID: MRT4577_14820C.1.pep
RPGTHSPWKSTILLVFPREVRDMMYSYSIPEIPATDATVSKTAYNTKNAPLLFLNEAISKDVQHVLYQDHAIVIPVLNPSEYELKETKFAPIVSQCSRLMKQRSNRVIIGTSRFIAASYSPLLHINIHDGTSAEDWIQKFCGFDNPEPLAKKLIDELISLTT

SEQ ID NO: 237527 - protein, 99 aa, Zea mays
  Clone ID: MRT4577_148210C.1.pep
VHPSDTNTPIPTLQTNQHFNQTTTTMPSVTQARLMWRSVARGMVEPHPFARNPITMTPHAWRAADLSKKVVKTSTVFFPFYAGILGWPVAAAWWFNGNM

SEQ ID NO: 237528 - protein, 48 aa, Zea mays
  Clone ID: MRT4577_148211C.1.pep
ERMFLWSLPLYVIPPLLITWKIELVLALSDWLSMTCQQMLPSNQLLRY

SEQ ID NO: 237529 - protein, 126 aa, Zea mays
  Clone ID: MRT4577_148212C.1.pep
TSRRRSAGGARWSAAFSCLGVGAASAAAAAWGRGRPAAEARHESRADEEEERPAAEMSAGDELRMEKARILSMVWSVTDDAPADGNRQRGRVPLFFLLRVELLVSAVACSCSCSCSCVWCARALAG

SEQ ID NO: 237530 - protein, 155 aa, Zea mays
  unsure (1)..(155): unsure at all Xaa locations
  Clone ID: MRT4577_148213C.1.pep
MALPNQGTVDYPSFKLVIVGDGGTGKTTFVKRHLTGEFEKKYEPTXLGVEVHPLDFTTNCGKIRFYCWDTAGQEKFGGLRDGYYIHGQCAIIMFDVTSRLTYKNVPTWHRDLCRVCENTMVVLCGNNADVKGNQVKGREPPFYLLSVVQYYEISA

SEQ ID NO: 237531 - protein, 257 aa, Zea mays
  unsure (1)..(257): unsure at all Xaa locations
  Clone ID: MRT4577_148214C.1.pep
MALPNQGTVDYPSFKLVIVGDGGTGKTTFVKRHLTGEFEKKYEPTIGVEVHPLDFTTNCGKIRFYCWDTAGQEKFGGLRDGYYIHGQCAIIMFDVTSRLTYKNVPTWHRDLCRYVDVFLCRKLVLMYNFVGKFXSSYEFMXVCENIPIVLCGNKVDVKNRQVKAKQVTFHRKKNLQYYEISAKSNYNFEKPFLYLARKLAGXDYPSSVHCIXVTTNYHSMFVLDNVFVFNSDPNLHFVEAVALKPPEVTIDMAMQQQ

SEQ ID NO: 237532 - protein, 54 aa, Zea mays
  unsure (1)..(54): unsure at all Xaa locations
  Clone ID: MRT4577_148215C.1.pep
CLPYQAPCANRGQXLFWGAFPPWGGANIFVGRGSFRAELPNEVFPMGIRTVAPI

SEQ ID NO: 237533 - protein, 67 aa, Zea mays
  Clone ID: MRT4577_148216C.1.pep
SVPLPRSRYRMIKQTASCRHEVSRTCMHQYLGVWQEMHSCMVHISNIAQSSCGGLSDLCGDKVVRLS

SEQ ID NO: 237534 - protein, 58 aa, Zea mays
  Clone ID: MRT4577_148217C.1.pep
EDAALAAIIRFWRLLLAPPPPQDQEQDSDQRRSPWSPSWQPSSSRLPPLPMLPRPAPS

SEQ ID NO: 237535 - protein, 98 aa, Zea mays
  Clone ID: MRT4577_148218C.1.pep
PPRYRPGTVALGEFPQSPKGLEFFIPKMPFPPLVGEIPQDFKTTLRFQSPPVLALQGAPKAPLFGFFWGPHLCPLPVKGVPLLPKDIRFSPRLLGGGG

SEQ ID NO: 237536 - protein, 154 aa, Zea mays
  Clone ID: MRT4577_148219C.1.pep
LHRAIGFLEAGRVSVLLSLAIDRSRERLPRLDTIPPAPCLRTLIYRAHARDRTTKQDTPCRRSSVGALDALVTAGARQAPVTLSQQGLLLARSRPASAGGGPVSTIVVMLMPSTIVRSVMHATCRRTSPRLTVVARLRSGSKLRGIEDQALATK

SEQ ID NO: 237537 - protein, 50 aa, Zea mays
  unsure (1)..(50): unsure at all Xaa locations
  Clone ID: MRT4577_14821C.1.pep
FSWNXSNRRNRDGQCYVNNTGMPPNQIDVLMNKQVNMEGLKICLLRIYQD

SEQ ID NO: 237538 - protein, 95 aa, Zea mays
  unsure (1)..(95): unsure at all Xaa locations
  Clone ID: MRT4577_148220C.1.pep
MGFIKSASIASVLVGAATASPYYAPPSNETVKYTTEVVTHLTTFCPEATTLTYGEKTYTITEATTLTIEDCSCTITKPVATXWLCSSSQAHSCQG

SEQ ID NO: 237539 - protein, 39 aa, Zea mays
  Clone ID: MRT4577_148221C.1.pep
GGRGLAFSFLVSSLLWDVAVIHLHSHNNAARRSLINYKL

SEQ ID NO: 237540 - protein, 156 aa, Zea mays
  Clone ID: MRT4577_148222C.1.pep
MNLEVDSENMHGLGVVAESEVEGLGEVAADTETGVVENASPEFLGGKDWNSDIPVDFDNDQTLDKNKKGKDSRSMKLFKSAIADFVKEVLKPSWRQGNMSKEAFKTIVRKTVDKVSGSVPSSHIPKTPAKIKHYVQSSQRKVTKLVMGYVDKYVKP

SEQ ID NO: 237541 - protein, 276 aa, Zea mays
  Clone ID: MRT4577_148223C.1.pep
MQLWFSSHPCSPRPRLARARIRLVGWGCPPLLPSSSPSTRGRHGCRHERVGLWQHRAAAWVGLGLGTRGLEPEHQWPVACHRGEGQFCFSSTRTVSCRQRTKLTGAPPPAGLGPQFSLLTSSLQRPPARLRSLDPSLYSSAWPPAFRSHTSPSASLHCDRARTPPPRVSQPAMMSTSRAVKSPACAAWRRQWSADAPNRTATFLARHGRRLGGGGGAPCSVRAEGSNTIGCLEAEAWGGAPALPAGLHVAAPSPGDAFVVPSEQRVHEVVLRQAAL

SEQ ID NO: 237542 - protein, 94 aa, Zea mays
  Clone ID: MRT4577_148224C.1.pep
LHRPIRVSGWMHRGRNCIHKSSKHILHVSLFCMTRLNGCKKQQLARPVRNGRSARTHACRPGREPSPLETDARRERALASPVQPHPYGPGWHSV

SEQ ID NO: 237543 - protein, 91 aa, Zea mays
  Clone ID: MRT4577_148225C.1.pep
WLLLYWTPNLCIQDDTLIGNTSSVDIATKENMESLIGIGQDLLKKPVARVNIDTGVYEPCSGEGTNAEALAHFAKKLSDERKLRKRNLDSY

SEQ ID NO: 237544 - protein, 78 aa, Zea mays
  unsure (1)..(78): unsure at all Xaa locations
  Clone ID: MRT4577_148226C.1.pep
DDTLTGNAXSGDIVTKENMESLISIDQELLKKPVARVNIDTGVYESCDGEGTNAQSLADFAXKLSDERKLRKRNLDSY

SEQ ID NO: 237545 - protein, 95 aa, Zea mays
  Clone ID: MRT4577_148227C.1.pep
RGLLKTEISTSGNKPTPGGGAFFVFCNRGNPPGGYLAFLFNPTQKICPPPKFFYKKPAPPAGVVFYGPRGWSKTKNFGGPLFNKAGLDEENLNVF

SEQ ID NO: 237546 - protein, 196 aa, Zea mays
  unsure (1)..(196): unsure at all Xaa locations
  Clone ID: MRT4577_148228C.1.pep
MPTQQACSAAAALRSRRPSPASTTTTSRQLRLRPPRAATAGVRLTVSDAELESRGFAVRRTAEGIDVAALNEVFVRVGFPRRQEERLRRALEHSRVVWLSAGEEEGRPVAFARAAGDGVFNAVVWDVVVEPSSQGLGLGRAVMERLVDELRRDGVXNIVLYAETRVVGFYRLLDFAMDPDGIRGMAYYRKSATTAA

SEQ ID NO: 237547 - protein, 94 aa, Zea mays
  Clone ID: MRT4577_148229C.1.pep
GGKKRVVSLKGKTTIIPGLVGHFWLFWKQGGWGKQKKGLNLEQLGAWKQKPVGFREKKSYKDLGKTQGGNLNRLRGGKPFLKSRGQLFLEKGGG

SEQ ID NO: 237548 - protein, 73 aa, Zea mays
  Clone ID: MRT4577_14822C.1.pep
GREQRRDERRMSGAHCGVHVLLAVFSRRGRGGGELLCLWRRTRRRWWSMTTTSWSWCSVSALSNSSCSIRRRV

SEQ ID NO: 237549 - protein, 137 aa, Zea mays
  Clone ID: MRT4577_148230C.1.pep
GGSFQFFGVFILFGERKQIPNRGRKKDRVNKRGWAQAHKPGRKKKSPRSMVQNPKGGGGGPPPNQRKRGLEWDSKKVPKDGTNHRRKHLVLREGRWPPSLGRGFLFSKCRGGPAVISPTTGGSGIKDRVLGPRREKA

SEQ ID NO: 237550 - protein, 69 aa, Zea mays
  Clone ID: MRT4577_148231C.1.pep
EIKLYREAAFLCLHKVFFFKSHLLSFSLADAVMLCFVGQHFLYWTKIFLNKTNCNCCRNVPFSIMLKIY

SEQ ID NO: 237551 - protein, 82 aa, Zea mays
  Clone ID: MRT4577_148232C.1.pep
QGPGRSGLYTLPGAPLQTTWARPLVRTPLQATIRAGRPPDCQAELIPGRSPLLGESSEGSSAPLIYMLKLSGQSQLTWGRPA

SEQ ID NO: 237552 - protein, 90 aa, Zea mays
  Clone ID: MRT4577_148233C.1.pep
ASLGGKRPNLGLLHLTLIKVTTTILNIGELHNLLCRTLLYRSCSPHVTNAPSLATLNYITYTCSSVLLEKKTYSSQFCAWHKERETPRNL

SEQ ID NO: 237553 - protein, 69 aa, Zea mays
  Clone ID: MRT4577_148234C.1.pep
MDEVASVATPLRKFPKDSFPLVKGCPNPAPKDFPKVPARTAMGFVLMGLVGFFCRFIFFPINNLIGGPG

SEQ ID NO: 237554 - protein, 96 aa, Zea mays
  Clone ID: MRT4577_148235C.1.pep
MGEQAVTERIQRKLEEANATVQQHLAGIQDHVNFTMQERLNRSLMVCQDKFEAAKLQKMKTDATQELESCVNRSIDDSIRALPYVVQQMKSTLNIN

SEQ ID NO: 237555 - protein, 237 aa, Zea mays
  Clone ID: MRT4577_148236C.1.pep
MPPISLLIVGLREKKKKKKKKKKKKKKKKKKKNFFFVQNRHTSLFALSRRFCSIPPPAGRKGIRRRSSMGRRHLSSNYFAAKASRSNQASGGCGAMGEQVVTERIQRKLEEANATVQQHLAGIQDHVNFTMQQAYFKCAYDCFDRRRTQEAINNCVENCGMPVLAVNNVFESEMAKFQERLNRSLMVCQDKFEAAKLQKMKTDATQELESCVNRSIDDSIRALPYVVQQMKSTLNIN

SEQ ID NO: 237556 - protein, 92 aa, Zea mays
  Clone ID: MRT4577_148237C.1.pep
VIRQARDLPAAGRPRRLHQSVRSVPPRAHLPLSLYVTRRDLGVVSPAPDPTDSMRGSTPSPRRKPHPNRVVGRAGWGLRSRRGRTPDASSPP

SEQ ID NO: 237557 - protein, 284 aa, Zea mays
  Clone ID: MRT4577_148238C.1.pep
ITFSWLVEPPRRPIRFLHRAADLTLVPSAAISKDFETAQVISANRIRLWNKGVDSASFHPRFRSHEMRVRLSDGEPEKPLVIHVGRFGREKSLDFLKMVMERLPGVRIAFIGDGPYRGELEKMFEGMPAVFTGMMQGEELSQAYASGDVFIMPSESETLGQVVLESMSSGVPVVAARAGGIPDIIPEDQEGRTSFLFTPGDLDDCLGKVQQLLTNREFRENMGRTARSEMEKCDWRAASKTIRNEFYNAAIWYWRKKHAELVKPLQWLAQMFLPAPEVRSIMQC

SEQ ID NO: 237558 - protein, 55 aa, Zea mays
  Clone ID: MRT4577_148239C.1.pep
KRAPWGFGTLLFNLQKPPRANRGDIKKPFPTGPGDYRAFFWGDKIGGGHWGGCPK

SEQ ID NO: 237559 - protein, 62 aa, Zea mays
  Clone ID: MRT4577_14823C.1.pep
QMIVPAEHCAGCIVHLIGHFVLPICVPTARVLLFMFRVHTFFASGCALVQRGSLCDYYQYSL

SEQ ID NO: 237560 - protein, 108 aa, Zea mays
  unsure (1)..(108): unsure at all Xaa locations
  Clone ID: MRT4577_148240C.1.pep
NKTPEQTIRGMERKYMKTXXPHQGAREERYRETLEKKAEEQGAQFVSFDARKGEWKLREKHFSAYGLRRKPGEISSLKGLMEQHFTLVAITMLGSRAMLMDKVAAGKK

SEQ ID NO: 237561 - protein, 228 aa, Zea mays
  Clone ID: MRT4577_148241C.1.pep
MDASYRRAGTGSGSAPRSVEDIYKDYRSRRSAILRALTHDVEEFYALCDPEKENLCLYGYANEAWEVALPAEEVPTELPEPALGINFAFYYAARLNRSDRKRLFGMMNDLPTVFEVVSSGVKQSKERDRSGTDNGGRNKLSVKQTSEPRLENNAREPDEGYDEDDSNHSETLCGTCGGIYSADEFWIGCDVCEKWYHGKCVKITPAKAESIKQYKCPSCCNSKRPRPI

SEQ ID NO: 237562 - protein, 127 aa, Zea mays
  unsure (1)..(127): unsure at all Xaa locations
  Clone ID: MRT4577_148242C.1.pep
PGGRDHNNTRTRPDSPPPPAYLSASALPGRGKGGKGHGTRRARHSRHTQGACADNIQGITKPAISKLDRRGGVKRISGIIXEETTRALNIFLENAIRDAATYTEHARRKTVPATDAVYALQCQRRTL

SEQ ID NO: 237563 - protein, 292 aa, Zea mays
  unsure (1)..(292): unsure at all Xaa locations
  Clone ID: MRT4577_148243C.1.pep
WVPRGRPGLDSINVSAVKEHEQSINTGATASTHQLAGDHKKIQDRAPRRRPTWRTPPLAAATSSXPRSAEDIFKDYRARRSAILRALTHEVEDFYAQCDPDKENLCLYGYANEAWEVALPAEEVPTELPEPALGINFARDGMNRRDWLALVAVHSDSWLLSVAFYYAARLNRNDRKRLFGMINELQTVFEVVSGARQQQSKERSSMDNGGRAKPVKIENNGKVTDEAYEDDSDHGETLCGTCGGIYNADEFWIGCDMCERWYHGKCVKITPAKAESIKHYKCPSCSSKRARQ

SEQ ID NO: 237564 - protein, 297 aa, Zea mays
  Clone ID: MRT4577_148244C.1.pep
MPPLAARVVSSLGSRPHRDQSSLSLPAFLLRLALAGGQAHRRRAMDASYRRAGTGSGSAPRSVEDIYKDYRSRRSAILRALTHDVEEFYALCDPEKENLCLYGYANEAWEVALPAEEVPTELPEPALGINFARDGMNRGDWLALVAVHSDSWLVSVAFYYAARLNRSDRKRLFGMMNDLPTVFEVVSSGVKQSKERDRSGTDNGGRNKLSVKQTSEPRLENNAREPDEGYDEDDSNHSETLCGTCGGIYSADEFWIGCDVCEKWYHGKCVKITPAKAESIKQYKCPSCCNSKRPRPI

SEQ ID NO: 237565 - protein, 76 aa, Zea mays
  Clone ID: MRT4577_148245C.1.pep
QLNSENKLILVSGDVLDQMNKAVHIANKSEVISSIVMSLPRHSLLKNAHHEGDVGSVYSRRLATFWMLRDGRVVYE

SEQ ID NO: 237566 - protein, 64 aa, Zea mays
  unsure (1)..(64): unsure at all Xaa locations
  Clone ID: MRT4577_148246C.1.pep
KDVFKAWVMPLRKKEYASILAFDCKVMPDARDLPKKSXGVRIFGADIKYHLVDQFTEYIKYLKE

SEQ ID NO: 237567 - protein, 151 aa, Zea mays
  unsure (1)..(151): unsure at all Xaa locations
  Clone ID: MRT4577_148247C.1.pep
MDVPVLPAPPPMAAQLAPSRQFYHLTXDRMTEHCRQELCYNCDEXVRWGHQYQHLFYLEDTNYLLDKAPEDTSSEVVLEDRPDATIVSLHAIVGMHXEDTMHLHAYIHXHQLLALLDGGLTHNFINVEVMCHIGLATMNNTNMRVMVANGV

SEQ ID NO: 237568 - protein, 310 aa, Zea mays
  Clone ID: MRT4577_148248C.1.pep
MDASYRRAGAGSGSAPRSVEDIYKDYRARRSAVLRALTHDVEEFYALCDPEKENLCLYGYANEAWEVALPAEEVPTELPEPALGINFARDGMNRRDWLALVAVHSDSWLISVAFYYAARLNRSDRKRLFGMMNDLPTVFEVVSGGVKQSKERDRSGTDNSGRNKLSAKQTSEPRLENNAREPDEGYDEDDGYHSETLCGTCGGIYSADEFWIGCDVCEKWYHGKCVKITPAKAESIKQYKCPSCSFKEGEAVAKPMNAGSLRMWDVWCRRGALQSLQAGEGQETSIYKIRTILLSSLCLMLTFFTYDKLM

SEQ ID NO: 237569 - protein, 173 aa, Zea mays
  Clone ID: MRT4577_148249C.1.pep
MASRLQGLPLFWHGELSWFFNLMVWSSSRSFFGVEDFVDEDNSRPYTYKKEKRSKNPHKHISFKQRTIAHMEPFTLDVFISKRFVSASLTHRSTCRQVAVAGTNSKDIKAALRSRSDVPACLAVGRFLAERAKEADVYTCTYTPRERDKFEGKIRAVVQSLIDNGINVKLYLD

SEQ ID NO: 237570 - protein, 127 aa, Zea mays
  unsure (1)..(127): unsure at all Xaa locations
  Clone ID: MRT4577_14824C.1.pep
GEKQRGRGGXGPAXDSERGTTDXSDSXRQHDRDENRANDQGNRTTPCVGGGTXSNRLIQNSXNNHVSMNPINTVXFDAKRLIGRRFSDAYVHSDIKLWPYKVISGPGEXPMIVGQHRGEEKHTADEE

SEQ ID NO: 237571 - protein, 62 aa, Zea mays
  Clone ID: MRT4577_148250C.1.pep
MTLQIMSTSRRLYEGVSGFQFQSLCNIGHDYAKLSSAPLYRKSGILAGSDRSLPTWPLAIKN

SEQ ID NO: 237572 - protein, 129 aa, Zea mays
  Clone ID: MRT4577_148251C.1.pep
LQFLFSLRMYDFDRNGTMSFQEFVALNNFLLKVQHAFSDLERGRGFLVPDDVFEALGKIGFMLDSPAFYSVCESFDQSKNGRFRLDDLISICIFLQSARNLFNSFDTAKQGRVTLDLNQFVYCTANCRI

SEQ ID NO: 237573 - protein, 204 aa, Zea mays
  Clone ID: MRT4577_148252C.1.pep
KPKYHTMADTVEESKQSISGEGQADANASVGAKGSAESSSKKTERKTPKKLGGKKPQQQPTPDATPAPDSDGEGNAEQEDAESKKQTNGGDADDSDEPQQEKSKSQSRRRQSRGRGRRGVESGAESDARSDVSQSGGRRNRQRQKKGGKGGGPLDDITENVPGGELVGGAGDMVQNTAWKGPLAPSAIQLAKALGGLTGGGKER

SEQ ID NO: 237574 - protein, 141 aa, Zea mays
  unsure (1)..(141): unsure at all Xaa locations
  Clone ID: MRT4577_148253C.1.pep
RSDVCWPYQRPKFTLAHLLGLAPFIRCXRSPDAVAQAPXIAGYYEHRATAGVLLISRDTIISTCGXGXHGVPGIYNQQQTDAXRKGDDAVYAKXNIFFCQLYHEGQPYNQQYHAAASFPLFSSVNPILXRLMILMPKGSYG

SEQ ID NO: 237575 - protein, 76 aa, Zea mays
  unsure (1)..(76): unsure at all Xaa locations
  Clone ID: MRT4577_148254C.1.pep
LQGANPKTLNGYSNTRXLQLYTVQXLRLDXXLVNTLDGSPLVMSAXCNTVGXLXTXXSPXXTRSWXKCRXLXTCFV

SEQ ID NO: 237576 - protein, 70 aa, Zea mays
  Clone ID: MRT4577_148255C.1.pep
YSMTYPYSHTPTAPTSNDRFYHTSFKTLLQIHQTWTYELYTQHHKPDLLSTHATYIILTHYIQIYHPHSI

SEQ ID NO: 237577 - protein, 94 aa, Zea mays
  Clone ID: MRT4577_148256C.1.pep
LTPKMIWQTLTHLASVGHDPSSLYRPLAVAGVRASPATGGRENSRDCSVGRSVISGGPGPVLCSWQRPRAAKQSRAEQIDLPGPMREEKRKEEN

SEQ ID NO: 237578 - protein, 78 aa, Zea mays
  unsure (1)..(78): unsure at all Xaa locations
  Clone ID: MRT4577_148257C.1.pep
QPKAXAAKPGSNPKEETEGGGXPXQPEQEPPPKNGAPTPKGEKPPTGRGPTTGTTTPSNAPGAGAPQSTKAEPQRQPP

SEQ ID NO: 237579 - protein, 72 aa, Zea mays
  Clone ID: MRT4577_148258C.1.pep
GAFACAVVPVRFWGWFCPVWCVPCWSFPLPLPVVGPLGLCLCGGLVLVASLCGASGCVSVPPPWGPPARVRK

SEQ ID NO: 237580 - protein, 95 aa, Zea mays
  Clone ID: MRT4577_148259C.1.pep
KKSSQKIFPSAFGDDDFYQRLFLMMAQQPLLRFFPPFYKKIEKIRPFRLNCSKSPLKPRGPMISLFFNFFDKPPYVVHATTLKYWQFFMRSSDFD

SEQ ID NO: 237581 - protein, 77 aa, Zea mays
  unsure (1)..(77): unsure at all Xaa locations
  Clone ID: MRT4577_14825C.1.pep
PPDPRVPRPLPLILHIHNNPTATGRGMLFALALLALAASATYTHTNAQCXCHPXSTIHLPPPPHMSTALQTPTSAHL

SEQ ID NO: 237582 - protein, 56 aa, Zea mays
  Clone ID: MRT4577_148260C.1.pep
MRAIFPAHGPRFQGGRTGPPFGNVGINKVRASILNLKPAPTKGSAFFPGGILLPTK

SEQ ID NO: 237583 - protein, 240 aa, Zea mays
  Clone ID: MRT4577_148261C.1.pep
MLVGGGRDDEEVLRKLKSMDVDKLENGGGGGDAESPRPAVKYHGWKAMPFIIGNETFEKLGTLGTSANLLVYLTQVFHMRSVDAATLLNGLNGTTSLAPIVGAFLSDAYLGRYLALAIASIASLIGMFLLTLTAGADSLHPPECAVGETCEKATSYQFAVLFVAFAFLVLGSAGIRPCSMPFGADQFDPHTESGKRGINSFFNWYYFTFTAAMMISATVIIYVQSSVSWPIGLGIPTALM

SEQ ID NO: 237584 - protein, 64 aa, Zea mays
  Clone ID: MRT4577_148262C.1.pep
VSPRLQITSHEREGNLGSHKMRALAESLYPIPIIARVQPLNSESPFLVYMAAMYFRKGRAKFKS

SEQ ID NO: 237585 - protein, 236 aa, Zea mays
  Clone ID: MRT4577_148263C.1.pep
MLVGGGRDDEEVLRKLKSMDVDKLENGGGGGEAESPRPAVKYHGWKAMPFIIGNETFEKLGTLGTSANLLVYLTQVFHMRSVDAATLLNGLNGTTSLAPIVGAFLSDAYLGRYLALAIASIASLIGMFLLTLTAGADSLHPPECSVGETCEKATSYQFAVLFVAFAFLVLGSAGIRPCSMPFGADQFDPHTESGKRGINSFFNWYYFTFTAAMMISATVIIYVQSNVSWAIGLGIP

SEQ ID NO: 237586 - protein, 128 aa, Zea mays
  unsure (1)..(128): unsure at all Xaa locations
  Clone ID: MRT4577_148264C.1.pep
NRNPLGPTKIIPLGEGKTGPPNTPPPLRGGPPGGTPSPPFPKGGEPPPGGGLPLGLPPGXHQGGGGRPLPPGFGGPPGKRPFKGPXKGGNGRPPSPGPGFGEKPPGXPGKPNRGWNGPGRVFKKEPSP

SEQ ID NO: 237587 - protein, 59 aa, Zea mays
  Clone ID: MRT4577_148265C.1.pep
ICFATLFMRIEEHRFIARSYNNIYIFFVYFAFVKLDPNKYTINQSHRPCSSRTNHAIGR

SEQ ID NO: 237588 - protein, 62 aa, Zea mays
  unsure (1)..(62): unsure at all Xaa locations
  Clone ID: MRT4577_148266C.1.pep
ALEQIRNXYADTIVEVPEMPEFISEGXLQQWSKQAGDFVEQDEEIATIETDKIDGAANAPEA

SEQ ID NO: 237589 - protein, 179 aa, Zea mays
  Clone ID: MRT4577_148267C.1.pep
VARLVDAYLAEAALEAGLRPAEFEELARAVPAHARPADDALYRAVDTYLKAHPSTAKEERKSLARLIDARKLTAEAAAHAVQNERMPVRAVVQVLFSEHGKLNRLAELSASFSGQRSPSPNPALELPGRCPSKREVLAQHQEVRRLRDDVARLQVQCNALQAQVDRLGSERRRRGGGGG

SEQ ID NO: 237590 - protein, 70 aa, Zea mays
  Clone ID: MRT4577_148268C.1.pep
TTAAVPLQRAAPLRRSIQTSRDDPPRGPVRDDGGSTCGGIASTIDHRTAFDIDRGKGNRPVHAVGGRGTS

SEQ ID NO: 237591 - protein, 80 aa, Zea mays
  unsure (1)..(80): unsure at all Xaa locations
  Clone ID: MRT4577_148269C.1.pep
MQYLSNAALARTSVASTTVLSSTSGLFTLFIGVXLGQDSINAAKIIAVFISMAGVVMTTVGQTWASDESEAGQSGFTQRT

SEQ ID NO: 237592 - protein, 115 aa, Zea mays
  Clone ID: MRT4577_14826C.1.pep
NQNFIKPPRGGWGNPHKKIGAPSPPYSKNRKKKMDKENSPKIKNQYKAGNGTPNPTRVGPVACPLGPGKTHPWPPFSPPTSWPRGKNPRLPTTFTSSKKKLSPTSFFWGQPHPQT

SEQ ID NO: 237593 - protein, 398 aa, Zea mays
  Clone ID: MRT4577_148270C.1.pep
MGSSLKYRSGLCLIVAVVLIWVISAEVTQGIFTKYRHPFAVTYLGASLMVIYLPLSFLKDFIYNSLRRHSRNTSASKIASKSSFGGSAPLKNGEFQKMLEMESQKTIVVNCPDVSIPVVEETKPLICGITEMDDGLFKDKQLSTKEIATYGLYLCPLWFVTEYLSNAALARTSVASTTVLSSTSGLFTLFIGVLLGQDSINAAKIIAVFISMAGVVMTTVGQTWASDESEAGKSGFTQRTLLGDMFGLMSAIAYGLFTVLLKKFCGEEGEKVDVQKLFGYLGLFTLVALWWIVWPLTALGVEPKFSMPHSAKVDEVVVANSLIGSVLSDYFWALSVVWTTPLVATLGMSLTIPIAMVADMIIHGRHYSAVYILGSVQVFSGFVIANLADRFSRSLGLS

SEQ ID NO: 237594 - protein, 243 aa, Zea mays
  Clone ID: MRT4577_148271C.1.pep
ERIQDGLLRHPADSPLWKDFDQKHPVFASDSRNIRLALATDGFNPFRSMNVSYSIWPVILIPYNFAPWLCMKQTNFIISLLIPGRRSPGSDIDIYFQPLIDDLLDMFVEGVRTYDSSKHEYFQLCAAIIWTISDYPGLGYIAACSTSGDVACIECHSYTCSLRLKQGTKNCYMGHRRFLGPNHPYRFDLDSFDGKVEDKPAPRPLSGEEILLQTENMHTVHGKGCQKKKKKKKKKSTLRCYHC

SEQ ID NO: 237595 - protein, 79 aa, Zea mays
  Clone ID: MRT4577_148272C.1.pep
PAGNAFHLIMSCLSNPVPQRRVALERPLWDEMVTLRGHGRNTTTGESNQDKVASEDQCSAPMSCANPRLRALPDDSDLI

SEQ ID NO: 237596 - protein, 184 aa, Zea mays
  Clone ID: MRT4577_148273C.1.pep
MTIVEMHVSIDCDGCEDNVRKALEKLKGVHHVSIDRMHGKVTVTGSVSQRKALRAARRTGKLAVLWPSAYNNPSYHQAHAMPAYYQYQYQYQANKPAQAQQHQYYSSVQRAGKNSGGGGGSAVATKPAGQYPQSKASSYNYRVHGYYDSELYGNYHDHEQPGDVVPATVRSYFSDENPSACSIM

SEQ ID NO: 237597 - protein, 101 aa, Zea mays
  Clone ID: MRT4577_148274C.1.pep
RKTQCYLGLGKGTFPPLGRGSFNHPIYRFEGGFFGKMSKPFCVLLKKNSVGSPPNFKMGKNPPTVSTEGPLGFFLLPIIKEGNPWFFFQPVFPTPRALIFA

SEQ ID NO: 237598 - protein, 223 aa, Zea mays
  Clone ID: MRT4577_148275C.1.pep
LEDGEDTVLVVGGTGYIGRRIVRASLAHGHRTFILMRPEIGLDIDKLQLLLSFKAHGALLVEASMEDHRSLVAAVKQVDVVVSAISGRHFLLQLKLVEAIKEAGNIKRFLPSEFGIDPARMGHALEPGRITFDEKMEIRRAIEEANIPHTYVSANCFAAFFVPNLSQMRTLLPPKKKVHVYGDGKVKVIFMDEDDVATYTIKSIDDPRALNKTIYLRPPENIL

SEQ ID NO: 237599 - protein, 172 aa, Zea mays
  Clone ID: MRT4577_148276C.1.pep
IDYRHDGVLFKLLLTTFNLLATYSTYVLREKKKKKKKKKKKKKKKKKKKKKKKKKKKKKISFRPGPAGKGKGGTPEQRKTGCPQVRAKGKGGGNARGPGPGVNRGGGKRGCFGAPKGKGGEFGGGPPGDLKGAPAHGVGLFQPGGEGAGFLPERGKPGEKKLIKKPQGPRKV

SEQ ID NO: 237600 - protein, 226 aa, Zea mays
  unsure (1)..(226): unsure at all Xaa locations
  Clone ID: MRT4577_148277C.1.pep
SNSPHEXQFWIKAPRVRLFPTPPPPSLLHKIATSSQSQDQETDGEQRRSVLQLGRRAATLGAFAWTTNRGAATLGPPARSPIRVGRFGLRRLSQQGKLGEVVVVLPARLPATPSATTSSTTHTSERGNAEVRSFGIPTRWICLIILWLKKRRQMGVRLGSKKRVVARQQVKMWFNRRPSKGRRKQMRRNKGIQPRPAKKVMKRHQRRTSNHVGDGDRRQLIYPNCR

SEQ ID NO: 237601 - protein, 100 aa, Zea mays
  unsure (1)..(100): unsure at all Xaa locations
  Clone ID: MRT4577_148278C.1.pep
SRWDDVVLVDEREGVNRKLELWRETLESKXFRISSTITEYMRYDFGTTISEDGDVSLGGQVVPKKDTFRYLGSMLQRDGDIDEDVSHRIKAGWMKWRQVL

SEQ ID NO: 237602 - protein, 54 aa, Zea mays
  Clone ID: MRT4577_148279C.1.pep
IRATGCFSSTPGFFEAKRRHSYPYFNNLRVLNIKKKKKKNTRPTRSRRILVYSR

SEQ ID NO: 237603 - protein, 93 aa, Zea mays
  Clone ID: MRT4577_14827C.1.pep
MLFFSYFKELVGKEVTVELKNDLAIRGTLHSVDQYLNIKLENTRVVDQDKYPHMLSVRNCFIRGSVVRYVLLPQDGVDIDILHDATRREARGG

SEQ ID NO: 237604 - protein, 417 aa, Zea mays
  Clone ID: MRT4577_148280C.1.pep
MAMSWIRSVVRRALIAPKPRGSRQFTVTAAGGGATQTERVAAEMVRYALGGAVHRSSPEEAMRILEQGASNLQGGGEGSAEAVGLLMLAMSTLLYRSGRRQDAVEKLKATQQVAPSAVFRVAAWEALMGLHMEAGQEMSYLISPNDSVDLSIKYDSKWSDQDHLKFRVNAVRGLVTLLNGETESAAQLFDGWCRDFSRGENQTENAAVSYGEYLHCVGDFQMAAQVYEKILEAFCMDDMSGNLLAAGNMVPEEASLGATCSYGQLLSHSGKFAEAEDYLTRALQKAEEQFGANHPKVGIILTCVARMYKLKAKSEGSTSIMVQEGLYRKALEVLKAPAINSEGTSKQVDWRDIISLARGEYAELLLIQSNRKAEGERMKQWAEDAWRNRRLTLAQALEFSEPSKPTVVVDTRIGRVV

SEQ ID NO: 237605 - protein, 51 aa, Zea mays
  Clone ID: MRT4577_148281C.1.pep
LNVRLEGLFMSKELGIYLIRKNITLMVKIEELIAKVKSLSFTGCIPPNLSI

SEQ ID NO: 237606 - protein, 268 aa, Zea mays
  unsure (1)..(268): unsure at all Xaa locations
  Clone ID: MRT4577_148282C.1.pep
IKLQNLAYICSLSAAQLFDGWCRDFSRGENQTENAAVSYGEYLHCVGDFQMAAQVYEKILEAFCMDDMSGNLLAAGNMVPEEASLGATCSYGQLLSHSGKFAEAEDYLTRALQKAEEQFGANHPKVGIILTCVARMYKLKAKSEGSTSIMVQEGLYRKALEVLKAPAINSEGXQRSPINDKVPLDMLILXYSVGTSKQVDWRDIISLARGEYAELLLIQSNRKAEGERMKQWAEDAWRNRRLTLAQALEFSEPSKPTVVVDTRIGRVV

SEQ ID NO: 237607 - protein, 73 aa, Zea mays
  Clone ID: MRT4577_148283C.1.pep
NPPNFGGAPAPFKSSWLYLVSFPRGAYHSPISLETRPKVLGMGPPFKVFWPSSGACGRSLIRVNVFKAPLNYC

SEQ ID NO: 237608 - protein, 99 aa, Zea mays
  Clone ID: MRT4577_148284C.1.pep
LLSSHPWPLASCMVRYCRRLPCPFKDSGTGLHLHAKIERRRESMNFRRRTWLPARAKEGKNSGSGRREEERAENYLFHPQKQKAKTMVLAASAQSSRLD

SEQ ID NO: 237609 - protein, 81 aa, Zea mays
  Clone ID: MRT4577_148285C.1.pep
FYQQKDPFFLPENRVSASWGQPATYQTGVSGGKYTPDRAARSCTPCAATGSSPGRIFSYAKTTAPRQTRTEPDPRTCQKPQ

SEQ ID NO: 237610 - protein, 167 aa, Zea mays
  unsure (1)..(167): unsure at all Xaa locations
  Clone ID: MRT4577_148286C.1.pep
ATXXPQGXQXXXXXXXPPXXXPTGGRRXENPXXQPNRXQQAXAXGXXXXXPXXXQQXXAXXQQXXXXXXXAQNXRAQQXQQXXXANXXAXXQQQQXXPXNQXXAXNXXXKXQQQQXPXSQXXXAHPQQXXPXNQPTAXNXPXXXQQQQPPPXSQPAGGSXATXXTQP

SEQ ID NO: 237611 - protein, 97 aa, Zea mays
  unsure (1)..(97): unsure at all Xaa locations
  Clone ID: MRT4577_148287C.1.pep
LQQAIAAGIIPXSPLLLEQSPALSLGQSWVQTIRAQQLQQLGLPVINQVLLANLFPYXEHTQFLPFNQLYTLNPWAYWQQHLLPFSQLATAYSEQQQ

SEQ ID NO: 237612 - protein, 260 aa, Zea mays
  unsure (1)..(260): unsure at all Xaa locations
  Clone ID: MRT4577_148288C.1.pep
MAASYTTSWRCAFLALLALFVSGAYGQLSPTFYASTCPNLEAIVRSIMNTTVTNEKRMGASLLRLHFHDCFVEGCDGSVLLDNVPATATAPAFVGEKNAFGNINSLRGFEVIDTIKTAVEQACPGVVSCADILALAARDGTFXFGGPTWTVPLGRRDSTTASMDLANRDLPPPFANLVSNPPDNSDLIARFQRKGLSATEMTVLSGAHTIGSAQCQNYRLRLYNEDRIDXQFAQGLKGNWPPNGPXGDTFLALXDSTEMS

SEQ ID NO: 237613 - protein, 77 aa, Zea mays
  Clone ID: MRT4577_148289C.1.pep
ISKKKKKKKKNKKKKKKKKKKKKKSFYLAQGGTLKGRFFENFLFSWGRVPPCMVKVLNFPFTRFGLQVHWPTVPNSP

SEQ ID NO: 237614 - protein, 43 aa, Zea mays
  Clone ID: MRT4577_14828C.1.pep
GSIANRSGSTLQRSLSHARWLNSLMTGGVTCFHSVESGYLKGR

SEQ ID NO: 237615 - protein, 131 aa, Zea mays
  Clone ID: MRT4577_148290C.1.pep
LARVNPAASLQQQQVFFFSPPAVVKAPTYLQHRLLHQFGPALTQLVVANPVASLQQVFPFNQLVGWNFGGALQQGPRFFYPPGGGNPLGGAFPQQHQLLPSTRFFLLTPPLLGPPPPVGGAFFCFHLGGPR

SEQ ID NO: 237616 - protein, 226 aa, Zea mays
  Clone ID: MRT4577_148291C.1.pep
MAASFTTSWRCAFLALLALFVSGAYGQLSPTFYASTCPNLTTIVRDAMVTALNPAVGGERRMGASLLRLHFHDCFVEGCDGSVLLDNVPANGSTPAFFGEKNAFGNINSVRGFEVIDTIKAAVEQACPGVVSCADILTLAARDGTFLLGGPTWAVPLGRRDSTTASMDLANRDLPPPFANLVTNPPDGSDLIARFQRKGLSATEMTVLSGAHTIGSAQCQNYRLRL

SEQ ID NO: 237617 - protein, 137 aa, Zea mays
  Clone ID: MRT4577_148292C.1.pep
ANAGDSPIQPQHNGYENNQSGERLGRGILTVYDPRRRGGGAPVCRCCRTSPAASSWRRGRHPRRRCRAPSPCWSRSASACGSRSRSERRAPRAARRAVKSSEALVMPVPDEARVAVPCAAPARDRDWGRWIPGPAGL

SEQ ID NO: 237618 - protein, 96 aa, Zea mays
  Clone ID: MRT4577_148293C.1.pep
PKETLFNGVISISNYDTDEAPSPQPVSLVSDEIDISESSPSPSPSPHTVDEMDNSEESPSPLSHTIELQMFEVPTTSCNNEEDEEDDDSFREWESD

SEQ ID NO: 237619 - protein, 45 aa, Zea mays
  Clone ID: MRT4577_148294C.1.pep
RTSLVHILIYPHTPILHACQSLICKPLSRFLKCELNYSASSFRYF

SEQ ID NO: 237620 - protein, 71 aa, Zea mays
  Clone ID: MRT4577_148295C.1.pep
SLYTLKAINRRNIRARSHFDLLILKKTNQYINSIWDKSILLSLKIRQTTLSQVCHTKVRTDETKLDLDIYL

SEQ ID NO: 237621 - protein, 89 aa, Zea mays
  Clone ID: MRT4577_148296C.1.pep
KRGRLHNSRGVQDPAKTATASVIHTIGLLLYLVAVKKLSRQIHRWGFQPRTTSRGLGQTNDGPIEGNGASAHMLRQTGGGWQHPRRQQG

SEQ ID NO: 237622 - protein, 133 aa, Zea mays
  Clone ID: MRT4577_148297C.1.pep
VVFCRVFRRRLREAQLRRGAPLERTTTRDRRFVAVAHTRSTTAAVWISVGEYARRRSAAVLQIRSSAAAAVMWISAGEYARKFSAADSLVSRDVEKVDGRALNPLWCEIARRDRVAVPTSWTRAVRTRKIPFS

SEQ ID NO: 237623 - protein, 121 aa, Zea mays
  unsure (1)..(121): unsure at all Xaa locations
  Clone ID: MRT4577_148298C.1.pep
SSASWASLFFAPNSIVAGGVSCTGSRAPRSTMRPFLTKGPRWSASSATSTPARPGGALDSSXGTEAAGXXVIADSAKRLGSDLVKSNLEAGXXVPPSVTLTVGLGRQAGNRASPSPRAAAD

SEQ ID NO: 237624 - protein, 235 aa, Zea mays
  unsure (1)..(235): unsure at all Xaa locations
  Clone ID: MRT4577_148299C.1.pep
TPAGIGPEFPGRPTRPPTRPLLPPCLLASPRSSSPVSRRSGHSELSVQCRAKDRASGPRVGAAKERGRSSGPKTKRATLSQTSTSAGAMKMVAPWTRFYSHSCCLCCHVRTGTILLGVWYLIINAVVLLILLSALADPNQYHFSGSELGGEFXEFMDDANMCIAIAISLLMILICAMATYGAYKQHAAWIIPFFCYQIFXDXALNTLVAITVLVYPNSIQEYIRQLPPSFPYRDD

SEQ ID NO: 237625 - protein, 91 aa, Zea mays
  Clone ID: MRT4577_14829C.1.pep
KKKKRPALSPLKFEGTKPDTFWAISQKPFGGDRLQQMFLGPLKRGREQLMPTPGVSGGRGQATGIWKGFGVGPTRGALSTNGHKGGGRVEQ

SEQ ID NO: 237626 - protein, 43 aa, Zea mays
  Clone ID: MRT4577_1482C.1.pep
KDGNQNDANTGLFLRAAVRPFTYRNLVKEIVLMRHHIIDGEIV

SEQ ID NO: 237627 - protein, 34 aa, Zea mays
  Clone ID: MRT4577_148300C.1.pep
AAKEPPPRHESFERVTEPVQDIFNKWRGPLLTLL

SEQ ID NO: 237628 - protein, 73 aa, Zea mays
  Clone ID: MRT4577_148301C.1.pep
KRGGVTMSCGSHPRLVKHLSCTSGPFGIPEVLSWQPSYLSPLKVYGEKNSHPPLEPINLWRQNKWINPRLTGF

SEQ ID NO: 237629 - protein, 43 aa, Zea mays
  Clone ID: MRT4577_148302C.1.pep
FVLNPVYCVCALVVSSLVNLFCYLIRGPVLYVLPCYKIVVLTF

SEQ ID NO: 237630 - protein, 88 aa, Zea mays
  Clone ID: MRT4577_148303C.1.pep
YRWNSGRRSKGPDADIGRGSSSHSVSTSLPVELAIQSPRLCVLDHCHCDTETRLRFLCLHYLYSLFRLQAGLVSFPDDLFCYCCDYVL

SEQ ID NO: 237631 - protein, 54 aa, Zea mays
  Clone ID: MRT4577_148304C.1.pep
TFSNFSGQGTNKAARHLIRFLTHKQIQKKYFSRAIHIPIKTYPLWSSTVQMATP

SEQ ID NO: 237632 - protein, 381 aa, Zea mays
  Clone ID: MRT4577_148305C.1.pep
MDKKKATDGTEPGPAPSRAVDRFGFIKPEQGNSPDGIPKGKSIHEREREERRIRKWRKMIGVGGNDWKHYVRRNPHVVKRRIRKGIPDCLRGLVWQLISGSRDLLLMNPGVYETLVIYETSASELEIIRDISRTFPSHIFFQQRHGPGQRSLYNILKAYSVYDRDVGYVQGMGFLAGLLLLYMSEEDAFWLLVALLKGAVHAPMEGLYQAGLPLVQQYLSQFEKLVIELMPKLGQHFVEEMINPSMYASQWFITVFSYSFPFHLTLRVWDVFLYEGIKVVFQVGLALLRLCHDDLVKLPFEKLLYALRNFPEEATDPDVLLPLAFSFKVSSRLEELQKEYQKRQEGTSETSSGERLQPLVSKTMSRVGSRVVSNLTTADRK

SEQ ID NO: 237633 - protein, 86 aa, Zea mays
  Clone ID: MRT4577_148306C.1.pep
LASLGPFLIRVGSDLRGSCLIHNARSLSNSVSGVMACYIHHHRNKLHICQAIMCANALENSTVLFPLPVSRIKPRACFLGNQTKLL

SEQ ID NO: 237634 - protein, 67 aa, Zea mays
  Clone ID: MRT4577_148307C.1.pep
VVSVHALPLRVSLSHVPVGDAHSLYEVAAWSCPSDGLDFASMLEMVSSLGAGSATCCRYAPGTAVDL

SEQ ID NO: 237635 - protein, 89 aa, Zea mays
  Clone ID: MRT4577_148308C.1.pep
APQGGRQAGGPPPPEQWCSERCSYARQVMYDMIVSPERYGKIMSLCRPVASSCQDSTPVGACRRMQGRALISKGGHIAHRFLIVAWGFI

SEQ ID NO: 237636 - protein, 54 aa, Zea mays
  Clone ID: MRT4577_148309C.1.pep
QSEQNSSKYWDLFIPQALLLPSGQRISPKNMVFQIRCAQAEASRTYNIARKFYF

SEQ ID NO: 237637 - protein, 77 aa, Zea mays
  unsure (1)..(77): unsure at all Xaa locations
  Clone ID: MRT4577_14830C.1.pep
WSPDSRLVAPGPLDPWAIVXEIAKPVARWVPIKGAPLGGVHGLPLLENNSLVPPGEEACLRVWKGVEKKGPPYFGGP

SEQ ID NO: 237638 - protein, 57 aa, Zea mays
  Clone ID: MRT4577_148310C.1.pep
NFLKKSFKGLKGLWRKKGHLGPVSQLVESLITPLRAPLKTAQKETKKNVDLLKVRPS

SEQ ID NO: 237639 - protein, 93 aa, Zea mays
  unsure (1)..(93): unsure at all Xaa locations
  Clone ID: MRT4577_148311C.1.pep
GVPLVLDHAENLCGAGVXXIQLEKRETDHRIAQACTSFHTTVVTMIMKISSRLGVIAPGDISLSLAMHVLLGVLEVTWITSVPAAETDLSLHS

SEQ ID NO: 237640 - protein, 71 aa, Zea mays
  Clone ID: MRT4577_148312C.1.pep
TQIFFFLRSPGHFPLKKWGGLSPPSLATLGGGEQRENLSGEYNGPSRWPPFFFYINAKRGANPPGFFKKNI

SEQ ID NO: 237641 - protein, 47 aa, Zea mays
  Clone ID: MRT4577_148313C.1.pep
WGLFLSILHKGGGGADGPSCNFDSDRSLADGRPGSSLCISALYPKRA

SEQ ID NO: 237642 - protein, 83 aa, Zea mays
  unsure (1)..(83): unsure at all Xaa locations
  Clone ID: MRT4577_148314C.1.pep
VSRSPASNSLRGTSSNFAAAAATGAPVVGEDYVRPPPARCHRKALLSLFLWSKKEESGGVGGGXXXHIXLXXKKHMRITWVTN

SEQ ID NO: 237643 - protein, 59 aa, Zea mays
  Clone ID: MRT4577_148315C.1.pep
STTGPSRTLYVAHYTGFLIAVTNCNSKRLALNLDALTNIRLNFITVGTLTSMVDTCEYS

SEQ ID NO: 237644 - protein, 125 aa, Zea mays
  Clone ID: MRT4577_148317C.1.pep
SKFVQDNILTALIKKIQLGHTHKVKLNAVFYTLCYIKLGGDNRVLFTSTCIYKDLHHHVPILEMDHGDYTLPLLQSSSTCSCAGQPTDPTDGSVPTRRDALAGGEAHDALLSRPAELAERPRLAS

SEQ ID NO: 237645 - protein, 101 aa, Zea mays
  Clone ID: MRT4577_148318C.1.pep
HMAGYFRILFFASLLVALSCCFVGLGPGAWCAAVLGLVVGSTSTHSYKHDRCTRMKYPWVIGFGLLLPKPIPVYPMGGDFVSYPYLGDNFRLSVTYPEKPG

SEQ ID NO: 237646 - protein, 152 aa, Zea mays
  Clone ID: MRT4577_148319C.1.pep
MVHFKNRYMVVEIFIDAGRGEQDPIILTQFNITKVIKDSIQLNFGECGLAGSLGSLQVKYVNPVTKLCIVRVSREDHQKVWAAMTMVRCIGKIPVSFNLLDMSGSIRACKKAALECDEAKFEQYKLVAGDCITAEITQSVEKCFEKIRGLES

SEQ ID NO: 237647 - protein, 48 aa, Zea mays
  Clone ID: MRT4577_14831C.1.pep
FNLSSTKKNLFRFMNRYVNFYNIKRPPLLFFFFFFLFYFFFFFFFIIL

SEQ ID NO: 237648 - protein, 131 aa, Zea mays
  unsure (1)..(131): unsure at all Xaa locations
  Clone ID: MRT4577_148320C.1.pep
RDSRGTPPGRGRKSPPFSTCSCPPPFLPPDLVLAPPFPSARLGAGPPFSSVPLPPASPFLIHFGSPGSPLXGAPGSCXISLARPSFPPQPQPPLFRPAPALPKLRTFFPPGLSLAKALFVPMGRIHPNPPL

SEQ ID NO: 237649 - protein, 144 aa, Zea mays
  unsure (1)..(144): unsure at all Xaa locations
  Clone ID: MRT4577_148321C.1.pep
PRVRPRVRPLVRPRVLRILREIKLMRLLRHPDIVESTHIMVPTSRREFKDIYVVDELMEPDLDHVIMANDDLTLEHYQFSLYQLIRAVKYMHTANVYHRDLKPKNILANSNCKLKICDFGLARVAFNDTATTIFSTDYVATXWY

SEQ ID NO: 237650 - protein, 69 aa, Zea mays
  Clone ID: MRT4577_148322C.1.pep
SMVQFIFTVETFYFNYFYGGGTFLRARYKVNPHLLERTDGSNGYAFGDAPPGDSRLGERLVHFVRNDPC

SEQ ID NO: 237651 - protein, 103 aa, Zea mays
  Clone ID: MRT4577_148323C.1.pep
LQSAVLLFLPQIIPWTRTIPSIKALNVSGDHTCRSSTLPWPENEEESKVTEEKTPPPLESQAGTWLYFDICGSEPDSPVNKGEEATNFCCFCSKVVPNEEKQE

SEQ ID NO: 237652 - protein, 63 aa, Zea mays
  Clone ID: MRT4577_148324C.1.pep
MALGHLPFVLLLVSSVAAFAVADHGLTHIQLYVHDTYTGGTPGRRRLQSPLGATSWFGTLALL

SEQ ID NO: 237653 - protein, 194 aa, Zea mays
  Clone ID: MRT4577_148325C.1.pep
ALINRVLQKNESLCILTFCSLDFMDGSGDDNKWPPQTLKNLEISHSAFLDKLPSWVDSLSTISSLTIEVNKLSKNITDTLAKLSALRSLSLTSIEKPEPEVRFVIGSAGRFENLESLKFVCNEMVNLLERPESNATQQLTGLTIVFHASRTERSRNKDFRFGLDKLLSLQHVRVEINCSNATQRTVKNAEARIG

SEQ ID NO: 237654 - protein, 30 aa, Zea mays
  Clone ID: MRT4577_148326C.1.pep
FFFFFFFFFFFFFFFFFFFFFFFFFWDPFQ

SEQ ID NO: 237655 - protein, 295 aa, Zea mays
  Clone ID: MRT4577_148327C.1.pep
KIGTSLAENVRCRSLLSIVFQTRVDNYLILCGNWENSFQIISLSDGKIVQSIRQHKDVVSCVAVSSDGSVIATGSYDTTVMIWYAFQGRSNDKRYRNANYDLSTKDHVIIESPCHILCGHDDIITCLFVSTELDIVISGSKDGTCMFHTLREGTYVRSIRHPSGAGLSKMVTSQHGRLVIYSDSDLSLHMYSINGKHIASSESNCRLNCMELSCCGEFMVCAGDHGQIVLRSMHSLDVVWRYEGAGKTITSLVVTPEECFLAGTKDGSLIVFSIENPLLRKNAMQRHKAKPSIGG

SEQ ID NO: 237656 - protein, 146 aa, Zea mays
  Clone ID: MRT4577_148328C.1.pep
FRPDRAFGDSDGENCPVEVQRTERWTPSSVLKPQGNLVHAKLVAWKDAQIAKLIEKLKKKEADIDDWQRKKTIKARQKMRSAELKLEKKRAEIAEKMQKAIKRAQKKADKKKVKEQVATKVQIDDVERALDKMSRTGKLPWSLAFL

SEQ ID NO: 237657 - protein, 119 aa, Zea mays
  Clone ID: MRT4577_148329C.1.pep
ARFPLGSPGASWAPGGGFDKGHGPGGKGIYGGPLKDESFKLVPPGPGGGRRGNVGPNPHGSRFFFCPGKPPWLGGRPVGFGPVLEGGDVVSLIGSRGPARGGRPKKKVVLRGGGGLPGG

SEQ ID NO: 237658 - protein, 491 aa, Zea mays
  Clone ID: MRT4577_14832C.1.pep
MPSQPQPSSIGGTSRTPAPFQTALVSTVGSPRTPATLSAQPVPRVTRRSIALVDWCLERVEGEEGKIRVAGITYTPQMSPQMRREASSSKGSRKVAGRVFKSSAIVRRYDHFRIMSEDGYLIRICCLLNIPKTRNNGFSEEVCECFEFGFPIQWHRLVNPKMVPDNKHALSPSETTASAPSHSVEYYIEKFLSDSFSNSNRYSFTENDSYTSVVCTGSRNGLTTQTLSNLPDDNAGNITVSWGLYGLGMDMSEKPWTPPAEACNNRQESDQHESMQIDACKQELVNRSMSSVSVKQSISAIRPNSKVDGNRIAPSKIMSVVNESYRSTVGCGQAEEDVGIQQEKKHSCASEHGMVNLPINCTSSQLGAPGIPKFGKDSVNLWTTDALELSTEGMTPKIGADSTDRRLRSGKILGMPSGGLMNRGHKLKKIQQEASSKQMVNQGATSTVDLTSHENDFSAAEIVVEEKLESHSSCLKGRGGPAKGKRKRERW

SEQ ID NO: 237659 - protein, 98 aa, Zea mays
  unsure (1)..(98): unsure at all Xaa locations
  Clone ID: MRT4577_148330C.1.pep
FGSRESLKVFIPDPLPATGAFIEPMRQMAEAEIDVLPTNGLPNDNGRKAVXLSSCTKEGVNICNQGNLLDXGSTMRWVSRGRKLTICNPRIKLSCGAD

SEQ ID NO: 237660 - protein, 110 aa, Zea mays
  unsure (1)..(110): unsure at all Xaa locations
  Clone ID: MRT4577_148331C.1.pep
KNPGVTKLIGLASHICFLTXCNSXQATADRSSDQWRTLTGEWDLPCTWALCSLSAGVTRTVTNTLGSALATDLFNFLPSFVDTYNSFLLTDLILELTVGFLLIDLQDLYH

SEQ ID NO: 237661 - protein, 134 aa, Zea mays
  Clone ID: MRT4577_148332C.1.pep
TSHVLVTASSMTHHPPVSVLEMGLEIPRCQLALQVARILVAENRGARASLSGSRADSMCDYNLRCAIGLPIMVVSPPTWPRAHRRRWAEAPWLDTPVPIADASEDWRPRRVFRIVAVVVPWVSRWRMDSPLPGR

SEQ ID NO: 237662 - protein, 93 aa, Zea mays
  Clone ID: MRT4577_148333C.1.pep
RRAGRERLFCTLGNCVAERLPRSGRDVSPRQLPGGGDRRRVEAAPHFIPKVLHLCDGWGGEGITGAIEIEMPPQASKCSFLFKVYLYSLIFVF

SEQ ID NO: 237663 - protein, 56 aa, Zea mays
  Clone ID: MRT4577_148334C.1.pep
PHPHSRLLYGSDLQICLSPINSSLLFLDFFFGSAAPNIMLAFRQKLQLAKRSTRKI

SEQ ID NO: 237664 - protein, 80 aa, Zea mays
  Clone ID: MRT4577_148335C.1.pep
ARAAAFPRAAALQQPPKSNRSDDGEAIKPEASAHEAAVAASLLLPLAGTYLVSFSSTIWSDTRIWSSLAFLLASQAAAVM

SEQ ID NO: 237665 - protein, 95 aa, Zea mays
  Clone ID: MRT4577_148336C.1.pep
ETLLDSPFVSAFCVSLFRSFKGVFWCLHGGPREPLSSGGSLCLSGPIPGSGLCVLLVGTCAFPGLPPKSKASFLCYIFRLLVLCLGFEGTPFSVC

SEQ ID NO: 237666 - protein, 105 aa, Zea mays
  Clone ID: MRT4577_148337C.1.pep
MDRCGGGAMASYLVAVVLLVALFASSAKCRPEPLDGGGNVNGNGTAPPVNGGGPGPGPGAVLKLQFCIQRNCVYEGRGNAPCFCCGALKPNQCYETRDGCSGNCV

SEQ ID NO: 237667 - protein, 115 aa, Zea mays
  Clone ID: MRT4577_148338C.1.pep
ADLFQWINKICFVAYLSRPRPRQPIRGKPTSTETIPEGSQSADPSERYTRQRPALRGERRSTHNHTKKKNPKQEESSPGGQRRAPSKNKRGGPTAPIAEGKTEPPALIRIAPTPG

SEQ ID NO: 237668 - protein, 57 aa, Zea mays
  Clone ID: MRT4577_148339C.1.pep
IRGPPALLDSPPPFFFFFFFFFFFFFFFFFFFFLRRCTFSFLKQARYNTFAKHLGIY

SEQ ID NO: 237669 - protein, 67 aa, Zea mays
  unsure (1)..(67): unsure at all Xaa locations
  Clone ID: MRT4577_14833C.1.pep
SLSRPPVWRSLLVFXCXGVVRLGFVXCXFFXASXPSVLPSLCFLLCFPRRGXXXSLFPLTVEVKDTT

SEQ ID NO: 237670 - protein, 94 aa, Zea mays
  unsure (1)..(94): unsure at all Xaa locations
  Clone ID: MRT4577_148340C.1.pep
GAFKKALLEGLXXFAPLNCSWQPEIAPKPDGYSLGPSRKSCPFRTLFSVPVGFPEPIVIILRVKVLPPLCPPKPLRAFLVLPGAPKKLILGYGF

SEQ ID NO: 237671 - protein, 547 aa, Zea mays
  Clone ID: MRT4577_148341C.1.pep
GLKPPHIMVYQVSIKTPAQIDIVFLAGSASKSPVIEERISKLTGPMLSDRLESKQKEFEERYDQIFNVNNKVDSKELSVGRAALSSLLGGVGYFYGQSKIALPKGFTQKNGDKYISYWPAALYTAVPSRSFFPRGFLWDEGFHQLVIWRWDVHISMDIIGHWLDLLNSDGWIPREQILGAEALSKVPEEFVLQYPSNGNPPTLFLAIRDLASGIHAQQFSDEEAEKISSFLERAYIRLNAWFQWFNSTQSGKYEGTFYWHGRDNITTKELNPKTLTSGLDDYPRASHPNDEERHVDLRCWMLLATNCICSIAEFLKMDSALEKDYYKMSNQLSDFGTLNKLHLDDTIGAYFDYGNHTEKVRMRWFDVKDNNNMRREFLRETLQAPQLQLVPHVGYVSLFPFMMGTIPPESWVLEKQLNLISNTSILWTDYGLRSLSRTSSIYMKRNTEHDPPYWRGAIWINMNYMVLSALHHYAHKDGPYSGRAKELYDKLRSNLIRNIVQNYDATGFFWENYDQKDKGKGKGARSFTGWTSLIVLIMAESYPTLHR

SEQ ID NO: 237672 - protein, 71 aa, Zea mays
  unsure (1)..(71): unsure at all Xaa locations
  Clone ID: MRT4577_148342C.1.pep
GGEKGGFRGGGXRPRPRLGPVQAPILPGINSRPLLERGMCESNASPDWWTPRVGSWVQLQILIKPGGCHPS

SEQ ID NO: 237673 - protein, 174 aa, Zea mays
  Clone ID: MRT4577_148343C.1.pep
GSYCSFSLAFQNDDQKSEGSMELLNSVKAISIHPLSNNKFLVLDSSGVLHVFIFSTTQMVSRGAIKQYSENIHTYRLHYPMKVQLSAVFSVTSIKTQFFWVSDGGHTVHVMSAVETESPNGDNGDVTGERELAPIKLSAIEAIFTSERVEDIVSISKDSVLILGQGNMFLYGTS

SEQ ID NO: 237674 - protein, 55 aa, Zea mays
  Clone ID: MRT4577_148344C.1.pep
CRFCPSHPKAVHVYICAIFYTDTRSVFAALSLSLCLRDSRLVGTSDSVLIDSIQH

SEQ ID NO: 237675 - protein, 67 aa, Zea mays
  Clone ID: MRT4577_148345C.1.pep
AANNIGITDRKGMWQLNTTNQSFFLTKTTCGGVLFPQPTVLVALMSAIPTTAIPFSYHISAAMAPSI

SEQ ID NO: 237676 - protein, 81 aa, Zea mays
  Clone ID: MRT4577_148346C.1.pep
LETQFFWVSDGGHTVHVMSAVETESPNGDNGDVTGERELAPIKLSAIEAIFTSERVEDIVSISKDSVLILGQGNMFLYGTS

SEQ ID NO: 237677 - protein, 92 aa, Zea mays
  unsure (1)..(92): unsure at all Xaa locations
  Clone ID: MRT4577_148347C.1.pep
HPTNSELSRYATXAPTARAQKIDYLFSNKPAQKGKLDAASTSYPDINDELTKPYGPDRKIYLTNGLINRTKEPKNLTREKLENYGGGATDPN

SEQ ID NO: 237678 - protein, 277 aa, Zea mays
  Clone ID: MRT4577_148348C.1.pep
MFYKTGTNEIVALKKIRMDNEREGFPITAIREIKILKKLHHQNVIKLKEIVTSPGPERDEQGKPIDGNKYKGSIYMVFEYMDHDLTGLADRPGMRFTVPQIKCYMRQLLTGLHYCHVNQVLHRDIKGSNLLIDNEGNLKLADFGLARSFSSDHNGNLTNRVITLWYRPPELLLGSTKYGPAVDMWSVGCIFAELLNGKPILPGKNEPEQLTKIFELCGTPDDTIWPGVTKMPWYNNFKPPRPLKRRVKDFFKHFDRHALDLLEKMLTLDPSQVCYIA

SEQ ID NO: 237679 - protein, 91 aa, Zea mays
  Clone ID: MRT4577_148349C.1.pep
EHQQAGSWTKREVGRKIPGLWVFLKTVGAQWQLLFGSCPGMVGFNVCVIQYGDLCLPVDAQLSGFIRPKLGRCVLPFACFGPFWVFVWNFV

SEQ ID NO: 237680 - protein, 119 aa, Zea mays
  unsure (1)..(119): unsure at all Xaa locations
  Clone ID: MRT4577_14834C.1.pep
GNFLPPGGPPVSPGGTRPXPPXPGRFVGSPPGRPGPPLFGRRLPPLSPLGLIFMLTGAPDXPLCGHLCFPPGPPLSPPPPXGFAPGPPRAGRPCPPPPPWVGPFFFFCLPFFFLVCPIK

SEQ ID NO: 237681 - protein, 250 aa, Zea mays
  Clone ID: MRT4577_148350C.1.pep
DACRFRSGIPGSTHASAVLPVPPIEFGVSPKDSDFSLPPGSVSGPVGNPVAKLQDVLASNAGLTQSIPILRRDHHMQRAIGLSPMSFPTADLTLKMESARKAWENSPSLPEQSSPGGAGSGIQPPSSVGASNGVNYSSFGGVSMPPMPVASVAPSASIPGSHLPPLYLDGHVFASQPRLVPQTIPQQQSYQQAATAQQIPISLHTSLQAQAQLGLRGGLPVSQSQEIFSSLQPFRSQVYMHPSLSPPSTM

SEQ ID NO: 237682 - protein, 60 aa, Zea mays
  unsure (1)..(60): unsure at all Xaa locations
  Clone ID: MRT4577_148351C.1.pep
SCENXVPRKAMSATRVAGILHALEGWEMHECGTSLLLSDLDQVWEACLSHGFQPLLLPHH

SEQ ID NO: 237683 - protein, 50 aa, Zea mays
  unsure (1)..(50): unsure at all Xaa locations
  Clone ID: MRT4577_148352C.1.pep
PCCLPGLXLXXVCRPXXXLXPPRDLLLYXXRHTQIEPTASSKYGRVRSTG

SEQ ID NO: 237684 - protein, 85 aa, Zea mays
  Clone ID: MRT4577_148353C.1.pep
SRRAALGLIEPAGMAVSEDLWARAVRVRGHRLRGWPQLEALAADVTTRSGAPMGSSPGRTSLRRYICTPLASWCGTASLHHGTRQ

SEQ ID NO: 237685 - protein, 61 aa, Zea mays
  Clone ID: MRT4577_148354C.1.pep
PPFIINPPQQKTLGGFLNHVARVPTPWTSSTTPCISRLRLPFSPIPLSMGHTQNRARYAEP

SEQ ID NO: 237686 - protein, 67 aa, Zea mays
  Clone ID: MRT4577_148355C.1.pep
MERQSSIRLVALEKLRSFRGMEKQKSFRGIMSLERLNKDSPVKRGDTPLHLAARAGSVAHVQKILAE

SEQ ID NO: 237687 - protein, 83 aa, Zea mays
  Clone ID: MRT4577_148356C.1.pep
FLIVRGLEKWHRKLIIFCTISLQPLTPVQHNLFYSSYIPNSHRFTFIRHRTLRNSEGEPILKPNYNRTGMDPLNKYYEEQYAA

SEQ ID NO: 237688 - protein, 79 aa, Zea mays
  Clone ID: MRT4577_148357C.1.pep
SPSLFFSMGLWVREIIFPVFRPDALFTFAKGPMLVGEQVHSIIHPDGGPYQLLRTQFLILFEPLLVQYGVLVSHEVKCG

SEQ ID NO: 237689 - protein, 233 aa, Zea mays
  unsure (1)..(233): unsure at all Xaa locations
  Clone ID: MRT4577_148358C.1.pep
QRVSMLAGQLAWPMEWFAAGFLGPGRSIDHSYTLAGQXCWFSGAEGGLHPVNNDKDTWLVKDMXDLILRRXHCEGKHPYRCIVLDVXNDGIRSQTVSGGIQMIXLIRTHSEEIERPNKPITVAGXRTDVAHYNTAIFLHFTLTDAMCTWWSDGENLDTDXDVKNIIIFMGPYFQVQDDYLVCYCDPEFMAKIATDIVDYXVTXLVVHALERADESQTRILFEYYXGLKDLACV

SEQ ID NO: 237690 - protein, 68 aa, Zea mays
  unsure (1)..(68): unsure at all Xaa locations
  Clone ID: MRT4577_148359C.1.pep
GICILTTTXRASGHPSIHCYSSGTSPRALKMLSHGTGRQSGPMSFGHSVMYGAWPQLLQLIIWSLESY

SEQ ID NO: 237691 - protein, 287 aa, Zea mays
  Clone ID: MRT4577_14835C.1.pep
SSFTHPSRFLASEASGDRRQPAAPPPPLPRALDKEERYASGSRAERIAPPDWRLLIVCRQCPRPICSAENNMGRSYNHSPSPPRGYRRRTRSPSPRGRYGGRDTDRDLPTSLLVRNLRRDCRPDDLRRPFGKFGPVKDIYLPKDYYTREPRGFGFIQYFDPEDASDAKYYMDGKMLLGREIAVVFAEENRKKPSDMRAREKISGRGRSYDGRLRSRSPGLNGSPRGRSRSQSRSYSPAPKRKHYSRSPAPRPRERSLSRSPAVNRSRSASPIVSRSPHRQGSLSVSE

SEQ ID NO: 237692 - protein, 129 aa, Zea mays
  unsure (1)..(129): unsure at all Xaa locations
  Clone ID: MRT4577_148360C.1.pep
MSSPGSSIXSGRKLRVARPCFRSMRRPRTSCWVDKNGDXSAYFDLYDIRNTTGXSDHYRSDAPPPYNPLQRKVYETLADPYTKRGLLLKFLLQGXAHFMVYVNVSVLLDLLSIKKGPQEQPQPXSRGKI

SEQ ID NO: 237693 - protein, 42 aa, Zea mays
  Clone ID: MRT4577_148361C.1.pep
RGRRCGCDHGGEPVPVHRMFFKRAGARHSAAEPRLELADHGP

SEQ ID NO: 237694 - protein, 87 aa, Zea mays
  Clone ID: MRT4577_148362C.1.pep
QAGNLRPQTLHQMGRILTPRQGGRGFLSLGEDYNRLKAFSNLWASRPPDNFIGAKSLSPPATELQALPPQQQNQFAGFLGPPWLGRV

SEQ ID NO: 237695 - protein, 85 aa, Zea mays
  unsure (1)..(85): unsure at all Xaa locations
  Clone ID: MRT4577_148363C.1.pep
LNYFFLQKVGGGGEEIVDGAKKQTKGLLFXKNWYFXLPTERRGILRLMVVDVGEVIFTAVVEVEVVGHEDFCVEIGVGVFFEEXG

SEQ ID NO: 237696 - protein, 38 aa, Zea mays
  Clone ID: MRT4577_148364C.1.pep
VDRRHIFVKGQQQMSGHLVLLKGHASLRTRLPRRIYAL

SEQ ID NO: 237697 - protein, 72 aa, Zea mays
  Clone ID: MRT4577_148365C.1.pep
PQIMISQVGPTPRNPLHALAKASLSQANASAAILWGHTSFPIKVETARGSSSKAKEVPWGPTSFSAQILFLP

SEQ ID NO: 237698 - protein, 40 aa, Zea mays
  Clone ID: MRT4577_148366C.1.pep
TSDNHSLYNLSLPIDAYIEITIILATTTRTYSVSWLLTFT

SEQ ID NO: 237699 - protein, 48 aa, Zea mays
  Clone ID: MRT4577_148367C.1.pep
NPTPVFFGQTTSGGVVKKKKKKKNKKKNKKRKQKKKKKKKKKKKKKSG

SEQ ID NO: 237700 - protein, 92 aa, Zea mays
  Clone ID: MRT4577_148368C.1.pep
RGLGLFLLYNPPTPPLVMWEKKLIHRRKHTQTKKGKRPKPNKNKRKSKVPPPHLDPGKVHNLTPQRQRGKEENPHKPTDAYIKKAKGCWGGR

SEQ ID NO: 237701 - protein, 83 aa, Zea mays
  Clone ID: MRT4577_148369C.1.pep
NKLYFSYPSTTYHSPIPIPLILKPLTVLLFQNFLLFPPPKPKLHHCPTSTLSNHTYSCILHNNSSILSPKTLSPSLTLHPLHH

SEQ ID NO: 237702 - protein, 61 aa, Zea mays
  Clone ID: MRT4577_14836C.1.pep
SSFISSLIEARQAVRQAQAVWRYDYKPSVPTPSPSIEKDAIADDDDVVGVRVPVQHGRRVC

SEQ ID NO: 237703 - protein, 84 aa, Zea mays
  unsure (1)..(84): unsure at all Xaa locations
  Clone ID: MRT4577_148370C.1.pep
LQPNKCSXXAVWRLLECGEQTNVMXLLFAGGWSSRLHTFRKDSCIHKIYYIERLLREKKKKKKKKKKKKKRGKKKKKRAAKINL

SEQ ID NO: 237704 - protein, 52 aa, Zea mays
  Clone ID: MRT4577_148371C.1.pep
RSVFRSATKTSISLELPFAMGYTSARIAWVLLHAYIIAAHLWTLHCLCLHAL

SEQ ID NO: 237705 - protein, 40 aa, Zea mays
  unsure (1)..(40): unsure at all Xaa locations
  Clone ID: MRT4577_148372C.1.pep
DVIDGRIGSKTWVIMKGEKDVVGMVCAFDVYANMVXEDVR

SEQ ID NO: 237706 - protein, 103 aa, Zea mays
  Clone ID: MRT4577_148373C.1.pep
RFQSIQSPPLFGWPEGTRAGQKGLQGRGGPELRPSSITKVLSAPPRPGVLPVPCTPLLVVGCSRTNPFFGGFLKKKKKKKKKKKKKKKKKKKKKYSALLPLLK

SEQ ID NO: 237707 - protein, 236 aa, Zea mays
  Clone ID: MRT4577_148374C.1.pep
MANGLPDPRCVVLTADAARSLVDSVDAFLFDCDGVIWKGDKLIEGVPETMELLRKLGKKLVFVTNNSRKSRRQYSKKFRSLGLEVTEEEIFTSSFAAAMFLKLNNFPPEKKVYVVGEDGILEELKLAGFECFGGPEDGKKNIKLEADFYFEHDKSVGAVIVGLDQYFNYYKMQYARTCISENPDCLFIATNRDPTGHMTSAQEWPGAGAMVAAVSCSVQKKPIVGGKPSGFLMDFL

SEQ ID NO: 237708 - protein, 81 aa, Zea mays
  unsure (1)..(81): unsure at all Xaa locations
  Clone ID: MRT4577_148375C.1.pep
MKEEMVVGLSAPGPVVRWGASPPQAMLERMKDYGQEGAFALWDDLSPEDRELLVRDIESLDLLRIDRITGASLXSQGIPLP

SEQ ID NO: 237709 - protein, 38 aa, Zea mays
  Clone ID: MRT4577_148376C.1.pep
YLHDKHGADLSNVVTDLCPTDWDPVDKITLPPHSHFLQ

SEQ ID NO: 237710 - protein, 647 aa, Zea mays
  Clone ID: MRT4577_148377C.1.pep
MALETEESAITQRSSGSSMGDTIEEFRDLDKLGQGFTSADPLEEIDIGDGKTPRPTFVNKTLETDPRNKMIGLLKEYSDCFAWNYTEMSGLSREIVEHRLPIKSGFRPFKQKARTFRPDLLPRIKDEIHRLLEANFIKPCRYAEWVSNIVPVEKESGFIGLFEWVVMTFGLKNASATYQRAMNLIFHELLGNTVEVYIDDIVVKSAKFSSHVADLRKAFDKMCRYGFKMNPCKCAFGVSAAEDKVIRAVLTQETGGNEHVVTYLSRRLVDAETRCYLLSSHCTVSGQADVIKYMLHNPIMSGRMGQGIGIVLVSPSNVSFDFSSRLKTYCTNNQAEYEALFFGLELLNCMGVKHVKAFGDSQLVVQQLVPAAELHPIIKHWPSRGWGLDFIGEIHPSSSKGHRFVLVATDYFTKWTEAVALKNMTHMEVIEFITEHIIHRFDIPHTLTTDQGTSFMSKEEAVLHVEISLNAFRFARQNDLTVGDYYNSMMDNIDEVTDKRVTALGEIEKDKIMVAKAYNKKVKAKSFQVGDLVWKTILPLRNKNRKFGKWSPNWEDPYKVKQVISGNAYLLQTLQGKDLPKALNGRFLKQYHPKWIRLSDELNSLNEPSTGRVEPYEAGPPLSQGPSVFTLIPSSNPNDPIEKIVPN

SEQ ID NO: 237711 - protein, 101 aa, Zea mays
  unsure (1)..(101): unsure at all Xaa locations
  Clone ID: MRT4577_148378C.1.pep
GTVSYEPNRPLAIEDVQVAPPXAGEDRVKILFTVLCHTYHYTWSGKDPEGLVPCIVGHQTDVIVESGGDGATAVQAADHVIACYQAQCKESHFCKSAKNNL

SEQ ID NO: 237712 - protein, 136 aa, Zea mays
  unsure (1)..(136): unsure at all Xaa locations
  Clone ID: MRT4577_148379C.1.pep
KFPPKSPKXIPLPRGKKGNPTPKPPPPXKPPPPSPPKRATPPPPTNPVPPPTQSPPLTPTSPXPPFNWQHFPPXNPTPPLVNFFPGAPXPPPPVSPPXPPSLCPQPQPFPWGDPPKISPPQNPREKFPPPYLGGQF

SEQ ID NO: 237713 - protein, 43 aa, Zea mays
  Clone ID: MRT4577_14837C.1.pep
KLWVTWTIFLAYQLHTKHLTFKQKSAKFVIIFNSKNSQPPAIH

SEQ ID NO: 237714 - protein, 1025 aa, Zea mays
  unsure (1)..(1025): unsure at all Xaa locations
  Clone ID: MRT4577_148380C.1.pep
MPTSMEEDDLLGEDLVDYEASPERLGMDVNVITFSANCTIIGDDEPVVAQFDFGPKEAAFTKPKESVNHLKPLFVHGHIDGIPIAKMLVDGGAAVNLMSYSLYRKLGKQDDELVKTNMTLSGVGTDSSIKARGVTSVELTIGTKTLAAAFFVADVEGNYSLILGRDWIHTNQCIPSTLHQMLIQWRKDSSTDNPVPETGKSAVTQRSSNSSVGNMIEEFRDLDKLGQGFTLADPLEEIDIGDGKTPRPTFVNKTLEADPRDEMIGLLKEYSDCFAWNYTEMPGLSREIVEHRLPIKSGFRPFKQRARTFRPDLLPRIKDEIHRLLEADFIRPCRYVEWVSNIVPVEKKESGKLRVCIDFRNLNRETPKDEYPMPIADTLINNVSGNRIISFLDGNAGYNQIFMAKEDASKTAFICPGFIGLFEWVVMTFGLKNAGATYQRAMNLIFHELLGNTXEVYIDDIVVKSAEFSSHIADLRKAFDKMRRYGLKMNPRKCAFGVSAAEDKVIGAVLTQETERKEHVVTYLSRRLMDAETRCYLLSSHCTVSGQADVIKYMLHNPIMSGRIGKWAYALIEYDLAYEPLKSMKGQVVADFIVEHRINDIHKLDMSYLTITPWTLYFDGSVCNEGQGIGIVLVSPSNVSFDFSSRLKTYCTNNQAEYEALLFGLELLNCMGVKHVKAFGDSQLVVQQVLEEYKCFDGTLNSYLEKCWSIIHSFDEFSIRHISRVENHRANNLAQDASGYRIKRGRFHDTENLITGVGPIPQVADRPRRDAGPSGVTINVLLIESADNEADASDWRTPILNYLRNPNIRTDKNIRRTSFKYVLMSDELYRRTINDVLLKCLGPNDAILAMAEVHEGICGTHQSAPKMKWLLRRGWGLDFIGEIHPSSSKGHRFVLVATDYFTKWTEVVALKNMTHKEVIEFITEHIIHRFGIPQTLTTDQGTSFMSKEVKAPSTQGTQSRLARAQPQAGTADPGGFTPRPRAPSSNRRTLDSPKAQFGQASRRSDLGQIALPTDQIAGAFNARIA

SEQ ID NO: 237715 - protein, 89 aa, Zea mays
  Clone ID: MRT4577_148381C.1.pep
MSQTNWEADKMLDVYIYDYFMKRNLQATAKAFQAEGKVSSDPVAIDAPGGFLFEWWSVFWDIFIARTNEKHSDVAASYIESFNKEQITL

SEQ ID NO: 237716 - protein, 84 aa, Zea mays
  Clone ID: MRT4577_148382C.1.pep
NYTRVIMPILNYAPPLPTVKLQFSVIKKKKSFLIWIPVGACGLLKTLLIKGGLSGKLNLNGVDLFPNSSKIFAHPLPAGLTFSG

SEQ ID NO: 237717 - protein, 96 aa, Zea mays
  Clone ID: MRT4577_148383C.1.pep
GSDAFRTCASRTIWSSGSWTSRTSSTTARSSSAYPMNAPRKTTTATRSLRLSPYRSRSFERSMSDLTSNFRMRLASVRSMPCHHHLARLSGSATDA

SEQ ID NO: 237718 - protein, 87 aa, Zea mays
  Clone ID: MRT4577_148384C.1.pep
IGAALTFQIFTLQNKVPFRGHGNTFWGLARGEVVSFSYRHSRKQNNPFLLEPRDRPALDFIFTIAPPGGLPLAKGILGHLDKFGILL

SEQ ID NO: 237719 - protein, 87 aa, Zea mays
  Clone ID: MRT4577_148385C.1.pep
LHPFSTKTTKTGRGYTIFFPEKKKTTHNSLKNQKPNRSPTGSRRADPTINTAPYPRTFPPFTITSEKINSPNQEYNKVPPGKLVIPS

SEQ ID NO: 237720 - protein, 131 aa, Zea mays
  Clone ID: MRT4577_148386C.1.pep
MTAVELMIGPLEWAMDDESPGVGDEDGKDEDWALDMERKGRGKRKMSAPRRRSGPKRRGAAAAMAPRAPSPARSQSEPCPGTAEPSPEHGFNAAAAAAGVKEETGGEEGGRGERGSEHQWQMRRRREEAGG

SEQ ID NO: 237721 - protein, 116 aa, Zea mays
  Clone ID: MRT4577_148387C.1.pep
MNQCVPSWDLVDDPTAAVAGGGGGLNHQVSTTGGAHRGLLLQASAGGAGGGGAFAPVVVPMSNQYYEVAELTWEKGNISYHGLLNRPAHNKYPTAVAPSSAQLHAIAGGGGRRLVS

SEQ ID NO: 237722 - protein, 83 aa, Zea mays
  unsure (1)..(83): unsure at all Xaa locations
  Clone ID: MRT4577_148388C.1.pep
VPSCSDGIFCXLMRPGLSARRLPQPLFSQCSSATIACLLAPYLSPSVSSMSENPVAXPYRIQQVXATRVLPLXPLVLQQPILL

SEQ ID NO: 237723 - protein, 92 aa, Zea mays
  Clone ID: MRT4577_148389C.1.pep
SNLKVIGTDVERCLSMCVEERLRGFIRSIIRFSKQRVEVEKSRHHFYPLSSDVRSHIMRVNREAREQWEKKQAEDAERIRKQNDGDGNANVD

SEQ ID NO: 237724 - protein, 58 aa, Zea mays
  Clone ID: MRT4577_14838C.1.pep
LLSRTCFCINKKAGPFLVVCERGASLVGPWVQHVIYEGALNIRCHARSLFFLASISGT

SEQ ID NO: 237725 - protein, 273 aa, Zea mays
  Clone ID: MRT4577_148390C.1.pep
HSIGRLGSSRPARSIAADNPNPATQVNSAGNMTETTIFYKSHNPGGESILLIHGGFSDGSEWDGVWPLLAEHNYHLLIPDMPSHGNSVDIHPFEIDDTVRRLAALIKAEARGGLAHVVGISIGGHIAAALASQHPSYVPSLIVSGFNIFTPNLFTPVLPLFVYGVQRGSGFARQPFAEWDRFCRGLGSLALTQDVFNILISSRELQTIECRTLVVAATRPGVSADNIDHSRRLFKTVVVGNGSQVVQHRGMRHPWNEEEPKVFADMVKRWIIT

SEQ ID NO: 237726 - protein, 123 aa, Zea mays
  Clone ID: MRT4577_148391C.1.pep
PPFLGGGYAPVGAFTRDPGCRLAPTWVGGRPGWWPARGLNGHQLGGFVGGVPEHVACDCAHFCFLVPILPCFSATAWIMLVSSFAKSTSSFQGREWRPSLWVIARFWGRGCARYYCSSRSPWS

SEQ ID NO: 237727 - protein, 161 aa, Zea mays
  unsure (1)..(161): unsure at all Xaa locations
  Clone ID: MRT4577_148392C.1.pep
MQMPCHCSXLKGLDGSDARLXTTMMGASWLYPXATDLKHPXCRWFAASPYYXAGETMTIAIYHAVREQYLHQTIRMMDEQYAQHELXIIIHVERTARARSXLXDPTIIHQKDSXLALHCLNPMDMXMIAHNMLDLGXLXHXQYELSRYRTIXCGRSAPIPY

SEQ ID NO: 237728 - protein, 138 aa, Zea mays
  unsure (1)..(138): unsure at all Xaa locations
  Clone ID: MRT4577_148393C.1.pep
WLHCWLFAPLLLMAVCVLREDPYLKXFLAXFFPXLRGLLGGSXHIGETLPGGGGEPSVLGGVPAFYAGTGLLEEALEFLGRALLEHPCSTFLDWPIGLCPLYRLVRVLNASSCCQAGRVWCXADSSILLAVCPFRRAF

SEQ ID NO: 237729 - protein, 67 aa, Zea mays
  Clone ID: MRT4577_148394C.1.pep
PRVRPRVRPRVRTRVRQNLENLLRIIYGYNSFREGQLEAIQKVVAGESTMLVLPTGAGKSLCYQVPA

SEQ ID NO: 237730 - protein, 38 aa, Zea mays
  Clone ID: MRT4577_148395C.1.pep
MIYNNRTILQSRSLLADHHMCRATQHNLFNTPFYLALL

SEQ ID NO: 237731 - protein, 239 aa, Zea mays
  unsure (1)..(239): unsure at all Xaa locations
  Clone ID: MRT4577_148396C.1.pep
MSLRSGGRQXSFELLAGDLTAXDXDDISXRSLPXTSSXGQXRRRRRXKXNLXFRSPPIQEAVSEGEQQPRVEGGGNSAXAFRVLDXKSTXETVFXNXDXERSXASXVTYVGVELRQXSXSRGGRVVAASXDYGTSSXXNTAXXXXAAXXAVXDVXXXXXRPEANXGMKKKPEKELSLDLXXYIKDNNKILGEFEPLDKSPFRYFLGDXYXGNSLRSTIXVGNXKKPHGVYNTMFHVPXR

SEQ ID NO: 237732 - protein, 97 aa, Zea mays
  Clone ID: MRT4577_148397C.1.pep
RLWLHDNEPPHRHPRQRLTAQCPWPSWRSIVDLPPSRHMVVALAQPPIYHAGGPPPIHRHTTCAHGGGPPIVVTQSLMVNTSDSLPSELGSSIHRST

SEQ ID NO: 237733 - protein, 61 aa, Zea mays
  Clone ID: MRT4577_148398C.1.pep
PLKKATEHSRRRRQRSCVMMIHLNTTRAGGPSQGAKISMTKIVSGDAFHNSARAVQVTLEA

SEQ ID NO: 237734 - protein, 54 aa, Zea mays
  Clone ID: MRT4577_148399C.1.pep
KLLSCLCYCSLIVIAHPVGRCTVYVVSRRGLLVFVVYSVCIIPVLPITTTSCSM

SEQ ID NO: 237735 - protein, 111 aa, Zea mays
  Clone ID: MRT4577_14839C.1.pep
QIPIAQILLTRSDIADRTSYINAQNTFSQLLDMGVLPVVNENDTLAVAEIKFGDNDTLSAITAAMVKADYLFLMTDVDCLYTANPRHDPNAQPIEVVSDISSLEADVSTSG

SEQ ID NO: 237736 - protein, 135 aa, Zea mays
  unsure (1)..(135): unsure at all Xaa locations
  Clone ID: MRT4577_1483C.1.pep
SSSFRSHSYPLXLNCHTSARSLYRPAPAPVDMSASSSTSQSLAPILQEQPPLPLIRCPWCHNGDIEWWVSRTPKNPGKHFYKCERHWVSEYFSCPGLIMLFEGKLCMPVTADPPHPAHKHRWIRVRAGHCRSSTG

SEQ ID NO: 237737 - protein, 69 aa, Zea mays
  Clone ID: MRT4577_148400C.1.pep
GWGFFLVGVGNQTKKQFFLRGDLGCSVKRTKTGGNSFVPSKVGQAFSVRVSYINLTWALLDTHLHSTML

SEQ ID NO: 237738 - protein, 43 aa, Zea mays
  Clone ID: MRT4577_148401C.1.pep
DLSIITPLNCRINEVTLFCFLSYLRQQWSAWVSGCSHYVALIQ

SEQ ID NO: 237739 - protein, 64 aa, Zea mays
  Clone ID: MRT4577_148402C.1.pep
CGWLHRTGSNRSWAWSSTPYCNNSSLIGHIPVLLAVQIAHYLTVIIDLHKTNSFHYTGANSVPH

SEQ ID NO: 237740 - protein, 141 aa, Zea mays
  unsure (1)..(141): unsure at all Xaa locations
  Clone ID: MRT4577_148403C.1.pep
GDFFPALRWVDRLRGATRRXRRLQARRDAFVGGLVQDQRRRRRDAGDGRGRHAAEKQSIVDELLSLQETDPEYYTDTIIKGVVLMLLTAGTDTSALTTEWAMALLLTHPEAMRKARAEIETSVGTARLVEESDIANLPYLQ

SEQ ID NO: 237741 - protein, 61 aa, Zea mays
  unsure (1)..(61): unsure at all Xaa locations
  Clone ID: MRT4577_148404C.1.pep
SNPAAYLQQLFPFNQLTMSRSASYLQQRQHLLNPLSLANPLITXFLHQXQFLPYIQFIYIN

SEQ ID NO: 237742 - protein, 137 aa, Zea mays
  unsure (1)..(137): unsure at all Xaa locations
  Clone ID: MRT4577_148405C.1.pep
LNPLHWVIVTRAMHGSLCADAQKHGIHARSTDIDLYVLKSLFSTAVVTSTSEKEATRRGSDINTPIIVHLVDMRRANHCEIMLTKIXMPIPDMINAILALDTFVIDHYQEENLIKSCPTTDEIEMPKGYNGHKQMLG

SEQ ID NO: 237743 - protein, 133 aa, Zea mays
  unsure (1)..(133): unsure at all Xaa locations
  Clone ID: MRT4577_148406C.1.pep
ERFAPRPAPRVVPVRNPPKQERRVPLPVPVXKGGGPMFGGIGSPLAQGMGFGPGSSMAPRAVDPVLGPRTIQHEIVASKTGGAAPAPPVINVNASSIPFKAFQNCFTTYGREVSNCPFSLNMLNEGPRGGGFA

SEQ ID NO: 237744 - protein, 98 aa, Zea mays
  Clone ID: MRT4577_148407C.1.pep
SARGGARALEASLPYMYGNSTEKNLRQVIHGGGISDQDWWRSCDWLLVLKQQQKIMYMRMLSVGVQNTLGQELVATGFTQELWLRYPAKSRLNVSWPR

SEQ ID NO: 237745 - protein, 428 aa, Zea mays
  Clone ID: MRT4577_148408C.1.pep
MAAASFTAAKFLAPVAARSGGERAPPLPAGASSSSFARTLRRGAVHHPRLRTALAVSSDLLAGNKAAQAAAAHPAVTREEALELYEDMVLGRVFEDMCAQMYYRGKMFGFVHLYNGQEAVSTGFIKLLNQADCVVSTYRDHVHALSKGVPARSVMAELFGKATGCCRGQGGSMHMFSAPHNLLGGFAFIGEGIPVATGAAFAAKYRHEVLKESGPDGLDVTLAFFGDGTCNNGQFFECLNMAQLWKLPIVFVVENNLWAIGMSHIRATSDPEIWKKGPAFGMPGVHVDGMDVLKVREVAKEAIERARRGEGPTLVECETYRFRGHSLADPDELRKPDEKTHYAARDSITALKKYIIEQNLATESELKSIEKKIDDVVEEAVEFADASPHPPRSQLLENVFADPKGFGIGPDGKYRCEDPKFTQGTAQV

SEQ ID NO: 237746 - protein, 57 aa, Zea mays
  unsure (1)..(57): unsure at all Xaa locations
  Clone ID: MRT4577_148409C.1.pep
TVIRLSSXQCEGVMPSLLSNQHXXYLLLATKTLHGSTHRTATKSLFKLSNINIYKFD

SEQ ID NO: 237747 - protein, 123 aa, Zea mays
  Clone ID: MRT4577_14840C.1.pep
MVKDGSVHFEERQGYTKEEVVETIDSLSKVNVFVVGRMPPTAPLVENPDELGPVGSYLASPESRTSASVLVIKRYDPATSPKSKRFDPSARPPAATKEDVLDEEMGSRSTVVPVPWSPMNDVV

SEQ ID NO: 237748 - protein, 98 aa, Zea mays
  unsure (1)..(98): unsure at all Xaa locations
  Clone ID: MRT4577_148410C.1.pep
LCHSTQGFKQIEIEKXHLRHKCWARPLDTGFXKQXNRQXAHXFXXIXTENTRERQSXXIQRPPQLSKGSTSHNSHKXXQMARHRDDVESHPGISGPST

SEQ ID NO: 237749 - protein, 77 aa, Zea mays
  unsure (1)..(77): unsure at all Xaa locations
  Clone ID: MRT4577_148411C.1.pep
SFAAKGSVWPMTLGLACCTEHTMHACAYRYNLNRFGIIFPXSXRQHDCMILFDTLTNKIASAVQKDNDQMPEPRWVI

SEQ ID NO: 237750 - protein, 34 aa, Zea mays
  Clone ID: MRT4577_148412C.1.pep
IQYSIIFISNIILNVLHSLFIHLSHMKPLIFYLK

SEQ ID NO: 237751 - protein, 33 aa, Zea mays
  Clone ID: MRT4577_148413C.1.pep
GGGMREKSPTPCQVYSKKRKLNDGLMPSGSVGR

SEQ ID NO: 237752 - protein, 149 aa, Zea mays
  unsure (1)..(149): unsure at all Xaa locations
  Clone ID: MRT4577_148414C.1.pep
MSPSPDLPSRILPRVLIVSRRTVRKNKFVDFVGEYHLDLVVSYGAVPVIVPRVAGVHAMLDSFEPIHGVLLCEGEDIDPSLYDAGGDGIDGDALSPEQLEAVRSLHPSDAAVDHEKDSIELLLERRCLERKXPFLGICRSSLTLKLLLI

SEQ ID NO: 237753 - protein, 99 aa, Zea mays
  Clone ID: MRT4577_148415C.1.pep
CSHVRWLRTDPDELSALIRRSLTLRVVSTLAGDPVNLADVLKTQRYLEHMLEYNGVTRRACTRRNLACATPHSITQWRTSSRGEIYTCRRCSYRTGPTS

SEQ ID NO: 237754 - protein, 102 aa, Zea mays
  Clone ID: MRT4577_148416C.1.pep
SSRPGTACIERRRRRCLSWPPCSSSPPRSLRQISVCAVRTSRPSSGITLPDEGERRRKPLPGRRTNEALIISIPGHRDAAQRHAIRRGYAEVYGEKLLRSIT

SEQ ID NO: 237755 - protein, 290 aa, Zea mays
  Clone ID: MRT4577_148417C.1.pep
KKKKSTYPKPPSRRPPSQPPPSRRSPSQQPPRTYTKPPSRRLPSPPPPPRRSPSPPQPPRTYHKPPSRRPPSPPPPPRRSPSPPQPPRTYPKSPSRRPPSPQPPPRRSPSPPQPPRTYPKPPSRRSPSPPPPSRRSPSPPQPPRTYPKPPSRRLPSPPPPPRRSPSPPQPPRTYPKPPSRRLPSPPPPPRRSPSPPQPPRTYPKPPSRRPPSPPAPAPPAAEELTEAGTEERKQSPPPHQTPGAAAGPKTPSPWSWEPPVPVSPPSPGPAPAHGAQEQPPDRQNHPLPLE

SEQ ID NO: 237756 - protein, 77 aa, Zea mays
  unsure (1)..(77): unsure at all Xaa locations
  Clone ID: MRT4577_148418C.1.pep
VMMPQMITLNMMSPLMMRRIMSPMVLRSIMLQMMMPQCRWDAVXKIMVQQQLPFMLNRMPMRIRPMFLQEAFVGXAF

SEQ ID NO: 237757 - protein, 74 aa, Zea mays
  Clone ID: MRT4577_148419C.1.pep
RPGSRRPRMGSADAHSVGTCRLLTWSTCTCNEAIVPSLAATSGSLYSATPISQSDQSKACTCSLLIGPSIIVTC

SEQ ID NO: 237758 - protein, 52 aa, Zea mays
  Clone ID: MRT4577_14841C.1.pep
ISSHVQDAWLRCLLVGMAGAFSESLERIACSQHSSTRALRLLSVTPGRPRRI

SEQ ID NO: 237759 - protein, 83 aa, Zea mays
  Clone ID: MRT4577_148420C.1.pep
EELGPAPRYWDIYLLFPAYLFYLLLTRFVWLEGPQGSGLQPATYFHPNPTADTYGQSLGFFFSSSQQQLRQLQPWRRINPRVR

SEQ ID NO: 237760 - protein, 78 aa, Zea mays
  Clone ID: MRT4577_148421C.1.pep
NIFFFFFFFWWVLFTFGSLITKGRKRRHYTRSSKVIQQERTREHPGAWHGNATPGQIECRSTGQGAESAHMERLGGEN

SEQ ID NO: 237761 - protein, 86 aa, Zea mays
  Clone ID: MRT4577_148422C.1.pep
IIFSVLCLLVQKKKQCYSSVPQISSALPHLPLLFSHICMHMASLHFHIMSQILQLDCFNVFPFLFLSLTPIASSTHDPRTRGRTCG

SEQ ID NO: 237762 - protein, 238 aa, Zea mays
  unsure (1)..(238): unsure at all Xaa locations
  Clone ID: MRT4577_148423C.1.pep
MGGEAGMGLRVRASSLLLSLVLELAVALVSVSAQHKFGINYGQIANDLPDPAQAATLLQSMGVNKVKLYDADPRVLTAFANTGVGFTIAVGNEDLQAMAASPDAARRWVAANVQPYVPATRITCVTVGNEVLSGNDTAAMASLLPAMRAVHAALGDAGLGQPVAVSSAHSVDVLATSFPPSSGAFREDLAXVDAVYAAMQAAXGRADVGVTVSETGWPSRGDDDEPGATAQNAAAYNG

SEQ ID NO: 237763 - protein, 93 aa, Zea mays
  Clone ID: MRT4577_148424C.1.pep
MGGEAGMGLRVRASSLLLSLVLELAVALVSVSAQHKFGINYGQIANDLPEPAQVATLLQSMGVNKVKLYDADPRVLTAKVVLSLLLQAIVILR

SEQ ID NO: 237764 - protein, 84 aa, Zea mays
  Clone ID: MRT4577_148425C.1.pep
FGSSMVLHLPFFLTPLTFRTWWVKTKLLGVLYHPLQMLVRAPVEGSIQVIQLLRTQCHPRLHWLTPQSNFLGIRMVLQRVVLNV

SEQ ID NO: 237765 - protein, 410 aa, Zea mays
  Clone ID: MRT4577_148426C.1.pep
MGLRVRASSLLLSLVLELAVALVSVSAQHKFGINYGQIANDLPDPAQVATLLQSMGVNKVKLYDADPRVLTAFANTGVGFTIAVGNEDLQAMAASPDAARRWVAANVQPYVPATRITCVTVGNEVLSGNDTAAMASLLPAMRAVHAALGDAGLGQPVAVSSAHSVDVLATSFPPSSGAFREDLAGYVRPILDFHAQTGSPFLVNAYPFFSYKASPGPGPGGVSLPYALFQPNPGVRDPGTGLTYDNMLYAQIDAVYAAMQAAGGRADVGVTVSETGWPSRGDDDEPGATAQNAAAYNGNLMRRVAAGQGTPLRPAVPVDVYVFALFNEDLKPGPTSERNYGLLYPDGSPVYALDAGGPGPGGSLNPYYTSMFSSSSSSGSAVGVTFLTEKVVLSLLLQAIVILRRSHSYC

SEQ ID NO: 237766 - protein, 153 aa, Zea mays
  Clone ID: MRT4577_148427C.1.pep
STALVPAASSILRSSPSAPPPSLRCVPCSLVQRAASLLGHHSVRPELPAPWSRQDPSQASLLPCWCAPLARTQLGALPSPCVSLFLNSLCARSVSSSGTELLPTRAAAVLPLPASYGARPGACVPLALALNVGARTAPSLAASAPSRPCSYSS

SEQ ID NO: 237767 - protein, 59 aa, Zea mays
  Clone ID: MRT4577_148428C.1.pep
DRWSILLCFLICPPEVAFPLLYATRRGVSAIGGAGRESKPMYDNTSIKSLSRTRWPVQQ

SEQ ID NO: 237768 - protein, 121 aa, Zea mays
  Clone ID: MRT4577_148429C.1.pep
APNLEEIRQLLHKGEQTVNTIISFGQFLDILPIRASKGYAVRWLSQQWNIPLEHVFTAGGSGADEDMMRGNTLSVVVANRHHEELSNLGEIEPIYFSEKRYAAGILDGLAHYRFFELLDPV

SEQ ID NO: 237769 - protein, 68 aa, Zea mays
  unsure (1)..(68): unsure at all Xaa locations
  Clone ID: MRT4577_14842C.1.pep
TPVGRPPLFXXFPRAHGKPSVDHPRGDGAPIGLLLPATENEKRGMNMPSSSRIECKQTGTQAIASSDV

SEQ ID NO: 237770 - protein, 124 aa, Zea mays
  Clone ID: MRT4577_148430C.1.pep
AISRSASSYLCLSLAVLGSSSGIRNLVSLLTPQPSTAGSRSGACSRPSLSSCIWIGCGSIRQPEWRSVERLRRLGNRSRSPSRAAGLRGARLVNGDPHIPRGSTYRFFKFSTFLGFLCIPGRPR

SEQ ID NO: 237771 - protein, 241 aa, Zea mays
  Clone ID: MRT4577_148431C.1.pep
MGRAPCCEKKGLRRGAWSPEEDQRLVAYVRQNGHPNWRALPQQAGLPRCGKSCRLRWINYLRPDIKRGNFTREEEDAVIQLHQMLGNRWSAIAARLPGRTDNEIKNVWHTHLKKRLEPKTATQAPKRKPKKQQQPEAVTLAAPVSPEQSAVSTSTTSTTTDYSAASSSLENADSFTSEEEDYQIDDSFWSETLAMAVDSSDSGMEEAEGAFGASPPAPSTNDDVDFWLKLFMQASDMQNSP

SEQ ID NO: 237772 - protein, 160 aa, Zea mays
  Clone ID: MRT4577_148432C.1.pep
AGALVTSLGARSSTRSRSAGVAQLLPALVPARSSSWRPAELSPAPSHGRRLASCSPRPGPYSSSPSRAPLPWPRPQLVFPSTPRCSSLLSSLPAISHGAQLLLLHLPLVLATLAGRSTVGALLYKLLVVVPVPLHRAHSVVPRRAMFASACSFPSSMDGS

SEQ ID NO: 237773 - protein, 46 aa, Zea mays
  unsure (1)..(46): unsure at all Xaa locations
  Clone ID: MRT4577_148433C.1.pep
GWFIIMAPLLWAVQRFKNXLGLRSHRKFVIRVTNWILPHAWVDAGI

SEQ ID NO: 237774 - protein, 397 aa, Zea mays
  unsure (1)..(397): unsure at all Xaa locations
  Clone ID: MRT4577_148434C.1.pep
MADEAERVPPWQQGGWLDGHENIIYDILLRLPPKSVVRCRAVCKSWLRLASDHIFLVDHHRCQPSLPLLYFXRRRPRPGYQRVPAXELDLHTXQRVADCPRILQPRQLVDAPWPXRRLALHGSCDGVLLLSSDDSLYLYNPTTRHWGCLPPLHSDNTIAGFYWHRISDDYRVLYFRRHEDGKYCYYVMEAGTKRQRLVSRQVSLIHSSWPTKCARRTPPVLLHGNLHWXLSHQGXTIAVFDTVGEVLRFMLSPAVYVNSLFDSNVKLLDMDGVLAMSGSCREAIGDDGPSRVDLWFLEDYNDRVWVCKYRIELPVEDISRFHEFEDVWNAVVVSHEGDVLVDLWNRLLGYDREGNSVANLLCDCSLMEIGPHMLKRSLVPHALLGMNNHSPNKPPFL

SEQ ID NO: 237775 - protein, 82 aa, Zea mays
  Clone ID: MRT4577_148435C.1.pep
ISSCPMCFPTAHALNNRVALDHEAVAAVPRPRLRARAGHARHHVTGPVARPPYVVQRTALAPITRAGVLVLHKECNGASSEQ

SEQ ID NO: 237776 - protein, 476 aa, Zea mays
  Clone ID: MRT4577_148436C.1.pep
MSLGYAEKLSYREDVGTVGMPEIFETPELVQNKIEELAAMVQKSKHLVVFTGAGISTSSGIPDFRGPMGVWTLQRAGKGIPNASLPFHHAVPSLTHMALVELERAGFLKFVISQNVDSLHLRSGFPREKLAELHGNSFKEICPCCKTEYLRDFEIETIGLKDTPRRCSDKNCGARLKDTVLDWDDALPPEEMNLATEHCRSADLVLCLGTSLQITPACNMPLMSIKNGGRVAIVNLQATPKDKKASLVIHGLVDKVIAGVMSKLSLRIPPYIRTDFVQLTLRHSLKKKCVRWTLRVTSIHGLRAPLPFLQSVKVSFPERPDLKSVVLKEQPFSLQRETSMNKPFFMLLTLNFSDGCSCLSSSIGWPVDFQKRKDSFVRDRALVLRELYSAAQRESCIGQQEILERENLPRAETSIHGIVTNIVRYDTEDEKLAPPKNDLMNHSRSNPAKRHVEGTDCHSSLPKKLKYFLKDKKLNC

SEQ ID NO: 237777 - protein, 86 aa, Zea mays
  Clone ID: MRT4577_148437C.1.pep
APPFFFFFFCHNCFYFYLQSVTDPRKVRSGKGTGADTGELAGAKASGQQECRGCGSRPGSLELCLPSGTQENGSGRAWEGVHCVRE

SEQ ID NO: 237778 - protein, 46 aa, Zea mays
  Clone ID: MRT4577_148438C.1.pep
KKKKKKKKKNKKKKKKKKRKRKNKKKKKKKKKKKKKKKKKKKGQPF

SEQ ID NO: 237779 - protein, 107 aa, Zea mays
  Clone ID: MRT4577_148439C.1.pep
PRSVVPPPKPEGGHSLNPPPPQNVEGAPGGLSRSQTHGKPQTSMTVVSPYNTRGGYPSPPQPQRGGFGGGPMGGDMPLGFPPPQNGTFVPALGRGAFLPPGLSLRPP

SEQ ID NO: 237780 - protein, 204 aa, Zea mays
  Clone ID: MRT4577_14843C.1.pep
MDMLGGAVAEEDGADDARGSSADEEEDEEDDDEEEEPEGAQLVAGDCGPSLRARVSEFAAVAGAAVERAHTSNCPVCMDPWTSQGPHRISCIPCGHVYGRSCLEKWLTLRGNQSATCPQCGKRFKHKDIINLYAQEVAVPNSELEKEISYLRREICSLKKMVVHHDKMFEEMIKRQNDGVRSKRQKVAEHSYEAANLVASTPAQ

SEQ ID NO: 237781 - protein, 66 aa, Zea mays
  Clone ID: MRT4577_148440C.1.pep
QVSNEKVECVYGRRHPPKIKVEPGCFISTTGTILGNICHAKKELPQEGFVSVILEPIYPKQFNVPG

SEQ ID NO: 237782 - protein, 59 aa, Zea mays
  Clone ID: MRT4577_148441C.1.pep
NHPLCPGGTETCPKNKYPLYPFTFKFPPPKQGGHGWVQKQCFFPFCTVWGYYGIINFLR

SEQ ID NO: 237783 - protein, 85 aa, Zea mays
  unsure (1)..(85): unsure at all Xaa locations
  Clone ID: MRT4577_148442C.1.pep
PCCLVPDDAELETLARCPVTSTRYSINTAXYRQQVAGWAVEYEEGLTLVTVRGAGHQVPLFAPDRSLAMLYHFLRGLTVTGHIGG

SEQ ID NO: 237784 - protein, 118 aa, Zea mays
  unsure (1)..(118): unsure at all Xaa locations
  Clone ID: MRT4577_148443C.1.pep
TKTXNXTRGLHILFISDPDSSSPSLLFVSQNXQNHNLLLHRHVNLLLQPHASLLLPTKRTDPQTNGSPTPDISTSHNLPFKNISPIPDALIYTQRRGLLLHWRHSLILRKHDTLPVIS

SEQ ID NO: 237785 - protein, 25 aa, Zea mays
  Clone ID: MRT4577_148444C.1.pep
GIIPSVEPVRLLRLNFSHGPWKVRH

SEQ ID NO: 237786 - protein, 44 aa, Zea mays
  Clone ID: MRT4577_148445C.1.pep
RDIISYFTSLPACLAGCVYTRPKLPTFLSSTIKERKPTTLVLTT

SEQ ID NO: 237787 - protein, 64 aa, Zea mays
  Clone ID: MRT4577_148446C.1.pep
RRHQQPLERSNTWLRLKSGLLALLELVLLPMRHNSIHIYHSCQNNGLFTTRPKGSVHHIHQLQL

SEQ ID NO: 237788 - protein, 75 aa, Zea mays
  Clone ID: MRT4577_148447C.1.pep
MMCGAPSATQPATAETQHIADQARSQLEEKDHKKFPVFKAVSFKSQVVAGTNYFIKVHVGDEDFVHLRVFQSLPH

SEQ ID NO: 237789 - protein, 97 aa, Zea mays
  Clone ID: MRT4577_148448C.1.pep
TTTLSFLSLDERRSLIVPVPCPVHSCSFIALLTSPPTLNVGYPQTTALQGLFILPSSQHRRHMGPLNQHLSTQSSSMSHGMPLKDLIRNTELVVPAK

SEQ ID NO: 237790 - protein, 56 aa, Zea mays
  Clone ID: MRT4577_148449C.1.pep
TLYWQGVVGLVCHCYPVICPKWLLSCYVSGGSYLSVVVWFTTYVVRLYPPALVLRY

SEQ ID NO: 237791 - protein, 84 aa, Zea mays
  Clone ID: MRT4577_14844C.1.pep
VKLPTDALSPLTAGEIPLALKQEWKWHLFENVKHLHRVNTSLSGYKILQKLEQEWHSNQMENSSLSTKNINDAFSAIAWEEQRV

SEQ ID NO: 237792 - protein, 102 aa, Zea mays
  Clone ID: MRT4577_148450C.1.pep
LWADLCALLCACLCACAPLRLFGHVPAEPEDFCDVEEVTVGWDGHNPDGYCSRAEVVYGGRGNVLLYDCLSGPGGGGGVCCGALRYLEHCASAIGSFLLVLR

SEQ ID NO: 237793 - protein, 101 aa, Zea mays
  Clone ID: MRT4577_148451C.1.pep
MRTTLRTVYVVVTATTGQKIQKMLIYISLFFPTCSTQGMNKCCIELVRVVRVQTDRAVRSVTLARPGCQSCGRRASRAPAAATRPPRRPPRVRPRVRPRVR

SEQ ID NO: 237794 - protein, 54 aa, Zea mays
  Clone ID: MRT4577_148452C.1.pep
ITVCSMKGLQISLKWCERLAKTPLTGALLEPLGLRAELFPGLMDKFVYVRRWPP

SEQ ID NO: 237795 - protein, 102 aa, Zea mays
  Clone ID: MRT4577_148453C.1.pep
MYCTFELKNTGKAAQLSTNPHPQDLSAYLGSDIYRLEAKVEGEGWKVALPNALVYAGAGKQKTVKVAVGRESRASNEATVTLTATSESDKGVSRSKTCKLRI

SEQ ID NO: 237796 - protein, 186 aa, Zea mays
  unsure (1)..(186): unsure at all Xaa locations
  Clone ID: MRT4577_148454C.1.pep
KKKKKKXKKKTQKGKKKHKKQKKTERKKXKKTKKEKKNKKEKKKKKKKKKKKKEKKNKKKRKRKKKKKNQKKQRKKRKKKKKKKKKKKKKKKEKKKTTXEKKKKKKKEKKEKQKKKKKKKKKKKXXKTKKKEKKKKQKKKKKRKKEKKKKKKKRKKKKKKKKEKKEKGKVKRKKKKKKKKKRRKKN

SEQ ID NO: 237797 - protein, 96 aa, Zea mays
  unsure (1)..(96): unsure at all Xaa locations
  Clone ID: MRT4577_148455C.1.pep
GTSRPXGKTFRKEKSATPLSLLSRRRQPSPPRVRTRRSSEEMAALQPSFSPAKTLKSSCSALKLPKTALSSGIGDIPPLQDAQDKNTSDAYSTPKD

SEQ ID NO: 237798 - protein, 85 aa, Zea mays
  Clone ID: MRT4577_148456C.1.pep
GNRAVSTRRKALRRSEARRGDGPSGSGVEQHEMACVRLRPLTNGAPRICCETREEARGRGRRRSGNRRTRTSSWESDPRPASRYP

SEQ ID NO: 237799 - protein, 141 aa, Zea mays
  unsure (1)..(141): unsure at all Xaa locations
  Clone ID: MRT4577_148457C.1.pep
LGNWGFPGGPTHSPXGKPPXGGPSLHGLRGVGPRGPIYFPPKXLGGPPPGFFKICNWPPKPTRGGPQSGPPLDPPXHEPTGARCSFPGGWAPEXGPTRARGRSPPPRQPPFSPPWRFPRGAGTGKGPPPPPFPDHGGGRPP

SEQ ID NO: 237800 - protein, 47 aa, Zea mays
  Clone ID: MRT4577_148458C.1.pep
YPFFRSLSGGPSASPSACPPPAHNSSHCLRLATEIRWHLHSRSPYQT

SEQ ID NO: 237801 - protein, 72 aa, Zea mays
  Clone ID: MRT4577_148459C.1.pep
QIQRSLAKGWDQLQHVPRYDGHWIRRTRNRSMLSYITDIQLLTDKKKGGPRTGLLYNIMNTIINVMACITDL

SEQ ID NO: 237802 - protein, 77 aa, Zea mays
  Clone ID: MRT4577_14845C.1.pep
ARWALGHAKHQKLAADGLWVRPLVRGEQQVVSGMNYRLYLDAGDPTGRTGPYGADLDEQVLTRTPQLGFFNPVTRAH

SEQ ID NO: 237803 - protein, 114 aa, Zea mays
  Clone ID: MRT4577_148460C.1.pep
TTTQQCAQPIYPPTPRIVPMAAAIRGSPTRAAAPTQPRAVLRVASSAAPASSSSARPRRGAVAEAVMQPGKGVAGEAGSPAAELEMGIRCLGHSDCNDAMVLSVVFRNGPIENA

SEQ ID NO: 237804 - protein, 110 aa, Zea mays
  unsure (1)..(110): unsure at all Xaa locations
  Clone ID: MRT4577_148461C.1.pep
WMQRRQLPFSQLCSAVPRQFLALRQXLPAVDVPGDLQQQQLLPFSQVAGVRPDTVLAQPQLLPFYQLGAPTAGILLRVQQLVPFXQRALTKPPAFSQRPIIGGALLLAFR

SEQ ID NO: 237805 - protein, 36 aa, Zea mays
  Clone ID: MRT4577_148462C.1.pep
LTSHDTSMCLCATASNRDSSDSTVHAMRRHHTQNQL

SEQ ID NO: 237806 - protein, 42 aa, Zea mays
  Clone ID: MRT4577_148463C.1.pep
TRSNSISSVAPSGCLGSIDLSYSVNSLMIVEPPCPILAPRRG

SEQ ID NO: 237807 - protein, 105 aa, Zea mays
  Clone ID: MRT4577_148464C.1.pep
MEWFREDLSLALAVHLQKAGRWMELAAGVWPRPHHCHLCRPLVNVLNTNHHLSNILREIDKMVNKIVNSARSYLFESPFSIFVWHLLKKQPLYMSYLVILISEIY

SEQ ID NO: 237808 - protein, 72 aa, Zea mays
  unsure (1)..(72): unsure at all Xaa locations
  Clone ID: MRT4577_148465C.1.pep
GPPPIGGPPLFFFPSCPPPVPXPPAXPPPGLLFGGPCPGGGPPPPWGSPSPLEGCPKCPPPRGGLRAPFGGF

SEQ ID NO: 237809 - protein, 70 aa, Zea mays
  unsure (1)..(70): unsure at all Xaa locations
  Clone ID: MRT4577_148466C.1.pep
ARPLEDAGCHYDIVPINYATAEHKSLXNLGRNPFAPAPALQDTDSHLFESRXICTYAARKNNPELLRERN

SEQ ID NO: 237810 - protein, 50 aa, Zea mays
  Clone ID: MRT4577_148467C.1.pep
CLQYRMHPEISRFPSLRFYGNKLPDGVEVADKSASFHFHECLGPYMFFDI

SEQ ID NO: 237811 - protein, 124 aa, Zea mays
  unsure (1)..(124): unsure at all Xaa locations
  Clone ID: MRT4577_148468C.1.pep
CFFFSVRVGSCLRCVRACWAGRLGSLSGCCFRSRSLGGGGVRAWPSPSGLCLRASFARFRGALLLVLPSCARAPSVCVAGRFCPGPGVCLGPLAGGAVPVAPGVGPVPAGRRPRRGCFCRXALG

SEQ ID NO: 237812 - protein, 154 aa, Zea mays
  unsure (1)..(154): unsure at all Xaa locations
  Clone ID: MRT4577_148469C.1.pep
MVGLPPDQADHGLATMSRCRVVHPLSELRQPGCELPPLGRCRWSFGERPGLILGTAXLLAQRGGTLPHAFANWALSRIRGLGRGPAGADRFYRTVVDWPLARLKLSIXLXLTGTGWDIPLEVKTVFHPNKCYGRDERXEAQLATRHRPLRGLPA

SEQ ID NO: 237813 - protein, 88 aa, Zea mays
  unsure (1)..(88): unsure at all Xaa locations
  Clone ID: MRT4577_14846C.1.pep
PTDACGVFSSLSGFLGTGAGGFXSERSQMAASDVEYRCFIGGLAWATDDHSLHNAFNTYGEVLESKIILHRETQRSLRLXXXTLYTEE

SEQ ID NO: 237814 - protein, 108 aa, Zea mays
  Clone ID: MRT4577_148471C.1.pep
PRHLAARCHLTAGFTSPSRPTSQNLVASPALLRRLGSQYPQTLASSALSVVEEHWGRERGSHQPSRPPPASTTQPTLPKGASQIPPHSLRPLRCRYEWRPVTCIYIRA

SEQ ID NO: 237815 - protein, 82 aa, Zea mays
  Clone ID: MRT4577_148472C.1.pep
KLLPPQVPAQNSRVPPPVQNFPPGKIVFFWPLCSPPLLGPLKENPPLVTNPPRFFKKKLGAPPPSMVKRAPPWGFFFSPPPL

SEQ ID NO: 237816 - protein, 227 aa, Zea mays
  Clone ID: MRT4577_148476C.1.pep
GHPEAALCQNWCASSSKLLDFDGSGLSRIVFPEEPLKSDLSRTVPFPKDGLTNDGTNSAALGFNDVTLLAKTEHASPLFETTLFSELILTDIVCKVTCKREMLSIMIYPSPALLNCSARSRRPTDATAFPPVDELIRSVLRRLAHGAAGLRRGKLKRALPPAAVRALLPEQGRARLRIRLERTGADGDGGGEVGVSGQSEDGRGRCGWRRGGWVGGRVRPRAEVKAR

SEQ ID NO: 237817 - protein, 43 aa, Zea mays
  Clone ID: MRT4577_148477C.1.pep
LHTQPFISTAGSFLLYCTNHLLVKMDALTHRSEKASHIGFIWI

SEQ ID NO: 237818 - protein, 260 aa, Zea mays
  unsure (1)..(260): unsure at all Xaa locations
  Clone ID: MRT4577_14847C.1.pep
GLIHIGQHYNFGXLGEYLTKRVREQMLAKILTFEIGWFDRDENSSGAICSQLAKDANVVRSLVGDRMALVIQTGCAVLIACTMGLVIAWRLALVMIAVQPLIIVCFYARRVLLKSMSKKSIQAQSESSKLAAEAVSNLRTITAFSSQDRILRLFDQAQDGPRKEGIRQSWFAGLGLGTSMSLMTCTWALDFWYGGKLMAERHITAKALFQTFMILVSTGRVIADAGSMTTDLAKGADAVASVFAGLDRETEIDPDNPEGY

SEQ ID NO: 237819 - protein, 56 aa, Zea mays
  unsure (1)..(56): unsure at all Xaa locations
  Clone ID: MRT4577_148481C.1.pep
GCCQRALSFVPAESLCVPGSHLYWIPVGSRFEAFTPSAVALAAVLCCLSKXALLEP

SEQ ID NO: 237820 - protein, 69 aa, Zea mays
  Clone ID: MRT4577_148482C.1.pep
VIGNIEHCICIYRHSRHDQTALQHGILHNGLHSEVFRKVIGPVHSDRDYLPDCPASCKPRICKRLIALE

SEQ ID NO: 237821 - protein, 82 aa, Zea mays
  Clone ID: MRT4577_148483C.1.pep
AFLALRELRLCRNLLQKCVQHHIVKDELPRMDSPLQPCTTSDSSYYAFNGWGLQRGKDALPMMQSSTRPVRLGTDYLSSSRT

SEQ ID NO: 237822 - protein, 82 aa, Zea mays
  Clone ID: MRT4577_148484C.1.pep
SSSQGREHQCHSSYYTRDVVAQMRPSFALCVLVVALLPAPSCAGFCTCSSAGPPHVLPSFPARATCSYPPHTHTHTQQQSCC

SEQ ID NO: 237823 - protein, 104 aa, Zea mays
  Clone ID: MRT4577_148485C.1.pep
RKGSYTASPAPPSSQGTGRGSRSSSRTSPTAQASSAYSSRRTRSAASTTPTSLLHPLISLASRRRRGDLASGDKDSFVHKYLAPKPMLNSMSFQYVMFICQLFF

SEQ ID NO: 237824 - protein, 60 aa, Zea mays
  Clone ID: MRT4577_148486C.1.pep
PLAAYGLRSSILPSKRYMGPLLSTGMTMNHAGHAGPNNGDLLQGTNYCGQHKTLWQGATL

SEQ ID NO: 237825 - protein, 63 aa, Zea mays
  Clone ID: MRT4577_148487C.1.pep
HRPICLSPNSFQKVTLAHSSWTSLALHLLYYSTSDNSRLLSSIAAATPTTLRALSLTLRVIPR

SEQ ID NO: 237826 - protein, 66 aa, Zea mays
  Clone ID: MRT4577_148488C.1.pep
LSIPISTVASESAFSTSGCVLSEHRSRLTPEILEALMCSQDWMRRKYLDASNADQPETFWTCLQEM

SEQ ID NO: 237827 - protein, 88 aa, Zea mays
  Clone ID: MRT4577_148489C.1.pep
YAGGEDVAERAVNDLARVTREPTCLAPTPGRLVTAPATAPNTPSRCTTRSGYMRPDTHTMELIRCTHAYQPLGWGVEHSNPTALVGSI

SEQ ID NO: 237828 - protein, 96 aa, Zea mays
  Clone ID: MRT4577_14848C.1.pep
RYDARGRKRGPSTAAALALFSFFFFSFLIPWSFGVAVTTSNYFFSPKPTSFYLLLHKKLPEPIVTNYKPTQITLAPSECQIPQDSKQSGLLPIIVG

SEQ ID NO: 237829 - protein, 41 aa, Zea mays
  Clone ID: MRT4577_148490C.1.pep
VDNSQGISYHHLKLSLHLRIATQFHDQLQGDTCLPPVSLAM

SEQ ID NO: 237830 - protein, 55 aa, Zea mays
  Clone ID: MRT4577_148491C.1.pep
LTFLSGKQEVLVDRILMENPGVPCFLLGHSTGGAVVLKVWQCEAFHQHIQAGFRH

SEQ ID NO: 237831 - protein, 120 aa, Zea mays
  Clone ID: MRT4577_148492C.1.pep
SSTDHPSSRKISVAVATPVLVLLALAVFSLYDNNLADSYQYIRRASSSSSASSPSTPSPATTPSSSTVPDTSSSSSVNPLLVFDVSGRHHRRGLRPYAGPMGGGRRGAVLHEPDVAVHST

SEQ ID NO: 237832 - protein, 76 aa, Zea mays
  Clone ID: MRT4577_148493C.1.pep
RTRGLVSESISAPVAIGGHDRNDRWVRLPRAHSAPLDSFHGLHASEKVHGDSRVNPGATDSVSDESSMRGCHGGSA

SEQ ID NO: 237833 - protein, 109 aa, Zea mays
  unsure (1)..(109): unsure at all Xaa locations
  Clone ID: MRT4577_148494C.1.pep
PPLPQLLQFSPHPAAPHPSPLSHQPLPSPHLPMSPPXAHXRQRPQSLNPLPVPNPLVTAFLQQQQXXPXNQFYFTPPPPEKAATPSLGNLLKFTSADVLMVPLHSRHGV

SEQ ID NO: 237834 - protein, 49 aa, Zea mays
  unsure (1)..(49): unsure at all Xaa locations
  Clone ID: MRT4577_148495C.1.pep
DFVFCYSASCLVRLGPGVWCAAVLGLVAGSTSTHSYKQDRCTHMKYXPG

SEQ ID NO: 237835 - protein, 37 aa, Zea mays
  Clone ID: MRT4577_148496C.1.pep
PYLKFEHLIAKQAIVEVFAGCRDSHVVDFGIKEGTKW

SEQ ID NO: 237836 - protein, 52 aa, Zea mays
  Clone ID: MRT4577_148497C.1.pep
HRFLGPKHKPRNKGLHGLGRAKKYTGHAMAKTEIIFGSPPNTKPIWFRPKPH

SEQ ID NO: 237837 - protein, 152 aa, Zea mays
  Clone ID: MRT4577_148498C.1.pep
MATPELWWYWWLWVTTMLAVVVSTVVCYLTNQHRRWGGWGSSSGRRRPPGPRPLPLIGNLLDLRRAPGSLHHTLARLARAHGAPVMRLDLGLVPAVVVSSRDAAREAFAAHDRRIAARPVPDSKRALGFCDRSMLSLPSSAPLWRTLRGRMG

SEQ ID NO: 237838 - protein, 70 aa, Zea mays
  Clone ID: MRT4577_148499C.1.pep
TLNPQEQKGRNFGLTSRHNLNFYRDINFFRFEQEKNRNKNLVCMNRSAQQSELPAPKKLTLHSGGKAAHT

SEQ ID NO: 237839 - protein, 81 aa, Zea mays
  Clone ID: MRT4577_14849C.1.pep
TFFKKEIGSKFQTQTKLGTVKVKGQGREAKKILQINFMGLPPVFHLENGNLPAPLVIVKTPGTGRSHFGLQARFVFFFEKG

SEQ ID NO: 237840 - protein, 81 aa, Zea mays
  Clone ID: MRT4577_1484C.1.pep
TPNNLRSGEQWKEAEISHISRKEEAPPPPRFLELPVQASLLLTVSSNPCPGTAAPMLVCLLLYLLPRASNSISILFCSSLF

SEQ ID NO: 237841 - protein, 75 aa, Zea mays
  Clone ID: MRT4577_148500C.1.pep
KKKKKKKKKKKKKKKKKKKKKKKKKKKKKKNGAGGLQFQSSHPPSSDMLTFIFCNLKTKYRPWSTTYNLGKPKPS

SEQ ID NO: 237842 - protein, 77 aa, Zea mays
  Clone ID: MRT4577_148501C.1.pep
HPFVLFDAGDDCISIQTGCSNINIHIVNCGPGHGISIGGLGRDNTKACVSNVTVRDVNMFRTMNGVRIKTWQVSLRT

SEQ ID NO: 237843 - protein, 184 aa, Zea mays
  unsure (1)..(184): unsure at all Xaa locations
  Clone ID: MRT4577_148502C.1.pep
GQPKAGPTGGGPQKGPPKGAPRIWPQXWGSPPNPTGPNRNLKTPXPKWKPEIPANRGKTPPGGATRXAPPAPGPKLGPPKWSPKHQLRPPXPAQRGAKNINQKKAGPNFPTMEGATRPPSKKGGEPPLXGPRETKKTGRGHGTPPRGXRGGKPRTMEGPPAPRGGGQQKAFSKNPRNSGLRALP

SEQ ID NO: 237844 - protein, 90 aa, Zea mays
  unsure (1)..(90): unsure at all Xaa locations
  Clone ID: MRT4577_148503C.1.pep
MVNARAVVGSSDGIKGTIFFTQVGEXPTTVTGSISSLKPGLHGFHVHALGDTTNSCMSTGPHYNPASXEHGAPEDEKSHDGDLGXVTAGA

SEQ ID NO: 237845 - protein, 150 aa, Zea mays
  Clone ID: MRT4577_148504C.1.pep
AQSPAPDIPRASCQSSSPPHHGVRRERGQLPGDGGAGERSGRDPDARGFPPHVLVGRWFTVFASLLIMGASGATYVFGSYSGALKSALGYDQRTLNTVSFFKDLGANLGVLPGLLNEVTPPGVVLGTGAPMNLCRYLMVYLGRVGGAPRR

SEQ ID NO: 237846 - protein, 83 aa, Zea mays
  Clone ID: MRT4577_148505C.1.pep
ENCIRSGLDNFNSQGLYLGFSLTPFYLASMHHFNLLEVACFLRWDQKSDVMSFCITPVGNADYGEQDVYARVSSIFKTWAYVT

SEQ ID NO: 237847 - protein, 75 aa, Zea mays
  Clone ID: MRT4577_148506C.1.pep
SIFIAGNSMNNNSTNIKTSTRSVNKTSKKIRKITRSTRGKKIVTSISKKRGMKKNSKKSVTIGTRSRSNENKRNG

SEQ ID NO: 237848 - protein, 108 aa, Zea mays
  unsure (1)..(108): unsure at all Xaa locations
  Clone ID: MRT4577_148507C.1.pep
LPVVVATRHHGVRRERQQLAGDGGAGERSGRDPDARXFARQVLVGRWFTVLASLLIMAATGATYVFGSYSGALKSSLGYDQRTLNTVCLFKDLGANLGVLPVLVNEVT

SEQ ID NO: 237849 - protein, 100 aa, Zea mays
  unsure (1)..(100): unsure at all Xaa locations
  Clone ID: MRT4577_148508C.1.pep
SIQRNVQQNTTKMVIYLVTCLDLTGGSATTMQMPXPCAELNELYGARSRLTTMMGARRLHHYSAFLTHAQCKWLTGRAFYPRIKHTSSMDYPLREQCSRQ

SEQ ID NO: 237850 - protein, 91 aa, Zea mays
  Clone ID: MRT4577_148509C.1.pep
TAMARLGLGFGAVVRMRRWLIRGVGFSSDVIITVIVFEAAAVAFGALSLRAEVHAELAELRGWNHGKKLAESICLKLHHMAKHQRPCIVTQ

SEQ ID NO: 237851 - protein, 146 aa, Zea mays
  unsure (1)..(146): unsure at all Xaa locations
  Clone ID: MRT4577_14850C.1.pep
RLAARVAKDIQAAAHEGKDYSDPPSAPLVDAEELTKWSLYRAVIAXIGATLLCLYITGATVIGHKHHTDAAALGPDTASGGVRVLRIPWAFSGLIXFILVYCTGGVSVGYINPADTFXYSMASKVSLVRALLYIDTQCLSCPSAGV

SEQ ID NO: 237852 - protein, 49 aa, Zea mays
  Clone ID: MRT4577_148510C.1.pep
VRVNFIRFQANNYPQGTNRGAPPPYNMNSLEPRVLAPFGYALRPKHSRG

SEQ ID NO: 237853 - protein, 73 aa, Zea mays
  unsure (1)..(73): unsure at all Xaa locations
  Clone ID: MRT4577_148511C.1.pep
MASGSDAPKQYGITKPLSLLGPVEADLQRTEELEKFLLESGLYESPDESARREEVLGKLDQIVKXWXKQLTSQ

SEQ ID NO: 237854 - protein, 73 aa, Zea mays
  Clone ID: MRT4577_148512C.1.pep
CGQTTSVVHVLGDQDHVLVIVAVVDERLQVLVVLVGQHVERAVQVVNAVLRLRSRALRRHLCAGYCHRRAAVN

SEQ ID NO: 237855 - protein, 56 aa, Zea mays
  Clone ID: MRT4577_148513C.1.pep
LTALYFPTTTSPSTGGAKTNFLGEEHKRYSKPDTELSFTVSEGEKFILAPLRIGSG

SEQ ID NO: 237856 - protein, 87 aa, Zea mays
  Clone ID: MRT4577_148514C.1.pep
RTGERRRRGRGARRASPARLPPPRGGNDGGADPPRAAGKWWLEVSGWSLSVPCDCNLDRSFHFISTTIALLVNGGGGGIKNMVSNVM

SEQ ID NO: 237857 - protein, 97 aa, Zea mays
  unsure (1)..(97): unsure at all Xaa locations
  Clone ID: MRT4577_148515C.1.pep
YLFKYIIISDTGVGKSCLLLQFTDKRFQPVDERSIGVEXGGRGMISDKQAIKLQIWDTACEESCRSITRSXERRAAGALLVYEITRRQTFKHLAXWL

SEQ ID NO: 237858 - protein, 96 aa, Zea mays
  Clone ID: MRT4577_148516C.1.pep
KEGKKFTHVNVHKCFIVQALQVAYGPLNTRKHPRGERRKEEGQGRRAGQARQQVTLVRQSGISFRGKFGRDNKGTGRLWFLLKGLSSSGRVGDGVG

SEQ ID NO: 237859 - protein, 71 aa, Zea mays
  Clone ID: MRT4577_148517C.1.pep
TEGKVKQKSEKSFKKAKFKKLGKRKGNGRKKGGGRPFGGPGLKFFLMSTLFYYFFILPFFYKKPPPFFFFF

SEQ ID NO: 237860 - protein, 182 aa, Zea mays
  unsure (1)..(182): unsure at all Xaa locations
  Clone ID: MRT4577_148518C.1.pep
MEAQRRCKPXPYAPILCITNCAFFGSSTTMNMCXKCHKEMITNHDHAKMAXASSIDSIVNLTXTSPWSRSVAVSNWETTVAQDKLQTMNVQXPLMLAETSXGSVTAXSAIIAGKCSGRNLLHSPARKIVLSSQSFNXRRGNLYCALHRYSNKYDCXCDYRTAARDAIANANRVVNAHELDKI

SEQ ID NO: 237861 - protein, 71 aa, Zea mays
  Clone ID: MRT4577_148519C.1.pep
PTRTCIGFKFISMGTCIELSFPMTGVLVPAHKAILSELLAVECELPLTVEMDMLLQFMRKAWFILRVLSGY

SEQ ID NO: 237862 - protein, 92 aa, Zea mays
  Clone ID: MRT4577_14851C.1.pep
GLHGMKQGWQSASLQRIRIIAYGDELAVRQLVAQLQGRAGSSRRHLLLAGHGDVSSFCAMSRTISRSSVVVKLKRGGRSHSRAIRATSGIRD

SEQ ID NO: 237863 - protein, 124 aa, Zea mays
  unsure (1)..(124): unsure at all Xaa locations
  Clone ID: MRT4577_148520C.1.pep
RANVYVGXQGRLDLTVLVMHGKIPTLKIPVIQILRAHLRQKIHESVAMDLRQALDHDLDTLEIDTVQKETIHPTKSYKMNSSCADMLVYSCTQXTMSKPSLFSESKDVFEHKASNKHWIDVQLH

SEQ ID NO: 237864 - protein, 169 aa, Zea mays
  unsure (1)..(169): unsure at all Xaa locations
  Clone ID: MRT4577_148521C.1.pep
MTDEDTPRSYHVNNLQDQQEWRGRATCLDFILAELLAGVAAATDFNEAGAAGFGLGHSALFQRKHGRADDEMPHPXEXQPKTKTELYMQRTAPSIXPKPRPMLHSEPMSEPQPKANPEPKPMPKRGPKSQPDALPTPKPEPXPEPKPEPYPEPKINPKPKPXEQKPEPK

SEQ ID NO: 237865 - protein, 67 aa, Zea mays
  Clone ID: MRT4577_148522C.1.pep
MGLAKEGVHMEEGTLEIGMEYRTVSGVAAPLVILDKVKGPKYQEIVNIRLGDGTTRRGQVLEVDGEK

SEQ ID NO: 237866 - protein, 69 aa, Zea mays
  unsure (1)..(69): unsure at all Xaa locations
  Clone ID: MRT4577_148523C.1.pep
ITXGXXQISPLXXGGFLGGXXAKGXFKNFPFPFKPFIPXPKFKIFFTGGNPPSNFFLREITCFLGNQPF

SEQ ID NO: 237867 - protein, 48 aa, Zea mays
  Clone ID: MRT4577_148524C.1.pep
AFLTMSSLVYFISAMYSVRLVSNHVKHPVLKILGRCIVLYHQFHIEQR

SEQ ID NO: 237868 - protein, 115 aa, Zea mays
  unsure (1)..(115): unsure at all Xaa locations
  Clone ID: MRT4577_148525C.1.pep
VACRVPPPVWAFGCRLRSRRGRSRRVSSLVCRRHRSSVXLWHVWRPFLLLPWPVGVLGVRCLWRLSPSRRSSLSGCRCSGSLGGXVVHVFLXSXPSPCGGGGRQHMKRRVVGCPR

SEQ ID NO: 237869 - protein, 172 aa, Zea mays
  Clone ID: MRT4577_148526C.1.pep
MALQAALLPSTLSSVPKKCSLAVAAKDTAFLSVSQKKVQAASLSVRTRVATTAPVATPGSSTAAKDGKKTVRQGVVVITGASSGLGLAAAKALAETGKWHVVMACRDFLKAAKAAKGAGMADGSYTIMHLDLASLDSVRQFVDSFRRRPRSSGRSARSSWGLPELAGTATAT

SEQ ID NO: 237870 - protein, 274 aa, Zea mays
  Clone ID: MRT4577_148527C.1.pep
RCRHSSSPSHEQRHHPAWPCRRRSSHPPSHPSPRSAASPSRRRTRHSLAYPTARTPTFTADGYEMSVGVNHLGHFLLARLLLDDMQKSDYPSRRLIILGSITGNTNTLAGNIPPKAGLGDLRGLAAGLRGQNGSAMIDGSESFDGAKAYKDSKICNMLTMQELHRRYHEETGITFASLYPGCIATTGLFREHIPLFRLLFPPFQKFVTKGFVSEAESGKRLAHVVSDPSLTKSGVYWSWNKDSASFENQLSQEASDPEKAKKLWEISEKLVGLA

SEQ ID NO: 237871 - protein, 69 aa, Zea mays
  Clone ID: MRT4577_148528C.1.pep
PYLQNSVLKFSQFTISQAVSLIHTSVTFTNHLQTSFSYPILLILTDPRTDHITIKESTLTNIPTIAFCN

SEQ ID NO: 237872 - protein, 172 aa, Zea mays
  Clone ID: MRT4577_148529C.1.pep
MALQAALLPSTLSSVPKKCSLAVAAKDTAFLSVSQKKVQAAKALAETGKWHVVMACRDFLKAAKAAKGAGMADGSYTIMHLDLASLDSVRQFVDSFRRAGMPLDSLVCNAAIYRPTARTPTFTADGYEMSVGVNHLGHFLLARLLLDDMQKSDYPSRRLIILGSITGNTNTL

SEQ ID NO: 237873 - protein, 88 aa, Zea mays
  Clone ID: MRT4577_14852C.1.pep
IPSPRSLATALKPYVQHGAKYLLYALYFECCRTFSHATAYVLFPPLPRARWNPFYLRPRISALPYTCLTYSLSQYLSLCQHSHTHTGC

SEQ ID NO: 237874 - protein, 55 aa, Zea mays
  Clone ID: MRT4577_148530C.1.pep
MRAEGAGGVAVGESHFAIYRPTARTPTFTADGYEMSVGVNHLGHFLLARLLLDDM

SEQ ID NO: 237875 - protein, 125 aa, Zea mays
  Clone ID: MRT4577_148531C.1.pep
NIPLSTFLQQSPALSLSQFLMQTSIPQQLHQLVLPLINQITIPNLSPYYHQQQFLPFNLLSTLNPTPYFHHQLLPFILLSTAYSYQQHLLPFNQLSILNLATYFQHHILLPFILLSSSNPSFFLT

SEQ ID NO: 237876 - protein, 242 aa, Zea mays
  Clone ID: MRT4577_148532C.1.pep
RGSRQLHHHAPGPGLPRQRAARTPTFTADGYEMSVGVNHLGHFLLARLLLDDMQKSDYPSRRLIILGSITGNTNTLAGNIPPKAGLGDLRGLAAGLRGQNGSAMIDGSESFDGAKAYKDSKICNMLTMQELHRRYHEETGITFASLYPGCIATTGLFREHIPLFRLLFPPFQKFVTKGFVSEAESGKRLAQVVSDPSLTKSGVYWSWNKDSASFENQLSQEASDPEKAKKLWEISEKLVGLA

SEQ ID NO: 237877 - protein, 52 aa, Zea mays
  Clone ID: MRT4577_148533C.1.pep
LVHPYPHKTYQLLVFREIPTHACIIFSKKPIRYRYFTHILFMRIHVFALHPP

SEQ ID NO: 237878 - protein, 387 aa, Zea mays
  Clone ID: MRT4577_148534C.1.pep
MALQAALLPSTLSSVPKKCSLAVAAKDTAFLSVSQKKVQAASLSVRTRVATTAPVATPGSSTAAKDGKKTVRQGVVVITGASSGLGLAAAKALAETGKWHVVMACRDFLKAAKAAKGAGMADGSYTIMHLDLASLDSVRQFVDSFRRAGMPLDSLVCNAAIYRPTARTPTFTADGYEMSVGVNHLGHFLLARLLLDDMQKSDYPSRRLVILGSITGNTNTLAGNIPPKAGLGDLRGLAAGLRGQNGSAMIDGSESFDGAKAYKDSKICNMLTMQELHRRYHEETGITFASLYPGCIATTGLFREHIPLFRLLFPPFQKFVTKGFVSEAESGKRLAQVVSDPSLTKSGVYWSWNKDSASFENQLSQEASDPEKAKKLWEISEKLVGLA

SEQ ID NO: 237879 - protein, 387 aa, Zea mays
  Clone ID: MRT4577_148535C.1.pep
MALQAALLPSTLSSVPKKCSLAVAAKDTAFLSVSQKKVQAASLSVRTRVATTAPVATPGSSTAAKDGKKTVRQGVVVITGASSGLGLAAAKALAETGKWHVVMACRDFLKAAKAAKGAGMADGSYTIMHLDLASLDSVRQFVDSFRRAGMPLDSLVCNAAIYRPTARTPTFTADGYEMSVGVNHLGHFLLARLLLDDMQKSDYPSRRLIILGSITGNTNTLAGNIPPKAGLGDLRGLAAGLRGQNGSAMIDGSESFDGAKAYKDSKICNMLTMQELHRRYHEETGITFASLYPGCIATTGLFREHIPLFRLLFPPFQKFVTKGFVSEAESGKRLAQVVSDPSLTKSGVYWSWNKDSASFENQLSQEASDPEKAKKLWEISEKLVGLA

SEQ ID NO: 237880 - protein, 296 aa, Zea mays
  Clone ID: MRT4577_148536C.1.pep
MALQAALLPSTLSSVPKKCSLAVAAKDTAFLSVSQKKVQAASLSVRTRVATTAPVATPGSSTAAKDGKKTVRQGVVVITGASSGLGLAAAKALAETGKWHVVMACRDFLKAAKAAKGAGMADGSYTIMHLDLASLDSVRQFVDSFRRAGMPLDSLVCNAAIYRPTARTPTFTADGYEMSVGVNHLGHFLLARLLLDDMQKSDYPSRRLIILGSITGNTNTLAGNIPPKAGLGDLRGLAAGLRGQNGSAMIDGSESFDGAKAYKDSASFENQLSQEASDPEKAKKLWEISEKLVGLA

SEQ ID NO: 237881 - protein, 72 aa, Zea mays
  unsure (1)..(72): unsure at all Xaa locations
  Clone ID: MRT4577_148537C.1.pep
NAVTGAKTCMASTQLVEVEESKHNMTKLKGISIPIMVMMYXGLGXGIGHTPGMDQDAPSGGTGGGPKIKKVD

SEQ ID NO: 237882 - protein, 366 aa, Zea mays
  Clone ID: MRT4577_148538C.1.pep
IERVTDSVVSMPCGQKVQAASLLVRTRVATTAPVATPGSSTAAKDGKKTVRQGVVVITGASSGLGLAAAKALAETGKWHVVMACRDFLKAAKAAKGAGMADGSYTIMHLDLASLDSVRQFVDSFRRAGMPLDSLVCNAAIYRPTARTPTFTADGYEMSVGVNHLGHFLLARLLLDDMQKSDYPSRRLIILGSITGNTNTLAGNIPPKAGLGDLRGLAAGLRGQNGSAMIDGSESFDGAKAYKDSKICNMLTMQELHRRYHEETGITFASLYPGCIATTGLFREHIPLFRLLFPPFQKFVTKGFVSEAESGKRLAQVVSDPSLTKSGVYWSWNKDSASFENQLSQEASDPEKAKKLWEISEKLVGLA

SEQ ID NO: 237883 - protein, 63 aa, Zea mays
  unsure (1)..(63): unsure at all Xaa locations
  Clone ID: MRT4577_148539C.1.pep
RAEYPREPSAHLCYLTSSRDHISSSQESRKELNRKARESYTILPGGTGGKSKEVHXHLTEGRI

SEQ ID NO: 237884 - protein, 114 aa, Zea mays
  Clone ID: MRT4577_14853C.1.pep
TPGCRRRARRARRASRPPPPCQQLPAPPRRRRRRRAAATTSGTPPRRPPAARAAPPPRIWSRAPSPQPAARLRRRCCCCRRGPRRRPWPWRRLRPRPWTQTFHLCTLETDGREI

SEQ ID NO: 237885 - protein, 104 aa, Zea mays
  unsure (1)..(104): unsure at all Xaa locations
  Clone ID: MRT4577_148540C.1.pep
CTSNNLTTGGTNILALLALLALLVSATNAFIISQCSLAPSAIISLFLPPVTLMGFEHSNVQAYMLQLVLAASVLQQPYCXLQQHFLAHLYPSKPFLLLHTTSVF

SEQ ID NO: 237886 - protein, 104 aa, Zea mays
  unsure (1)..(104): unsure at all Xaa locations
  Clone ID: MRT4577_148541C.1.pep
RAGIPGGRRRVRVFLRQLNEMLTRDXAEIRVWGXGGGAPILTXIIIRATRTQNVLGEKGRMIRELTSGVQKRVNFPENGGELYAEEGVNRGLWAIGQAEALRYK

SEQ ID NO: 237887 - protein, 90 aa, Zea mays
  Clone ID: MRT4577_148542C.1.pep
STNLSFCSLLDEVLLVVVCCLMLTWVSCVVSTCRGARSYCRVECPLLRHPKPAFYFSLNRGRVRLMILLIQTKKKFSPVVVCYSFFVVCS

SEQ ID NO: 237888 - protein, 59 aa, Zea mays
  Clone ID: MRT4577_148543C.1.pep
IVETAVGKRAGKGETGSGASKRKNGEYLLCHRLVYQSLLFPKAGREIENPNEAEGSGHK

SEQ ID NO: 237889 - protein, 361 aa, Zea mays
  Clone ID: MRT4577_148544C.1.pep
SRWLAANVLPFVPATTISAVAVGNEVLESGDATLGAALLPAMQNLRAAAAAAGGGAAGIRFSTVNTMGVMAQSDPPSTGAFHPDVAPQLQQILGFLSRTGAPFMINPYPWFAYQSDPRPDTLAFCLFQPNAGRVDGGSKIRYTNMFDAQLDAVKSALVRAGYGDVDVVVAETGWPTRGDAGEPGATAENARAYVSNLVAHLRSGAGTPLMPGKAVETYLFALYDEDLKPGPTSERSFGLYHTDLSMAYDAGLASSAAAGGRGGGGGGAAQPRGGGWCVARAGASDAELQADLDYACSQVGVDCSAIQPGGACFEPNTVRAHAAYAVNQLYQAAGRHPWNCDFRASATLTSDDPISRSTARA

SEQ ID NO: 237890 - protein, 87 aa, Zea mays
  Clone ID: MRT4577_148545C.1.pep
MDSFSSSPSSSGPGANPDVVMEQIKTQLAQAYAQEFLETVGNKCFEKCVTKPGSSLSGSESSCISRCVDRYIEATGIVSRALFTSQR

SEQ ID NO: 237891 - protein, 77 aa, Zea mays
  Clone ID: MRT4577_148546C.1.pep
FGDLEVFEVDLEDLVINADVLGDDVELVDEVDVLGDVLAGIGVQVLAHQLQELQGFEVDTVDLTGRASTVSGINSTD

SEQ ID NO: 237892 - protein, 65 aa, Zea mays
  Clone ID: MRT4577_148547C.1.pep
TVSSYYLFIKKKKKKKKKKKKKKKKKKKKKKKKKKKRKKEKKKKKKKKKKKKKKKKKKKKKGGAI

SEQ ID NO: 237893 - protein, 103 aa, Zea mays
  Clone ID: MRT4577_148548C.1.pep
NPGAKGHPPFFKLPPNPLGQKGFKFNCHRATWGRLGQTYPGGGGGGASTKTGEKTMDVTGPASKGPARTARLPKTPLETKEEGRSWGRLPEIVEEVDRPSNPN

SEQ ID NO: 237894 - protein, 44 aa, Zea mays
  Clone ID: MRT4577_148549C.1.pep
HSVHPKTLEAIVDACEPLLSSAIPDLVTSHFSPHQTPPRQGATP

SEQ ID NO: 237895 - protein, 108 aa, Zea mays
  Clone ID: MRT4577_14854C.1.pep
SIGPGLRVKMLANNPWCVCVCVLTCGAWNACVYGAVIDQVQVERGDREGSARSVRCGRMRRTRPERAGSWARSRQGHGERVHYVHGYKSRVFIIVTEWSRVRARWKYT

SEQ ID NO: 237896 - protein, 247 aa, Zea mays
  unsure (1)..(247): unsure at all Xaa locations
  Clone ID: MRT4577_148550C.1.pep
MAPPPPPPLHPHHHCVLTRFRCPATGTARFLIRLGIKPFCCSSVPSRTPPPLHGPSLRRGRRPLDYPDPFARTFDLAALRVPAAACAPLERRLRGHLLNWPRVHNVIRLRNDQGLLSLSPPPPGYPAEEPGGPAPRATAVLRREKLVRELNARGFLRFPNLARLSRPSPLARKRRERKGDGGDEETCEPDKDKAYVVEVAGERREDDDDWKGLGGEEGIGRDTWRIGSTRVLVLEERYAXRKVDELP

SEQ ID NO: 237897 - protein, 70 aa, Zea mays
  Clone ID: MRT4577_148551C.1.pep
GSLLNFTHHICSPHDLYRVKAKLIGIRVPTPSTYSQTLNRFDGSLASVSRANQSAAPKSPFLTSTSGYSL

SEQ ID NO: 237898 - protein, 70 aa, Zea mays
  Clone ID: MRT4577_148552C.1.pep
KKEKIFNFFPIPIQSTGNGKTQQALKLLGKKDRLRLIRINVCGEPGGKINFPTCWKVATGMDQKNLPGPP

SEQ ID NO: 237899 - protein, 108 aa, Zea mays
  unsure (1)..(108): unsure at all Xaa locations
  Clone ID: MRT4577_148553C.1.pep
MAMPGFCRLDLPPATGAWAVAGFXPHGPLPPLPPPPPPRGVPPHARANSSVPGTLPTPGTPTPTTPGMIPSPSVSSQTPPRYSRGSKIKADGFSVPLGFGAFGPVLAF

SEQ ID NO: 237900 - protein, 159 aa, Zea mays
  Clone ID: MRT4577_148554C.1.pep
MGVLGGAAAASCPATRHCAEWARIYLRYCFLEPATLPTQMYMALLYTITTLILTVQTIYYSHIYHRLEAKKSRAASKAQKHQRADASLRERLLGAKDGVLSRNNGSDATVLIPSSPIPVNVKLVDQYHGSSPNTDYYYMSARSLSRSPVPTAGTWLGSN

SEQ ID NO: 237901 - protein, 178 aa, Zea mays
  unsure (1)..(178): unsure at all Xaa locations
  Clone ID: MRT4577_148555C.1.pep
MGVLGGAPPASCPATRHCAEWARIYLRYCLCSQKEGAALALGLISVISWGFAEVPQIMTNYRQKSTEGLSVAFLMTWXVGDLFNLVGCFLEPATLPTQMYMALLYTITTLILTVQTIYYSHIYHRLEAKKSRAASKPQKHQRADASLRERLLGAKDGCGIQKQRVRCYSPYSKLTYSC

SEQ ID NO: 237902 - protein, 155 aa, Zea mays
  unsure (1)..(155): unsure at all Xaa locations
  Clone ID: MRT4577_148556C.1.pep
GGEGPKTLTRAPKKSPGKRAREAKKGNPQGRQGRKAKRGKPGNVAKKGGKKGERPGPTAXKGERNGARNPPKRRAKREGTRGGPFAKQAAQRKGRANGKGPKGGKXQGVKRGRPAXEGAGNPQGGPRHKGEKRRPRERKKGTPKKGPPRLQALCM

SEQ ID NO: 237903 - protein, 98 aa, Zea mays
  Clone ID: MRT4577_148557C.1.pep
TLFKLLYVVVPDVSRCNAIRLCSRFLQYILLFLGTSRTSVGTAVLLVTHLPIAVADVPRAVKITHTHTPSRTTTRTRTGRPISKHHKRDPGPMPYQCS

SEQ ID NO: 237904 - protein, 49 aa, Zea mays
  Clone ID: MRT4577_148558C.1.pep
MALVADYDAELKAKAKAKAEVYYGDEACQLCAQFLLREVGRPNGLLSKQ

SEQ ID NO: 237905 - protein, 62 aa, Zea mays
  unsure (1)..(62): unsure at all Xaa locations
  Clone ID: MRT4577_148559C.1.pep
PXXXFXXXQPPXPXQXLPXTPXXXXXXLXKXNXIKXXXYXQXXFXXHXNPXXXXHNYSPIQX

SEQ ID NO: 237906 - protein, 127 aa, Zea mays
  Clone ID: MRT4577_14855C.1.pep
SRRRLRSSNRATHRQNQRSTQQSNRTNNISTTNPRHITTRTRNQNPSTHTKRINQRKRISRLTNNITRRLKHTNTSHNLSLQSIFNTTLHHTTKIIRRRNNRSRRQQGQRKHLNRYPPYLHQRLTLQ

SEQ ID NO: 237907 - protein, 75 aa, Zea mays
  Clone ID: MRT4577_148560C.1.pep
ACTNRRVLICIKKKKLFDTTKGYSLCLFQFVRLVQVSWSLNYYARVNVEQLINLHALFVFHHFSVQNKKKKKKAA

SEQ ID NO: 237908 - protein, 115 aa, Zea mays
  Clone ID: MRT4577_148561C.1.pep
LIRRIAASLFCYYYDRYSLRREYDSDIDRYSTHMLMTLSTEASARLHVHARLRREYQSEFVRRTRALASACTTMHACETLIQTPPPMPPPPPHPAPHASAHASAHASADAWVNPG

SEQ ID NO: 237909 - protein, 182 aa, Zea mays
  unsure (1)..(182): unsure at all Xaa locations
  Clone ID: MRT4577_148562C.1.pep
IRSQLTRDIQGNIPWCMLFADDVVLINKSWXSGVNRKIXLWQKTLEXSKVFRLSRTKTKYIRCDFGTTHEKRDVSLKGQIVPRKDTFRYLESLLXRDEDIDEDVSXSHRIKAGWMKGRQASNVLYDKREPKKLKGKFYMMSIRPAMLYRMWPKKTGCSIDKCWERHMCEDLGHQEGSGKPRG

SEQ ID NO: 237910 - protein, 90 aa, Zea mays
  unsure (1)..(90): unsure at all Xaa locations
  Clone ID: MRT4577_148563C.1.pep
MAASMISPTALAVAPQGLPTLSRRASSFTVDCSNKNTKTDKPYRIGGGLTDYGDANGRKGKGKGMYQXVDKHGANVNGYSPIYNQDDRAP

SEQ ID NO: 237911 - protein, 105 aa, Zea mays
  Clone ID: MRT4577_148564C.1.pep
EKKLESMNKHERQKRLSVYKSVASTEEKKLESMNKHERQKLILERKKLNLEKLKMERQKVKEDTEQEVLILSMDLTKCNPLLRQYYEAKQQEILARVTGTSSSSK

SEQ ID NO: 237912 - protein, 68 aa, Zea mays
  Clone ID: MRT4577_148565C.1.pep
KQLLPFSQVGVVSPAAFLTEQRLLPFSGRVGLKGGAFLKWQQLLPFTQRVLTSPRGFYQQPIMGGALF

SEQ ID NO: 237913 - protein, 484 aa, Zea mays
  unsure (1)..(484): unsure at all Xaa locations
  Clone ID: MRT4577_148567C.1.pep
MDRVLLSSHLPSHAHANTRLQQGPGGLNSIGFAVIKKGCLKLRCYAIGDELGGPGRFSKHFIENSNGPVFQGLDASAGSFRTVGAEITQDTGDFFVSDAEGDPDKPTDGFSSIDQAIGALREGKFVIAVDDENGDNEGDLVMAATLVDQKSVAFMIRNGSGIISVGMEEEDLTRLMIPMMSPITEIEDITAAASTVTVDARVGISTGVSAADRAKTILTLASSDSKPSDLRRPGHIFPLKYRNGGVLKRAGHTEASVDLVALAGLRPVSVLSXVMDPRDGSMAGVTVLQQXAXEHDKPIVSIXXLIRXISXGXXFVNXKXSVAFFLIFWLXXTXCIKLFKIKXNVINAXKLKXVLXGSGIGESRXKLXVELISVSRXXTKWGLFRAYXXQSRLDGXEHIAVVKGXXGDGEEVLVRVHSEXLTGDILGSXRCDFRNQXELAMQPIXKAGXCVLLYLRXHEGGXFXLAKXPXYNLQDXGHDTLRQR

SEQ ID NO: 237914 - protein, 106 aa, Zea mays
  Clone ID: MRT4577_148568C.1.pep
MAVVVNMAPTPPASTAIPGRLLLLLLLLVSVTASFSEGLSDECVYFVGGNCFAAMDKYQNEVSQQRCCEIFQADKDCACFWATGPYRGDLPLNVYFCGLGSCMGTD

SEQ ID NO: 237915 - protein, 84 aa, Zea mays
  unsure (1)..(84): unsure at all Xaa locations
  Clone ID: MRT4577_148569C.1.pep
LTTTFSTFSPTTFLRALPNLLLLLLLLLTGLPSSSLALLELEVLADLHDLLLLKLLAPALHGVLIQCSAXRHSRSFTSRLASRR

SEQ ID NO: 237916 - protein, 447 aa, Zea mays
  Clone ID: MRT4577_14856C.1.pep
MRKVTIGSVDSLVANSSITQHIEIITPSEKQRRLEQILRSQDSGSKILIFCTTKRMCDQLARTLTRQFGASAIHGDKSQSEREKVLNQFRSGRSPILVATDVAARGLDIKDIRVVINYDFPTGVEDYVHRIGRTGRAGATGVAYTFFCDQDSKYAADLIKILEGANQRVPRDLEDMASRGGGRGRKRNHWASRPDRGGSRSELDSRYSSRDGLASSGKSESGRGSRGRDDNGSRGRYDPGETDGRSRRSTRGRSRSRSKSDSRSRSPSPKKSRRHEGRRSRTKSRSRSRSRRNHGASHSKSRSPVASRRYEKTASGSARPNSGHAEHKSPPRSHSRDDHVNHSDHKDDHMEDGKMERVDLDRSPSPHDDKSAPYSPVYNGKASGSMSPNGQPEAGAKFVEPSGKPEPASPVRCSKGRDDDEEGIIDEDGEIGEDDPRANAAVQNGNN

SEQ ID NO: 237917 - protein, 75 aa, Zea mays
  unsure (1)..(75): unsure at all Xaa locations
  Clone ID: MRT4577_148570C.1.pep
MGGHLVSMLRWPPNLGLPXLAVLLPAPAAHLRVQVQDWRQWQWQRSRAEQLDANARRLTQLVRNVSVLVDAALWG

SEQ ID NO: 237918 - protein, 110 aa, Zea mays
  Clone ID: MRT4577_148571C.1.pep
VVFFLFQTKKCNTPKGSDGHSGKKRQLPGSKKRREGQTLFFIHETIGTRGRAVKRRAEHDTGMPQPGASRGPGRRTEGQRTTGTRDQGGKERGVPQRRCGKGRRETHARA

SEQ ID NO: 237919 - protein, 36 aa, Zea mays
  Clone ID: MRT4577_148572C.1.pep
YDTVGTGKTMMPTNLIALRHIHLLLAREESEKALTR

SEQ ID NO: 237920 - protein, 100 aa, Zea mays
  Clone ID: MRT4577_148573C.1.pep
KPYSVLWEVFSPDNISPVCTNIWAWLKKRNSLCCSEGGQKHIFGTDLHKEIPGKLVFTNSDAENLAVDRFSSCIFFYGKGFPNMSLLRGAHPGFGMSGNP

SEQ ID NO: 237921 - protein, 102 aa, Zea mays
  Clone ID: MRT4577_148574C.1.pep
YHLTPIHYLIFYNFLTPKTLTLPNLIPLHHIPLSPSHQLSNSPSPPTLPTIPPSSYPNSTHPLPSHLPLTLPLFTLTLTPTLTTPLSPAPFPFYPYFLPTFP

SEQ ID NO: 237922 - protein, 112 aa, Zea mays
  Clone ID: MRT4577_148575C.1.pep
KKTTIPFHFTFSSTMLYHDCISGLICYLIIKIVTCQIVEWFRKEDFESTSDAFIFAMMFVLSVSRSQYFFGWGFKLSVVSHICLMPCLNRSHVYWICVPTPNTCQEQKSLQY

SEQ ID NO: 237923 - protein, 31 aa, Zea mays
  Clone ID: MRT4577_148576C.1.pep
PTSGHEAKEFRPVTRFFSPKEKMIQVKHLPL

SEQ ID NO: 237924 - protein, 69 aa, Zea mays
  Clone ID: MRT4577_148577C.1.pep
NTSDLGRRRCPNVCVNQGAIGAQIVPWTKLLCFSVCCYSEMKSKVTRANCTPETIVLYSSKPLYTLVFK

SEQ ID NO: 237925 - protein, 444 aa, Zea mays
  unsure (1)..(444): unsure at all Xaa locations
  Clone ID: MRT4577_148578C.1.pep
VGPFHVNAYGKGVHVNPYSWSKVANLLFLDSPVGVGYSYSNTSDDALKNGDARTATDSLAFLLKWLERFPQYKEREFYLTGESYAGHYVPQLAQAIKRHHEATGDKSIRFFSRYLCCPPPQNLYRPNSVLCARVVGRSLILLPLLRHRERWTMVWSXIFDPSMIRPLNQIDLDCETXAGTXNLKGYMVGNALTDDFHDHYGIFQFMWTTGLISDQTYKLLNVFCDYESFVHSSPQCDKXIMDIASTEAGNIDSYSIFTPTCHASFASSKNKVMKRLHSAGKMGEQYDPCTEKHSTVYFNLAEVQKALHVNTVIGKSKWETCSEAVNTHWGDCERSVLHIYHELIQYGLRIWVFSGDTDAVIPVTSTRYSIDALKLPTITPWHAWYDDDGEVGGWTQGYRGLNFVTVRGAGHEVPLHRPKQALTLIKSFLTGSPMPVQSSTHSNM

SEQ ID NO: 237926 - protein, 63 aa, Zea mays
  Clone ID: MRT4577_148579C.1.pep
TLTPSPLPPPFSCHRRPIFRAPISSTLPRVVQAWWSWASHTSSTAYFSRCTMKSYQQIFTTRR

SEQ ID NO: 237927 - protein, 257 aa, Zea mays
  Clone ID: MRT4577_14857C.1.pep
MWLHHTAEANIFTLFAKVFRYLLLSELTPDSTSYMSVALALQKLDDCELILKFVREILEITHSRDATVMNRIIFATAKYGHIDKSLVIFEELKKYETSLDVVTFNTVLDMLGKAGRVDQMLGEVKLMEKLRHFPDIVTYNTLINCLRRLGRLDLCKRFALEMVERGITPDLRTYTALIDSFGRSGHITEALEMFHEMKKLHQPSVYVYRALTSNLKKAGHFELAQKLTEDMNSSASELIGPEDFKPNNKGIRFRKNG

SEQ ID NO: 237928 - protein, 90 aa, Zea mays
  unsure (1)..(90): unsure at all Xaa locations
  Clone ID: MRT4577_148580C.1.pep
TPFFILWMTSVRSMCLNEDPGFDNGGTLQTHNLTEFPHGTXTYXYPILVAALHYLKGHMSGQGSQIKDHPGMLGLLAKFYKIHLNSLSMP

SEQ ID NO: 237929 - protein, 50 aa, Zea mays
  Clone ID: MRT4577_148581C.1.pep
MGSRVSREDFEWVYTDQPHADRRREILAKYPEIKSLMKPDPNLIWIIIMM

SEQ ID NO: 237930 - protein, 128 aa, Zea mays
  unsure (1)..(128): unsure at all Xaa locations
  Clone ID: MRT4577_148582C.1.pep
PTRPPTRPPTRPPTRPPTRPPTRPPTRPPTRPPTRSRTRGRTRGRARKLARWRAHGRAHSGMPKEDAGKXLHSGDCYVILYTYHLGDLKEEYYLSYXIGKDSLVDYQVSASXMTNTMGNSLEGRAVVG

SEQ ID NO: 237931 - protein, 210 aa, Zea mays
  Clone ID: MRT4577_148583C.1.pep
MRIPGVNCRIPRTLEFLKRKLRPKPSGGGHVWALAWAWDGSHFSLSKATFHSAVLCHDREKPRRRRPPLSCLPSPVASNRPSRERMMESEVVRMEMVLAPTLPFKKVQTADKYPKGQSRGRQWKHLRHLLQSADASSMPPDRPNYMNIQSPPSIYPPKRYCDLTGFEARYVDPRTKLRYSDPEVFKQIRMLPDEYVQRYLALRNAAVILR

SEQ ID NO: 237932 - protein, 197 aa, Zea mays
  unsure (1)..(197): unsure at all Xaa locations
  Clone ID: MRT4577_148584C.1.pep
MALTVFETTEQQLLPCQQAVEQGAGDGGAAAAAGAEKATVTLKETDRGGDDDRPERDDIWNMIQAQXAAAAARRAQAXPYVHPLVRRSSSLLTQKSLEICTESLGSETGSDGFSDADGSATEHLCQGSDDERGEGEEEEEEVAPRAAPPRAFPPPLPSLARRKVESTMEMRQKRQDGRLLVKVVPVASSTLFRAQRR

SEQ ID NO: 237933 - protein, 125 aa, Zea mays
  Clone ID: MRT4577_148585C.1.pep
MMESEVVRMEMVLAPTLPFKKVQTADKYPKGQSRGRQWKHLRHLLQSADASSMPPDRPNYMNIQSPPSIYPPKRYCDLTGFEARYVDPRTKLRYSDPEVFKQIRMLPDEYVQRYLALRNAAVILR

SEQ ID NO: 237934 - protein, 85 aa, Zea mays
  unsure (1)..(85): unsure at all Xaa locations
  Clone ID: MRT4577_148586C.1.pep
MATRAMAXLSSTVFAGKAVNVPASSDFGEARVTMRKTAVNAKPAAAFWSPWYGPDRVLYLSPLYGEPTIYLTGDFPCNYGLNTAG

SEQ ID NO: 237935 - protein, 54 aa, Zea mays
  Clone ID: MRT4577_148587C.1.pep
NGGLLAINTSAHVLNLNSRFQLQIRNKSFIAHGFKLEISFFFHCMLRALVVCGQ

SEQ ID NO: 237936 - protein, 144 aa, Zea mays
  unsure (1)..(144): unsure at all Xaa locations
  Clone ID: MRT4577_148588C.1.pep
PVDEEGAAAVVLAQLERSLLVLASCCRCPPIGAALLPGFRKVPHISIRDLGWKARRLLGAATRVGRKVTCCRLRGLCAXRVEPEIRDLGADKSFGVQGKYRLLLLQIYMLVGEVLSRSDHQLFFQFVVLSKRNLXVLERERERE

SEQ ID NO: 237937 - protein, 225 aa, Zea mays
  unsure (1)..(225): unsure at all Xaa locations
  Clone ID: MRT4577_148589C.1.pep
MSAPMEISFSAPPPPPDAASTAAASPLLEPAAAQMLPPVAAVSSSQPMRQTAAAAAVVAPSPADDKVLVSVEVLLHATSVARHEDVQVAVERMLEARSLSYVDGPVPIPADNSFLLENVKRIRISDTDEWVENHKVLLFWQVKPVVHVFQLSEDGPGEEPSEDDTLSSFNEWALPAKEFDGLWESLLYEVGLKQRLLRYAASALLFTERGVDTCLVSWNXRIVLL

SEQ ID NO: 237938 - protein, 802 aa, Zea mays
  Clone ID: MRT4577_14858C.1.pep
MSGGTGSSGRAAPRYAPDDPTLPKPWRGLVDGTTGYLYYWNPETNVTQYERPVPPESQLLPPPPPLPPPPPRSRDRRDRSRSRSRTPPRRDHRDRDRDRDRRHDEHASSKTASSHHHPAPVAVADDPSTEAYRRRHEITVTGDNVPTPITSFEAGGFPSEILKEIQRAGFASPTPIQAQSWPIAMQNQDVVAIAKTGSGKTLGYLLPGFMHIKRLQNSTRNGPTVLVLAPTRELATQILDEAVKFGRSSRISCTCLYGGAPKGPQLRDLDRGVDVVVATPGRLNDILEMRKVSLKQVSYLVLDEADRMLDMGFEPQIRKIVKEIPHRRQTLMYTATWPKEVRRIADDLLVHPVQVTIGSVDSLVANSSITQHVEIITPSEKQRRLEQILRSQDSGSKILIFCTTKRMCDQLARTLTRQFGASAIHGDKSQSEREKVLNQFRSGRSPILVATDVAARGLDIKDIRVVINYDFPTGVEDYVHRIGRTGRAGATGVAYTFFCDQDSKYAADLIKILEGANQRVPRDLEDMASRGGGRGRKRNHWASRPDRGGSRSELDSRYSSRDGLASSGKSESGRGSRGRDDNGSRGRYDPGETDGRSRRSTRGRSRSRSKSDSRSRSPSPKKSRRHEGRRSRTKSRSRSRSRRNHGASHSKSRSPVASRRYEKTASGSARPNSGHAEHKSPPRSHSRDDHVNHSDHKDDHKDDHMEDGKMERVDLDRSPSPHDDKSAPYSPVYNGKASGSMSPNGQPEAGAKFVEPSGKPEPASPVRCSKGRDDDEEGIIDEDGEIGEDDPRANAAVQNGNN

SEQ ID NO: 237939 - protein, 41 aa, Zea mays
  Clone ID: MRT4577_148590C.1.pep
KLAYITKAYICSLCLKPIYCSNAIISWLTVYAVCSLLYKLT

SEQ ID NO: 237940 - protein, 162 aa, Zea mays
  Clone ID: MRT4577_148591C.1.pep
LGEHLPFCHGSFGAGETAAGPGRREESRGKLGIAGGTGKVATPEWLKAGWLLEALEILGTGIRTLVHWFTGPVSSYYITSCEQSSSSSWCALFTLSVRLYSRYAVTDLAVSPVAGGIRVRPFLIHHVLVNCQPGWSWPTASMGSIGDCCGWQAARPASRYPM

SEQ ID NO: 237941 - protein, 89 aa, Zea mays
  Clone ID: MRT4577_148592C.1.pep
VVLYRNGIYSPHWNLNANSVIYVTRGKGRVRVVNCQGNAVFDGELRRGQLLVVPQNFVVAEQGGEQRLEYVVFKAHHNAVSSYIRDVFR

SEQ ID NO: 237942 - protein, 256 aa, Zea mays
  unsure (1)..(256): unsure at all Xaa locations
  Clone ID: MRT4577_148593C.1.pep
TWTSFAKNLTGRTITLEVXRLDTXIDNCXTTNQRDEGIPTNHSPVVFRANQVDYPRTLADYNIFNDSTLHRALPPTGSMKMFTMTMTNYTITLQGQSSDTIGNGKAKIQDKEGIPPDQQRLIFAGKQLEDGRTLADYNIQKESTLHLVLRLRGGMQIFVKTLTGKTITLEVESSDTIDNVKAKIQDKEGIPPDQQRLIFAGXQLEDGRTLADYNIQKESTLHLVLRLRGGMQIFVKTLTGKTITLEVESSDTIDNV

SEQ ID NO: 237943 - protein, 213 aa, Zea mays
  unsure (1)..(213): unsure at all Xaa locations
  Clone ID: MRT4577_148594C.1.pep
SPLVGVSRTDTIDNVQAKIQNKEGIPPNHXSFIFAGKQLDDERTLADYNIQKESTLHLVLRLXRGMHIFVKTLNGXDITLEGETSDTIDNDQAKIQDKEGIPPDQQRLIFAEKQLEDGRTLADYYIQKESTLHLMLRLKRGMQXIFVKTLXTGKTFTXLEVESSDTIRQRXAKIQDKEGIPPXQQXXIFAGKQXLEDGRTLADXNIQKESTFH

SEQ ID NO: 237944 - protein, 55 aa, Zea mays
  Clone ID: MRT4577_148595C.1.pep
AQNIPATGGLYQFQWPSFRTWSLWRIQCHSSLCIIPDIWGISCIHLFLSIYVIRQ

SEQ ID NO: 237945 - protein, 40 aa, Zea mays
  Clone ID: MRT4577_148596C.1.pep
GSNQTSDTTCMPLTIGIYDEPLTPSNRYLAVNTIGRAGTA

SEQ ID NO: 237946 - protein, 134 aa, Zea mays
  unsure (1)..(134): unsure at all Xaa locations
  Clone ID: MRT4577_148597C.1.pep
MEGGSVRSKGKEPCIGKSSSATACEWVVTTDXLHDMLKEKIGGELVRWNATKFGTXFLFLQSFWDRQDKFQAWMMSSDWKNNDRRDEEDHKFTYNCLIDRIWGARKVEMVLKTVTPLYSVLRFADHRKMGPFLA

SEQ ID NO: 237947 - protein, 83 aa, Zea mays
  Clone ID: MRT4577_148598C.1.pep
VSVFALLYFISTTQTIYYTWITKIFIIRGHTITKLCRGAGIALHTIVHNLFLFRFCDSPKFLIYPLKCQNLLGSLVPETEPLG

SEQ ID NO: 237948 - protein, 67 aa, Zea mays
  Clone ID: MRT4577_148599C.1.pep
IRLEAERNFFFTHLVVLQWTVFNKPGVDPEWIEQALAGLKTNNLFIITESPKKIFGRDRNLNITPTE

SEQ ID NO: 237949 - protein, 1200 aa, Zea mays
  unsure (1)..(1200): unsure at all Xaa locations
  Clone ID: MRT4577_14859C.1.pep
MVETRRSSAAAAGKRTSPSPSSSSVPPPKRPKAESSGSPTASAPGRAEEDSVAGAAPARSAGSVDDAAAIAQKDQGVDKPSSAVAESSKRRKEQEQQQPAVPWAKLLSECSQTPHYPISVDQISVGQSKNCNLWLKDQPVSKVLCKLRRLEQGGPCELEVIGKKGMVQLNGRSVSPGTKVPLTGGDEVIFSSCGKHTYIFLYPLNDKVPKLXSSAVSLLEAPVASVKRIRTDKRTGDTSAVAGTEMMTSTSNQKDVAAVPPASAGENSQRVVRPMASSASDKSKGRAVSPEKEFANGENANEVNSNIEDSPMVVAAAPISPDAAANDTCQQNGFVSDSHLGAEIALEDQRDHIIRELNASTNVPPSRCQAFKDGMKQGIINPSDIDVTFENFPYYLSENTKNVLLSSAFIHLKKKEFIKQFVEISSINQRILLSGPAGSEIYQETLVKALAKHFSARLLVVDSLLLPGAPSKDPEFQKDVGKADKSGDKAAAEKFAIYQKHRSSLADTVHFRRPAAPTSSVNADIVGTSTLHSASLPKQESSTATSKSYTFREGDRVRYVGPAQPCSLSQRGPSYGYRGRVMLAFEDNGSSKIGVRFDKQIPDGNDLGGLCEEDHGFFCSAELLRPDFSAGEEVERLAMTELIEVISEENKSGPLIVLLKDVEKSFTGVTESLSSLRSKLESLPPGVLIIGSHTQMDSRKEKAHPGGFLFTKFASSSQTLFDLFPDSFGSRLHERSKESPKTMKHLNKLFPNKILIQLPQDEALLTDWKQQLDRDVETLKAKSNIGSIRMFLSRNGIECNDLEELFIKDQSLSNENVDKIVGYAVSYHLNQNKIETSKDAKLVLTTESLKHGLNMLQSMQNDNKSSKKSLKDVVTENEFEKRLLADVIPPNDIGVTFDDIGALENVKDTLKELVMLPLQRPELFCKGQLTKPCKGILLFGPPGTGKTMLAKAVATEAGANFINISMSSITSKWFGEGEKYVKAVFSLASKIAPSVIFIDEVDSMLGRRENPGEHEAMRKMKNEFMVNWDGLRTKDKERVLVLGATNRPFDLDEAVIRRFPRRLMVNLPDASNREKILKVILAKEELGSDVDMDSLANMTDGYSGSDLKNLCVTAAHYPIREILEKEKKEKNLAKTEGKPEPALYGSEDIRPLSIDDFKSAHEQVCASVSSDSANMNELLQWNDLYGEGGSRKKKALSYFM

SEQ ID NO: 237950 - protein, 127 aa, Zea mays
  unsure (1)..(127): unsure at all Xaa locations
  Clone ID: MRT4577_1485C.1.pep
MSSPPAPVFERLAGIRPLAESGRFKAWFLDQFGVLHDGKKPYPGAILALEKLAGNGAKMVIISNSSRRXXVTMEKLQSLGFDTSCFLGAITSGELTHQYLDKRDDPWFASLGRKCVHLTWGNRGAIS

SEQ ID NO: 237951 - protein, 104 aa, Zea mays
  Clone ID: MRT4577_148600C.1.pep
AVVTTQSTFFFFFFFFFLGIFFFFFFFLFLQLFINIGPMSKLQKYTIWRTKTMGCHPTRTLHTKGKGHPTHKGPEPKRGLNYAEGPTPARRDCKRRRGCGHKRI

SEQ ID NO: 237952 - protein, 56 aa, Zea mays
  Clone ID: MRT4577_148601C.1.pep
VELGAYESAHIRQQRALGSGWCLDDPLPLRFIFRSLNASRPQISTDQAYSNRGWRK

SEQ ID NO: 237953 - protein, 108 aa, Zea mays
  unsure (1)..(108): unsure at all Xaa locations
  Clone ID: MRT4577_148602C.1.pep
AKQLAWAAAVYLPMFLEMRSAXKTHTQIXTRNSHKIAGGVTHFFTDSAEDRDTLISLEKMSIGRNGCSLKTNEKFEVIPGIPAERXMIETDSAYXDVRNTHAGSQCVK

SEQ ID NO: 237954 - protein, 79 aa, Zea mays
  Clone ID: MRT4577_148603C.1.pep
INLHYEQASQGKKNKWRWKGKIVENSLYACLGASQLSERGKSSERVGKNIYIYQVISLFFPGLDFLCYQGKPIWVVFVP

SEQ ID NO: 237955 - protein, 65 aa, Zea mays
  Clone ID: MRT4577_148604C.1.pep
WRAYRMRYGTLHQRSPGSRTAKSSRHRARPCQQWRRRYYHQQALTPLLHEQYHLESAVVDCPAPA

SEQ ID NO: 237956 - protein, 79 aa, Zea mays
  Clone ID: MRT4577_148605C.1.pep
VKTEGIRIGKGKYCVVILILYSRICHGMRKESCLELPDDVITHFSQEKSNFMLNFLTAVQAYPKLQTTKNLPTRPPTRP

SEQ ID NO: 237957 - protein, 164 aa, Zea mays
  unsure (1)..(164): unsure at all Xaa locations
  Clone ID: MRT4577_148606C.1.pep
MVKYSREPSNPTKSAKAMGRDLRVHFKNTRETAFAIRKLQLSKAKRYLEDVIAHKQAIPFRRYCGGVGRTAQAKSRHSNGQGRWPAKSAKFILDLLKNAESNAEVKGLDVDTLYVSHIQVNQAQKQRRRTYRAHGRINPYMXFPCHIXELMXSXEKEEPVKKGG

SEQ ID NO: 237958 - protein, 55 aa, Zea mays
  Clone ID: MRT4577_148607C.1.pep
TAQAVIQAWSQQEGHPHQVCKLKIYLWLVGNILGDIFLDLIIVGWLNVIKEIGNL

SEQ ID NO: 237959 - protein, 271 aa, Zea mays
  unsure (1)..(271): unsure at all Xaa locations
  Clone ID: MRT4577_148608C.1.pep
MAHLRLLLSHSRCHPQPHRLLPLFRFSTSNSGDPPPPTIKPVSYAPKPQAPPEEASSPDARSASPGWQDSPPRRFEQQPPNPPRQFTRQEVRFVKDAGPAIAPVSYPSRVAPLPEDRPAEDGAGEGVNEQDLRGEAERIEMNAERARRSIFGVPVEEETVPYPSLIPAAKRPQKVAIDLVDALREIKTSANEKKRNFTETVEAHVMLGVDPRRGDQMVRGAITLPHGTGKTVRVAVFAEGPAAEEARAAGADGXGGDELIEEIRKGGGQLS

SEQ ID NO: 237960 - protein, 72 aa, Zea mays
  Clone ID: MRT4577_148609C.1.pep
GPKGTANHPFFTFPFFSPGFSKASSPTTCPCWLRSCNRRKQRLTLRPGRLFGFPGLQLQAAPDRSKTNRTRW

SEQ ID NO: 237961 - protein, 83 aa, Zea mays
  unsure (1)..(83): unsure at all Xaa locations
  Clone ID: MRT4577_14860C.1.pep
FLFFIYSFNYLLLLFSFFFXIFYLFLSLFIFNFFIYLLLFSSIIFFLFIFFLYFLFFFFFYSFFFXYFFFFFLFFYSFFYLYF

SEQ ID NO: 237962 - protein, 176 aa, Zea mays
  Clone ID: MRT4577_148610C.1.pep
ARTPTLVRLGFVRFPSSALSSLPLVLDLCFPPRFPLLPSAVSCRARRRSRVCAPRRLACSSSTPASLPRGVPKDSQTGMANAAERCALKASVAANGARRAATSAANAAVVAGDLCAATSVGNQSTVSTLDVLITATCAETRAESAWGEARLAALLAEESRVSNLQVCFALSELCCQ

SEQ ID NO: 237963 - protein, 340 aa, Zea mays
  Clone ID: MRT4577_148611C.1.pep
MRPSLMRSTSQLLRRRSYSSASGQPERKVAILGAAGGIGQPLSLLMKLNPLVSSLSLYDIAGTPGVAADVSHINSPALVKGFMGDEQLGEALEGSDVVIIPAGVPRKPGMTRDDLFNINAGIVKNLSTAIAKYCPNALVNMISNPVNSTVPIAAEVFKKAGTYDEKKLFGVTTLDVVRAKTFYAGKANLPVTDVNVPVVGGHAGITILPLFSQATPATNALSDEDIKALTKRTQDGGTEVVEAKAGKGSATLSMAYAGAVFADACLKGLNGVPDIVECSFVQSTVTELPFFASKVRLGKNGVEEVLGLGELSDFEKEGLEKLKSELKSSIEKGIKFANDN

SEQ ID NO: 237964 - protein, 146 aa, Zea mays
  Clone ID: MRT4577_148612C.1.pep
LSIGVLPKRTLLERYSLLEYADVVTALKRGDLRLLRQALDRHEDQFLKSGVYLVLEKLELQVYQRLVKKIHIIQRQKEPAKAHQIKLDVVVKALKWLEIDMDVDEVECIMACLIYKNLIKGYFAHKSKVLVLSKQDPFPKLNGKPV

SEQ ID NO: 237965 - protein, 45 aa, Zea mays
  Clone ID: MRT4577_148613C.1.pep
VFFFLIFLTKAGGAGMNGYGQLNQTELTAGPRKSKRCERRRLIGG

SEQ ID NO: 237966 - protein, 64 aa, Zea mays
  Clone ID: MRT4577_148614C.1.pep
IVTKKRTDRVLFMVWVLIAVAPFFCALLLNGVEWLTCLEKKNKANLYTHINICRVFRVVLLSGK

SEQ ID NO: 237967 - protein, 99 aa, Zea mays
  unsure (1)..(99): unsure at all Xaa locations
  Clone ID: MRT4577_148615C.1.pep
LVHSXQCTRTAANGSSRALNSRLQISPSFTQLHLLSASSCTHRAPNCGGMIACGEEVATSGGISAKTTLWEEFEVQIVAFDRHSNLLVIQEGVDSAERG

SEQ ID NO: 237968 - protein, 694 aa, Zea mays
  unsure (1)..(694): unsure at all Xaa locations
  Clone ID: MRT4577_148616C.1.pep
GRVGENLKTLFDFVCKGINALEYKEHLHYDVVKSADPELKKATIQINVYKQHRQTIQXAAIPLPIVKSMLGPYLVFLSSTVNGYEGTGRSLSLKLLQQLESQSQPSHESNGAYSSRLFKKIELNESIRYASGDPVETWLNDLLCLDLANSIPNISRLPHPKECDLYYVNRDTLFSYHKESEIFLQRMMALYVASHYKNSPNDMQLMADAPAHHLFVLLGPVDESKNQLPDILCVIQVCLEGQISRKSAMKSPTDPRSPSGDQIPWKFCEQFQDNVFPSLSGARIVRIAVHPSALRLGYGSAAIGLLSRYYEGQMRRLFDDDEEETEEPDVKITEAAEKASLLEETIKPRANLPPLLVHLHERRPEKLHYLGVSFGLTQELFRFWRKHNFYPFYVGQIPSAVTGEHTCMVLRPLNSDDIEVSESNKHGFLDPFYQDFRQRFRRLLGTSFRHLNFKLAMSVLASKIDYSNHEPSEYDNNSTSKLLEDMLSPHDMKRLEAYSNNLVDYHLILDLVPILAHQYFSERLPVSLHGAQAAVLFCLGLQDKDIGTVKEELGIEREQVLSNFIKTMKKLYGYLHNIAGKKIETTLPRLKEIEMPPLSKSMDEDLAEAAKEVEEQRRAANEAPVDPKILQKYAIGDDNEIDKALQNTKVSASGIISVKSNRTKTDKKDKHKETGKSKRKGTDGGRSELKKKRS

SEQ ID NO: 237969 - protein, 237 aa, Zea mays
  Clone ID: MRT4577_148617C.1.pep
MAGADVDVGTELRLGLPGGGADAAKAAKRGFEDTIDLKLKLPTAGMEEAAAAAAAKPEPAAEKAKRPAEAPAADAEKPPAPKAQAVGWPPVRSYRRNVMTVQSVKSKKEEEPEKQQSAANAGGNGSAFVKVSMDGAPYLRKVDLKMYNSYTELSVALKKMFSTFTTSGNNMNEGKLVDPVSGADVVTTYEDKDGDWMLVGDVPWEMFVESCRRLRIMKSSEAIGLAPRTKDKCKNRS

SEQ ID NO: 237970 - protein, 56 aa, Zea mays
  Clone ID: MRT4577_148618C.1.pep
MTPRLSYQTRITTGKPMYQICHYKLDLLPPYAMALNHGIYSVPCCGISSWGQEFFL

SEQ ID NO: 237971 - protein, 205 aa, Zea mays
  unsure (1)..(205): unsure at all Xaa locations
  Clone ID: MRT4577_148619C.1.pep
SVTXAVVDDPMQIPRTMMEGWHPQQIDELPESFSGGWVGFFSYDTVRYVEKKKLPFSSAPEDDRNLPDVHLGLYDDVLVFDNVEKAKEHIMAGDIFQIVLSQRFERRTYANPFEVYRALRIVNPSPYMAYVQARGCVLVASSPEILTRVSXGKIINRPLAGTVRRGXTEKEDQMQEQQLLSDEKKCAEHIMLVDLGRNDVGRFPN

SEQ ID NO: 237972 - protein, 104 aa, Zea mays
  unsure (1)..(104): unsure at all Xaa locations
  Clone ID: MRT4577_14861C.1.pep
HPGSDNNDINALTWDHVDIATGASESLQGRXLPRQARQTQTYTRRARMRXQEVEEEEAHDSSDDDIGVDPHDDIDVSDADEANGGEEGREXNVDLIVDEFDDGY

SEQ ID NO: 237973 - protein, 69 aa, Zea mays
  unsure (1)..(69): unsure at all Xaa locations
  Clone ID: MRT4577_148620C.1.pep
GHLRCLVVVVXWPFVALVTMFAARFRPAMCGLPVLGGVVSLFPSTLSVAYHFLSGYLLAPLVFDIFNTF

SEQ ID NO: 237974 - protein, 120 aa, Zea mays
  Clone ID: MRT4577_148621C.1.pep
DRADDRPDRYFRYSDRSQQRDLALLGNKVLASCSFIGGTSEGEAYHLVFNSSLELLATPPACCVTPRQTCPPPEGFGRNLRSKTRWFAGFCNSHQVSHFATFFIDARAEISVAESRVAGR

SEQ ID NO: 237975 - protein, 480 aa, Zea mays
  Clone ID: MRT4577_148622C.1.pep
GRVGELLLKHPLYLRPDVNSGIEGQFSSLIESTVAKLRDPHVYYLVEGPITSSQSHRSIILRGDDLSFDSHTHGNSRTDSCTTSIVTCSEFFTEKRYDLSLTRETADAIAITVNQSAPSLKPGGTPVVEYFPASAPASLIVITLKLDILCYSSIDFPVAAAVSELVIPGLADQMIVMKRIIASEITQQAQLQPFHFIPSGWHVPVTAIYNTRYGETEESWIVLRKYLHLRLGLPLDRPLLRISNALTFGGMGRRKKSMPRSGSSLLRDIHRELPSSGVSGGVMSLIDGSYEYYHYLHDGIDDNGWGCAYRSLQTIVSWYRLQQYSSIDVPSHREIQQVLVEIGDKDPSFIGSCEWIGAIELSFVLDKLLGVSCKVINVRSGDELPEKCRELARHFETQGTPVMIGGGVLAYTLLGVDYNGASGDCAFLILDPHYTGTDDLKKIVNGGWCGWKKSVDSKGRSFFLKDKFYNLLLPQRPNMV

SEQ ID NO: 237976 - protein, 202 aa, Zea mays
  Clone ID: MRT4577_148623C.1.pep
MDDGADLPCQLLFSHPEMPDSFDEFFNSATTTCTHTHSCNPPGPSVAMHTHTCLHAHTLVLGSGGEDDDDAREDSAKPRRPLGNREAVRKYREKKKAHAAFLEEEVKKLRAANQQLQRRLQGHAALEAEVARLRSLLLDIRGKIDAEVGGVLPFQKPCSVGSVACADPALCLTARVGGARRLQRKLMSQKACVIPWMLLRAS

SEQ ID NO: 237977 - protein, 100 aa, Zea mays
  Clone ID: MRT4577_148624C.1.pep
SSSGVVGEDLKRVGFYEGAADGVFSWGGSVVGTWQGLPGRFTACALGVGAVGGASVGALPVVVRLWGAGTASGQPWWAWSADEGGCLFGKHAEADQVVVG

SEQ ID NO: 237978 - protein, 408 aa, Zea mays
  Clone ID: MRT4577_148625C.1.pep
TADAIAITVNQSAPSLKPGVTPVVEYFPGTWKSSNHLICCVPQRTYPDLWTGRLGPASGHGHAPASLIVITLKLDILCYSSIDFPVAAAVSELVIPGLADQMIVMKRIIASEITQQAQLQPFHFIPSGWHVPVTAIYNTRYGETEERQSELRKELHLRLGLPLDRPLLRISNALTFGGMGRRKKSMPRSGSSLLRDIHRELPSSGVSGGVMSLIDGSYEYYHYLHDGIDDNGWGCAYRSLQTIVSWYRLQQYSSIDVPSHREIQQVLVEIGDKDPSFIGSCEWIGAIELSFVLDKLLGVSCKVINVRSGDELPEKCRELARHFETQGTPVMIGGGVLAYTLLGVDYNEASGDCAFLILDPHYTGTDDLKKIVNGGWCGWKKSVDSKGRSFFLKDKFYNLLLPQRPNMV

SEQ ID NO: 237979 - protein, 624 aa, Zea mays
  Clone ID: MRT4577_148626C.1.pep
MGSGVRALMRRKQVDSERTRAAGSAHQLRKELSVTQLVAIGVGSTIGAGVYVLVGTVAREHSGPALTLSFLIAGIAAALSAFCYAELASRCPSAGSAYHYSYICVGEGVAWLIGWALILEYTIGGSAVARGISPNLALFFGGQDSLPWILARHEIPWLDVVVDPCASFLVFVVTGLLCVGIKESSFVQGVVTVLNCFVMLFVIIAGSYIGFQTGWVGYKVAGGFFPYGANGMLAGSATVFFAYIGFDSVASTAEEVKNPQRDLPLGIGTALSICCSLYMLVSVVIVGLVPYFAMDPDTPISSAFAKHGMHWAMYLVTTGAVLALCSTLMGSILPQPRILMAMARDGLLPSFFSDVHKTTQVPVKSTVVTGICAAALAFFMDVSQLAGMVSVGTLLAFTIVAVSILILRYVPPDEVPLPSSLQASFRLSQENDEEKLRGTLGDDDHEQGSAEISDVVVEPITDPLIEKQLYASNLSEAKRRKTAACSITSVCIGVLILTTSASATFLPFPVRCSVCVLGGMLLLAGLGMLCWIDQDDGRHSFGHSGGFICPFVPLLPVMCILINTYLLINLGGGTWMRVGVWLVMGVFVYIFYGRTHSSLTDVVYVPVAEANEIYGSSSSLGFVA

SEQ ID NO: 237980 - protein, 196 aa, Zea mays
  Clone ID: MRT4577_148627C.1.pep
MASSGSCHSLLSSASPISPALFSRHRAAAVGGGASRASKVQSQVRCLARDEDSKGCANVSKAETNEEKETTPSSRRRCLVCLGAVTLISATGPPNGLAADAMNKAGVQKAVCRNCNGSGAVICDMCGGTGKWKALNRKRAKDVYEFTECPNCYGRGKLVCPVCLGTGLPNNKGLLRRPEAKQLLDKMYNGKILPRS

SEQ ID NO: 237981 - protein, 105 aa, Zea mays
  Clone ID: MRT4577_148628C.1.pep
MDDGADLPCQLLFSHPEMPDSFDEFFNSATTTCTHTHSCNPPGPSVAMHTHTCLHAHTLVLGSGGEDDDDAREDSVKPPRPLGNREAVRKHRQKKKEHAALSGRG

SEQ ID NO: 237982 - protein, 86 aa, Zea mays
  Clone ID: MRT4577_148629C.1.pep
PNKIYLYDQVKAMELIDKLEVTRRGPYSGGLGGISFDGDMQIALSLRTIVFSTAPSHNTMYSYKDADRRREWVAHLQAGAGIVADS

SEQ ID NO: 237983 - protein, 102 aa, Zea mays
  unsure (1)..(102): unsure at all Xaa locations
  Clone ID: MRT4577_14862C.1.pep
HPDRXASDPGAAGEAKRRFQRIQEAYSVLSDKGKKAMYDAGLFDPLNDDDQDFSDFMQEMLVMMDNVKNEKPDTLEDLQKMPPDVARRTRVAPHPQPQQGGR

SEQ ID NO: 237984 - protein, 604 aa, Zea mays
  Clone ID: MRT4577_148630C.1.pep
MESLAATSVFAPSRVAVPAARALVRAGTVVPTRRTSSRSGTSGVKCSAAVTPQASPVISRSAAAAKAAEEDKRRFFEAAARGSGKGNLVPMWECIVSDHLTPVLAYRCLVPEDNVDAPSFLFESVEQGPQGTTNVGRYSMVGAHPVMEIVAKDHKVTIMDHEKSQVTEQVVDDPMQIPRTMMEGWHPQQIDELPESFSGGWVGFFSYDTVRYVEKKKLPFSSAPQDDRNLPDVHLGLYDDVLVFDNVEKKVYVIHWVNVDRHASVEEAYQDGRSRLNMLLSKVHNSNVPTLSPGFVKLHTRKFGTPLNKSTMTSDEYKNAVLQAKEHIMAGDIFQIVLSQRFERRTYANPFEVYRALRIVNPSPYMAYVQARGCVLVASSPEILTRVSKGKIINRPLAGTVRRGKTEKEDQMQEQQLLSDEKQCAEHIMLVDLGRNDVGKVSKPGSVKVEKLMNIERYSHVMHISSTVSGQLDDHLQSWDALRAALPVGTVSGAPKVKAMELIDKLEVTRRGPYSGGLGGISFDGDMQIALSLRTIVFSTAPSHNTMYSYKDADRRREWVAHLQAGAGIVADSSPDDEQRECENKAAALARAIDLAESAFVDKE

SEQ ID NO: 237985 - protein, 574 aa, Zea mays
  Clone ID: MRT4577_148631C.1.pep
MTLASTDKVVLGCIAFSIFWVLAVFPSVPFMPVGRTAGSLLGAMLMVLFRVMTPEEAYKAIDLPILGLLFGTMVVSIFLERADMFKYLGSALAWRSRGSKDLLFRVCLVSAVASALFTNDTCCVVLTEFILKLARQNNLPPQPFLLALASSSNIGSSATPIGNPQNLVIAVQSGITFGQFLVGVFPAMIVGVAANTCILLCYFWRCLSAPEKDQEGGAAAAGPDVAVVADEEVTSHRFTPARMSRASSVNGGGADADCVGELIRRSDSLSRADTTLGMSMRSRSYNSEGGDIQVAIRSMRASSMSQEMVEVSTVCDRRDDGGAGPRKVTRTTSHQRSVIIEDAPEADAADDDDDGHKGKDGDSVTNKEKRWKVLVWKTAVYLTTLGMLAALLMGLNMSWSAITAALVLLALDFTDAQACLEKVSYSLLIFFCGMFITVDGFNRTGIPNALWELVEPHSRIDSAKGTALLAVVILVLSNVASNVPTVLLLGTRVAASAVAISPESEKKAWLILAWVSTVAGNLTLLGSAANLIVCEQARRAQFFGYNLTFWSHLRFGLPSTIIITAIGLLIVASY

SEQ ID NO: 237986 - protein, 117 aa, Zea mays
  unsure (1)..(117): unsure at all Xaa locations
  Clone ID: MRT4577_148632C.1.pep
MPDMAINSNFLFFSPERXKGNTFLRLQPWPMICVSCAAINDTEDKECGVANKHLALPDHAEXIGRTEIXSDFDAYSMNTDEIVKGLEELFNISANEFGTLTIDNDEDAADLVDKTCC

SEQ ID NO: 237987 - protein, 62 aa, Zea mays
  unsure (1)..(62): unsure at all Xaa locations
  Clone ID: MRT4577_148633C.1.pep
XAXQAFVNLXPTLLCDAGAXXVXVCTILFNAYMYITRCTGVXAHISWWFXSQDTXXPDVDWL

SEQ ID NO: 237988 - protein, 118 aa, Zea mays
  unsure (1)..(118): unsure at all Xaa locations
  Clone ID: MRT4577_148634C.1.pep
LLLXXIILXTYXYFXKQTVYYQNHTPTKTYPIINLLFNPFHNHLYLLFLTXSINKFXFLPFIIHTHHXNIPSIKSTFKLNHTLSLPLYLLSPLPIITIMFPFFFFHFQNFYYFFSFHF

SEQ ID NO: 237989 - protein, 103 aa, Zea mays
  unsure (1)..(103): unsure at all Xaa locations
  Clone ID: MRT4577_148635C.1.pep
VLLQHVPLAHLLAQNIRAQQLQQLELANLAAYSQEQQLLPFNQLAALNSAYLQQQQLLPFSQLAGVSPATFLTQPQLLPIYQDAGPNAGTLXQLRQWLAWNQL

SEQ ID NO: 237990 - protein, 942 aa, Zea mays
  unsure (1)..(942): unsure at all Xaa locations
  Clone ID: MRT4577_148636C.1.pep
MLLHAGPSFLLAPPPRFAAAPSSASPRRSRTPQSSPPTSHFARPADPVAQRVRPVAPRPPMATAEEGASSDVGVAVAESAQGFLLDARAYWVTKSLIAWNISDQKTSLFLYASRNATMCMSSQDMKGYDSKVELQPENDGLPSSVTQKFPFISSYRAFRIPSSVDVATLVKCQLAVASFDAHGNRQDVTGLQLPGVLDDMFAYTGPLGTIFSEEAVSMYLWAPTAQDVSVSFYDGPAGPLLETVQLNELNGVWSVTGPRNWENRYYLYEVTVYHQTTGNIEKCLAADPYARGLSANSTRTWLVDINNETLKPLAWDGLAAEKPRLDSFSDISIYELHIRDFSAHDSTVDCPFRGGFCAFTFQDSVGIEHLKKLSDAGLTHVHLLPSFQFGGVDDIKSNWKCVDEIELSKLPPGSDLQQAAIVAIQEEDPYNWGYNPVVWGVPKGSYASNPDGPSRIIEYRLMVQALNRLGLRVVMDVVYNHLYSSGPFAITSVLDKIVPGYYLRRDSNGQTENSAAVNNTASEHFMVDRLIVDDLLNWAVNYKVDKARFDLMGHIMKKTMIRAXYTINDVXGSKIYGTFLYRGKPPYFPGTGIGSFNDRIRDAINGGXPFKNPLQQGFSTGLFLEPNGFYQGNETETRLTLATYADHIQIGLAGNLKDYVVISHTGEARKGSEIRTFDGSPVGYASSPIETINYASAHDNETLFDIISLKTPMDLSIDERCRINHLSTSMIALSQGIPFFHAGDEILRSKSLDRDSYDSGDWFNKIDFTYETNNWGVGLPPREKNEGSWPLMKPRLENPSFKPAKHDIIAALDKFIDILKIRYSSPLFRLTTASDIVQRVHFHNTGPSLVPGVIVMSIEDARNDRHDMAQIDETFSCVVTVFNVCPYEVSIEIPDLASLRLQLHPVQVNSSDALARQSAYDPATGRFTVPKRTAAVFVEPRC

SEQ ID NO: 237991 - protein, 58 aa, Zea mays
  unsure (1)..(58): unsure at all Xaa locations
  Clone ID: MRT4577_148637C.1.pep
VLDGRGAHPHAATVPIDIISLVGIGVHNTTSVIVVGHRLRLSDTLVNWSXPDFILQPG

SEQ ID NO: 237992 - protein, 811 aa, Zea mays
  unsure (1)..(811): unsure at all Xaa locations
  Clone ID: MRT4577_148638C.1.pep
ISSYRAFRIPSSVDVATLVKCQLAVASFDAHGNRQDVTGLQLPGVLDDMFAYTGPLGTXXSEEAVSMYLWAPTAQDVSVSFYDGPAGPLLETVQLNELNGVWSVTGPRNWENRYYLYEVTVYHQTTGNIEKCLAADPYARGLSANSTRTWLVDINNETLKPLAWDGLAAEKPRLDSFSDISIYELHIRDFSAHDSTVDCPFRGGFCAFTFQDSVGIEHLKKLSDAGLTHVHLLPSFQFGGVDDIKSNWKCVDEIELSKLPPGSDLQQAAIVAIQEEDPYNWGYNPVVWGVPKGSYASNPDGPSRIIEYRLMVQALNRLGLRVVMDVVYNHLYSSGPFAITSVLDKIVPGHDLRRDSNGQTENSAAVNNTASEHFMVDRLIVDDLLNWAVNYKVDGFRFDLMGHIMKKTMIRAKSALQSLTIDEHGVDGSKIYLYGEGWNFGEVAENQRGINGSQLNMSGTGIGSFNDRIRDAINGGSPFGNPLQQGFSTGLFLEPNGFYQGNETETRLTLATYADHIQIGLAGNLKDYVVISHTGEARKGSEIRTFDGSPVGYASSPIETINYASAHDNETLFDIISLKTPMDLSIDERCRINHLSTSMIALSQGIPFFHAGDEILRSKSLDRDSYDSGDWFNKIDFTYETNNWGVGLPPREKNEGSWPLMKPRLENPSFKPAKHDIIAALDKFIDILKIRYSSPLFRLTTASDIVQRVHFHNTGPSLVPGVIVMSIEDARNDRHDMAQIDETFSCVVTVFNVCPYEVSIEIPDLASLRLQLHPVQVNSSDALARQSAYDTATGRFTVPKRTAAVFVEPRC

SEQ ID NO: 237993 - protein, 65 aa, Zea mays
  Clone ID: MRT4577_148639C.1.pep
AGRRCGLGTNIGSCGHHMTKITTNNIGIVGPSRTTGSRPSQNPRLDFSLSNTGCMMGVRQHGAHQ

SEQ ID NO: 237994 - protein, 54 aa, Zea mays
  Clone ID: MRT4577_14863C.1.pep
IRILIGRHLLMLRRWLHDSDPRIYQFTRCEPLTEEDVMALCLIAIKMLIAENHL

SEQ ID NO: 237995 - protein, 72 aa, Zea mays
  unsure (1)..(72): unsure at all Xaa locations
  Clone ID: MRT4577_148640C.1.pep
KKKKKKKKKKNKKNKLKKKKKEKXKKKKKNKKKKKKKKKKKIKKKKKRYKKKKKKGGPVLRVQTFLSRPGKF

SEQ ID NO: 237996 - protein, 46 aa, Zea mays
  Clone ID: MRT4577_148641C.1.pep
PCGGGRPPLVEASVWSVFTLPTEGAGGGLQRSCSARDGVCAVTIAS

SEQ ID NO: 237997 - protein, 283 aa, Zea mays
  Clone ID: MRT4577_148642C.1.pep
MSSLNSLFNRSSPFGTKCKTCLNLIISRIKLLRNRREMQLINMRKEMVQYLQTGQESIARIRVEHIIREQNILAAYEIVELFCEFVLARVPIVEAQKECPIELREAIASIIFASGRCSDLPELMHLRNLFTTKYGKEFVAAAMELRPDCGVNRTIIEKLSVKAPSAESKLKVLKAIAHEYNLDWDSSNTEAEFNKKYEDLLDDSGSSVRQGQTPTIESSPASSISRDKPSILPVNDTSKNKTPESPKSPAVSSRAYAATKSNVASQEHQPPAAERSSCAGPGS

SEQ ID NO: 237998 - protein, 57 aa, Zea mays
  Clone ID: MRT4577_148643C.1.pep
VVSELSLHDRGATTIRTDYTQLGIPNHTTYVALNPCICQPFPQILHNVNWSALPGST

SEQ ID NO: 237999 - protein, 63 aa, Zea mays
  unsure (1)..(63): unsure at all Xaa locations
  Clone ID: MRT4577_148644C.1.pep
MVRKFFVSGNWKCNGTTNQVENIVKTLNEXQVPASHVVEVVVSPAYVFLPESKIQLLHQSMFG

SEQ ID NO: 238000 - protein, 172 aa, Zea mays
  Clone ID: MRT4577_148645C.1.pep
MAEYDLTTRIAHFLDRHLVFPLLEFLSVKEIYNEKELLQGKLDLLSDTNMVDFAMDVYKNLYSDDIPHALREKRTTVVAQLKQLQAETEPIVKMFEDPETTRQMQSTRDGRMLFDYLADKHGFRQEYLDTLYRYAKFQYECGNYSRAAEYLYFFRVLVPATDRNALSSLWGK

SEQ ID NO: 238001 - protein, 71 aa, Zea mays
  unsure (1)..(71): unsure at all Xaa locations
  Clone ID: MRT4577_148646C.1.pep
MGQXSRXVLLXVVALLXAGLLPQALGKGRGGRGHGGNAAICFPEVWTGRAKPIDNVLMQVDAAKRAQAKAT

SEQ ID NO: 238002 - protein, 95 aa, Zea mays
  Clone ID: MRT4577_148647C.1.pep
AGGEPSVITTVAELVVPPRNQPHVPDLGAYYDRHRLDSFQSHFPFSQLPAQGGGGAITLFPPTSCRRGGGTSLSVYPSVRTGLRGLFAPSLTSAV

SEQ ID NO: 238003 - protein, 202 aa, Zea mays
  Clone ID: MRT4577_148648C.1.pep
MDEACNEALCREAACVWQGEGEDHPDAASCTSPSGTSSGSSSCSLGLNLGDGSTYSPPDDYSSELSSASSSTLHLDSEAEGPLYELSSLLAQLPARRGLSKYYPGKSQSFTWISNATCLQDLGKEVTYSKRMKTCKSYAAGLGMNQRSNHLPRTCNKMIAKRPSKSSFACQMSRASSTNLLYRSANLPAHQNKEDVQMHMNS

SEQ ID NO: 238004 - protein, 85 aa, Zea mays
  Clone ID: MRT4577_148649C.1.pep
DQYANIGRASVPYDISSFCIQGRDLEKRSSLFHSAHVVTLCSCQHVLCILLKDVTMFAVVIFIFLIISGMSLCLYVNLWISFGTR

SEQ ID NO: 238005 - protein, 166 aa, Zea mays
  Clone ID: MRT4577_14864C.1.pep
MDGGSGNASSGGAAVCCYYALLGVRKSASATDIRTAYRRLAMKWHPDRWASDPGAAGEAKRRFQRIQEAYSVLSDKGKKAMYDAGLFDPLDDDDQDFSDFMQEMLVMMDNVKNEKPDTLEDLQKMLADIVNGDGGDGVGGRVPPAPPDVARRTRVAPHPQPQQARR

SEQ ID NO: 238006 - protein, 78 aa, Zea mays
  Clone ID: MRT4577_148650C.1.pep
SPRASTADPLSGGATSQAHTRSGRRAIWQTAPRHRARSHRRVHTWLTTSYPPPWTSICLRRWAGASVSGGRHCTLHVG

SEQ ID NO: 238007 - protein, 112 aa, Zea mays
  unsure (1)..(112): unsure at all Xaa locations
  Clone ID: MRT4577_148651C.1.pep
RSKGISARALAVSYPAYTTRQALRGDTQERTAYPPLNERLVQLSDQXISTNMYXENKPRYSFKKIARSLGYPCNKAXLVMLQPXAKWYCGECAKRRVHMDRLSVSTLGWSHM

SEQ ID NO: 238008 - protein, 56 aa, Zea mays
  Clone ID: MRT4577_148652C.1.pep
RIAGLVMPWMLSRSTCWCRLAPPCSRSFPPCSRLDMIAESSPWTCSTDSELRRSSV

SEQ ID NO: 238009 - protein, 98 aa, Zea mays
  Clone ID: MRT4577_148653C.1.pep
PGRGIRNYEMSTHHFFPAGGGGQGAPLSSMDLYSSGAFLNLAATLVCAAIMALPACIEMLGIIPVLLPFILGALCSQAVHRHACLVQPPGQDDVIWRP

SEQ ID NO: 238010 - protein, 574 aa, Zea mays
  Clone ID: MRT4577_148654C.1.pep
MTLASTDKVVLGCIAFSIFWVLAVFPSVPFMPVGRTAGSLLGAMLMVLFRVMTPEEAYKAIDLPILGLLFGTMVVSIFLERADMFKYLGSALAWRSRGSKDLLFRVCLVSAVASALFTNDTCCVVLTEFILKLARQNNLPPQPFLLALASSSNIGSSATPIGNPQNLVIAVQSGITFGQFLVGVFPAMIVGVAANTCILLCYFWRCLSAPEKDQEGGAAAAGPDVAVVADEEVTSHRFTPARMSRASSVNGGGADADCVGELIRRSDSLSRADTTLGMSMRSRSYNSEGGDIQVAIRSMRASSMSQEMVEVSTVCDRRDDGGAGPRKVTRTTSHQRSVIIEDAPEADAADDDDDGHKGKDGDSVTNKEKRWKVLVWKTAVYLTTLGMLAALLMGLNMSWSAITAALVLLALDFTDAQACLEKVSYSLLIFFCGMFITVDGFNRTGIPNALWELVEPPSRIDSAKGTALLAVVILVLSNVASNVPTVLLLGPRVAASAGPISPESEKKAWLILAWVSPVAGNLTLLGSAANLIVCEQARRAQFFGYNLTFWSHLRFGLPSTIIITAIGLLIVASY

SEQ ID NO: 238011 - protein, 84 aa, Zea mays
  Clone ID: MRT4577_148655C.1.pep
MTLASTDKVVLGCIAFSIFWVLAVFPSVPFMPVGRTAGSLLGAMLMVLFRVMTPEEAYKAIDLPILGLLFGTMVVSIFLERADM

SEQ ID NO: 238012 - protein, 63 aa, Zea mays
  unsure (1)..(63): unsure at all Xaa locations
  Clone ID: MRT4577_148656C.1.pep
LDHTEEQIYMDRICAKLHGGDSSSICDXRTTKXKGISWASGTEAIXANTYRFLSRERPDHSVL

SEQ ID NO: 238013 - protein, 45 aa, Zea mays
  Clone ID: MRT4577_148657C.1.pep
LVCTAVQSDLNQLNPVSPFMECDMSCYAPGSYLLLCYICKHHVNM

SEQ ID NO: 238014 - protein, 229 aa, Zea mays
  Clone ID: MRT4577_148658C.1.pep
MDDGADLPCQLLFSHPEMPDSFDEFFNSATTTCTHTHSCNPPGPSVAMHTHTCLHAHTLVLGSGGEDDDDAREDSAKPRRPLGNREAVRKYREKKKAHAAFLEEEVKKLRAANQQLQRRLQGHAALEAEVARLRGLLLDIRGKIDAEVGGVLPFQKPCSVGSVACADPALCFNGNSEVGGGWEESSRPAAADCRIDEVRGMSREIDVPEGLRHSMDVVASFVSSDPLAE

SEQ ID NO: 238015 - protein, 79 aa, Zea mays
  Clone ID: MRT4577_148659C.1.pep
KGARHPSSGPINPFTWFYKRHHHRMTHNTWVPNNATFTLNKLKQGSRQTFFVDTHEHKPLRFRERNKQFHFHPTRRHPW

SEQ ID NO: 238016 - protein, 63 aa, Zea mays
  Clone ID: MRT4577_14865C.1.pep
QIGVVLLSKRPNHVISTQDAEVSVNVIPADDDSTDAAHGDAVRRHHDGGANQLVNFERAFAEK

SEQ ID NO: 238017 - protein, 158 aa, Zea mays
  Clone ID: MRT4577_148660C.1.pep
MSDRELRPLRSIRITGDGRCLFRSVAYGACLRRGKHAPSDSAQKELADELRAKVADEFVKRRGDTEWFLEGNFENYVRQMRKPHAWGGEPELFMCSHVLRMPITVYMYTSSSDGPRIIAEYGQEYGMDDPVRVLYDGYGHYDALQPSLVRTQSRLRGV

SEQ ID NO: 238018 - protein, 120 aa, Zea mays
  Clone ID: MRT4577_148661C.1.pep
TILGGRRGNNYTLKTREGNMGLGKNYPDPPPPKKKNIAFHGNRNRGSFGGARGKKTGRWGHRGPENLWVGPPKTLKLLGGGSGIKGPPKNIFCPGVKKSRKPGGELKPWGGGKKTNPPVF

SEQ ID NO: 238019 - protein, 467 aa, Zea mays
  unsure (1)..(467): unsure at all Xaa locations
  Clone ID: MRT4577_148662C.1.pep
MSADPPNQPEQNGDGYAYLSGLGNSFASEAVPGALPANGHNSPLLCPLGLYAEQLSGTSFTTPRHRNLRTWMYRIKPSVTHDPFHPRTPPNPRLLADFHDPNAAVATPTQLRWRPADLPPRDADADLDFVDGLYTVCGAGSSFLRHGFAVHMYAANKSMDGCAFCNADGDFLIVPSKGXLLITTECGKMLVPPGEIVVIPQGFRFAVDLPDGPSRGIVLXTPRTHTYLNCVXCAGANGLASPRDFLSPTAWFEQEHHPGYTIVHKYGGELFSATQDFSPFNVVAWHGNYVPYKVCCMPLYTCLPLRCVSLFLHPLLFQYDLSKFCPFNTVLLDHGDPSVNXRWLVAENTFRPPYYHRNCMSEFMGLIYGMYEAKADGFLPGGASLHSCMTPHGPDTKTYEATISRAAANEPSRLSGTLAFMFESWLIPRVCPWALDSPCRDLDYYQCWIGLKSHFSPPAAAVDDENE

SEQ ID NO: 238020 - protein, 400 aa, Zea mays
  Clone ID: MRT4577_148663C.1.pep
MGNAGSNGGGPATGHRRRSSGHGHHQQAPPPPQPQETAPNRYVFAAATPYPPQYPNPNPPQYYPQYGNYYPPPPPSVPVPLPAPYDHHHRPPTAAPGEFPPPPTAHPHNYPGWAGRYPSYGPHLSMPTPYVEHQKAVTIRNDINLKKETLRIEPDEECPGRFLVAFTFDATVAGSMTVYFFAKEELNCNLTTVKEDLIKPITVSFKEGLGQKFRQPSGTGIDFSVFEESDLLKQGDMDVYPLAVKAETTLSVDHPPEGDDQKMITPNSQITQAVFERKENGDYQVRVVCQILWVNGTRYELQEIYGIGNSMEGDADANDPGKECVICLSEPRDTTVLPCRHMCMCSECAKVLRYQTTRCPICRQPVERLLEIKVNNKSEDQQQTPQSPPLPDLAPQQEGV

SEQ ID NO: 238021 - protein, 136 aa, Zea mays
  unsure (1)..(136): unsure at all Xaa locations
  Clone ID: MRT4577_148664C.1.pep
FVFQVCLEGQISRKSAMKSLSEGRSPSGDQIPWKFCEQFQDNVFPSLSGARIVRIAVHPSALRXFFLHLCDLVYVSXIILYIILCFLPCXLGYGSAAIGLLSRYYEGQMRRLFDDDEEETEEPVVKIAEAAEKASL

SEQ ID NO: 238022 - protein, 74 aa, Zea mays
  Clone ID: MRT4577_148665C.1.pep
KNRGGGGAVSPKGLNKSREGQMLGASYEKGQLAKRGGEERGITREAPQVYQDKGFKNDDQGKKRAGQQKKGVFY

SEQ ID NO: 238023 - protein, 220 aa, Zea mays
  unsure (1)..(220): unsure at all Xaa locations
  Clone ID: MRT4577_148666C.1.pep
QLLREINHEDGVKLVNVHINHADMSLYLAFDYAEHDLYEIIRHHREKLSSSINPYTVKSLLWQLLNGLNYLHSNWIIHRDLKPSNILVWCHQLYRNIIAQFLQTCPLADTYFICATKVMGEGDEHGIIKIADFGLARIYQAPLKPLCDNGXVVVTIWYRAPELLLGGKHYTSAVDMWAVGCIFAELLTLKPLFQGVEAKXTSEPFQVWALSLSNYCCYLA

SEQ ID NO: 238024 - protein, 66 aa, Zea mays
  unsure (1)..(66): unsure at all Xaa locations
  Clone ID: MRT4577_148667C.1.pep
FKLNYSKHLMLRLDEXPDDVNKLYQKLQXRAHRDKCRPPHAQXRLSXLARDQQLLIDPQERCYILE

SEQ ID NO: 238025 - protein, 320 aa, Zea mays
  unsure (1)..(320): unsure at all Xaa locations
  Clone ID: MRT4577_148668C.1.pep
MEAVGKSVCVTGAGGFIASWLVKLLLCRGQYKVRGTVRDPGASKNAHLKVMEGAGERLQLVKADLLDYSSVASAIAGCEGVFHVASPVPSGRSSNPEVEVIGPAVTGTTNVLKACYEAKVGRVVVVSSCAAVYANPNYPKGKVFDEDCWSDEAYCRKNEDWYFGLRTLSEXNVCRXVKQHCQQVNPGIMLEQHXXSLSLFFIPHTIXGSGPNSRPSADWEIVLSNMALIXDVADSLLLTYEKPSAFGRYICSSHAIKIFDMINILKTMYPSYPYPKNFVENDVNSVYSFEKLQKLGWPFKPIKESPRDTVESYKAFGILN

SEQ ID NO: 238026 - protein, 177 aa, Zea mays
  Clone ID: MRT4577_148669C.1.pep
SRSVRLFVKRGMEVFVAQSYSKNLGLYSERVGAINVVCSAPEVADRVKSQLKRLARPMYSNPPIHGAKIVANVVGDPIMFGEWKQEMELMAGRIKNVRQKLYDSLSAKDKSGKDWSFILRQIGMFSYTGLNKAQSDNMTDKWHIYMTKDGRISLAGLSLAKCDYLADAIIDSFHNVN

SEQ ID NO: 238027 - protein, 96 aa, Zea mays
  Clone ID: MRT4577_14866C.1.pep
RPVTRLYTRGTRFALVLPISDAQTCCIVACRCAYLVTPLARWDGVSSSRDRRLFPPHPHLRSRLFPAPFLSPCRRQSHRQFCTSHPLLPPHGRLRR

SEQ ID NO: 238028 - protein, 223 aa, Zea mays
  unsure (1)..(223): unsure at all Xaa locations
  Clone ID: MRT4577_148670C.1.pep
STYLFTIQRLCWDELSSIIKHVTVSFKEGLGKKFKQSSGTXIAFSVFEESDLLKQGDMDVYPLAVKAETTLYVDHPPDVGDQKIKTPNSXHSGSQVVFEKKENGDYHVRVVCQILWVDGTRYELQEIYGIGNSVEGDADANDPGKECVICLSEPRDTTVLPCRHMCMCSECAKVLRYQTTRCPICRQPVERLLEIKVNNKSEDQQQMPQSPPLPALDPQQEEV

SEQ ID NO: 238029 - protein, 46 aa, Zea mays
  Clone ID: MRT4577_148671C.1.pep
MADGNEKDFDEEFSGSANVTTSNVQDISLEGVTSSKWGKLPDDIFF

SEQ ID NO: 238030 - protein, 227 aa, Zea mays
  unsure (1)..(227): unsure at all Xaa locations
  Clone ID: MRT4577_148672C.1.pep
MGRLSCGGVQPKLRKGLWSPEEDERLYGHIIRHGVGCWSSVPKLAGLQRCGKSCRLRWINYLRPDLKRGGFSQQEEDLIVALHEILGNRWSQIASHLPGRTDNEIKNLWNSCLKKKLRQRGIDPATHKPIAAEAGSALLHHDDQSKPQQQPAAAAVFDPFPVTDFGFDLGAAALYGEXDASSDAGFVADYSSVLDVSENLGYGESSSNSSGWTARRWACRARQRGAA

SEQ ID NO: 238031 - protein, 83 aa, Zea mays
  unsure (1)..(83): unsure at all Xaa locations
  Clone ID: MRT4577_148673C.1.pep
IVNMASSLRTFTSSLRLALPLARPTSARSGFRPIPSGPSSSRWASTSADVNNHGPYLTLXELANNKGATXTHVRLGRGWSSTK

SEQ ID NO: 238032 - protein, 107 aa, Zea mays
  unsure (1)..(107): unsure at all Xaa locations
  Clone ID: MRT4577_148674C.1.pep
MSPQWQPQHRVGLFSAGAATATIPHPCSHTXQSPISPLLPTYLLLAVXSPSENTIHQPSSIHHALLTCIIPLSPTIIQHLTSLLQQSPIVXLXAHNITTQQLQQLVL

SEQ ID NO: 238033 - protein, 233 aa, Zea mays
  Clone ID: MRT4577_148675C.1.pep
MLSADIPPNQTIYLNNLNEKVKKEELKRSLYALCSQYGRILDVVALKTQKLRGQAWVVFSEITAATNAFRGLQDFDFYGKKMRVQYAKTKSDCIAKEDGTYAPKEKRKKQEEKAAEKKRRAEEAQQAGPNAAAAQSNGTGYQASRLGKASQEPPAPPNNILFIQNLPDQTTSMMLQILFQQYPGFREVRMIEAKPGIAFVEFEDDGQSMVAMQALQGFKITPENPMAISYAKK

SEQ ID NO: 238034 - protein, 37 aa, Zea mays
  Clone ID: MRT4577_148676C.1.pep
LNEHTLLMLLNSTILYISLVLIYGHTYNRHFILNLHA

SEQ ID NO: 238035 - protein, 233 aa, Zea mays
  unsure (1)..(233): unsure at all Xaa locations
  Clone ID: MRT4577_148677C.1.pep
MLSGDIPPSQTIYLNNLNEKVKKEELKSSLYALCSQYGRILDVVALKTQKLRGQAWVAFSEITAATNAFRGLQDFDFYSKXMRVQYAKTKSDCIAKEDGTYAPKEKRKKQEEKAAEKKRRTEEAQQAGLNAAAAQSNGTGYQASRLGKASQEPPAPPNNILFIQNLPDQTTSMMLQILFQQYPGFREVRMIEAKPGIAFVEFEDDGQSMVAMQALQGFKITPENPMAISYAKK

SEQ ID NO: 238036 - protein, 233 aa, Zea mays
  Clone ID: MRT4577_148678C.1.pep
MLSGDIPPNQTIYLNNLNEKVKKEELKRSLYALCSQYGRILDVVALKTQKLRGQAWVAFSEITAATNAFRGLQDFDFYGKKMRVQYTKTKSDCIAKEDGTYAPKEKRKKQEEKAAEKKRRTEEAQQAGLNAAAAQSNGTGYQASRLGKASQEPPAPPNNILFIQNLPDQTTSMMLQILFQQYPGFREVRMIEAKPGIAFVEFEDDGQSMVAMQALQGFKITPENPMAISYAKK

SEQ ID NO: 238037 - protein, 117 aa, Zea mays
  Clone ID: MRT4577_148679C.1.pep
SHDLTDLDAQIDENEVLESIMQLPSDKAPGPDGYTGRFYKVCWPIIKTDVMAVIAAIWCRKFQQFGRLNAAFVTLIPKKEGAEEVKAFRPISLVHSIAKLVTKLMANRLSRQQRNSS

SEQ ID NO: 238038 - protein, 104 aa, Zea mays
  Clone ID: MRT4577_14867C.1.pep
GSTNKPSYRTACVFPMSWTRVLPVLDCASNMAALPCPCVSACPRCQPPQQVTWLLRSVSQDPTLVLHRSRSISTSPHDRHLSRRPPCLCSTPAYHKPTDMVAHT

SEQ ID NO: 238039 - protein, 233 aa, Zea mays
  Clone ID: MRT4577_148680C.1.pep
MLSADIPPNQTIYLNNLNEKVKKEELKRSLYALCSQYGRILDVVALKTQKLRGQAWVVFSEITAATNAFRGLQDFDFYGKKMRVQYAKTKSDCIAKEDGTYAPKEKRKKQEEKAAEKKRRAEEAQQAGPNAAAAQSNGTGYQASRMGKASQEPPAPPNNILFIQNLPDQTTSMMLQILFQQYPGFREVRMIEAKPGIAFVEFEDDGQSMVAMQALQGFKITPENPMAISYAKK

SEQ ID NO: 238040 - protein, 118 aa, Zea mays
  Clone ID: MRT4577_148681C.1.pep
HNKLCGHAYPRLVLLALAALLPAGLFTQGSMNSKSKAYGARAELPWSRVIWLRTTFPEACIASIVAACIPQCGHGPYGREEHLRGRLRSAQNAEPDTHGRRRAPVFHQLGRSAEDLHH

SEQ ID NO: 238041 - protein, 55 aa, Zea mays
  Clone ID: MRT4577_148682C.1.pep
NAVSSHSKYPQASHRIPPGYCNLAAQSALIHKSKSYQNVKTNQKNSISSIILYTR

SEQ ID NO: 238042 - protein, 51 aa, Zea mays
  Clone ID: MRT4577_148683C.1.pep
YLETATIHQERRKPGWMHTHLCVMLRRLMSYQHMLEERCLISKKRLNDGQL

SEQ ID NO: 238043 - protein, 72 aa, Zea mays
  Clone ID: MRT4577_148684C.1.pep
RPGPAIPMREGRHVSCWMPQEDLGNISHPCMFFRCQIQMFLIFQSTGCWRSRFPCPGWKQTDLSTLNGPPQT

SEQ ID NO: 238044 - protein, 517 aa, Zea mays
  unsure (1)..(517): unsure at all Xaa locations
  Clone ID: MRT4577_148685C.1.pep
MFVRVCVIINRSIMLFTLFISVCSCICGRAKINHGRPGFIKPMYPAVCNNAMENEPKRMLPFQTRLSATDISALASMKNVAKCDTWCELQNPANHRVFERKLRPKPSGGGHRGRPGCHQSNTQTTMGHQAQHGTDDTEELLAAHRQLWCHALGYVKSMALKCALDLRIPDTIDRCGGSATLGELLAASEIPASNHDYLRRVMRTLTAMRIFAVSHDDPAKADDAAAISYQLTPASRLLVSSSSSSVDAAAAGAGASKENTTTPSILPNIAHLVRPNTISLLFSMGEWMKDESAASVSLYETVHXGRGMWACVEDDAANRASFYESMDADTRLVMQAVVRRCPHVFDGIKSLVDVGGGRGTAAAAVVAAFPHIQRCTVMDLPHVVAEAPAGTAGLSFHGGDMFEHIPSADALMLKWILHDWDEDKCIKIMERCKEAIGGKEAGGKVIIIDTVLGSRADDDDDDKTCRETYVLDLHILSFVNGAEREEHEWRRIFLAAGFRDYKITHTRGIPSIIEVFP

SEQ ID NO: 238045 - protein, 54 aa, Zea mays
  Clone ID: MRT4577_148686C.1.pep
HLICKISTVSAPCVHHFQFRACLWYQSARFVLCSVALGRFSFFKWSFLCIERHI

SEQ ID NO: 238046 - protein, 38 aa, Zea mays
  Clone ID: MRT4577_148687C.1.pep
AYTQSYLRLQNHHPPTQQAILKRKLNNQNCIMRDLTHI

SEQ ID NO: 238047 - protein, 58 aa, Zea mays
  Clone ID: MRT4577_148688C.1.pep
RLVQAKLEKTTNQFESSSYHQNNKEYVSMEPKERTISTSIMSTHIVESMKLPVLHPDI

SEQ ID NO: 238048 - protein, 407 aa, Zea mays
  unsure (1)..(407): unsure at all Xaa locations
  Clone ID: MRT4577_148689C.1.pep
MAATMGSISANGSYQTNRPSALKQAPHMQFQQCCNGGLRFLSKHSQSMRSKIQVAKRRATDNGIHPKTTGHRAPIVCSAGMTIVFVATEVHPWCKTGGLGDVVGGLPPALAAMGHRVMTIAPRYDQYKDAWDTSVLVEVNIGDTVETVRFFHCYKRGVDRVFVDHPMFLEKVWGKTGAKLYGPTTGTDYRDNQLRFCLLCLAALEAPRVLNFNNSEYFSDKMGRCVFVANDWHTAIFACYLKRCMSGGGRXVGGEAVKGAVTEAEKEVASEGLQLVAGAELAGDGLVQXAVVAGAEALGVVVGLSVXWYPDALAXWCRLLGLVXGRITPPGFSAXLXMXLIFGAXXXKKKNGXFWTKPLEIGIVNGLDVYEWXPXTDKYISVKYDATTXVTEARAFNXESLQAGSRI

SEQ ID NO: 238049 - protein, 110 aa, Zea mays
  unsure (1)..(110): unsure at all Xaa locations
  Clone ID: MRT4577_14868C.1.pep
KKRGRPPRPPTHTTTPFLAIHLETKRGIAKFYIFALPXTQNQPAKNHKPFTSTMTLTLTYTLNITNPLTTPLTLATLPKNNLNAFELFATYIKLPSKAPTVIKDHNPPPG

SEQ ID NO: 238050 - protein, 73 aa, Zea mays
  unsure (1)..(73): unsure at all Xaa locations
  Clone ID: MRT4577_148690C.1.pep
VTHRSCAFSGKEPNKVDRTRAYVTKQVAKSILDSGFGRRFLVXVSYGIGXPEVLYLLVRLLDHGKIPDNVMLN

SEQ ID NO: 238051 - protein, 231 aa, Zea mays
  Clone ID: MRT4577_148691C.1.pep
MRIRKSASRLLGSAYSASAAPTVDAAPRLDLLPPPHPAPCSAPESCGGPAFSSPSVSTAEPCELSRSPWDLIADLSLSDEKVEDELVDKYFVHVTTRASWLFSSTVSATTSTKKKKKLPAAVYEDSTQLRREAAKKTATNREEGETKKKAKVKKEEVQQDGAAAAAAQVWKCKKNDGRRWHCNRPVSQPNTLCEYHFVQKRSYLNPGFEFHSTAELGAAPAPAPVHAASSS

SEQ ID NO: 238052 - protein, 186 aa, Zea mays
  unsure (1)..(186): unsure at all Xaa locations
  Clone ID: MRT4577_148692C.1.pep
MGHRVMTIAPRYDQYKDAWDTSVLVEVNIGDTVETVRFFHCYKRGVDRVFVDHPMFLEKVWGKTGAKLYGPTTGTDYRDNQLRFCLLCLAALEAPRVLNFNNSEYFSGPYXXXDVVFVANDWHTAILPCYLKSMYKPNGIYKNAKVAFCIHNIAYQGRFARADFDLLNLPDSFLPSFDFIDGHVKP

SEQ ID NO: 238053 - protein, 612 aa, Zea mays
  unsure (1)..(612): unsure at all Xaa locations
  Clone ID: MRT4577_148693C.1.pep
MAATMGSISANGSYQTNRPSALKQAPHMQFQQCCNGGLRFLSKHSQSMRSKIQVAKRRATDNGIHPKTTGHRAPIVCSAGMTIVFVATEVHPWCKTGGLGDVVGGLPPALAAMGHRVMTIAPRYDQYKDAWDTSVLVEVNIGDTVETVRFFHCYKRGVDRVFVDHPMFLEKVWGKTGAKLYGPTTGTDYRDNQLRFCLLCLAALEAPRVLNFNNSEYFSGPYGEDVVFVAXNDWHTAILPCYLKSMYKPNGIYKNAKVAFCIHNIAYQGRFARADFDLLNLPDSFLPSFDFIDGHVKPVLGRKLNWMKAGIIESDLVLTVSPHYVKELTSGPDKGVELDGVLRTKPLEIGIVNGMDVYEWDPSTDKYISVKYDATTVTEARALNKERLQAEVGLPVDSSIPVIVFVGRLEEQKGSDILIAAIPEFVGENVQIIVLGTGKKKMEEELTQLEVKYPNNARGIAKFNVPLAHMMFAGADFIIVPSRFEPCGLIQXLQGMRYGVXIPICSSTGGLVDTVEEGVTGFHMGSFNVECETVDPADVTAVASTVTRALKQYDTPAFHEMVQNCMAQDLSWKGPAKKWEEVLLGLGVEGSRAGIDDAEEIAPLAKENVATP

SEQ ID NO: 238054 - protein, 110 aa, Zea mays
  Clone ID: MRT4577_148694C.1.pep
GGAVKTTPVVLKTTPPVGERWVQTGGGVAATTTGIGGNNRWGPLKPSNFVGFGSRVHPSLKGVYFRRGWSRARIFRFGFVVVVPHLCFYPQARPSEVVRKVYNGPIPSRH

SEQ ID NO: 238055 - protein, 273 aa, Zea mays
  Clone ID: MRT4577_148695C.1.pep
PLRLGFLFGAKKYPSPPNIKPFHNMRNPNGTGRSLFPQLSHHSPAQVLRNFTHIRNLRIELPSGDVGTEEGVLLKWRAEYGSTLQSCVILGGTRVDRKPVGGEHEQSLEDNGSMPESFYTNGGLKLRVVWTISSLIAASTRHYLLRSIINDHSTLLSLVLTDADGQGTLCMGAEQLKEFRENQLSASACSNRTQVPACNMKLKYAPYLELPGGMALQGATLVAIKPSPDGSNGSHPNRKEADAFVFGAFDGPFKAAVKALMKRRTYLLEMNGF

SEQ ID NO: 238056 - protein, 64 aa, Zea mays
  Clone ID: MRT4577_148696C.1.pep
ETGCTIKTLTILHISGIRQIYTSMFRRVFKTLCQNVCKNLFRDSSVPLKLLFSFTKESSLTRCN

SEQ ID NO: 238057 - protein, 217 aa, Zea mays
  Clone ID: MRT4577_148697C.1.pep
MSSDELRLELDELRRLEGLAKRPRVQTLLANEIRNIEAKMAKATEPSPEPLAAASAPAAAARSDLSYATLGSFSWEQDNEKIRIYIPLEGVEQGKVEATFKPTSVDVKFHDVKGKNYRCAIPKLNKETVPDKCKVVVKPTKVIVTLFKASKGNWLDLHFKEDKFKPSMDKEKDPMSGIMDLMKNMYEDGDEDMKRTIAKAWSDARSGKTTDSLSGLR

SEQ ID NO: 238058 - protein, 109 aa, Zea mays
  Clone ID: MRT4577_148698C.1.pep
ARDPRSWRSSSRVSFCPDFFLAYLCELSQEQKGRGSLQFRCTQASRFNSEALSEASASISARGWVTWEATVEAPPLVTAVGAPATAITSRRRRLPSRRRLRPTATCSRP

SEQ ID NO: 238059 - protein, 72 aa, Zea mays
  Clone ID: MRT4577_148699C.1.pep
QMLRKAHFLVLITKFPDRKASICCILFQRTRQRNRIIAQRTGMYSHTTIQNRWFPNMNFQKFLAVISATLHV

SEQ ID NO: 238060 - protein, 82 aa, Zea mays
  Clone ID: MRT4577_14869C.1.pep
CNRQQLPTLLVAVYVLVVGAAAVCDMSNEQFMSCQPAAAKTTDPTAAPSQACCDALAVADLKCLCGYKNSPWMGVYNIYPKR

SEQ ID NO: 238061 - protein, 162 aa, Zea mays
  unsure (1)..(162): unsure at all Xaa locations
  Clone ID: MRT4577_1486C.1.pep
GEWPAYXLDHLTTDSCDGVGEHHRIQIIVKDHGNRTMRSYDDFNVFHGLISDAAEIHFLWMPIDTVFEAIRFIYXRTSDGRVLRDIKXWPFSXMSDAVEKQCTECSIKGXGELLQQTEEISSMDLIRMQDIDRPYLVSTIINDVLDGPDYISVSERQTSTVA

SEQ ID NO: 238062 - protein, 97 aa, Zea mays
  Clone ID: MRT4577_148700C.1.pep
VRSFGDSFVCVEGEGRHFELMVVHRNHVECFCHLVIIDAVIDLGFSPSTGSSSFAMLANKLGIRNLLKIELMTGRIDILGIQIDLSREILHCLATRC

SEQ ID NO: 238063 - protein, 525 aa, Zea mays
  Clone ID: MRT4577_148701C.1.pep
MARGIILLLLVTPLAISMALPSLSTRIEGSVIGERSNLFSQLHSDNSSPTENKLQPGEKSFASEAYAVNWNEPPDQQSQDSLEQLEPYRVIWKQPVQGEKSFVSEAYPAKWNKPPSPSKQSQDSFEPEAYRVKWNKSPPPHQQSQDSFESEAYRVKWNKSPPPHQQSQDSFEPEAYRVKWNKSPPPHQQSQDSLEQEAYRVKWNKSPPPQQQTQDSFEQEAYRVKWNKSPPPHQQSQDSFEPEAYRVKWNKSPPPHQQSQDSFEPKAYWVGWKKHAQGATDVADETTPARGHGLHVATGMLFTRKSLLPGTALPEGTKFCGHGFLDPERFELRADADAIPFSYSQLDTILRMFRIPRGSKKAEQVAATLRTCEAESPEAHACATSEQAAADFAASSLGVRASKLVALVTTVHGGKDATRYVVAPNGITRIGKAAGAAAVVPCHPMPYPYMVHYCHQPADVEALRVELTGLGDGGVTTAIAMCHANTMNWDDRYFQMLNVTRGEEICHFMPRNYVLWLPAAELLGN

SEQ ID NO: 238064 - protein, 95 aa, Zea mays
  Clone ID: MRT4577_148702C.1.pep
PKHIVRTVPGVTSNDHHAYETSSTAPQTASLSGLSSAQLSMRPPSLPSFHGHSAHGCRICVRSSPPTTGSVSLDSSSAHGPARSRRYGPPAQRGR

SEQ ID NO: 238065 - protein, 183 aa, Zea mays
  unsure (1)..(183): unsure at all Xaa locations
  Clone ID: MRT4577_148703C.1.pep
MGNAGSNGGGPATGHRRRSSGHGHHQQAPPPPQPQETAPNRYVFAAATPYPPQYPNPNPPQYYPQYGNYYPPPPPSVPVPLPAPYXHHHRXPPPPPPPXPGPTHRPTPQPPQTTPGWGRAVSPPTXPASVYAXRPTXEHXXKAVTIRNDINLKKETLRIEPDEXCPGRFLVAFXFDATVAGSM

SEQ ID NO: 238066 - protein, 112 aa, Zea mays
  Clone ID: MRT4577_148704C.1.pep
AMYLVTTGAVLALCSTLMGSILPQPRILMAMARDGLLPSFFSDVHKTTQVPVKSTVVTGICAAALAFFMDVSQLAGMVRIHQTFSVRTYVDFILTSIILVNLIPRDHHSVCM

SEQ ID NO: 238067 - protein, 91 aa, Zea mays
  Clone ID: MRT4577_148705C.1.pep
NFGNFFPPQYVQMPEWKFSKKYKEGFQARTGIFQGPRSPPPKKLPKAGVALVLKKNPPAWFAFGQNFAILSILYYAPLWFKNCLYKFFIKC

SEQ ID NO: 238068 - protein, 127 aa, Zea mays
  Clone ID: MRT4577_148706C.1.pep
HRPRRGAPEGHTHRPKTLFYYSIHRWTGFKRGGGGNPYRGLNPKTSPPPTQRSTSLRELGLFLRGLPFFTFEGEKLLLAGQNPLGGFGGPNHRGAHRLKDVAHYRGVLGGRTFCFCGRSPPGGFDGP

SEQ ID NO: 238069 - protein, 105 aa, Zea mays
  Clone ID: MRT4577_148707C.1.pep
RETVENILRNMVDVRDVADALLLAYEKPEASGRYICSSHAIKVADMINILKTLYPSYPYPKNFVEDDVNSVYSSEKLQKLGWSFKPIEESLRDTVESYKAFGILN

SEQ ID NO: 238070 - protein, 71 aa, Zea mays
  Clone ID: MRT4577_148708C.1.pep
TSLCFINIAQALGISRPWEKDHFTSFFWCLHAFYHGFYFIKSLKAVLITCIKATFNLVLNPRCLLTKSVGP

SEQ ID NO: 238071 - protein, 65 aa, Zea mays
  Clone ID: MRT4577_148709C.1.pep
GFLFPGVGKGPFNKNLTPGVVNLFSKKNQKKILFFFGFLERPPKICFHKGPMEKGFFLKIKPGGW

SEQ ID NO: 238072 - protein, 364 aa, Zea mays
  unsure (1)..(364): unsure at all Xaa locations
  Clone ID: MRT4577_148710C.1.pep
MGSSLSNLTDAACIVHQFKINGYSATKSMARTDSLPSKRLAVGGYEWEVHYTPSLLVDGSYMIAFRLVLLGAPRRNDVKAAFRCRLLYPSTNYGHQRGACVSDSMGNVEGQMSHAFKRAKESSGWIPLRKRNXWEAARVIENDSLTAECTITVVTELPEPDTAKTNAVLPRIRRLTGVHSLHHDLGELLGKGTGSDVVLVVCGESFAAHKAILASRSPVFMAQFFGPMKETHSQSQRVEIMDMEAAVFGAMLRFMYTDVVPELERQENGDVIAQHLLAAADRYGLDKLKSMCEDKLCGGTTVETAATTLALAEQHGCPKLKAWCVEFIAANLDAVMVTEGYKHLMTSSPLVLNDLLRAVRGTKN

SEQ ID NO: 238073 - protein, 319 aa, Zea mays
  Clone ID: MRT4577_148711C.1.pep
MEPVRKSVCVTGAGGFVASELVKLLLSRGQYAVRGTVRDPGASKNAHLKVLEGAEERLQLLKADLMDYNSIASAVAGCEGVFHVASPVLSHRPSNPEVEVIAPAVIGTTNVLKACYEAKVRRVVVVSSCGAVYANPIYPKGKVFDEDCWSDEDYCRKKEDWYLVSKTLSEREALAFAAKTGLDVVTVCPSLVFGPLMQPTVNLSSEMILKYFKDLETVENVLSNMVDIRDVADALLLTYEKPEASGRYICSSHAIKISDMINILKTMYPSYPYPKNFVEDDVNSVYSSEKLQKLGWSFKPIEESLRDTVESYKAFGILN

SEQ ID NO: 238074 - protein, 100 aa, Zea mays
  unsure (1)..(100): unsure at all Xaa locations
  Clone ID: MRT4577_148712C.1.pep
AQRRRAAPADLEXPRVLPVERTGTVHXLFHXEELISGDRGPQPTTRARGDYIIGKEIVDLGLDRIRKLADNCTGLQXGFLCSNAVGGGTGSGLGSILLER

SEQ ID NO: 238075 - protein, 37 aa, Zea mays
  Clone ID: MRT4577_148713C.1.pep
HHNCSGQCEVHTVSVTFVLLSWSSTTVSERSSLHRLR

SEQ ID NO: 238076 - protein, 50 aa, Zea mays
  Clone ID: MRT4577_148714C.1.pep
GYIICVYARIMPVSCCATRRERSDSDIETHRHGLSDGFGTVYMETADHNV

SEQ ID NO: 238077 - protein, 40 aa, Zea mays
  Clone ID: MRT4577_148715C.1.pep
HRLGEGTIPYFSVVANNCCIIIVDVNVEADPVSSGLLGSS

SEQ ID NO: 238078 - protein, 78 aa, Zea mays
  unsure (1)..(78): unsure at all Xaa locations
  Clone ID: MRT4577_148716C.1.pep
ARNSARFFLKHNXKXGFVIEIYLMAXIQPPNTHNHINISITTMLPVFTFIKCKSIFLKSLLRTLTTHTRHLSMTSFSS

SEQ ID NO: 238079 - protein, 58 aa, Zea mays
  Clone ID: MRT4577_148717C.1.pep
RIIENALLKEDWASDQPPGSAPSSELVLIPLLAFLGTLKFVIRLIYVLHLLAVHHPGR

SEQ ID NO: 238080 - protein, 190 aa, Zea mays
  unsure (1)..(190): unsure at all Xaa locations
  Clone ID: MRT4577_148718C.1.pep
ISSFPYRAQIDLHGSLGLFLKQQARYDLRSTTNTKQCVSDHISEDGIRVVNACXKVYCSINXMQPDRARAXDITPRNLTDXAFTTCFKQCGGENNVPRANCHDLKPCGTIEVRTAPYLQILHPEQLINAWYDDAXNXFGRGHYTIGXEIDDQSLDRIQIVDDNCTRLLDSLIDDDFGGGTVSARVSLLLE

SEQ ID NO: 238081 - protein, 63 aa, Zea mays
  Clone ID: MRT4577_148719C.1.pep
APLSVLSGSCYWPHLGTVRDAPRVRRGFPGGPLGVGSSVVRFNEPRILLKETRVQGQFPEEKR

SEQ ID NO: 238082 - protein, 174 aa, Zea mays
  unsure (1)..(174): unsure at all Xaa locations
  Clone ID: MRT4577_14871C.1.pep
MAAATMAITSRALIGKPAAGTRDVFGEGRITMRKTAAKPKPAASGSPWYGADRVLYLGPLSGSPPSYLTGEFPGDYGWDTAGLSADPETFAKNRELEVIHCRWAMLGLADDPEAFAELKVKXIKNGRLAMFSMFGFFVQAIVTGKGPLENLADHIADPVNNNAWAYATNFVPGK

SEQ ID NO: 238083 - protein, 155 aa, Zea mays
  Clone ID: MRT4577_148720C.1.pep
MADDEFESVGSGASTCFPMQCSAIKKNGYAVLKNRPCKVVETSTSKTGKHGHAKVHMVGIDIFTGKKYEEICPSTHNMMVPNVDRRDFQVINIEEGFVSLLKDDGSTKDDLKVPEGELGDKLKEAFDDGKDVVATVLAAMDEECIISWKEASNKS

SEQ ID NO: 238084 - protein, 836 aa, Zea mays
  Clone ID: MRT4577_148721C.1.pep
MKKVVNYETDSLSPSTFGVESTTSKRQERKKYSKMPLRYPRIAKHAPLLFVPLGKPPYFDGEDYCMWSDKMRHHLTSLHESIWDIIEFGAQAPQVGDEDYDSDEAAQIRHFNSQATSILLASLCREELNKVQGLKNAKEIWDVLKMVHEGDKVTKITKRKMIEGELGQFVLNKGEEPQAMYNRLKTMVNQVRNLGSTKWDDHEMVKVILGSLVFCNPTQVQLIRGDPRYKQMSPEEVIGKFVSFELMIKDSKHIINLEQGTTSTPEVQPIAFKATEEKKEESTPSRLPIDASKLENEEMALIIKSFRQIFKQRKGKEYKPRSKRDCYRCGKSGHFIAKCPYTSDSDTDDDKKGKKNKKRYYKKKGGEAHVGQEWDSDESSTDSSSDEDAANVTINKGLLFPNVGHKCLMAKESKKKKDQKKRINELIETINEKDGLLECQEDLLVKENKKFVKLKNIYALEVEKCENLSKELDICNDSISRFRDVNASLNAKIEELNSCNISTSTIEHVTICTRCRDVNVDAMNDHIAMIKEQNDHIAKLNAKIAEHELENENFKFACSMLYNERRPSIKDGIGFQQGSQSNIKLNAPKHKLSNFVKGKAPMVQDREGYILYPMNYPEHKIRKIHARKSHIVSHHAYMYSNEASSSRHSTHIKMPKKKIVNASNEHSISFKTFDAFFVLTNKSGKIVAKYVGGKHKSTKTCVWIPKVYASGGSSWIIDSGCTNHMTGEKMMFSSYEKNDDPQRAITFGDGNQGLEKSQTQETLKRFLRWAQNEFGLRIKKIRSDNGTKFKNSQIEGFLEEEGIKHEFPSPYTPQQNGVVERKKRTLLDMARTMLDE

SEQ ID NO: 238085 - protein, 551 aa, Zea mays
  Clone ID: MRT4577_148722C.1.pep
MITGDKPEASGRKNNERTMSKEVGDKHKGDKKKKKRKKSASSIKSQRKGDKKKKKMKKVVYYETDSSSPSTSSVESTTLKRQERKKYKEEPQAMYNRLKAMVNQVRNLGSTKWDDHEMIKMSPEEIISKFVSFELMIKNSKHIVNLDQCATSTPEVQPVAFKVMEEKKEESTPSRLPIDVSKLDNEEMALIIKGFRQILKQRKGKDYKPCSKRVCYRCGKSGHYIAKCPYTSDSDRDDDKKGKKKMENKRYYKRKGGEAHMGREWDSDESSTNSSSDKDAANIAINKGLLFPNVGHKCLMAKDGKRRSGCTNHMKEEKRMFSSYEKNEDPQRAITFGDGNQGLVKDSLDYNLLSVSQLCKMGYSCLFTDVGVTVFRKNNDSIAFKGVLDGQLYLVDFDDNNVELDTCLIAKTNMGWLWHRRLAHVGMKNLHKLLKGEHILGLTNEKSQTQDTLKRFLRWAQNEFGLRIKKIRSNNGTEFKNSQIEGFLEDEGIKHEFSSPYTPQQNGVVKRKNRTLLDMARTMLDEYKTLDRFWAEAINTACYSINRLYLH

SEQ ID NO: 238086 - protein, 835 aa, Zea mays
  unsure (1)..(835): unsure at all Xaa locations
  Clone ID: MRT4577_148723C.1.pep
MPGEHAKREMVTGDKPEARKNDERTPSKEAGDKHNDESASSIKSHRKGDKKKNKMKKVVYYDTDSSSPFTSFTESTTLKRQERKKYREEPQAMYNRLKTMVNQVRNLRSTKWEDHEMVKILDTNRCPPEEVIGKFVSFDLMIKDSKHIVNLEQGTTSTPEVQPVAFKATEEKKEESTPSRLPIDASKLDDEEMAHQELSANPQAKEGEGLQTVFQEGLLQVCDSDRDEDKKGKKKMGKKRYYKKKGGEAHMGWEWDFDETSTDSSSDEDTTNIAINKGLLFPNIGHKCLMAKDDKKKKVYASSGSSSIIDSGCTNHMTWEKRMFSSYEKNDDPQRAITFGDGNQGLGKIAISPDHFISNVFLEDSSDYNFLSVFNYEKSQTQETLKRFLRRAQNEFGLRIKKIRSDNGTKFKNSQIEGFLDEEGIKHEFSSPYTAQQNGVVTMLDEYKTPDRFWAEAINAAFYSTNRLYLHRILNKTSYELLIGKKPNVSYFRVFGSKCFILINRGRNSKCAPKAVEGFLLGYDSNTRAYRVFNKSTGLVEVSCDIVFDETNGSQVEQVDLDELDDEEASCVALRNMSIGVVCPKESEEPTQAQDQPSSSTQASPPTQYEDKTQEEEGEDQDDEPPQEEDIDQGGDEDDHNKEDDQEIQDQRPPHPRVHQAIQRDHPVNSILGDIHKGVTTRSRVAHFCEHYSFVSSIEPYRIEDALRDPDWVMAMQGELNNFTRNXGTKWVFRKKQDEHGVATRNKAXLSPKVYVEQPLDFEDSEYANYVYKLSKALYGPKQAPRAWYLRARAKSMYDVKSMIVTKVGVAPKLRAGELRLNGGKRNRLKGEKAI

SEQ ID NO: 238087 - protein, 190 aa, Zea mays
  unsure (1)..(190): unsure at all Xaa locations
  Clone ID: MRT4577_148724C.1.pep
MKRCFSLAAALAVVTLAALLSSDAVVACIDVGFYDRTCPSAETLVQQTVAAAFGNDSGVAPAIIRLHFHDCFVKGCDGSVLIDSTPGNKAEKDSAPNFPSLRFFDVVDRAKAAVEARCPGVVSCADVLAFAARDSVVLSGGLGYQVPAGRRDGRVSTEANALNNLPXPTSTASDLVAGFAAKNLTVEDIV

SEQ ID NO: 238088 - protein, 62 aa, Zea mays
  unsure (1)..(62): unsure at all Xaa locations
  Clone ID: MRT4577_148725C.1.pep
MHPVISRGTNCSSAVIVGFVVCEVNQGSLVMWIVLLTSNYXLMSIVSCGYFSIESNIYEAFA

SEQ ID NO: 238089 - protein, 536 aa, Zea mays
  unsure (1)..(536): unsure at all Xaa locations
  Clone ID: MRT4577_148726C.1.pep
MSIRDVCPKESEESPQAQDQPSTSIQASPPTQDEELAQEEEDEDQDNESPQEEDIDQGGDEEDQDKEDDQEIQNQRPPHPRVHQAIQRDHPXLGDIHKGXIEDALRDPDWVMAMQEELSNFTRNEVWHLVPRPDQNVVVAXVWSFRRHSSXTVDLLAFVSAGVGSSNGREKDMVLYSHRHKLVHSWLIVFDENYIILLYQMDVKSAFLNGPIKEEVYVEQPPIFEDIGKVDPTLFTKTIAKDLFICQIYVDDIIFGSTNNSSCEEFSRIMIQKFEMSMMGELKYFLGFQIKQLQEGTFISQTKYIQDILKKFGMKNAKPIKTPMGTNGHLDLDTGGKFIDQKVYRSMIGFLLYLCASQPDIMLSVCMCERFETNPKEVHHRAVKRIMRYLVYTPKFGLWYPKGSTFDLIGYSDADYAGCKIDRKSTSETCQFLVRSLVSWALKKQISVALSTAEAEYIVAGHCCAQLLGMRQTLRDYGYKLSKVPLLCVNGSAICMADNPVEHSRTKHIDIRYHFLRDHQQXGDIKIAYVSTHNQL

SEQ ID NO: 238090 - protein, 253 aa, Zea mays
  Clone ID: MRT4577_148727C.1.pep
MSGAHRTVSGAPEESDSELASFGFPLRYNSPDMSGAHRTVRSTNKSSCEEFCRIMIYKFKMFMMGELKYFLGFQMKQLQEGTFISQTKYIQDILKKFRMNNAKLIKTPMGTNGPLDLDTGGKSIDQKANPKEVHLRAVKRIMRYLVYTPKFGLCYPKMRQTLRDNGYKLSKVSLLCDNESAIRMADNPIEHNRTKHIDIQYHFLRNHQQNGDIKIAYVSTHNQLADIFTKPLDEKTFNKLRNELNILDSWNFD

SEQ ID NO: 238091 - protein, 562 aa, Zea mays
  unsure (1)..(562): unsure at all Xaa locations
  Clone ID: MRT4577_148728C.1.pep
MARGPFSLQRGRNSKFAPKAVEGFLLGYDSNTRVYRVFNKSTGLVEVSCDIMFDETNGSQVEQVDLDELDDEEALCIALRNMSIGDVCPKESKESPQTQDQPSSSMQASPPTQGEELAQEEEDEDQDHEPPQEEDIDQXGDEDNKEKEDGQEIRDQRPPHPRVHQAIQRDHPVNSILXPYRIEDALRDPDWVVAMKEELNNFTRNEVWHLVPCPNQNVVGIKWVFRNKQDEHGVVTRNKARLVAKGYSQVEGLDFDETYALIARLESIHILLSYATLHGFKLYQMDLKSAFLNGPIKEEVYIEQPLGFENSEYPNHVYKLSKALYGLKQALRAWYKCLRDFLITNGFKVGKDDPTLFTKTIAKDLFICQIYVDDIIFGSTNKPTCEEFSRIMVQKFEMSMMGELKYFLGFQIKQLQEGTFISQTKYIQDIHKKFGMKNAKPIKTPMGTNGHLDLDTGGHCCAQLLWMGQTLRDYGYKLSKVPLLCDNESAIRMADNLVEHNRTKHTDIRYHFLRDHQQKGDIKIAYVSTHNQLADIFTKPLDEKTFSKLRNELNILDSRKFD

SEQ ID NO: 238092 - protein, 135 aa, Zea mays
  Clone ID: MRT4577_148729C.1.pep
CFLVSALLPSQPGEKIVQYPIRPVDTTTDFEGTTSLQPTQPPSGNAPPGGQSVARPMPRQMPQQPMVGGIPRVAGGVTMAAFNAASQAGMAGLNPGNMPMQRGAGGQSHPHQLRRKADQGMGMQNPGYPQQKRRF

SEQ ID NO: 238093 - protein, 56 aa, Zea mays
  Clone ID: MRT4577_14872C.1.pep
KHERWNHVLPSARGGIGAPTRTPTILNVGLTWRPPIGSASSWAPGYDDHCSLSSSR

SEQ ID NO: 238094 - protein, 364 aa, Zea mays
  unsure (1)..(364): unsure at all Xaa locations
  Clone ID: MRT4577_148730C.1.pep
MNYRTVDGTNLFKDKEDDQEIQDQRPPHPRVHQAIQRDHPVNSILGDIHKGVTTRSQVAHFCEHYPFVSSIEPYRVEDALRARDWVVAMQEELNNFTRNXGTKWMFRNKQDGHGVVSRNKARLIXAKGYSQVKGLDFDETYAQLYQMDVKSAFLNGPIKEEVYVEQPPGFEDSEYPSHVYKLSKALYGLKQAPRAWIWYPKGSTIDLIGYSDADYAGCKIDRKSTSRTCQFLGRSLVPWASKKQNSVALSTAEAEYIAAGYCCAQLLWMRQTLRDYGYKLSKVTLLCDNESVIRMADNPVEHSRTKHIDIRYHFLRDHQQKGVIEIAYVSTHNQLDDIFTKPLDEKTFSKLRNELNILDSRNFD

SEQ ID NO: 238095 - protein, 416 aa, Zea mays
  Clone ID: MRT4577_148731C.1.pep
MPDVQPLVSDFVLKLKRRKVEGSHAVARQTAELLRSVVSQHRMGSSANQAAALADAVRAVGEQLISANPIELAVGNIVRRVLHIIKEEDISSTAVGIEGLSVTVDSDDEYDSEHDDRPALSAAVLAAHARNALRAPSLQTLLEDIPVSPAISGTASSTGDSDGKSKSAGDKSSTRKLKHDVIAAIGDLIDEIDSCYEPISEQAVELIHQNEVILTLGRSRTVKEFLYAAKEKKRSFRVFVAEGAPRYQGHVLAKELVEKGVQTTVITDSAVFAMISRVNMVIIGAHAIMANGGVIAPVGMNMVALAAQRHAVPFVVVAGSHKLCPLYPHNPQVLLNELKSPSDLLDFGEFSDCMNFSTQDGSPLLNVANPTFDYVPPKLVSLFITDTGGHSPSYMYRLIAEYYSADDLVVRRKATS

SEQ ID NO: 238096 - protein, 357 aa, Zea mays
  unsure (1)..(357): unsure at all Xaa locations
  Clone ID: MRT4577_148732C.1.pep
MGKGHAQGRGKGREGERRGEGKLTFGSDDRRLPSTGSHLGQRRWKRGRYKIYVEQPLGFEDSEYPNHVYKLSKALYGLKQAPRAWYESLRDFLITNGFKVGKTDPTLFTKIIAKDLFICQIYVDDIIFVSTNKSTCEEFSRIMIQKFEMSMMGELKYFLGFQFGMKNAKPIKTPMGTDGHLDLETGGKSVDQKANPNEVHLRAVKRIMRYLFYTPKFGLWYPKVSTFDLIGYSDAVYAGCKIDRKSTSRTCQFLGRSLVSWASKKQNSVALSTAEAEYIAVGHCCAQLLWMRQTLRDYGYKLSKVPLLCDNESAIRMADNPVEHSRTKHIDIRYHFLRDHQQXGDIEIAYVSTHNQL

SEQ ID NO: 238097 - protein, 183 aa, Zea mays
  Clone ID: MRT4577_148733C.1.pep
MKHLHLSSSLPLLLHRPSKPHLLHHSRRRASIRNAASGGGSGEPTPAAETASGTSPPAAAKPAGVKDRLKARNQARRVRLDSPPPEVVVVPKKKPAPAASSSPAPKKKVGRKGWEEMSLGEKAVDLYVGEKGLLFWLNKFAYASIFIMVGAWVLFRFVGPSLGLYQLDAPPLPPTAVFSGGSP

SEQ ID NO: 238098 - protein, 90 aa, Zea mays
  unsure (1)..(90): unsure at all Xaa locations
  Clone ID: MRT4577_148734C.1.pep
RAFFSLSHISISFKGSSXTDPIYIPLMVIXQSILGSWHKSIRVGNCSGSSLAPRFMNAHSAESLMCPNTNYQDTPIFCINTIVTADTLQD

SEQ ID NO: 238099 - protein, 417 aa, Zea mays
  Clone ID: MRT4577_148735C.1.pep
MGYNYLFTDVGVTVFRRSDGLVAFKGVLDGQLYLVDFNNNNAELDTCLIAKTNMGWLWHRRLAHVGMKNLHKLLKGEHILGLNVHFEKDRICNACQAGKQVGVHHPHKNIMTTDMPLELLHMDLFGSIAYISISGSKYCLVIVDDYSCFTWVFFLQEKSQTQETLKRFLRWAQNEFGLRIKKIRSDNGTEFKNSQIEGFLEEGIKHEFSSPYTPQQSSVVERKNRTLLDMARTMLDEYKTPDRFWAEAINTACYSINSLYLHRILKKTSYELLTGKKPNVSYFRVFRSKCFILIKRGINSKFAPKALEGFLLGYDSNTRAYIVFNKSTGLVEVSYDIVFDETNGSQVEQVDLDELDDEEAPCVALRNMSIGDVCLKESEDPPQTQDQPPSSNQASPPTQDEDKAQEEEDEDQDDEPP

SEQ ID NO: 238100 - protein, 391 aa, Zea mays
  Clone ID: MRT4577_148736C.1.pep
MEPRVRPGGPWVRGHERLHSPSIHLPPHPATALLFSPAEPDWNLPERGYKGTRIEETNPFHSIPHKARHKRTKPMASDGSGVVTVYGSNGAELLEPSKQPKSATFSVKVGLAQMLRGGVIMDVVTPEQARLAEEAGACAVMALERVPADIRAQGGVARMSDPGLIRDIKRAVTIPVMAKARIGHFVEAQILEALGVDYVDESEVLTPADDAHHINKHNFRVPFVCGCRDLGEALRRVREGAAMIRTKGEAGTGNVVEAVRHVRSVMGDVRALRSMDDDEVFAYAKRIAAPYDLVMQTKQLGRLPVVQFAAGGVATPADAALMMQLGCDGVFVGSGIFKSGDPARRARAIVQAVTHYSDPTILADVSTGLGEAMVGINLNDPKVERYAARSE

SEQ ID NO: 238101 - protein, 365 aa, Zea mays
  unsure (1)..(365): unsure at all Xaa locations
  Clone ID: MRT4577_148737C.1.pep
MATGPEHVAAAVEETPEKKAASTTELPAPSGWTKKVAPTRGGRFEVIFVSPTGEEVKSKRQLTQYLKAHPGGPASSEFDWGTSDTPRRSARLSEKVKATESPEGEKTPKRGRSSSKRGKKEEKEDTEAANEAGEDGASEEGKGTDVEMKDAENAEDEKKEVPNADAAEKTEEGEDKKEEAPAVDAAEKTEEGEDKREEEAPAVDAAEKTGEKEVAPAVDATEETEKSTEGQAQPNYVAAPESEYKGDXGKPGESEAAPLAFVDETAPHVIIGEEKKEENTENENSQAAESAVPSLASLEGEKKENGGAPEQPALPVAETKADAPPAEAEKGAENSGQPNTGSQEPKAANCDEGQIQPGASAVRCT

SEQ ID NO: 238102 - protein, 258 aa, Zea mays
  Clone ID: MRT4577_148738C.1.pep
MRGMPINGSFRKDNSTESFDLECQEKHLDIVPTSSSPERKFSFSSCSSNGLLLSKESSKQQTSIHNLDKCNGGHLHVSDETFSEAAPKTHKSAEDHDDRSKPPLIRGRFRVIPGHVDSKAQPPGLQKCHSMQTISRLPSLSIPSSAEVASTIIGGSFYMQLYSILQTNMLQRDQILNAMKQVSGCAMASPGVPSMASPCIPSTSRSTSPSGVPSVDRSMLEAAQEREKELLNEVLELQWRLLCTQDEVQKLKANAAQI

SEQ ID NO: 238103 - protein, 692 aa, Zea mays
  unsure (1)..(692): unsure at all Xaa locations
  Clone ID: MRT4577_148739C.1.pep
MESLAATSVFAPSRVAVPAARALVRAGTVVPTRRTSSRSGTSGVKCSAAVTPQASPVISRSAAAAKAAEEDKRRFFEAAARGSGKGNLVPMWECIVSDHLTPVLAYRCLVPEDNVDAPSFLFESVEQGPQGTTNVGRYSMVGAHPVMEIVAKDHKVTIMDHEKSQVTEQVVDDPMQIPRTMMEGWHPQQIDELPESFSGGWVGFFSYDTVRYVEKKKLPFSSAPQDDRNLPDVHLGLYDDVLVFDNVEKXIQEFLFSFVTNSXVLCVSEYCPTVAVMIKYXTLPWSTNFLEAEXIASSLIXKLTILILKIMHVVCQCFILFFFHIYNRQKLHRLVHXKVYVIHWVNVDRHASVEEAYQDGRSRLNMLLSKVHNSNVPTLSPGFVKLHTRKFGTPLNKSTMTSDEYKNAVLQAKEHIMAGDIFQIVLSQRFERRTYANPFEVYRALRIVNPSPYMAYVQARGCVLVASSPEILTRVSKGKIINRPLAGTVRRGKTEKEDQMQEQQLLSDEKQCAEHIMLVDLGRNDVGKVSKPGSVKVEKLMNIERYSHVMHISSTVSGQLDDHLQSWDALRAALPVGTVSGAPKVKAMELIDKLEVTRRGPYSGGLGGISFDGDMQIALSLRTIVFSTAPSHNTMYSYKDADRRREWVAHLQAGAGIVADSSPDDEQRECENKAAALARAIDLAESAFVDKE

SEQ ID NO: 238104 - protein, 645 aa, Zea mays
  Clone ID: MRT4577_14873C.1.pep
MATASAASSFLVPATAIAPTPSACPSTVPKNKKNAAGRRRRTLQCRASGRRGDDEDSRLLWLPRREVLTGLGGVAASFVGYPDLASIALEANPVESCRRGEKVTEKLVECSDPNRDFPCPPASRVPIVDFTPEARVTRVRRPAHLLDPEYQEKYREAVGKMRALDGSNPLSFAAQAAVHQSYCDGHYRLDPTEKNRPFDVHFSWIFAPWHRMYIYFYERALGQLIGDDTFALPYWNWDAPAGMGIPAIFKQGVSTADNPLYDPYRNMENMDALLDLDYLKKPRRDTIPFEPPTDPAARAKYDDAVQTNLCTIYLQQVRDGKGPRAFLGEKLCSESSFRVKEINERSKRRQADGQSSKVSPSKSQSQGTLERMAHTTVHVWTGRANPATCSAEQGGVVGHDGKPHCQVDMGFLGTAGRDPLFYSHHANVDRMWHIWSTRLGGKGFDDPEWLDTSFVFYDDYRSPRLVRMKFRDVLDATRLGYTYDKESEAALPWLNSKPTRFSGGGKAKAKAAPKVASEFPLTLTDEAVDVPAVAVPARQAGKDLVLLIEGIEYDPQINNKFDVVINVAREDAARVGPKDSEYAGSFSAVPSSNAAGGTLVGKFTLALDGVLADLGLAGASAVDIVLVPHTEGEIKLYLPPTIENA

SEQ ID NO: 238105 - protein, 416 aa, Zea mays
  Clone ID: MRT4577_148740C.1.pep
MPDVQPLVSDFVLKLKRRKVEGSHAVARQTAELLRSVVSQHRMGSSANQAATLADAVRAVGEQLIAANPIELAVGNIVRRVLHIIKEEDISSTAVGIEGLSVTVDSDDEYDSEHDDRPALSAAVLAAHARNALRAPSLQTLLEDIPVSPAISRTASSTGDSDGKSKSAGDKSSTRKLKHDVIAAIGDLIDEIDSCYEPISEQAVELIHQNEVILTLGRSRTVKEFLYAAKEKKRSFRVFVAEGAPRYQGHVLAKELVEKGVQTTVITDSAVFAMISRVNMVIIGAHAIMANGGVIAPVGMNMVALAAQRHAVPFVVVAGSHKLCPLYPHNPEVLLNELKSPSDLLDFGEFSDCMNFSTQDGSPLLNVVNPTFDYVPPKLVSLFITDTGGHSPSYMYRLIAEYYSADDLVVRRKATS

SEQ ID NO: 238106 - protein, 165 aa, Zea mays
  Clone ID: MRT4577_148741C.1.pep
MAEETVQELRASFASGRTRRAEWRAEQLKGLIRMIDEKEAEISAALHEDLAKPHMESYLHEISITRSSCKFALDGLKSWMKPEKIPAALTTFPSSAQIVPEPLGVVLIISAWNYPFILSIDPVIGAIAAGNAVVLKPSEIAPATSSLLAKLLPEYVDNSCIKVVE

SEQ ID NO: 238107 - protein, 39 aa, Zea mays
  Clone ID: MRT4577_148742C.1.pep
FLVSFSWSSVLGLALRGGLAGGVPTVLGEEAAVGRVRKP

SEQ ID NO: 238108 - protein, 81 aa, Zea mays
  Clone ID: MRT4577_148743C.1.pep
SPGPGPRAPGREKKRFPRVAPLPTGCLPPRSARCLSTPRGGCPGAPPTPNRWCKSWNKKLRILRAVKKKLSSFLRYCCDDL

SEQ ID NO: 238109 - protein, 370 aa, Zea mays
  Clone ID: MRT4577_148744C.1.pep
MAPVEAEQHRRRALALAAHDASGAVSPIRISRRDTGDDDVAIQILYCGICHSDLHTIKNEWKNANYPVVPGHEIVGLITEVGKNVKRFNVGDKVGVGCMVNTCQSCESCEGGHENYCSKIIFTYNSHDRDGTVTYGGYSDMVVVNERFVIRFPDGMPLDRGAPLLCAGITVYNPMKHHGLNEAGKHIGVVGLGGLGHVAVKFAKAFGMRVTVISTSPGKREEAMETLGADAFVVSGDANQMKAAKGTMDGIMNTASASMSMYAYLALLKPQGKMILLGLPEKPLQISAFSLVTGGKTLAGSCMGSIRDTQEMMDFAAKHGLAADIELIGTEEVNEAMERLAKGEVRYRFVIDIGNTLNAASLGSSPVPAL

SEQ ID NO: 238110 - protein, 509 aa, Zea mays
  Clone ID: MRT4577_148745C.1.pep
MRSASARIATAAVHLVTAAAILLMLARGGEAVSLWLPPPTAGGGGFLGGADRYLTREEHWMNQTLDHFNPTDHRQFKQRYYEFLDYYRAPNGPIFLYICGESTCNGIGNNYLAVVAKKFGAALVSPEHRYYGKSSPFNSLTTENLQFLSSKQALFDLAVFRQYYQETLNAKYNRSGADSSWFVFGGSYAGALSAWFRLKFPHLTCGSLASSGVVLAVYNFTDFDKQIGISAGPECKAALQEITGLVDGQLQSGRNSVKELFGATKLENDGDFLYLLADAAAIAFQYGNPDVLCSPLAEAKKNGTDLVETFASYVKDYYIGKFGASVASYDQQYLKNTTPAESSYRLWWYQVCSEVAYFQVAPKNDSVRSPKIDTRYHLDLCRNVFGEGVYPDVFMTNLYYGGTGIAGSKIVFANGSQDPWRHASKQKSSDELPSYLIECKNCGHCSDLSGCPQAPSNIEGDSSKCSPPEALNKVRKEIVDHIDLWLSECQEQGHDKEPWLGSRWSIAAI

SEQ ID NO: 238111 - protein, 122 aa, Zea mays
  Clone ID: MRT4577_148746C.1.pep
MASDEGDVIPGHRKGEFDPHMTKGQEAGKLVGIDFTAGWSGPWRAILPLFLRHGKKFTQGEVLKGDVDQVKEVTGAYEDEAMATFHFIKNGKTVATIVGATKDELLVQIEKDGAPAAASASG

SEQ ID NO: 238112 - protein, 98 aa, Zea mays
  Clone ID: MRT4577_148747C.1.pep
MKAILAIALCLIFVAAASAHVTVVGARGPGINSPGYIKSNSMDPCGNGTYDMTKAINVTANDIFPVTWALFVNHNIPPAVAGSINFYWGLEGNARIDP

SEQ ID NO: 238113 - protein, 119 aa, Zea mays
  Clone ID: MRT4577_148748C.1.pep
RSWRKSCRAPARGPPPGSRRRTCTSSSTPSSSPSPRRPASSRAAAPADVRQPRRMRPPRTPTPTPSEEKERARRWSSSRMGSSRRLRRCRCLQRCPLWQPMPRGLLLSSRSQWWWRPTL

SEQ ID NO: 238114 - protein, 95 aa, Zea mays
  unsure (1)..(95): unsure at all Xaa locations
  Clone ID: MRT4577_148749C.1.pep
MGGSLPHTATGSPDHVNGGSAGSLCSDEQFCFFELHPVRPVVAPSFSDLPQTLASSLKVLATPVVWIGLDGAPSLYLPSLSLDGLARDIPXAPYI

SEQ ID NO: 238115 - protein, 158 aa, Zea mays
  Clone ID: MRT4577_14874C.1.pep
MAASTMEISSTAMAGTPISVGSFGDGRITMRKTVGKPNVAVSGSRWYGPDRVKYLGPFSGEPPSYLTGDFPGDYGWDTARLSADLETFGKNRELDVIHSRCAMHGALGCVLRELLSRNGFFVQAIVTGKGPLENLADHIADPVNNNAWAYATNFVPGN

SEQ ID NO: 238116 - protein, 239 aa, Zea mays
  unsure (1)..(239): unsure at all Xaa locations
  Clone ID: MRT4577_148750C.1.pep
MELPWGMLLPLLLVLSISSPSSSSAAATLAVTAPPPLPVPPPRHAQDAEGMLINGNFETAPRRLNKTLIVGRHSLPGWTVQGHVEXGMFFAVPHGVHALRLGSRASASQNVTVRPGALYALTFAATRTCAQDEALRVAVAPSISAPADVAVRTLYSGASADTWAWGFRASSPVAQVTFANPGVQEEPACRPLLDAVAIKELPAPYPTKDNLIPRSPTASRSAAPCWTRSRLCLSRRSEM

SEQ ID NO: 238117 - protein, 44 aa, Zea mays
  Clone ID: MRT4577_148751C.1.pep
PTHACGLTHISRRTFVFTDTPMIMGGYFRSNLIHKGRRTIGFHR

SEQ ID NO: 238118 - protein, 152 aa, Zea mays
  unsure (1)..(152): unsure at all Xaa locations
  Clone ID: MRT4577_148752C.1.pep
HWVPRGRPGPFWLRSSVIESLKAVRFIDAAHFSVPAGQYAVELVAGRESAIAXQVIRTVPNRAYNLSFAVGDARNGCHGSMLVEAFAGNVTQKVPFDSAGKGGFKTAAFRFVAGGVRTRLTFYSSYYHTKVTDGVSLCGPVLDQVKVVPVKA

SEQ ID NO: 238119 - protein, 390 aa, Zea mays
  Clone ID: MRT4577_148753C.1.pep
MELPWGMLLPLLLVLSVSSSSSSSAAATLAVSAPPPLPVPPPRHAQDAEGMLINGNFETAPRRLNKTLIVGRHSLPGWTVQGHVEYVSGGPQPGGMFFAVPHGVHALRLGSRASASQNVTVRPGALYALTFAATRTCAQDEALRVAVAPSLSAPADVAVRTLYSGASADTWAWGFRASSPVAQVTFANPGVQEDPACGPLLDAVAIKELPAPYPTKDNLIKNDGFEIGPQVLRNSTVGVLLPPKQKDATSPLPGWIIESLKAVRFIDAAHFSVPAGQYAVELVAGRESAIAQVIRTVPNRAYNLSFAVGDARNGCHGSMLVEAFAGNVTQKVPFDSAGKGGFKTAAFRFVAGGVRTRLTFYSSYYHTKVTDGVSLCGPVLDQVKVVPVKA

SEQ ID NO: 238120 - protein, 152 aa, Zea mays
  unsure (1)..(152): unsure at all Xaa locations
  Clone ID: MRT4577_148754C.1.pep
FPFSYPSPPVCPQSPPRPSVLQRPRPRSTPWCRDASKTNDAQKKAAAAANTRDQASPASSPPSSAAAAAXDTVPNGVMPFKLSHRTCTGVLASHPLSRDIHIEPLSLTFLVFDLTADSDLELTYGRYTPQYIMLPFTYELACSCTMPLVTFI

SEQ ID NO: 238121 - protein, 66 aa, Zea mays
  Clone ID: MRT4577_148755C.1.pep
SGRRSRRCSRRPWAACLCRRPSSSYWSCIPRVPCSSRVTGWSAWDLTARRAVAPCPRGRWRAESPC

SEQ ID NO: 238122 - protein, 110 aa, Zea mays
  Clone ID: MRT4577_148756C.1.pep
PPTSPCVLVSCHGCEQPELIWSPPRRRGVDGDDSIRRLRRAMHRARARARQGNRFAWAAGVPRAHGQTRAVVGSRTRTSSWERMCPCLPPRGPSLQRCAAHVHGDDHSMS

SEQ ID NO: 238123 - protein, 126 aa, Zea mays
  unsure (1)..(126): unsure at all Xaa locations
  Clone ID: MRT4577_148757C.1.pep
TRXXSLXHILNFSFFPEILHPQQDYFLKRHMSLLFPFHLINHISQSLYFIHHFFYSTSSFFFISLLILYFLIFFLLSSLSFIIFHILHFFTLLIIFFFIIFSPFSLLILPSINNFTFTFLPLLYSL

SEQ ID NO: 238124 - protein, 60 aa, Zea mays
  Clone ID: MRT4577_148758C.1.pep
RIDPKFDLMYAKRAFVHWYVGEGMEKGEFSEAKEDLAALEKDYEEVGIETAEGEGEEEGY

SEQ ID NO: 238125 - protein, 224 aa, Zea mays
  Clone ID: MRT4577_148759C.1.pep
MGYSKTPAVCLFAMLFLAPSVLATDPDPLQDFCVADLDGKAVSVNGHTCKPMSEAGDDFLFSSKLAKAGNTSTPNGSAVTELDVAEWPGTNTLGVSMNRVDFAPGGTNPPHIHPRATEIGIVMKGELLVGILGSLDSGNKLYSRVVRAGETFLIPRGLMHFQFNVGKTEASMVVSFNSQNPGIVFVPLTLFGSNPPIPTPVLTKALRVEARVVELLKSRFPDGF

SEQ ID NO: 238126 - protein, 176 aa, Zea mays
  unsure (1)..(176): unsure at all Xaa locations
  Clone ID: MRT4577_14875C.1.pep
MTTARQWWRRAAAAVKDRRSLYLTRVVALRPWPVSGVATPALRSPKLEAAVIRATSHDERSVDHGSAARVFALARASPPSLQPLMWALARRARRTRCWAVALKALMLAHGLLXCGPTLRHARRALGRVPFDLADFRDRSSPPSKSSGFSAFVRAYFXFLDTRSLXTAHELDAFNSR

SEQ ID NO: 238127 - protein, 80 aa, Zea mays
  Clone ID: MRT4577_148760C.1.pep
STRTWTPKSLLWTSCTSSAQGLLKGTYGIKRSVIVSPCMKYSHRVTACLTRLICTLLGTDRPISGVTFQMYEADTVLNED

SEQ ID NO: 238128 - protein, 104 aa, Zea mays
  Clone ID: MRT4577_148761C.1.pep
DCAHFSFCGLQAEQDSDGSAQSTADMTAFVSTNYYCAVLHLAVLIVECRLDHICCVEPTVHLWLMVYPCSLFSGAKPSYADGKFLALFGDSLVSCACPHFDYIF

SEQ ID NO: 238129 - protein, 82 aa, Zea mays
  Clone ID: MRT4577_148762C.1.pep
CCQDPTRGWRQIYKGGKVGPNRRSPCTKTGGLTGFNCQCGNLYCALHRYCDKHDCKFYYRTADTDAIAKANPVVNADTLYKI

SEQ ID NO: 238130 - protein, 55 aa, Zea mays
  Clone ID: MRT4577_148763C.1.pep
YILLNWNNFVIIEHLYFFCQGVFWVCFYHVVKGPVNNCSIRMVFNLILHYVFLMP

SEQ ID NO: 238131 - protein, 56 aa, Zea mays
  Clone ID: MRT4577_148764C.1.pep
AYVSRSLEQKQRLTARTFNTEYRGQNRSWKGSFSRRHEKTVTHFFPMTRKKSWHKW

SEQ ID NO: 238132 - protein, 75 aa, Zea mays
  Clone ID: MRT4577_148765C.1.pep
PRGRPGSSCRQPHHLLRLVAFALSLTDLDFFYTLSYQSRKRPSRIPLVRHRRTPPRRSPHHGRLRHRHLRTRLNS

SEQ ID NO: 238133 - protein, 71 aa, Zea mays
  unsure (1)..(71): unsure at all Xaa locations
  Clone ID: MRT4577_148766C.1.pep
MSEYHCFKGXLAWSTDKHSLHNAFKTYSEGLEFKIILDRXTHRYSGLGLXTLYTEEAMQNAIEGMNGKELD

SEQ ID NO: 238134 - protein, 79 aa, Zea mays
  Clone ID: MRT4577_148767C.1.pep
GGDDALLSDFCATLLGVSGALGAQQVFASAEDPLQAAAHVLEAGEHPPGPLGTRGAMHEVARILLGEGPTNQKGYTLAA

SEQ ID NO: 238135 - protein, 131 aa, Zea mays
  Clone ID: MRT4577_148768C.1.pep
PRGRPPAAQTDTSGGPPGGPAQAGETRSWHRVRRRPPQRLRRRRAAPRGGSLAPLGTPNSGAVAATATAVQVATMEEARQRWWWGGGGAAPGQQLGGPVRIQLGSAGNVLCVPLGCILVPPKGSPIIYAKP

SEQ ID NO: 238136 - protein, 105 aa, Zea mays
  Clone ID: MRT4577_148769C.1.pep
TPYPPPGGGPPKKNNGRGKTPGQANKWGLLGRSFGKKWGGAPPGGQGRWDQYPERTPPPKKKKNGSKKKKKKKKKKKKKKKKKKKKKKKKIKKNKKKKKKKKKAC

SEQ ID NO: 238137 - protein, 163 aa, Zea mays
  Clone ID: MRT4577_14876C.1.pep
MAAATMAITSRALVGKPAAGTRDVFGEGRITMRKTAAKPKPAASGSPWYGADRVLYLGPLSGSPPSYLTGEFPGDYGWDTAGLSADPETFAKNRELEVIHCRWAMLGALGCVFPELLAMFSMFGFFVQAIVTGKGPLENLADHIADPVNNNAWAYATNFVPGK

SEQ ID NO: 238138 - protein, 238 aa, Zea mays
  unsure (1)..(238): unsure at all Xaa locations
  Clone ID: MRT4577_148770C.1.pep
PAGKMVGLSXRGHWVYAIAGVVLGMVIVNESITVGAETGERLRSLILKYIREKSLIGHKYDWEHWRVNTRAKQSVLLSVMIILMSFFWILSIVLTVVKMHSLADGAVLWMGCSVAPPGVWLRWYLARLNGQGIGKQRSLKWLPTGTLVANVLAAGIMAVLAVTSKAVDTKRSTTILSGIQLGFLGCLSTVSTFAAEVYTMRRSGQIARAFVYAASTFLLSFLLGTLVYSVPVWEKHYK

SEQ ID NO: 238139 - protein, 208 aa, Zea mays
  Clone ID: MRT4577_148771C.1.pep
ASSAAPAEHKHHQQSLVSWQPPTVSATTDYIGFAQPRKGGGHAVAHAFASPAPHLGNIASIAMAPAQHYHHLASGAVTVASGGGEPHADMTHFSFLQDHFMPVHAMPASAPAGEYNLNFSMSSGLLGVNSRGTLQSNSQPHISGHHHHHQQLQRLSTPLDAPNIPFMFSSAAAAAAAATTPTTAEGQFAAFQLWNGFQHADMKEKGKN

SEQ ID NO: 238140 - protein, 351 aa, Zea mays
  Clone ID: MRT4577_148773C.1.pep
MEVEVQRAAVSSWNELDYEAEARLVAEARASWDRKARGEEEDEEDHDPEMTLDYYAYQAKKFRNTWNILYFGYFGRFEDTTRTPPMRFTEKPPDSPAYPRTTLQVFSIKVAGIEGGLQWPLHVFGKVALRDAVDHNRNMVFDRTRDNCQILTKEVPNLKLTGPSRAVLLVDPVTIEADLKVKGRTESEDKHLSFLAVPFLISIPLESCLRTRDFTSKLSTLRFGLAIVVLSVEATISVRVRGGSWPDGLRAQFAAHTVSIGREEVVLLDSGDDKLPVSDDGTITLGRRVASVEVSGELNVSVKAWQGGEVFTHRERGFKPKEAGWSYGTLDVGFCQMDVSVAWSLLSSYGV

SEQ ID NO: 238141 - protein, 454 aa, Zea mays
  Clone ID: MRT4577_148774C.1.pep
MAMEEEQTPPELRYLSGLGNTFTSEAVPGSLPVGQNNPLVCPLGLYAEQLSGTSFTTPRARNLRTWLYRIKPSVTHEPFYPRNPTNERLVGEFDRTTTVATPTQLRWRPADVPLHPGLDFIDGLYTVCGAGSSCLRHGYAIHMYAANKPMDGCSLCNADGDFLIVPQQGRLFITTECGRLLVSPGEIVVIPQGLRFAVDLPDGPSRGYVSEIFGAHFQLPDLGPIGANGLASPRDFLSPTAWFEQEHHPGYTIVHKYGGELFSATQDFSPFNVVAWHGNYVPYKYDLSKFCPFNTVLLDHGDPSVNTVLTAPTDKPGVALLDFVIFPPRWLVAENTFRPPYYHRNCMSEFMGLIYGMYEAKADGFLPGGASLHSCMTPHGPDTKTYEATISRAAANEPSRLSGTLAFMFESWLIPRVCPWALDSPCRDLDYYQCWIGLKSHFSPPAAAVDDENE

SEQ ID NO: 238142 - protein, 144 aa, Zea mays
  Clone ID: MRT4577_148775C.1.pep
PRVRLQCVRWWEYRLEPLIRRLTRATRPDMGCSVGYRDKQGYVGYRGRVKSRGGNRAVAYGMAYGKPMHQGMTQMKFQRNNRDGAEERAGRKLGGLRDCNYYCGNEDSSYKIFEIILEDVVHKAMKTNRMINCVCNPGQKHREL

SEQ ID NO: 238143 - protein, 76 aa, Zea mays
  Clone ID: MRT4577_148776C.1.pep
QHPPSDHLLQKHHVLAPVDVAPCTMPLLYSTALVSDLSPTKPMPDPTDSYNNVTAIIHPYPNVINRNSASLRSDST

SEQ ID NO: 238144 - protein, 320 aa, Zea mays
  Clone ID: MRT4577_148777C.1.pep
MEPVRKSVCVTGAGGFVASELVKLLLSRGQYAVRGTVRDPGASKNAHLKVLEGAEERLQLLKADLMDYNSIASAVAGCEGVFHVASPVLSHRPSNPEVEVIAPAVIGTTNVLKACYEAKVRRVVVVSSCGAVYANPIYPKGKVFDEDCWSDEDYCRKKEDWYLVSKTLSEREALAFAAKTGLDVVTVCPSLVFGPLMQPTVNLSSEMILKYFTGDRETVENILRNMVDVRDVADALLLAYEKPEASGRYICSSHAIKVADMINILKTLYPSYPYPKNFVEDDDNSVYSSEKLQKLGWSFKPIEESLRDTVESYKAFGILN

SEQ ID NO: 238145 - protein, 65 aa, Zea mays
  Clone ID: MRT4577_148778C.1.pep
VLDVFSSCKNTNLMMKEELNNILVVVHHHYVHMFLVTYNSIWTVLTQERGIITIITPNNSVGRYS

SEQ ID NO: 238146 - protein, 260 aa, Zea mays
  Clone ID: MRT4577_148779C.1.pep
MAGADVDVGTELRLGLPGGGADAAKAAKRGFEDTIDLKLKLPTAGMEEAAAAAAAKPEPAAEKAKRPAEAPAADAEKPPAPKNAEPVANKNINMHDLATIVKKYQFEALTRIIVTRAQAVGWPPVRSYRRNVMTVQSVKSKKEEEPEKQQSAANAGGNGSAFVKVSMDGAPYLRKVDLKMYNSYTELSVALKKMFSTFTTSGNNMNEGKLVDPVSGADVVTTYEDKDGDWMLVGDVPWEMFVESCRRLRIMKSSEAIGLG

SEQ ID NO: 238147 - protein, 130 aa, Zea mays
  Clone ID: MRT4577_14877C.1.pep
MEVPMNTTQSGPHFPVQHRSLSLDIKGNKTDIVINKYEDTFLVIVTQIGCMGTILAAKKDESVFSDPTYNVSVLFGKRDEPLLLACARQLIEHISGSGSARSLVISLGLKDHSQGTLKDITVAVIENRLW

SEQ ID NO: 238148 - protein, 219 aa, Zea mays
  Clone ID: MRT4577_148780C.1.pep
MSAGELRLELDELRRLESLAKHPRVQILLANEIRNVEAKLAKATEPSPEPLAAASAPAPAPAARPVLSYVTLGSFSWEQDNEKIRIYVSLEGVEQEKVETTFKPTSVDIKFHDVKGKNYRCAIPKLNKEIVPEKCKVVVKPTRVVVTLFKGSKGNWLDLHFKEDKFKPNMDKEKDPMSGIMDLMKNMYEEGDEDMKRTIAKAWSDARSGKTTDSMSGLR

SEQ ID NO: 238149 - protein, 60 aa, Zea mays
  Clone ID: MRT4577_148781C.1.pep
QVWMKIAGQQEIMKCDFLYSLPLDVAGVLVLFSQWFLTQDTYPHASGSSEYIYSKIAKTC

SEQ ID NO: 238150 - protein, 478 aa, Zea mays
  unsure (1)..(478): unsure at all Xaa locations
  Clone ID: MRT4577_148782C.1.pep
MKNVAKCDTWCELQNPANHRVFERKLRPKPSGGGHVCLGVTPLPPCCLRFCQRAPHHHRKRNSPILLHPARSPHAHPDPSALIEGEEGMDEFELEDNLEFILQSIQELMEDPGDNNAFGDANQNELFASIVNYDQENMLPDVSAADVAAGKDIQGIPCEKMLFGRDKYREMKMKNYXEQVYNLLYFLALNISVQVHILLGLVSKYSFLLLQRGHGSQSVAMVQVTTMAVDSNLLVVGGFQGEIICKRLDDEGVVYSTRVTDDENAITNSLEMYQDPSGSRRLVAANNDCSIRIFDTEYFDLLKHYVFPWSVNSVSVSPNGKLFAVLGDHEDGCVVDPKCGKAIGSLRGHLDYSFASAWHPDGNIVATGSQDTTCRLWDIRNLSQSVAVLGGRMGSIRCVKFSSDGRFLATAEPVDFVHMYDAYADYSRSHEIDLFGEIGGLAFSPDTEAFYVGLADQTYGGMIEFSKRHQHHYLNSLW

SEQ ID NO: 238151 - protein, 52 aa, Zea mays
  Clone ID: MRT4577_148783C.1.pep
DTIAPLRNWLIMKLPLAMVPRLFIPVKSLPLASLGMIDYVKLSSLDLCIGAF

SEQ ID NO: 238152 - protein, 212 aa, Zea mays
  unsure (1)..(212): unsure at all Xaa locations
  Clone ID: MRT4577_148784C.1.pep
MKSVDRRPSNPKRLTIESSQEVFXIDISRRTRSSNSAHQDDIPQNQEQNEPQPAPIHRFRRKALACHLKIKPPAPSTVSDDDFMDAPSLKRQFRSASPSPSEQISAKKLKVPSPQVPCVKRSPKSNIITKKXSPKQKTPRKSXRWLMDKLDPHDMTIRPXAGKKLKITKDTVHLIXGLPCAGGGREFTDWYGEVDAAANXRRDLNVGKEDLM

SEQ ID NO: 238153 - protein, 62 aa, Zea mays
  Clone ID: MRT4577_148785C.1.pep
MGVPPGVSPPPPPPQKQKGVTLFWFSRGSKKKKKKKKKKKKKKKKKKKKKKKKKKKKKKKKT

SEQ ID NO: 238154 - protein, 52 aa, Zea mays
  unsure (1)..(52): unsure at all Xaa locations
  Clone ID: MRT4577_148786C.1.pep
GASLDGPCAPSSTPLGSLACVPHQCRFFRMLFGFTPXXSLAAPLLLDLDTFD

SEQ ID NO: 238155 - protein, 208 aa, Zea mays
  Clone ID: MRT4577_148787C.1.pep
MASTSSSTPAPVEVDERGRKRKRAAGADPAAPAQPSKWRTRREHEIYSSKLLEAIRLVRAGPPSAAAAGTAAAPPRSRAVREAADRALAVAARGRTHWSRAILASRRRRLQAAHRARLRAPASPPARHGAPSASAAKGAATPPLERKAKVLGRLVPGCRKLSFPTLLAETTDYIAALQMQVRAMTALAEALSAVSATSSSGAGSSSPP

SEQ ID NO: 238156 - protein, 213 aa, Zea mays
  unsure (1)..(213): unsure at all Xaa locations
  Clone ID: MRT4577_148788C.1.pep
IRHEAPTQPSEWRTRREHEIYSSRLLEAIRLVRAGPSAAAAAEAAPTRSRAVREAADRALAVAARGRTHWSRAILASRRCRRLQAAHRARLRAPASPPPRHGASAAKGTAALPPVARKAMVLGRLVPGCRKLSFPTLLAETTDYIAALQMQVRAMTALAEALSXSPPHPPAPALPLPPRRRDRSLNIRGFVVNFFFPSLFSLAPNFSSGLVNL

SEQ ID NO: 238157 - protein, 606 aa, Zea mays
  Clone ID: MRT4577_148789C.1.pep
MCGILAVLGCADEAKGSSKRSRVLELSRRLKHRGPDWSGLRQVGDCYLSHQRLAIIDPASGDQPLYNEDQSVVVAVNGEIYNHLDLRSRLAGAGHSFRTGSDCEVIAHLYEEHGEEFVDMLDGVFSFVLLDTRHGDRAGSSFFMAARDAIGVTPLYIGWGVDGSVWISSEMKALHDECEHFEIFPPGHLYSSNTGGFSRWYNPPWYDDDDDEEAVVTPSVPYDPLALRKAFEKAVVKRLMTDVPFGVLLSGGLDSSLVATVAVRHLARTEAARRWGTKLHSFCVGLEGSPDLKAAREVAEYLGTLHHEFHFTVQDGIDAIEDVIYHTETYDVTTIRASTPMFLMSRKIKSLGVKMVISGEGSDELFGGYLYFHKAPNKEELHRETCRKVKALHQYDCLRANKATSAWGLEARVPFLDKEFINAAMSIDPEWKMVQPDLGRIEKWVLRKAFDDEEQPFLPKHILYRQKEQFSDGVGYSWIDGLKAHATSNVTDKMLSNAKFIFPHNTPTTKEAYYYRMVFERFFPQKSAILTVPGGPSVACSTAKAIEWDAQWSGNLDPSGRAALGVHLAAYEHQHDPEHVPAAIAAGSGKKPRTIRVAPPGVAIEG

SEQ ID NO: 238158 - protein, 79 aa, Zea mays
  Clone ID: MRT4577_148790C.1.pep
CRRSRYCSVVHSIGAPDLDCSGIRGLFGCHPEPNLPGRRPSLSPTPHPVSDRLTTGLQQSAAKQPSRVQISVLKEQADP

SEQ ID NO: 238159 - protein, 85 aa, Zea mays
  Clone ID: MRT4577_148791C.1.pep
DFPIPLKKALMPVDLDLPIMLNRQSLPFGSPLLLSRLKSVHGHAIWAFFPGLKTNKGSWALRFVFLKKKKKKKKKKKKKKKKKKK

SEQ ID NO: 238160 - protein, 81 aa, Zea mays
  Clone ID: MRT4577_148792C.1.pep
MASSRRTLLKVMILGHCGVGTTYLMNQYVNKKFSNQNKVTTGADFLIMEVQDADMLFTLQIWDTAGQEGLQSLPVAFYRRA

SEQ ID NO: 238161 - protein, 108 aa, Zea mays
  Clone ID: MRT4577_148793C.1.pep
IRQEHASVTRVLVVIVASLSNMPMLEVTFTASPPWLPPCSCDVWKSHRLTITSVEDEVGVASGGEREDDDDEEEEAADGDDGQQHATCRHLLILVAAAFHGRASGQCS

SEQ ID NO: 238162 - protein, 64 aa, Zea mays
  Clone ID: MRT4577_148794C.1.pep
KGNTVAFLEQQWRPRDWPSLCAGLLRQGWLTHPFFLIPTSFYCWPFFSIHFPLIARFSYGKNLS

SEQ ID NO: 238163 - protein, 59 aa, Zea mays
  unsure (1)..(59): unsure at all Xaa locations
  Clone ID: MRT4577_148795C.1.pep
KDHNEDGVNHTTKGRRKIKQRSSGVRRVXRTVPSDDLRIRXRRAGYXQSAAAGCVRCLP

SEQ ID NO: 238164 - protein, 77 aa, Zea mays
  Clone ID: MRT4577_148796C.1.pep
LTREGSSSLFGGRGREVFYNATKQKTSFREEAERQALNISIETTDRRTGKYGRCYKAGDTDISKNGIHNLSSRNITK

SEQ ID NO: 238165 - protein, 127 aa, Zea mays
  Clone ID: MRT4577_148797C.1.pep
GRCRPSNEPLLLWSYAAYLPVKFGLLGVCDFGRRGSRCFPHRLLACFAPDGGPAGLRLGAFWSPPLWCPLHPIWGLPFLLFRRLSPRHGHAWPRGCLKLPRVGGSAGYAAGFSSFSPLLNLIFLCPV

SEQ ID NO: 238166 - protein, 42 aa, Zea mays
  Clone ID: MRT4577_148798C.1.pep
DNNTIDLTVICAFGLNLVYPHVLLLFLLSKSPVSLGLVPGNL

SEQ ID NO: 238167 - protein, 63 aa, Zea mays
  Clone ID: MRT4577_148799C.1.pep
GLRSGEVKKKFGNGREHHGARIRRLRDQAGPGGRRLRLDGLHVRCLSIPDTLHDGESYCFLLV

SEQ ID NO: 238168 - protein, 97 aa, Zea mays
  Clone ID: MRT4577_14879C.1.pep
STAQACALGTATQSSTWLLPRRPLTWPVMCCCSMMYWRTQCQYRIEPALPLHQPELHACLCQQPLAITCTMQGTCGAGLTPNELHSVDQQRHAGNPT

SEQ ID NO: 238169 - protein, 73 aa, Zea mays
  Clone ID: MRT4577_1487C.1.pep
NPLEGKKKREKVTFPGFVDWVYLGAPSELILGNGLGDKNALANSNWSEAVLWNPPLQKEACYKNFVCVENAQI

SEQ ID NO: 238170 - protein, 126 aa, Zea mays
  Clone ID: MRT4577_148800C.1.pep
MDIRDPTAKTVRVAGPKCGGAARPHSEISMEMRETATAGLWGLGEGLGRVQGDMANMIMGTTPARGHQRAQNAVGWPNGGADLLRVFNSNSNQVSNSNQIKHVHKFKEYLGLSMMQQFMTYIVLTK

SEQ ID NO: 238171 - protein, 166 aa, Zea mays
  Clone ID: MRT4577_148801C.1.pep
DVSSEFGSRNAVIWGSILSACRVHKNIDLARHAAEHLLKLAPEEDAVYVQLYNIYIDSRQWADAKRVRMLMEERGVKKTAGYSSITVAGQVHKFVANDQSHPWTLEIMAMMEEIARRLKSVGYSPVTSRIAVDVDEEEKEQALLAHSEKIAIAFGLISHPPSLPIH

SEQ ID NO: 238172 - protein, 88 aa, Zea mays
  Clone ID: MRT4577_148802C.1.pep
CSRTAPGASFRELHSSWARHHLLFAAAATAPPGSQPALGEEYDGGGGGTGLKGCILSGLLSVDGLKGLRMDRDDYYGGDSTSLNLNQL

SEQ ID NO: 238173 - protein, 50 aa, Zea mays
  Clone ID: MRT4577_148803C.1.pep
PKYHMNLLNFFFFFFFFFFFFFFGTDGVIFVNNSTTVRSHIRIFCFFFFP

SEQ ID NO: 238174 - protein, 74 aa, Zea mays
  unsure (1)..(74): unsure at all Xaa locations
  Clone ID: MRT4577_148804C.1.pep
YAPGCHVVSACGQTVLSDRPRLVRQLAQPVPTAHLQRDSPRHCSGHEFFPGPGRPLFLVKXRCLTALEPNSELT

SEQ ID NO: 238175 - protein, 104 aa, Zea mays
  Clone ID: MRT4577_148805C.1.pep
MAADQTTDLLQKLSLDSQPKAAGATEPAAAAAAAKEGAVTNQPLSVAIPPERSITPVLQDFMDPNLFYLPAYYYGGYDSSMSEWDDYPRYLNSDGVEIAPAVYG

SEQ ID NO: 238176 - protein, 95 aa, Zea mays
  Clone ID: MRT4577_148806C.1.pep
RFRICINWLGCDIFDHVSDGNINIVGVSPPNELYVPFRNRVNKDGGCIIPKNIYCELSKLPQFKLGIALWIFRKPAWHAPKKWFCIDPNRGMVCK

SEQ ID NO: 238177 - protein, 184 aa, Zea mays
  Clone ID: MRT4577_148807C.1.pep
MDPNLFYLPAYYYGGYDSSMSEWDDYPRYLNSDGVEIAPAVYGDIYGYGYAPYGAYSPATSPVPTVDGQMFGAQHYQYPTTYFQPPTPIPSTTQSNLQSSNNPEKPAAKADPAKATANGVPNGTGHTHSYSGTVPSQQSSALTPDGTYRAPLLGGVPSAGYLDTTYYGYDSTGAQFAWYDGSAY

SEQ ID NO: 238178 - protein, 698 aa, Zea mays
  Clone ID: MRT4577_148809C.1.pep
MAAVATPPAPAPAAPAPAPAPAAAPAPVTVAPAADQTTDLLQKLSLDSQPKAAGATEPAAAAAAAKEGAVTNQPLSVAIPPERSITPVLQDFMDPNLFYLPAYYYGGYDSSMSEWDDYPRYLNSDGVEIAPAVYGDIYGYGYAPYGAYSPATSPVPTVDGQMFGAQHYQYPTTYFQPPTPIPSTTQSNLQSSNNPEKPAAKADPAKATANGVPNGTGHSYSGTVPSQQNSALTPDGTYRAPLLGGVPSAGYLDTTYGYDSTGAQFAWYDGSAYANGQQRTTTTNRFPSSSFSGNGSSARYQNKSSTTQQMGMQNRRPTTTSAAPTYPNRMYPSPRPYTQYGNSVKTGLPYGSNGYDSRIYGRCGLGMDNRYRPRACSGYYGYGNESQDGTIELNRGPRSGRFKNQKLYGHTVTIAVKGQSLPSSESKNDSAVPDRAKYNRDDFPVQYDAAKFFVIKSYSEDDIHKSVKYNVWASTTNGNKKLDAAYQEAQSKGSACPIFLFFSVNTSGQFVGVAEMTGAVDFEKTLEYWQQDKWNGSFSVKWHIVKDVPNNILKHIILENNENKPVTNSRDTQEIRLEQGLQMLKIFKDHVSKTSILDDFAFYESRQKLMQDKRSKQQQLQKQVWDTRTPVSVTGERPQEPANGKPNPSVPDGVTAEVKAVKAPAENGITAPVVSYAAKVAQTAPEKPVLSNGVAKTG

SEQ ID NO: 238179 - protein, 279 aa, Zea mays
  unsure (1)..(279): unsure at all Xaa locations
  Clone ID: MRT4577_14880C.1.pep
MRHGLPPRMAITSRALIGKPAAGTRDVFGEGRITMRKTAAKPKPAASGSPWYGADRVLYLGPLSGSPPXSYLTGEFPGYYWWDTAVLSADPXETFAKNRXXEVIHCRWAXMLGALGCVFPXLLARNGVKFGEAVWIKAGSQIFSEGGLDYXLGNPSLGHAQGILAIWGXCQVVADGXAVEGYRVAGGRLRERVXDPLVPXGGSFEPXLGLADEPXEAFAELKVXKEIKNGRLAMFSMYXGFFVQAIVTGNGPLENLGDHIYDPVNNNALAYATNFVPGK

SEQ ID NO: 238180 - protein, 513 aa, Zea mays
  unsure (1)..(513): unsure at all Xaa locations
  Clone ID: MRT4577_148810C.1.pep
LGTSRPAGNTVLAAAKADPAKATANGVPNGTGHTYSGTVPSQQNSALTPDGTYRAPLLGGVPSAGYLDTTYGYDSTGAQFAWYDGSAYANGQQRTTTTNRFPSSSFSGNGSSARYQNKSSTTQQMGMQNRRLTTTSAAPTYPNRMYPSPRPYTQYGNSVKTGLPYGSNGYDSRXYGRCGLGMDNRYRPRACSGYYGYGNESQDGTIELNRGPRSGRFKNQKLYGHTVTIAVKGQSLPSSESKNDSAVPDRAKYNRDDFPIQYDAAKFFVIKSYSEDDIHKSVKYNVWASTTNGNKKLDAAYQEAQSKGSACPIFLFFSVNTSGQFVGVAEMTGAVDFEKTLEYWQQDKWNGSFSVKWHIVKDVPNNILKHIILENNENKPVTNSRDTQEIRLEQGLQMLKIFKDHVSKTSILDDFAFYESRQKLMQDKRSKQQQLQKQVWDTRTPVSVTGERPQEPADGKPNPCVPDGVTAEVKAVKAPSENGITAPVVSYAAKVAQTAPEKPVLSNGVAKTG

SEQ ID NO: 238181 - protein, 738 aa, Zea mays
  Clone ID: MRT4577_148811C.1.pep
GERERGEKVRSVGRGLSDLAAASPFLRWDLARFAPWPAVATPPAPAPAAPAPAPAPAAAPAPVTVAPAADQTTDLLQKLSLDSQPKAAGATEPAAAAAAAKEGAVTNQPLSVAIPPERSITPVLQDFMDPNLFYLPAYYYGGYDSSMSEWDDYPRYLNSDGVEIAPAVYGDIYGYGYAPYGAYSPATSPVPTVDGQMFGAQHYQYPTTYFQPPTPIPSTTQSNLQSSNNPEKPAAKADPAKATANGVPNGTGHTHSYSGTVPSQQSSALTPDGTYRAPLLGGVPSAGYLDTTYYGYDSTGAQFAWYDGSAYANGQQRTTTTNRFPSSSFSGNGSSAIYQNKSSTTQQMGMQNRRPTTTSAAPTYPNRMYPSPRPYTQYGNSVKTGLPYGSNGYDSRIYGRCGLGNGMDNRYRPRACSGYYGYGNESQDGTIELNRGPRSGRFKNQKLYGHTVTIAVKGQSLPSSESKNDSAVPDRAQFNRDDFPVQYDAAKFFVIKSYSEDDIHKSVKYNVWASTTNGNKKLDAAYQEAQSKGSACPIFLFFSVNTSGQFVGVAEMTGAVDFEKTLEYWQQDKWNGSFSVKWHIVKDVPNNILKHIILENNENKPVTNSRDTQEIRLEQGLQMLKIFKDHVSKTSILDDFAFYESRQKLMQDKRSKQQQLQKQVWDTRTPVSVTGERPQEPANGKPNPSVPDGVTAEVKAVKAPAENGITAPVVSYAAKVAQTAPEKPVLSNGVAKTG

SEQ ID NO: 238182 - protein, 44 aa, Zea mays
  Clone ID: MRT4577_148812C.1.pep
ESYLFCFSFPCYTLRKGKPRPQNPKNTLKPGNPEGKSVNSGNGV

SEQ ID NO: 238183 - protein, 703 aa, Zea mays
  Clone ID: MRT4577_148813C.1.pep
MAAVATPPAPAPAAPAPAPAPAAAPAPVTVAPAADQTTDLLQKLSLDSQPKAAGATEPAAAAAAAKEGAVTSQPLSVAIPPERSITPVLQDFMDPNLFYLPAYYYGGYDSSMSEWDDYPRYLNSDGVEIAPAVYGDIYGYGYAPYGAYSPATSPVPTVDGQMFGAQHYQYPTTYFQPPTPIPSTTQSNLQSSNNPEKPAAKADPAKATANGVPNGTGHTHSYSGTVPSQQSSALTPDGTYRAPLLGGVPSAGYLDTTYYGYDSTGAQFAWYDGSAYANGQQRTTTTNRFPSSSFSGNGSSAIYQNKSSTTQQMGMQNRRPTTTSAAPTYPNRMYPSPRPYTQYGNSVKTGLPYGSNGYDSRIYGRCGLGNGMDNRYRPRACSGYYGYGNESQDGTIELNRGPRSGRFKNQKLYGHTVTIAVKGQSLPSSESKNDSAVPDRAKYNRDDFPVQYDAAKFFVIKSYSEDDIHKSVKYNVWASTTNGNKKLDAAYQEAQSKGSACPIFLFFSVNTSGQFVGVAEMTGAVDFEKTLEYWQQDKWNGSFSVKWHIVKDVPNNILKHIILENNENKPVTNSRDTQEIRLEQGLQMLKIFKDHVSKTSILDDFAFYESRQKLMQDKRSKQQQLQKQVWDTRTPVSVTGERPQEPADGKPNPSVPDGVTAEVKAVKAPSENGITAPVVSYAAKVAQTAPEKPVLSNGVAKTG

SEQ ID NO: 238184 - protein, 43 aa, Zea mays
  Clone ID: MRT4577_148814C.1.pep
LECEICWVQHAGVSVSGFYFPLYSHISKQFACDRMKDGHLALS

SEQ ID NO: 238185 - protein, 76 aa, Zea mays
  Clone ID: MRT4577_148815C.1.pep
MGSGALGRRGLLHVPLALFGSGHEYSPSEYVFGSQGLYNGLDDQGQSGPCPLVAPHSDGEIKGDIDGHGGAGDNVE

SEQ ID NO: 238186 - protein, 125 aa, Zea mays
  Clone ID: MRT4577_148816C.1.pep
VYHFRQKPGQGPGEPMSWLFLIACGPIWVPGMKTPDRGFGLGFSWAYMFRFIGKGPQYEWPSPPKDRPPRGTIGEFTPCVWPFETFRFARFAFIWAAAGNWKKGRKEKENTNNPKKKKKKKKKGE

SEQ ID NO: 238187 - protein, 59 aa, Zea mays
  Clone ID: MRT4577_148817C.1.pep
ICINYRRDLFKILGRAKRIHMGAGNRKKGALYVVDKCQGRPSWVIEPKYFCEIKKNFYP

SEQ ID NO: 238188 - protein, 114 aa, Zea mays
  Clone ID: MRT4577_148818C.1.pep
KVHVFKADDVSHPQVLAIRKKLDELMEKIARLGYVRTDSPRSEIHHSEKLAVAFGLMTLPTWMPIHIMKNLRICGDCHTVIKLISTVTGREFVIRDAVRFHHFNGGSCSCGDYW

SEQ ID NO: 238189 - protein, 138 aa, Zea mays
  Clone ID: MRT4577_148819C.1.pep
SRPAGTLRLLMNLGPLDCGCAAVGDGGMAPRAGAASPGHRVVGEGREPGAGAVGHGAQDAVRRIRSRTHRHVKDSEKRVLARKALMQHVRYQELGKKLREILIRKIRSGASSHLHQYLYLLAHRLCVLVFVISCWLIC

SEQ ID NO: 238190 - protein, 59 aa, Zea mays
  Clone ID: MRT4577_14881C.1.pep
DRWCLHTDTHSGVWSFELHCFLHGEPENALRYALVMRRTRAGLISQGSPACKRRCRPIA

SEQ ID NO: 238191 - protein, 33 aa, Zea mays
  unsure (1)..(33): unsure at all Xaa locations
  Clone ID: MRT4577_148820C.1.pep
MPKVXRSRKAPPDGWELIEPTLDALDQKMREAE

SEQ ID NO: 238192 - protein, 87 aa, Zea mays
  Clone ID: MRT4577_148821C.1.pep
STDNSCIAAPPLARASCSCFSRPFPVIEPLAPILFLPQNKLLVDLQPGLSRWGAVGGAPPSPVSPAAGGKANGLVYKMFNPVEDNAW

SEQ ID NO: 238193 - protein, 209 aa, Zea mays
  unsure (1)..(209): unsure at all Xaa locations
  Clone ID: MRT4577_148822C.1.pep
MAIAIVPTDAELLQGHADLRGHSPYYLTSMALKCAEDLHIPTAIHYLRGTARLTYLIXALSLPAAKILFLGCVMPLLVTXGVFPSYEDMQHRLNPTXWLLAEGVESEDHTYHKDLLLCTVSRHYVEAGMXLADWLKNEEDDDRQLPSSIDAMHYVPLVHESTKLLDDELXDRVTEERWGDAYNLDIGTNIRECRXDDFTWLRSITYCCH

SEQ ID NO: 238194 - protein, 49 aa, Zea mays
  Clone ID: MRT4577_148823C.1.pep
LSSLLLVAVTSGYGPASSHSSSRVVHGEDEVPYRWLWNVSLQYDKSGSL

SEQ ID NO: 238195 - protein, 147 aa, Zea mays
  Clone ID: MRT4577_148824C.1.pep
RKNIVRLIGCCLEVDKPMLVYEFLSKGSLDDVLHGSRRDPLNLKCRLDIAAESAEGLAYLHSKTTNVILHGDVKPANILLDEDWTPKISDFGISRLIVKDKQHTDFVIGDRSYMDPVYLRDGLLTDRSDVYSFGVEILELISRKRAP

SEQ ID NO: 238196 - protein, 211 aa, Zea mays
  Clone ID: MRT4577_148825C.1.pep
FGTRLQCCLLMNGLVHEASEEATMNAMNDELPRIQEQVYYGHIQSHTDILEKFLSENSYKRYNPSITGKNAEKKFVSLFASYHQDSFIFNDMKYLQSPGTTDDAKPVTHLLAIDLSSKVGTKLLYEAILYLMDGSDRARVGLLLYVHTGGSSPILLLKDIFDRTISSFSYKERLLVFLHGLLKFYDAQPLPASSAADDWTRTMMEGLYLSC

SEQ ID NO: 238197 - protein, 129 aa, Zea mays
  Clone ID: MRT4577_148826C.1.pep
MKRNEIAAAAMVLLLLTLGAEAQICYSRSKTFKGWCYHSTNCISVCITGGEISGFCQHGICMCTYECLTGNEASLPGGGGGGEDPQLLHVATPNGDGARPLSLEDDKKETSTETAMRGAKSHSPRYMRR

SEQ ID NO: 238198 - protein, 140 aa, Zea mays
  Clone ID: MRT4577_148827C.1.pep
MALLDPPECFQSEVALDLVRNLLGWGAPAFAGRIRVGASPHDDLAAGVFALFVSNLSCGLALPISSFFVLLLEELGLHPQHFTPCFILQAAIIAYLCKIDLPEAEGELSCGSIFRVSFTSIPWYTTMNWSSSNSMRWEAS

SEQ ID NO: 238199 - protein, 80 aa, Zea mays
  unsure (1)..(80): unsure at all Xaa locations
  Clone ID: MRT4577_148828C.1.pep
LSPVYLPSRTYCNGPGPTIECINTTPPNPTQGLGFPXXXXXXXXXXXXXXXXXXXXXXXXXXXXXXXXXXXXXXXXXXXX

SEQ ID NO: 238200 - protein, 148 aa, Zea mays
  Clone ID: MRT4577_148829C.1.pep
MALLDPPECFQSEVALDLVRNLLGWGAPAFAGRIRVGASPHDDLAAGVFALFVSNLSCGLALPISSFFVLLLEELGLHPQHFTPCFILQAAIIAYLCKMFVGATLLPPIFEGMGVAQRPSRGGRRAELRLHLSCELHQHPMVHHHELV

SEQ ID NO: 238201 - protein, 436 aa, Zea mays
  unsure (1)..(436): unsure at all Xaa locations
  Clone ID: MRT4577_14882C.1.pep
MAHGGGGGRAKVTPNLAVDGEGTRTLNLTVLQRLDHAVEDILITAAHVTLYDFDTDINQWSRKDVEGSLFVVKRNAQPRFQFIVMNRRNTDNLVEDLLGDFEYQLQAPYIMYRNAAQEVIGIWFYNSQECQQVANLFSRILNAFSKVAPKPKIPSVQSEFEELEAAPSLVDGPLEAQTSNIMSTTTHVQEDPLSAFFSVWNLFSLXTLYLGPFTPLTFGCFSAKDCYLLSPAYNIFSFCFVCLNVHLWKQAAANAGGNSAVAVARQPIQPFGATPVATHAATSITTTQSPGLHYLLPSQASSVSGRPADAHGGTGSIGRSTSLVYPSLFSPLTSSQTKMVHTNSAVPTAPPQHPRIAQQPQSAPLLQPFPLPTASSPPYGTPLLQPFPPPNPSPSLASAPVLSPALTRDKVRDALLRLVENDEFVDLVYREIMNRQ

SEQ ID NO: 238202 - protein, 51 aa, Zea mays
  Clone ID: MRT4577_148830C.1.pep
QEYIPSVTCFSLRIHVISRRSDHVEQDSSCGARHFRSAVRMPPRDSAEWRT

SEQ ID NO: 238203 - protein, 177 aa, Zea mays
  unsure (1)..(177): unsure at all Xaa locations
  Clone ID: MRT4577_148831C.1.pep
PAKRRKGTIRHGLPCADHALHPRLHLPEQQASCDIPRASRHTSTETAPVCRSCSPATLPLLRPLPHQEPQEEDPDCNEEECAPHKEVGNLSRSTIXDEETTHVGRPLPSKKRRGTGLVEKDTAGQTKINSVQTMLYLYQSPTRSGTAATSTDAAKNTCTIDARAALITVSTGSAIII

SEQ ID NO: 238204 - protein, 157 aa, Zea mays
  unsure (1)..(157): unsure at all Xaa locations
  Clone ID: MRT4577_148832C.1.pep
IKLLXPSPPRHTTXPXSEPSNGPDXIEGPPPXPPSSGPLPLXGLGLQGPXPXPLSXXXATSSPFSSALXXSAAAFLFXALPHSADGAXCXXATYXYFPRGGGXXLXLFIXXLSXXTXXXEICSVLXCXPPIXGRSXFLSTRRGSIPCXGVXCVISSP

SEQ ID NO: 238205 - protein, 99 aa, Zea mays
  Clone ID: MRT4577_148833C.1.pep
FFFFFFFFLGGFIICLCFFFFIHSFWKKQIQAGEITPNNLFDTDRGLIPKEGGKKPGGTPPLEASCRVVLGNTMTGDWSFKNSDDKPPSKLGGGGKGGT

SEQ ID NO: 238206 - protein, 93 aa, Zea mays
  Clone ID: MRT4577_148834C.1.pep
QSEALECSPSLGQGEHTVIVGVLLGAPCVQPASEGGLVHIELVATCNRPVSLRSCCPSCALAQGKPSYTCTLAILRTILSNASRFAPGIGMVL

SEQ ID NO: 238207 - protein, 51 aa, Zea mays
  Clone ID: MRT4577_148835C.1.pep
KVTIGRGRNICGTALFFEHFFGSAFIQSLGPLNLRDRFGILILARSSSNKP

SEQ ID NO: 238208 - protein, 76 aa, Zea mays
  Clone ID: MRT4577_148836C.1.pep
PYLLPTWSKPILLSRVFSWIEAQTSTWGGCPIPWKGHKYYEVFLEGLSRGLRFKLRGAVRSSFLLSKRWNIVWFVI

SEQ ID NO: 238209 - protein, 75 aa, Zea mays
  Clone ID: MRT4577_148837C.1.pep
SRRREQSASAHSASSRSRHQSQGATSPTPSVNDFDKTDPLPGQANKLTSIKSQLSLHPTILLACCKALYHRWTER

SEQ ID NO: 238210 - protein, 58 aa, Zea mays
  unsure (1)..(58): unsure at all Xaa locations
  Clone ID: MRT4577_148838C.1.pep
GDPRILXYLNLYQNSQFFPILHILRCVSSLNTLHISFIYLYSPPIYNNITYISHPTSK

SEQ ID NO: 238211 - protein, 281 aa, Zea mays
  unsure (1)..(281): unsure at all Xaa locations
  Clone ID: MRT4577_148839C.1.pep
MYNRFKMMVNQVRNLGSTKWTDHEVVTLMLRSLIFCNATLVQVLLENPGYKVMTPEEMLGKFVNFMLRVKDSRHVENIAQDNSSTPELQPVAFKATKEKEETTPSKGLVIDTFKLDSEEMALIIKSFQQILKQSKGKDYKPHSKRFCYRCGKFSHYIAKYPYASDDDRDNDKKGKKRIEEKKFFYKNKDGDAHVRRECDSNEISSDSSDEDVANIVVNKGLICPNVGHKCLMAKESKKKVQPRETPKYTTFDDDGLSFQQFEKINELVXTINEKDGLLESQ

SEQ ID NO: 238212 - protein, 303 aa, Zea mays
  unsure (1)..(303): unsure at all Xaa locations
  Clone ID: MRT4577_14883C.1.pep
MASSTSGPCSSTAXAGKXAVNVPXSSLFGEXARVTMRXRLAIGNSRAAXGGAPWYXGPDRVLYLGPLSGAPPSXXLTGEFPGEXGLDPAGLSADPKTFAKTREXLKVIHXSRWAMXLGPLACVFPEPLARNXVKFGEAXVWFKAGSXQIFSEGGLDYLGNPXSLIHAQSILAIWAXCQXCSMGAIEGFRVFGXGPLGEVVDPLYPGGSFDPLGLADDPEAFAEXKVKELKNGRLAMFSHGSGSWLQAIGTGKGPVQKLREHLXATPATTTAWGXYAPNFXVPGKGRGWRRHRPPATGHRCGIF

SEQ ID NO: 238213 - protein, 412 aa, Zea mays
  unsure (1)..(412): unsure at all Xaa locations
  Clone ID: MRT4577_148840C.1.pep
MEASFLRKDGGDQASAATMSGEHRNKGLDWDLNDWRWDANLFLATPAAIAPSESISRELSRGQGEIDFGVVVDKRRRLSPEEDGSGGCSNSAVADGDNSHVVCVQRGRNTEETRPRKGANSSTTPSCQVDGCQADLSGARDYHKRHKVCEAHTRTTVVCINNVEHRFCQQCSRFHLLHEFDDGKKSCRSRLAQHNGRRRKVQPQPAVNGNSMNEDQSLSSTLFLLLKQLSGLESGSSSEQINHPNSLVNLLKNLAAIASTHAYQDVLKNATSISSNDGNNAANGSIMHXSKPYXIPVRRESLAEEPAVKRRVQDFDLNDSCIEEAESRTDKIAFKLFGKEPKDFPVYLREQILNWLWHYPTDMXSYIRPGXVILTIYLDLPNWMCDEFNDDPSSWIENLISSSNDGFWRTGW

SEQ ID NO: 238214 - protein, 93 aa, Zea mays
  Clone ID: MRT4577_148841C.1.pep
KNFFITQHQASVLPLSRDLPKRAPANGLRGFVFKNFLVFPPPCCKSCLFPPLAPGVFKKKKAGYGVASQKKKKKKKKKKKKKKPKNQKKKKKK

SEQ ID NO: 238215 - protein, 164 aa, Zea mays
  Clone ID: MRT4577_148842C.1.pep
RVMAVNARAAVACLKHAARVMVPQGAGCVLYTGSTTGMLGGLAALPYSLSKATVISVVRAAADELARSGVRVNAISPHAIATPLLLRSLARLHPGVPDEQLKRLVETGMSDLRGAVLQVQDVARAAVYLASDEAKFVTGHNLVVDGGFTASKRIGTPAASSTAS

SEQ ID NO: 238216 - protein, 731 aa, Zea mays
  unsure (1)..(731): unsure at all Xaa locations
  Clone ID: MRT4577_148843C.1.pep
FCQQCSRFQLLQEFDEGKKSCRSRLAQHNGRRRKVQPQAVVNGNSMSENQSLSSTLILLLKQLSRLEXRHSHSKCVLVWVAAGSSSEPINHPNSLVNLLKNLAAIASTQSYQDILKNANSNSILSNDGNNAANGSTVHEQTIRSIPISGESLAEEPAVKSRVHDFDLNDACFEEVESRTDKIVFKLFGKEPKDFPVDLREQILHWLSHYPTDMESYIRPGCVILTIYLRLPNWMWDELDDDPASWIEKLISLSNDGLWRKGWLYARVQDCLTLSYNGSLMFASPWQLVIGDKHQRLCVTPIAVAXCASSVKVSVKGRAHVSVTMPSTIDTVGKHASRMKPADQITFGVEKKQLSINQTLSCRQCVQQAQQLAFXIPEQIRFLSNRTAMLSLVSIAAVCVCVGLIMKSLPQVGCMKPFLWGNIGWGXQLIDCRRASPICIRCMMKMFAPSEXFLVMYMFLYTKCLTYFCXIVKPVXTCLACNSIXICILTEVKLLLXKKKKKKQNVLLTAVKKRSKPLVEFLLRYTATDYAPVGGGAGAPVQFLFTPAMTGLSNITPLHIAATISDATGVLDALTDDPRQLGIKAWKNARDATGFTPEEYARKRGHISYIQLVQDKIDRRVSRAHVSVTIPSTIDTAGKHASRLKPADQITFGVEKKQRGMNQTLSCRQCVQQVQQLAFHPRTNRFLSNRTAMLSLVSIAAVCVCVGLIMKSLPQVGCMKPFLWDNIRWGPN

SEQ ID NO: 238217 - protein, 51 aa, Zea mays
  unsure (1)..(51): unsure at all Xaa locations
  Clone ID: MRT4577_148844C.1.pep
ACPAACFASSHYVSSLDQLHITQDVNAAPRDXSGDTYSMELGALLVLETSV

SEQ ID NO: 238218 - protein, 431 aa, Zea mays
  Clone ID: MRT4577_148845C.1.pep
RRVQYFDLNDSCIKEAETRTDKIVFKLFGKEPKDFPVDLREQILSWLSHYPTDMESYIRPGCVILTIYLHLPNCLWEAFNDDPASWIENLISLSNDGFWRTGWLYARVQDCLTLSCKGSLMFASPWQPVIGDKHQRLCVTPIAVDCSSSVKFSVKGFNIVQPTTKLLCVFDEKYLIQEETQMLLEDSTMQQGPQCLTFSCSFPCTSGRGFIEIEDYDQSSLSVPFVVTDKDVCSEIRMLEHGLDLVSFDQTSKRIDDLMIYRSRALHFLHEIGWLLQRSHVRATSEQRQYCPDRFPVARFRWLLSFAVDQEWCAVLRKLLNTMFQGDIDVLSPIEFALGENLLHTAVKKRSKPLVEFLLRYTTTNIAPVGGGDGAPVQFLFTPAMTELSNITPLHIAATISDAIGVLDALTDDPQQVTTLNCHVLTCCSLL

SEQ ID NO: 238219 - protein, 123 aa, Zea mays
  Clone ID: MRT4577_148846C.1.pep
MPINRIALGSHQEGYHPGALKAAFAELISTLIFVFAGQGSGMALRKLTGGGPTTPGGLIAGGGAHAFALFGAVSGGANISGGHVNPAGTFGALGGGNITLFRGLLYWGAPLLGVTGGGLLLGL

SEQ ID NO: 238220 - protein, 439 aa, Zea mays
  unsure (1)..(439): unsure at all Xaa locations
  Clone ID: MRT4577_148847C.1.pep
KLLCVFDEKYLIQEETQMLLEDSTMQQGPQCLTFSCSFPCTSGRGFIEVQCLYIFYILIFCVYYRLDSVFXEDYDQSSLSVPFVVTDKDVCSEIRMLEHGLDLVSFDQTSKRIDDLMIYRSRALHFLHEIGWLLQRSHVRATSEQRQYCPDRFPVARFRWLLSFAVDQEWCAVLRKLLNTMFQGDIDVLSPIEFALGENLLHTAVKXRSKPLVEFLLRYTTTNIAPVGGGDGAPVQFLFTPAMTELSNITPLHIAATISDAIGVLDALTDDPQQLGIKAWKKARDATGFTPEEYAAKRGNISYIQMVQDKIDRRVTRAHVSVTMPSTIDTVGKHASRMKPADQITFGVEXXQLSINQTLSCRQCVQQAQQLAFHPRTNRFLSNRTAMLSLVSIAAVCVCVGLIMKSLPQVGCMKPFLWDNIVGAPIDRLQKSQPDCISV

SEQ ID NO: 238221 - protein, 87 aa, Zea mays
  Clone ID: MRT4577_148848C.1.pep
MNNIISWTALFVFYGQNACTPEAVRVFSEMQRDGIDPDDFTLGSVISSCANLASLEEGAQFHCLALASGLMHYITVSNALVTLYGKC

SEQ ID NO: 238222 - protein, 109 aa, Zea mays
  Clone ID: MRT4577_148849C.1.pep
PAGSGTSYHLPLLYADPHTDPSSAWQPLAADFTRTSRSRCPGTRVNIAFVTAVEGCSCIKHYEDYDYNEEVIEDSKERNLIFSPASRRNYSASTHTQSSAENYKHENSE

SEQ ID NO: 238223 - protein, 210 aa, Zea mays
  Clone ID: MRT4577_14884C.1.pep
KGDGRQRPRAEKPSPKKSSRGGSPQKNQNGTGKGANKPEIGGVKRAARPKREGKNPKPRGERHGRKQKARPVGPPQGEGLRGGDTARPPPQKRRDKAGNGQQWGPPPFRNSRRKGPPPQNDRGGKPQGFPSHNVGERRGKKKKRGRPTKDRKRNIGGAIKEVPLRRPPFFIFFFFIFFFPFFFFFFFFFFFFFFFFFFSDAWADAWAATW

SEQ ID NO: 238224 - protein, 487 aa, Zea mays
  Clone ID: MRT4577_148850C.1.pep
MAAAREEDEAARPLLLLPRTAQEDQKWWRRWAREAGWVGYLALPMVVVNLSQYAVQVSSNMMVGHLPGVLPLSSAAIATSLANVSGFSLLIGMASALETLCGQAYGAKQYHKLGLDTYRAVVTLLVVCVPLSLLWVFMDKILVLIGQDPLISQGAGRYMVWLIPGLFANAVIQPLTKFLQTQSLIYPLLLSSAATAAVHVPLCYVMVFKTGLGYTGAALTISISYWLNVAMLVGYIAFSSSCKETRARPTVEVFRGVDAFLRLALPSALMMCLEWWSFELLTLMSGLLPNPELQTSVLSICLTSVTLLFTIPFGLGAAGSTRVANELGAGNPDGARSAVRVVLSMAGIDAVVVSGSLLAARRLVGIAYSSEEEVISAVAAMVPLVCITAITDCLQGILSGVARGCGWQHLGAYVNLGSFYLLGIPMAILLGFVLRMGSRGLWMGIVCGSLSQTTLMSAITFFTDWNKMAEKARERVFSDKQPQEPGP

SEQ ID NO: 238225 - protein, 63 aa, Zea mays
  Clone ID: MRT4577_148851C.1.pep
APCVLVVSLPGRPRLCILGGGSLLPVWTCKPITLSRWIPLFPWLRQAPLRLRIGFAGMPPGPG

SEQ ID NO: 238226 - protein, 38 aa, Zea mays
  Clone ID: MRT4577_148852C.1.pep
PSTYFFISITQIGESKTRAKHLTIIKLKSYVLILFLTH

SEQ ID NO: 238227 - protein, 59 aa, Zea mays
  Clone ID: MRT4577_148853C.1.pep
RGMRDTIQNEQIPLPRHYLRSCRPSKDTEPHGRITISIQGRDFSIGGLPQGAEGGGNQA

SEQ ID NO: 238228 - protein, 104 aa, Zea mays
  unsure (1)..(104): unsure at all Xaa locations
  Clone ID: MRT4577_148854C.1.pep
VGTADARAPPPPSYCXCEAFIGILTSDEQPGWTLPRGGLPAPVPGASRGSSGPNRAWLVNRTSTCLAGWRLLMGFGKIRTGFLTVVPKVALACKKATLVMNEPK

SEQ ID NO: 238229 - protein, 95 aa, Zea mays
  Clone ID: MRT4577_148855C.1.pep
YQKEKKLQFCCKVSSYVWEPCNVAKGHETDFPRVFVYICLKKKKKKKKKKKKKKKKKKKKKKKKKKKKKKKKKKKKKKKTLGGGPGPKFPLKGGK

SEQ ID NO: 238230 - protein, 91 aa, Zea mays
  Clone ID: MRT4577_148856C.1.pep
MSMLLSFLLALMTSAVFSLCLYSFWIMFLTFYLMKCSFKIMFPSTLLGTGEKWTMMKTISVTEYLNYEAGKFSKSKGIGVFGNDAEDTNNP

SEQ ID NO: 238231 - protein, 255 aa, Zea mays
  unsure (1)..(255): unsure at all Xaa locations
  Clone ID: MRT4577_148857C.1.pep
MLVDYGNDHGNAPNLHHQPDPNSPTQRPARHHPRPYALPWYQDTLWGGLINKLSKRRALPFPEERDDFVAPEEYLPGYKTRNHGTNAAAGRSGSHDSRVSGAESETTHVGSGTPKEPKTGMVEANNSSSSSSSQQPSPNNAGSDDEKNRETPPDNLEDSSDPYLVDWNGPSDPDNPLNWAPARKFFVTALLCLLTFSVYMGSAIYTPGVELLANYFGVGVVPATLXLSLFCLGYGLGPDGGVELGIRDPSYRSVD

SEQ ID NO: 238232 - protein, 318 aa, Zea mays
  unsure (1)..(318): unsure at all Xaa locations
  Clone ID: MRT4577_148858C.1.pep
DLMKXTXEFSKENIIGTGRTGTMYRAVLPDGSFLAVKRLQDSQHSESQFASEMKTLGQVRHRNLVPLLGFCVAKKERLLVYKHMPLGSLYDQLNKEEGSKMDWALRLRIGIGAAKGLAYLHHTCNPRVLHRNISSKCILLDEDYEPKISDFGLARLMNPIDTHLSTFVNGEFGDLGYVAPEYARTLVATPXGDVYSFGVVLLELVTGERPTHVSSAPENFRGSLVEWISHLSNNALLQDAIDKSLVAKDADGELMQFLKVACSCTLATPKERPTMFEVYQLLRAIGERYHFTADDDLVLPPLSTDSDGVTLDELIVAK

SEQ ID NO: 238233 - protein, 89 aa, Zea mays
  Clone ID: MRT4577_148859C.1.pep
NCIHALVISLLLCYLNSTNCWLLYTRKICIKPWRFPTGYPYAPLRILSAHLLDKRPVTLCCFLQLYHPQCYNETRTCSRDINSHLDVGV

SEQ ID NO: 238234 - protein, 67 aa, Zea mays
  unsure (1)..(67): unsure at all Xaa locations
  Clone ID: MRT4577_14885C.1.pep
SIXKHPVXFQIFCPETXXLNSHFNISFFXIGSISRNPXILFLTDYKKALIQLFLPAQPPNSIHILCI

SEQ ID NO: 238235 - protein, 65 aa, Zea mays
  Clone ID: MRT4577_148860C.1.pep
TTLTNQKYEFNTLFLHKYMNIFTITANRICYTSDCDILHPRQLLFELQPKITKRTLAMFKLTLKP

SEQ ID NO: 238236 - protein, 47 aa, Zea mays
  Clone ID: MRT4577_148861C.1.pep
GRTSLSLTLIPWFSRFLFLRMAPSMSLLEVGEVLLHQGALDVIYVLV

SEQ ID NO: 238237 - protein, 63 aa, Zea mays
  Clone ID: MRT4577_148862C.1.pep
PNVMISWGPSVWVESFDSGRPWPLKMRASCVPPCFRSCFINGVLPSCGLCGIVALPLAIACQV

SEQ ID NO: 238238 - protein, 78 aa, Zea mays
  Clone ID: MRT4577_148863C.1.pep
TQGSRLWPIDCGGRKDMTTLPVTVIQAYRKKLPKMLMELESERKDMVVAPLNDPGQPRADLRRPARAVSVGGSRSIRP

SEQ ID NO: 238239 - protein, 161 aa, Zea mays
  Clone ID: MRT4577_148864C.1.pep
TSGLPGRGPSPIFGRFTGPAPLCSPFPRAAASTPPPASQCLPTALRARQATSRSRSRIQTNQYITTMVLDSLSSPHRRSQNTFFVSSAKKPQSSRDDSWSALVERHRFLLTTLLVLAFLCTVYLYFAVTLGASDACTGLTGAERIECQARSVLQHGKLKFR

SEQ ID NO: 238240 - protein, 83 aa, Zea mays
  Clone ID: MRT4577_148865C.1.pep
TGDIQTWWQEDPISEYALLGSLCVTPSLLRLSLCFCCLDLMFHAVHFHLSLFVYHLLSGLAGLLLPSEVWAPTLIMIKNVKIT

SEQ ID NO: 238241 - protein, 41 aa, Zea mays
  Clone ID: MRT4577_148866C.1.pep
FGLNGYLVKFSQIFVSKVGSSIRTMNLRESVPRLASTQRAP

SEQ ID NO: 238242 - protein, 47 aa, Zea mays
  Clone ID: MRT4577_148867C.1.pep
GCVLVGGLQIRRSSYHDVIRVSEIQKVLDISGVQTYIINSARVVFLN

SEQ ID NO: 238243 - protein, 64 aa, Zea mays
  Clone ID: MRT4577_148868C.1.pep
FSMFFFTCNYILPVMATQVFSINNSIQINFGSCTLCKWFSPFMFQLLSCSLSFQLKASVRRFVL

SEQ ID NO: 238244 - protein, 75 aa, Zea mays
  Clone ID: MRT4577_148869C.1.pep
GRKISTLFWAPGFVTPRGQKTRAQKIPKTPLRSPAENSAGMVSLKKDRWKKISPPQRVPPFYNQSPPVGWPFRIC

SEQ ID NO: 238245 - protein, 60 aa, Zea mays
  Clone ID: MRT4577_14886C.1.pep
QRHYTEDVGRAASTRMWAWFKNGSTPYFTNHTSIYKWNPRETYPPLITLTSTSPIQPTFF

SEQ ID NO: 238246 - protein, 52 aa, Zea mays
  Clone ID: MRT4577_148870C.1.pep
CSPVSQSKELTMSVTTTSHHRLCSVGILGCPSRRSGFTSRSRSEQSIILAPL

SEQ ID NO: 238247 - protein, 86 aa, Zea mays
  unsure (1)..(86): unsure at all Xaa locations
  Clone ID: MRT4577_148871C.1.pep
LPNTFFNIKQGPRHTNKEEVHKGYMVIIVEIDLYYKNPGNSFHSHGGLKAWGTPXXXLLCIQNNLPFKHNTLLLNIIQPFIVTNFP

SEQ ID NO: 238248 - protein, 72 aa, Zea mays
  Clone ID: MRT4577_148872C.1.pep
HQIDRTDDKFVQWEVRRLLLLGLRARSVSSRRDGSKIFFLQITLLNTLRDSTLNTTVMSLWQIGWYDVRTGR

SEQ ID NO: 238249 - protein, 109 aa, Zea mays
  Clone ID: MRT4577_148873C.1.pep
SVRTRWRDRGFSRLAPKLWGLCTVRTGGRVAGDGIQDRSGNAGNVAPLLLLLAPEEGARLEKGVRVVAGLFLLPHGVASVDATRDGEGDRRDHGQQVLATAREWRRGEI

SEQ ID NO: 238250 - protein, 82 aa, Zea mays
  Clone ID: MRT4577_148874C.1.pep
KTNKNPYQLNKGSGPNLAPGKGNPETPKGGGGAKLSLETKKKKTGGGVPALPYGGLPIPRVKTGKTPWQAEAKKVRGNWQAH

SEQ ID NO: 238251 - protein, 58 aa, Zea mays
  unsure (1)..(58): unsure at all Xaa locations
  Clone ID: MRT4577_148875C.1.pep
VCFLTKTYTSDCIPKKWLAYLHSINQHIKPLVPLQAITIFIQKSNNYSFLVGGGALXX

SEQ ID NO: 238252 - protein, 417 aa, Zea mays
  unsure (1)..(417): unsure at all Xaa locations
  Clone ID: MRT4577_148876C.1.pep
MFNKIIKRGNRKGARGDSAEVAARPAAPSSSSGSGGGGAGGAAPVTVNHASRATAPSPSSPTSPHVAPSAFATNPAVGAASPPLLEPLPLLRDVAAADRPGLILRKLRLVAALFDLSDSLKHPREKEAKRQALLELVDYVQAPAQAAGANAPTRLPDHVQEALVLAISANIFRPLPPALHESAAAIDPGAAPDDDEEPYLDPSWPHLQLVYELLLRYVVSPDTDTKVAKRYVDHAFVLRILDLFDSEDPREREYLKTVLHRIYGKFMVHRPFIRKAINXVFYRVIFETQRYNGIGELLEILGXIINGFALPMKEEHKLFLARALIPLHKPKSVVIYHQQLSYCIVEFVEKDYKLADTVIRGLLKYWPVTNCQKEVLFLGELEKVLEATQPAEFQRCMVPLFKQIARCLNSSHFQVWL

SEQ ID NO: 238253 - protein, 130 aa, Zea mays
  unsure (1)..(130): unsure at all Xaa locations
  Clone ID: MRT4577_148877C.1.pep
TFGSIHAFAEYFSSSLMLFADEFIPFHYVEIRLWQDIKNPCCVNHDPIFXASCLPXSTKCXGFPDSVFYPLNFAPTLEANEKELANGRLAMLALLGFLIXHNVTGXGPFVNLLQHLFDPWHNTIIQTFFG

SEQ ID NO: 238254 - protein, 64 aa, Zea mays
  unsure (1)..(64): unsure at all Xaa locations
  Clone ID: MRT4577_148878C.1.pep
XPLFQKGSYATRLSSTKRSSSRYRSECAAVRKSPPGKTTTVDPHAADASDSAMAELEPQEGIPP

SEQ ID NO: 238255 - protein, 49 aa, Zea mays
  Clone ID: MRT4577_148879C.1.pep
EGLLNNPLGPDDINLFLVNDYFSKPFSVEDFPKLIVHVDVTDKDLPPVI

SEQ ID NO: 238256 - protein, 60 aa, Zea mays
  Clone ID: MRT4577_148880C.1.pep
ICWVDVLLVGGRPFFLWFFLEWKSDLHQVMKFNTDTDFSRTAVPDDECLHTITTKRTNAG

SEQ ID NO: 238257 - protein, 64 aa, Zea mays
  Clone ID: MRT4577_148881C.1.pep
LSVTNNLNHSHEFIIDSQFHTVTNNLTVTQMTDPSQIRLESQIHTLTVNIDNSLRDYDSLDFIF

SEQ ID NO: 238258 - protein, 64 aa, Zea mays
  unsure (1)..(64): unsure at all Xaa locations
  Clone ID: MRT4577_148882C.1.pep
IIRCARNKAPVWKSWSVTTGPVYPXCVFCFLLVFFFFYICFFLFFFVVFFFHIISFFITSSAAQ

SEQ ID NO: 238259 - protein, 90 aa, Zea mays
  Clone ID: MRT4577_148883C.1.pep
REKGPFGGFKKPCSKMGRGVFLLKQRGIPPGGAINFFFPHQGIKREGPWGASPFPKSSPHVLGGKEPQGNSFKALKVFSPMLGELQWFSF

SEQ ID NO: 238260 - protein, 70 aa, Zea mays
  Clone ID: MRT4577_148884C.1.pep
IASTLQRDRIEVTELCTTGSDSTVIHCRYVQPTINNDIHYHSKRITVYILRTKQHLCLYKVLNRRRVQPL

SEQ ID NO: 238261 - protein, 78 aa, Zea mays
  unsure (1)..(78): unsure at all Xaa locations
  Clone ID: MRT4577_148885C.1.pep
MGLPAMLRSLPWLRAWRVALSQIEVELRREMTLFKTLAITFSRMMIFTGITSLYGSILQLGRPAXSLVWGWVIISFFT

SEQ ID NO: 238262 - protein, 69 aa, Zea mays
  unsure (1)..(69): unsure at all Xaa locations
  Clone ID: MRT4577_148886C.1.pep
PKSLEEKLKFSGISYKVHINRGCWHAFMNTSLGALKRKKGMGFFYXNQEPVDLAWSRFFFWMGRFLGFV

SEQ ID NO: 238263 - protein, 71 aa, Zea mays
  unsure (1)..(71): unsure at all Xaa locations
  Clone ID: MRT4577_148887C.1.pep
VSIFLGLTVQKYFFRSAMAARSGPAHTKGAWFSCYINAIFXVPPTVGVMVAVIMRHPIXLKQSGMARGMLW

SEQ ID NO: 238264 - protein, 92 aa, Zea mays
  Clone ID: MRT4577_148888C.1.pep
SSIFSLDGMIHMPLGSLGALFLMSRATIDLSGYNVLMHLVCCQGPMVVSPSPRPSSRVCLLARLGFCVRAGYVMYVMLGYWPGALHDGHVKK

SEQ ID NO: 238265 - protein, 33 aa, Zea mays
  Clone ID: MRT4577_148889C.1.pep
PAAPFDTGLNINKVQAPEVFLKYFKHVRRSAYM

SEQ ID NO: 238266 - protein, 41 aa, Zea mays
  unsure (1)..(41): unsure at all Xaa locations
  Clone ID: MRT4577_14888C.1.pep
GPFFFFFFFFFFFFFFFFFFFFFFFFFFFLVPKTKNXLSFP

SEQ ID NO: 238267 - protein, 122 aa, Zea mays
  Clone ID: MRT4577_148890C.1.pep
KAPTKVAPTGASFASQAPKSFFSPGLAPRPFVQVSYPIGVPEPLSVFVDTFGPGPIPPKEFLKFVKENFVFRPGIFFINLAPKKGGNGRSPKTGASGPFGRAAPPFPWEVVNPPKGENPFFA

SEQ ID NO: 238268 - protein, 54 aa, Zea mays
  unsure (1)..(54): unsure at all Xaa locations
  Clone ID: MRT4577_148891C.1.pep
LKRAGLSAVPADXCSRAQKAVGYICKCNGGRGAIREFAEHIFLLLEKVNNSCQK

SEQ ID NO: 238269 - protein, 75 aa, Zea mays
  Clone ID: MRT4577_148892C.1.pep
LRRLNLNAGSTTTTSPPPRPPHPLSSSSIVKPAPSFHKPSQTGPTGKDAAFSVSFWVLTSTSFPTSPSFRPKPNR

SEQ ID NO: 238270 - protein, 75 aa, Zea mays
  Clone ID: MRT4577_148893C.1.pep
KTPGRKFRSLIRQDHVSQFRYNRRKAGHLSLHLYELDRGPHTLCVKCRKFRLQHVRSGSGVEPCDAVLCKGIANV

SEQ ID NO: 238271 - protein, 109 aa, Zea mays
  Clone ID: MRT4577_148894C.1.pep
VGFASAFVGLSLAVWCLCNGAPICGRCLFWGRLVPSYLAWPPAPPRWCYFCALCYMWLCPPPVDSLFLPSVCGGGASVPFVGCEPVLRLCVSSLWCPLRLSLSVCVRNF

SEQ ID NO: 238272 - protein, 77 aa, Zea mays
  Clone ID: MRT4577_148895C.1.pep
MSRCLPNGSVYVCNLPPRTDETMLAEYFGTIGLLKKDKMTGCLKIRKPFVPGHYKGKSFLPNSISDWPYACACSAVS

SEQ ID NO: 238273 - protein, 119 aa, Zea mays
  Clone ID: MRT4577_148896C.1.pep
RPGGWGQFLAFYAPRWGGTREKAAPQPLILVPLPPLPAGKVWKRPLDLPPPPGFSFFQKFLTCSQPPFSIWVSSAPAPSVSRVPWSCGVWFYNKNCVCTGWSGLGTFLGLWKLWLFGLL

SEQ ID NO: 238274 - protein, 92 aa, Zea mays
  Clone ID: MRT4577_148897C.1.pep
KGGRRGRRPLIFAKEVFHWHLFFHLHSFNYVRHVAKFYANVFCSLTVYSFRHYLRATTASLTLITLHYFITHKFSIHKEKFQWVKISSTSSI

SEQ ID NO: 238275 - protein, 916 aa, Zea mays
  unsure (1)..(916): unsure at all Xaa locations
  Clone ID: MRT4577_148898C.1.pep
MGGENMSTTGAGDDILPVTSVHKPAEGVSVTPPAALRAPGHIEEHTXSRRGRRREAXPMRHIGPHEQDTPHILQSHPDNIDIRLIPKVGMTFSNVDEAYNFYSQYAYEVGFPLKKYRERKNCKWLNCSMEGKNAERVAGNPRIRNTCSKRTQCKAGMKLKKIYDDAKEKVISVRIDLVNYEHNHEFLKKDTEKGQLQCNKTHDREYMEFLSAMQESRIPPHCIMDFVTEMHGGPENVPITVQDMSNLKKAWQRERNANDVSKLLSFFSLCKKDNPQFFSDFQLDKEGKILSIFWSHASQQVEYIDFGDAVTFDTTHKTNMYDKPLGMFVGSNHHLQCTIFGFALLGDETVDTFEWVFNTFKTCMGCDGPRVMLTDQDPAMPIALGRVFPNTIHRLCLWHVQNRYMPHLNELYARFEDMDFKTRFQSIIHHPLNEMEFEAAWQMMLDDFQLHENNTLARLYEIRKDWVPAFFKGDYCGLMVSTQRSESMNKLVKSAHVDANTPLHEFAKQMMKLLHSRKMKEAKEALGCMGQKDTTTLYMFEIRVARADTRAVMTRFQETVKYATAYRIDRDTEGEEHDWVVKHTTRSNKIVWGQHQFKIRADVDAGKYSCECKHWEHTGLFCVHLVRAFMHLQIERIPSEYILQRYTYSAHQDVAFSRDDRNLKGKDGETRSYRQKMLLKKAMKVVHHASLSKAGNDKALEMMDELLGLLMRVEPDIGTGESCGTSVCDDIQVEAYETEEMAIDNLRKLDDGNEEILMGSNTNECNTKDDQCNMQILTLEHNTDIQLVESSSMDVEARKKLEFHMEGVNLTRSDKAKPKGRTIKSSEQQVLKLGAKGAKKMSRKCQKCGIADGHNSRTCLTVEDNRVRLANLSGRKRGRPPGSRNKLIAVALQWNETSTSKKRTVDVGDDDSSGRE

SEQ ID NO: 238276 - protein, 133 aa, Zea mays
  unsure (1)..(133): unsure at all Xaa locations
  Clone ID: MRT4577_148899C.1.pep
MSEEKHHHLFHHHKKDEEQPTGXGEYSETVATEAVTTGDGENEYEGYKKEHKHKQHLGEAGAIGAGAFGLYEKHEAKKDPEHAHRHKIEEELAATAAVGAGGYAFHEHHEKKKDHKXAEEAPGGEKKHHHLFG

SEQ ID NO: 238277 - protein, 75 aa, Zea mays
  Clone ID: MRT4577_14889C.1.pep
SVTAPAADNSRRECKTGEGRGHQYRTAMPTEEAHAAEAPATQEPAEDPAAPGGRGTQREKSAQRQQGPQREEAHR

SEQ ID NO: 238278 - protein, 112 aa, Zea mays
  unsure (1)..(112): unsure at all Xaa locations
  Clone ID: MRT4577_1488C.1.pep
MSWLCQSSNGGATEQMTYTEQPLERLDYLRTELDEHSSXAIKDLLSDASLVRFIESRNCNXHKASEMMKAAVKWPLAFKPENICWDDIAQEADTAKIYSAXYKDKHGTTVIV

SEQ ID NO: 238279 - protein, 44 aa, Zea mays
  unsure (1)..(44): unsure at all Xaa locations
  Clone ID: MRT4577_148900C.1.pep
KEKGLSSIIEVVKMDYVNTAFERLEKNDVRXRFVVDVEGSNLDA

SEQ ID NO: 238280 - protein, 49 aa, Zea mays
  Clone ID: MRT4577_148901C.1.pep
FSTNPYSFPLFLITIEPSQNLFIYTYCLYSFTIIYPDTHTFPRLNFTTF

SEQ ID NO: 238281 - protein, 178 aa, Zea mays
  unsure (1)..(178): unsure at all Xaa locations
  Clone ID: MRT4577_148902C.1.pep
MSEEKHHHLFHHHKKDEEQPTGXGEYSETVATEAVTTGDGENEYEGYKKEHKHKQHLGEAGAIGAGAFGLVRCRRPCRAIDRCFVALTYHTSXHYSVDIHVMNSADRXLFLSFLQYEKHEAKKDPEHAHRHKIEEELAATAAVGAGGYAFHEHHEKKKDHKXAEEAPGGEKKHHHLFG

SEQ ID NO: 238282 - protein, 69 aa, Zea mays
  Clone ID: MRT4577_148903C.1.pep
QNVAYPKNVCDPLLREWVKPSHNPIIVPEGGINATQFRDPTTAWRVPGPEQWQLFFCNYLILFIFICYI

SEQ ID NO: 238283 - protein, 100 aa, Zea mays
  Clone ID: MRT4577_148904C.1.pep
PRVHLHMHSLLSDWTNLYCGDFMNYDKLIQWEDPIGNKLLNVALDYHFPENGSRLKKQGNLFQEQLPLGKKNGWFTLQKEGNYRTNERAGLLRRPQGGHP

SEQ ID NO: 238284 - protein, 219 aa, Zea mays
  Clone ID: MRT4577_148905C.1.pep
MAPVKVFGPAMSTNVARVLVCLEEVGAEYEVVDIDFKAMEHKSPEHLVRNPFGQIPAFQDGDLLLFESRAIARYVLRKYKKNEVDLLREGDLKEAAMVDVWTEVDAHTYNPAISPIVYECLINPLMRGLPTNQTVVDESLEKLKKVLEVYEARLSKHDYLAGDFVSFADLNHFPYTFYFMATPHAALFDSYPHVKAWWERIMARPAVKKLAAQMVPKKP

SEQ ID NO: 238285 - protein, 240 aa, Zea mays
  unsure (1)..(240): unsure at all Xaa locations
  Clone ID: MRT4577_148906C.1.pep
MAPVKVFGPAMSTNVARVPVCLEEVGAEYEVVDIDFKAMEHKSPEHLVRNPFGQIPAFQDGDLLLFGTMINLPFSVTTLSLSKXVNCLASVSRHLNGANXKANPSFLFWWVDAPSPNILSNSQKHCVLAPFSESRAIARYVLRKYKKNEVDLLREGDLKEAAMVDVWTEVDAHTYNPAISPIVYEYLINPLMRGLPTNXTVVDESLEKLKKVLEVYEARLVQHDYLAGDFVRFPELNHFP

SEQ ID NO: 238286 - protein, 119 aa, Zea mays
  unsure (1)..(119): unsure at all Xaa locations
  Clone ID: MRT4577_148907C.1.pep
MKGKYFHDISIVRAGGESTVLLPESDGXVVVFRSFMKAGICFPSHRMLVEVLKKFEIFLHXLTPEALVKVGVFIXAMRSQGLDPDADCFCNIHALSYXTKAIGKEQYHNNFGCYSRTRG

SEQ ID NO: 238287 - protein, 307 aa, Zea mays
  unsure (1)..(307): unsure at all Xaa locations
  Clone ID: MRT4577_148908C.1.pep
GSFVASCRLIYFGVEAMITLQSSGVETGLVILPVIDTTVAKCKVLVTNMLLLVLVVWVDSRCLNLQXRLDHLLLDCHAMKVQSLALGLQXLGRXLLMDLMESRGHLFRVFHLGNPRCHQVLIHHFLGSNNSINRYLSSNIPSFRSHHLQTCPNCRHQLTCFHIHKDLGLLFPSFHQWVDHQXSQVNPPLPPMPHPTAMHGSQSQMMPQMPQHMMGLNQMHAGSVPPGTVPPMGGFPSGMGNIQGASGSSGVQNFPMGGMYNRPQGQMAPQGQMTSIPGLSSYQGMGNVGLTPPPPQHPPPRGGSATQ

SEQ ID NO: 238288 - protein, 71 aa, Zea mays
  Clone ID: MRT4577_148909C.1.pep
FGSKREATLGMRSPIRRTKWLIQMTSPWIAYLVKVGIPRGLSFQTSPKGCAHVVPAKGIQASQTHPSRCDS

SEQ ID NO: 238289 - protein, 35 aa, Zea mays
  Clone ID: MRT4577_14890C.1.pep
FYQINVYYILINDHETFSGPHFGEIHSKNLPKYKF

SEQ ID NO: 238290 - protein, 84 aa, Zea mays
  Clone ID: MRT4577_148910C.1.pep
TMSWNSTTMVDQEVKELLSKAYENAKTIIAAHKRELHALVVALLEHETLTGDQITALLNETLANRETGIDWPQEEEEVNEWSNR

SEQ ID NO: 238291 - protein, 41 aa, Zea mays
  Clone ID: MRT4577_148911C.1.pep
KKKQQGMLGQLQGVGLAPSRPRVIEVQGRCRLDNIYSPYAW

SEQ ID NO: 238292 - protein, 265 aa, Zea mays
  Clone ID: MRT4577_148912C.1.pep
MFAASNATATRLILPRPSVPFRALLIPRRRGRLRRAVHANAVAGGGGGSEGVAKEPPRTLFPGGFKRPEIQVPALVLRVGTEEALRCGDEVADAVSRGVGIVVLEAGEEGGGRSYEAARALRATVGDRAYLLIAERVDVASAVGASGVVLADDGIPAIVARSMMMKSNADSIYLPIVARRIQSANSALSASSSEGADFLIVNTGSGDFVDVINDVVGQHVKIPIFVTLNHLSEGTYSDFTSMLLQSGASGVVTSLAGMETPHDDL

SEQ ID NO: 238293 - protein, 239 aa, Zea mays
  Clone ID: MRT4577_148913C.1.pep
MVKIAALALLALLGSVACQGDNGSPAESPAYSASSAPASLKAISYPPGASPSQPMPSPIVLSPSPLAQPPSPSVDLGAPSRSPPVYPPSVSQPALPPSASSSAPSASSPEYLPSPSPSVSGQTPPTYSPDPSPPSHPPTISPSPLSPSTTIAYPPSPSPSQPAYLPSPSPINPRQPNPASPSPSPAPYISSPSPSPSPSPDSPAPAPYPPSNSPSPSTPVSGLSVGHYSYSCPNAEAIV

SEQ ID NO: 238294 - protein, 48 aa, Zea mays
  Clone ID: MRT4577_148914C.1.pep
RYSHFPRGAYLMKVVRVRMIYSVKKQQQQKTKRLGKNRNFIWLLHLVI

SEQ ID NO: 238295 - protein, 52 aa, Zea mays
  Clone ID: MRT4577_148915C.1.pep
CVSALCMSSVFFSDSYVFVLFFFVALGAFFLAKRMRPNAACPRVVILYLTSH

SEQ ID NO: 238296 - protein, 100 aa, Zea mays
  unsure (1)..(100): unsure at all Xaa locations
  Clone ID: MRT4577_148916C.1.pep
FLLNAHPNXPRSFLYKKKRTTSXXPLFPQSSSTLFHFHNLNATTPSFLPPSLLSFLITQIHPIPTLPQHSIFPFSQLFYTPFPPNFSPPYFLTILSYFIL

SEQ ID NO: 238297 - protein, 99 aa, Zea mays
  Clone ID: MRT4577_148917C.1.pep
PDPVPAGPPPAQRQLHQTMVRGGSGTRNTCGLTQNCSLSLWPHLWGVLFQVRLRRRGGRLGADCYGCVYDSNQVVFPITLAPTSESSGGQLENRNPHEF

SEQ ID NO: 238298 - protein, 104 aa, Zea mays
  unsure (1)..(104): unsure at all Xaa locations
  Clone ID: MRT4577_148918C.1.pep
STLRTGQDMNPNHIIXAYSTHLKXSGKMKRTYRIDIAKSAMLSEIPPHDTNWNYITSAFIALKXLTNXGIGAGGFDIIXSARHTNGSPPPHFCYSRGAVVLHIL

SEQ ID NO: 238299 - protein, 34 aa, Zea mays
  Clone ID: MRT4577_148919C.1.pep
SLIKQLYIMSKLPVLPTGITSFQLWLKMMKPPAA

SEQ ID NO: 238300 - protein, 43 aa, Zea mays
  Clone ID: MRT4577_14891C.1.pep
NLFNPIMANMNQGACADKGGSAGMNEHAPSENGGPGPKIEEVD

SEQ ID NO: 238301 - protein, 43 aa, Zea mays
  Clone ID: MRT4577_148920C.1.pep
IFLIRKVMKRYKEQKDLHMVFINLKKAYDKIPRDLMWWALDLV

SEQ ID NO: 238302 - protein, 170 aa, Zea mays
  unsure (1)..(170): unsure at all Xaa locations
  Clone ID: MRT4577_148921C.1.pep
RSARLDRGEQTHTWVYISGATHFSAILIDTYYRYDLTTHLSPYXSKGTTFVAFNQLRTLNPADYVEQQPSPFIQVTTAYXSNNKLLHWNQLSALNHGAYVQQQILLPWNQLAVANRASFLTQEKWLTGXQQCGGNPATLLQLQQLMPCGQLALTDPATSYQQHIIGGALF

SEQ ID NO: 238303 - protein, 40 aa, Zea mays
  Clone ID: MRT4577_148922C.1.pep
VPTSRARLTLLLTTHHNNDKFSKTISRPIIIPLICTLCCP

SEQ ID NO: 238304 - protein, 237 aa, Zea mays
  Clone ID: MRT4577_148923C.1.pep
MVRGSRPLGQTISKKFSDMRYSNISWPFLLLLCFVSMADAEYMKYKDPKQPINSRIRDLIGRMTLAEKIGQMTQIERQVASANVMKQYFIGSILSGGGSVPSPQASPAIWVNMVNEFQKGALSTRLGIPLIYGIDAVHGNNNVYNATLFPHNIGLGATRDPGLIKRIGEATALEVRATGIQYTFAPCIAVCRDPRWGRCYESYSEDHKVVQQMTDIILGLQGEIPVNHTKGVPYVAG

SEQ ID NO: 238305 - protein, 107 aa, Zea mays
  unsure (1)..(107): unsure at all Xaa locations
  Clone ID: MRT4577_148924C.1.pep
MANDEYDFLFKVVLIGDSGVGKSNLLSRFTRNEFNLDSKSTIGVEFATRSIQVDSKTIKAQIWDTAGQERYRAITXAYYRGAVGALLVYDISKHQTYDNVTRWLKEL

SEQ ID NO: 238306 - protein, 177 aa, Zea mays
  unsure (1)..(177): unsure at all Xaa locations
  Clone ID: MRT4577_148925C.1.pep
MASESVVFEILHWRGQVRFGKHSHMTARDLLVDLAGININHLIMAGFTDALKPEKFSVMHFKRWQAKDMLWLSCYECXFHVSKGKSEGTLTPKEEKXYDDANIIFMRAVLSVLVDRLVXEYVXYTDGKELWDALTTKYGALDASSDLYVIESFHDYNMADNRSIVEQAHEKKKKKSG

SEQ ID NO: 238307 - protein, 124 aa, Zea mays
  Clone ID: MRT4577_148926C.1.pep
MVLSGQFYLSNVLVTPDIIKNLLSVRQFTTDNNCSMEFDLFGLSVKDLNSRNTILRCNNSGSLYTISLPTARAPPATTHYALAAVAAPASLWHQRLGHPGPNVLAKLSNIVVVSCNKPKHADAW

SEQ ID NO: 238308 - protein, 159 aa, Zea mays
  Clone ID: MRT4577_148927C.1.pep
GYLEAGRKVVELSSLRRRCSTEQGSKRCVKSCRLRYTNYRALIWATNCVRVCRGSLIAKQLPRRTGNDVRNRWNTKLIASSCGSAGSTPPPPSPASCTSSSAPSPYGDDGTGTTTARERSSTPPWTATRRHGWTSSSPSCWPTRPTTLAPPPRWAGSWA

SEQ ID NO: 238309 - protein, 266 aa, Zea mays
  unsure (1)..(266): unsure at all Xaa locations
  Clone ID: MRT4577_148928C.1.pep
HRPNRPRRHPNSFTVHANLSASSVPTLSPPPPPVFLSLFPPHKQGGSRSFDFGADDVLCSYDDFAASSEPKRPDPADSVPDFHDSRLGGPFVKPYEQESXGKEDVLSAVEKCMKKYADNLLRSLEGITSRLSQLEIYCYKLERSIGELRSDVLRDETDIXLKSLEKHLNEVHRSIQILRDKQELAEAQKELAKFQLTQDTSXKXKEDVPTFIPEQKKPEENPDTSNQQLXALVLPHQVNLPSLAPRASESVQQYKKSPVQPSDPTP

SEQ ID NO: 238310 - protein, 183 aa, Zea mays
  unsure (1)..(183): unsure at all Xaa locations
  Clone ID: MRT4577_148929C.1.pep
ATPGSRETWGATTSRGRCSCNHHDLLLLLLVPPFAGAWGKEGPMLVXTIAVKDLSDKAAAAAKALLGESSGGELSAACPWADQERWHYRWAMLLHYSGTLQLCXFEISGDCHNGAAQGGVCVVVALILYAGHLYSYRQTTVNNLAESLMVLAHFVGVRHQPLHVRFXDGVGGDSISVHRFRAK

SEQ ID NO: 238311 - protein, 40 aa, Zea mays
  Clone ID: MRT4577_14892C.1.pep
HILRIHICTFLPLYFGRMWDCNSPRNSDLISFGFRIGLIR

SEQ ID NO: 238312 - protein, 157 aa, Zea mays
  unsure (1)..(157): unsure at all Xaa locations
  Clone ID: MRT4577_148930C.1.pep
HIDAVDLSALDCPXSEKEVMDTIACLPSDKATGPDVFTGRFYKTCWNIIKVDLRGFIKPVGTXKVDLMEALAVLHQGNAQKLWQLNSSYLXLIPKKMDASSPGDFRPISXKLVTKLLANRLGPRLHELVAANQSAFVRGRSIHDNFMLVQQSIKSLH

SEQ ID NO: 238313 - protein, 126 aa, Zea mays
  Clone ID: MRT4577_148931C.1.pep
PPPKRGGGGGSPPLLFFLFLKEGVFYCSGGGRLLIKEPLFCCPPPAVLPPPRKDQGGYFFSLSLLFPGGRFSPRKLISPRPVFPPPTLFPGNLGGFHPQETVLVPSGGPLGKLSRQAFDGPGGESP

SEQ ID NO: 238314 - protein, 130 aa, Zea mays
  unsure (1)..(130): unsure at all Xaa locations
  Clone ID: MRT4577_148932C.1.pep
RSRQVEEAPPQAMEVRVXKILYTGLCHIDVYFCELNRQTPPFPMILLHEVGGIVESVQHGVTELTAGXDHVLPVITAKCKDCAHCNSEESNLCDLLSINAYSGVMITDGESRFSIDAKPFLHFSTTSTFS

SEQ ID NO: 238315 - protein, 196 aa, Zea mays
  Clone ID: MRT4577_148933C.1.pep
LVCGILTYQYGLQFAAITATTMVAYTAFTITTTAWRTKFRRQANAADNRGATVAVDSLINYEAVKYFNNEKFEVSRYDKALKHYEDASIKVTTSLALLNSGQNMIFSTALAAMMYLAADGVATGTLTVGDLVMVNQLVFQLSVPLNFLGSVYRELRQSLLDMETLFNLQKVNVNIKEKPNAPLLALRKGGEIRFEN

SEQ ID NO: 238316 - protein, 54 aa, Zea mays
  Clone ID: MRT4577_148934C.1.pep
VKNQESLVPPPVPLGLFLSNPPNFVGFKKKKKKKKKKKKKKKKKKKKKKKKKKK

SEQ ID NO: 238317 - protein, 237 aa, Zea mays
  Clone ID: MRT4577_148935C.1.pep
MQLKPPARPKLYSGLMPQEDLDPYRDLIPGLPEDLAKICLALVPRAHFPAMGAVSKRWMSFLESKELVAVRKEVGKLEEWVYVLVPDAGAKGSHWEILECSGQKQSPLPRMPGLTKAGFGVVVIGGKLFVIAGYAADHGKDCASDEVYQYDSCLNRWTVLAKMNVARCDFACAEVNGVIYVAGGFGPNGESLSSVEVYDPEQNKWTLIEGLRRPRWGCFGCSFEGKLYVMGGGGSAL

SEQ ID NO: 238318 - protein, 201 aa, Zea mays
  unsure (1)..(201): unsure at all Xaa locations
  Clone ID: MRT4577_148936C.1.pep
LPSPLPSRDTSCRPTRRLPCPSAPPQAPRRPLQQPPSSTSSXPLPCRVSRSRVPRTSSAFPTPPXRLASRSRRARRKAAAAXRRRRDAGAGAGAAPARRRSAPPYTPAGARRRASPLASPSRNPYRSMAPACXKQKQESSGRKRXPRRQRLAFGLRSRRRRGGGFVPVPGEATSTLEPSEKRREQTGLLIFYVTEILFTRG

SEQ ID NO: 238319 - protein, 231 aa, Zea mays
  unsure (1)..(231): unsure at all Xaa locations
  Clone ID: MRT4577_148937C.1.pep
MEVEEELPASADLTGGSKQATTTTPFYLALDHTASARSSPPPAEAPPLPRAAAANSERGSEIIKAKIMSHPLYPAVLRAFIDCRKVGAPPEIVGRLSALADDVEMNSDDRQEQRRAVDPELDQFMEIYCHMLVRYRQELTRPIQEADEFFRSMEAQIDTFSLLDDNGYEGCGSSDEDEQXSRRLGRPVSXRPAAPSGEDNELKNRLLNKYSGYLSSLWRELSRKKKKXKLP

SEQ ID NO: 238320 - protein, 99 aa, Zea mays
  Clone ID: MRT4577_148938C.1.pep
CMPVWKDQTMPLILSGSYIYPVATPNYSICISKDWLSRSLKKMLLRKTAIFIEIDNDMTPRLAPQYTACPAISPYYILSLNENDEVLGDYVTLYHGQLC

SEQ ID NO: 238321 - protein, 51 aa, Zea mays
  Clone ID: MRT4577_148939C.1.pep
FSLFFFPYDKPDFLTSHRTHAHHPILPSRKNRVKYLKLHWSASPPPQECQA

SEQ ID NO: 238322 - protein, 92 aa, Zea mays
  Clone ID: MRT4577_14893C.1.pep
IKEAFSTFYYPCLKGKNDNKNFVLQKRETIKFSAPLGKKTWQFQLLKKADPFLPGRRFFLAWGPLGKGKKTNSSFFGEEPWGEGPLKKTLGS

SEQ ID NO: 238323 - protein, 180 aa, Zea mays
  unsure (1)..(180): unsure at all Xaa locations
  Clone ID: MRT4577_148940C.1.pep
MEVEEELPASADLTGGSKQATTTTPFYLALDHTASARSSPPPAEAPPLPRAAAANSERGSEIIKAKIMSHPLYPAVLRAFIDCRKVGAPPEIVGRLSALADDVEMNSDDRQEQRRAVDPELDQFMXWICMSCVNVRAQEIYCHMLVRYRQELTRPIQEADEFFRSMEAQIDAFSLLGDYV

SEQ ID NO: 238324 - protein, 202 aa, Zea mays
  Clone ID: MRT4577_148941C.1.pep
ARPLIHRPIKDKETSEGWVPTRRRRRRCQRRRWPALAKNTVKQYHRIVVGFLLGFFLVLVLYTTLSSQFGSRTAIGVLQSLSAVRTDQATGAAPPLPSSNTPSNLAQEEDGGHKNDKPNKTEEEHIQDDAHRIGKNNQSEAKLDVKNNGQNEEQTGQPAANDASDRMEEELIRQEIDQGSKKNDTIMEPAATAPRKPICDLS

SEQ ID NO: 238325 - protein, 256 aa, Zea mays
  unsure (1)..(256): unsure at all Xaa locations
  Clone ID: MRT4577_148942C.1.pep
GTPAGTGPEFPGRPTRPPLPFGQCFRYIEIFKSSRAEVRTHYDPPRKLMAMQRPGPYDRPGAGRGYNSIGRGAGFERMRRGAYGGGYGGYDDYNGYNDGYGFGSDRFGRDLNYCFSGMSDHRYGDGGSTFQSTTGHCVHMRGLPYRATENDIYNFFSPLNPVRVHIEIGPDGRVTGEADVEFATHEDAVAAMSKDKANMQHRYVELFLNSTAGASGXGAYEHRYVELFLNSTAGAGGGAYGSQMMGGMGLXNQSSY

SEQ ID NO: 238326 - protein, 75 aa, Zea mays
  Clone ID: MRT4577_148943C.1.pep
GTDDDSVSRSQSWPVNHDEAGPSADAQSFSDTIKSRLQSVSTKYKDSITKSTRGWKERWFAQSSPMSNFGLEMRR

SEQ ID NO: 238327 - protein, 481 aa, Zea mays
  unsure (1)..(481): unsure at all Xaa locations
  Clone ID: MRT4577_148944C.1.pep
MAATPTIVLVPVWGIGHFVPMLEVGKRLLARSALPLTVTVLVMPLPAEAKRASEITEHIRQQEASGLAIRFHHLPAVEPPTDHSGIEEYISRYVQLYSPHVKAAVAGLTCPVAGVVVDIFCTALFDAAHQLXRAGLRVPDHQRRDVRALAALPDARRGGSRRGRVRANGRRSGRARAAAGAGVLXLPTGLENRKIPTYRWFLYNGRRYMEAAGIIVNTIAEAEPRVLAAIADGRCTRGVPAPPVYSIGPVIPSTPPAEQQAQECVRWLDSQPPSSVVFLCFGSGGCFTAPQAHEIAHGLDRSGHRFLWVLRGTPEPGTKLPSDGNLAELLPADFLARTKDRGLVWPTKAPQKEILAHAAVGGFVTHCGWNSVLESLWHGVPMVPWPLGAEQHYNAFTLVADMGVAVALNVERKRKNFVEATELERAVKALMCDGETARKVRDKVMEIKAACRKAMEEGGSSNMSLQRLCDALVEGAVHPGK

SEQ ID NO: 238328 - protein, 90 aa, Zea mays
  unsure (1)..(90): unsure at all Xaa locations
  Clone ID: MRT4577_148945C.1.pep
TNGFRVMLRHVDSGKNXTKLERVQHGIKRGKSRLQKLNAMVLAASSTPDSEDQLEAPIHAGNGEYLIELAIGTPPVSYPAVLDTGSDLIW

SEQ ID NO: 238329 - protein, 48 aa, Zea mays
  Clone ID: MRT4577_148947C.1.pep
MSTLNPVYHDQSNEADNVSLIPSRLSSDGIGEVADFVEGAERGRLEDY

SEQ ID NO: 238330 - protein, 106 aa, Zea mays
  unsure (1)..(106): unsure at all Xaa locations
  Clone ID: MRT4577_148948C.1.pep
MYSIGASYRTDPLXIRALDKIIAASSAPGTASXLTAVPDAAGLRGXYTGSPLRRYQRTESXDYIVREYQGSDAMRDYYVPMLFSNISREPLSATNRIXRLLSLVND

SEQ ID NO: 238331 - protein, 91 aa, Zea mays
  Clone ID: MRT4577_148949C.1.pep
SRHRETQGTRTPPRGKLVVAANPRSHRQWGLGVNPGGFVPSSGLCPWPSWGGNDHYGEPNCTPKIVIHIESALDAVRDLCAPILRARLRAT

SEQ ID NO: 238332 - protein, 84 aa, Zea mays
  Clone ID: MRT4577_14894C.1.pep
MARAMLVALALVVVVAVEIATSAFAGKIRMRILDSIDDSIIYNNRSNASAWYNMTYFESECRVFYSDMKLADETGSAPAPATTP

SEQ ID NO: 238333 - protein, 79 aa, Zea mays
  Clone ID: MRT4577_148950C.1.pep
ERVELLLKSESQCRVVVLMGSTSDLGHCEKIKKACGNFGIPCELRVTSAHKGPDETLRIKAEYEGDGIPTVFVAVAGRS

SEQ ID NO: 238334 - protein, 95 aa, Zea mays
  Clone ID: MRT4577_148951C.1.pep
AHFPIKGSFTNSNPAMKIRTFLGKKKFKKVTMLAGVPILRSKKVRAEFIFNGNAVKLFFGSAAFINQKCHVKKRDSRKFLNGIYVSAKGVFKKDQ

SEQ ID NO: 238335 - protein, 87 aa, Zea mays
  Clone ID: MRT4577_148952C.1.pep
HTISPSPLTGSLYSPRVRAHCLRPAHLPTVLGMGAGANNHEETSPLIPSADAAPADEKPPQAPAPDAANYYADSVPVEIKEPKSAHA

SEQ ID NO: 238336 - protein, 197 aa, Zea mays
  Clone ID: MRT4577_148953C.1.pep
AVDYYRSAPSPASMEAFYLHLLRSCAALPHVAAVHAHLARAHPNASLFLRNCLLASYCRLGVGAPLHAARLLDEMPRRNAVSYNLVIVAYSRAGLPALSLATFARARARARVVDRFTYAAALAACSWALDVRTGKAVHAMVILGGLGNGVFLSNSVASMYARCGEMGEARRVFDAAEERDDVSWNALLSRVRRAGAR

SEQ ID NO: 238337 - protein, 104 aa, Zea mays
  Clone ID: MRT4577_148954C.1.pep
KAAGDDVSTRQGHHHQAPPPTDGEVRIQKVDKIEVVYKNILSKPKLYKPTAATGKHPTAGHEVAGWKKKVVDQNPSRPRSAVHVDDINKLSERYITEMKKRFLG

SEQ ID NO: 238338 - protein, 87 aa, Zea mays
  Clone ID: MRT4577_148955C.1.pep
SCSFGEGTNREQNLNARLDHKNQGDVTGLRGYTFHGKESQAGVPMRAQVKALNWVWEHVRHCPVQSRVAQTSFVDFGRGGILFGAPP

SEQ ID NO: 238339 - protein, 267 aa, Zea mays
  unsure (1)..(267): unsure at all Xaa locations
  Clone ID: MRT4577_148956C.1.pep
AALPTVFRLLGFYNLSSPPPXPHAPPPGAPVPXAPXPLPWPTRXPPFSPPSPPPXTTPPXPILPPHHTPPXPTPPGTPSGPPPPPPAPPRGALYPPPXFCQPPRPPPSSPPPPTPPHLPTHPPPRPPPTPPPPTAPRPPPAPPPHPPPTPPLPPHPPPPQPPXTPTPPTPPTPPPPPLLPHPDPAPPPPPPPPPPTPPPSSPPHPPPPPPTLPPPPPHAPPPPPPPPPYXPPPPXPPPPPPXPPPPPHPLLPPHPPSPPPSLPTPPP

SEQ ID NO: 238340 - protein, 282 aa, Zea mays
  Clone ID: MRT4577_148957C.1.pep
MSAVVCGKRSSSIFADELLPPSPTSPHSSHQPAPKRSRRSPSHRGSSDGHRREALVHHLLLLFPDMDPQLLEKALEASGDDLDSAIKSLNLLRLESAEAILSSTGFKSENGQHTAIQPPVEGIPNGGVDTTTEHHPTVDNYQTSKNGSEWVELFVREMTNASDIDDARARASRALEALEKSIVERAGAEATQNLHKENMMLKEQLTVVLRENAVLKRAVAIQHERQKEFDERSHEVQSLKQLVLQYQEQVRTLEINNYALTMHLKQAQQSSSIPGRFNPDVF

SEQ ID NO: 238341 - protein, 105 aa, Zea mays
  Clone ID: MRT4577_148958C.1.pep
KRANSYPYQRVILPWFGSSDSNARQIQSHTCGSDQVQSITISYWGEAHHTNNVGQPMSQTGCTCRDSALYNGWSPYHTKGGAYSKQDFMSCGSNPPICGNVPHIF

SEQ ID NO: 238342 - protein, 68 aa, Zea mays
  Clone ID: MRT4577_148959C.1.pep
MEGAAGQMLVPILGIVAVAAVTFYTVSFMEMRDKSFEELDEKYSDFDESGGRQRRSRRRAERDRKKSK

SEQ ID NO: 238343 - protein, 64 aa, Zea mays
  Clone ID: MRT4577_14895C.1.pep
YFDGEHYFNTMELTYEQYFTHWSSTSNTQDATHTLKPFKRITYLNESLDHPLHFAGLIIRLVHT

SEQ ID NO: 238344 - protein, 108 aa, Zea mays
  unsure (1)..(108): unsure at all Xaa locations
  Clone ID: MRT4577_148960C.1.pep
PPLVFPLFRGPPYKVGGGVGAPPGHVGGGPLTKQPPKGLGFALQATGFRPGGLLIWPGFLNYKNENFFGPXXXXKKKKKKKKKKKKKKKKKKQKKKKKKKSTLRCYHC

SEQ ID NO: 238345 - protein, 142 aa, Zea mays
  unsure (1)..(142): unsure at all Xaa locations
  Clone ID: MRT4577_148961C.1.pep
MCTIWAHGSWSLRHMIXDNCSPLRHPSSPDVDSSILSSAIXKCPRHACAAAKCCDCSASYAAKNLKTCDGRVASGDWTTLSHLILAGNYLNIXGLLDLCCPTVXDMIEGKTPXEIRNTFSITNDFTHYWVDEIRMLNQWAYE

SEQ ID NO: 238346 - protein, 88 aa, Zea mays
  Clone ID: MRT4577_148962C.1.pep
SSFLLQVSNLTNLSQFSRQHPRVSFLLFLIYLCEHVYMVKFLMAAAHLWNDHRREPICPGHGCHGLGHASILCEISREPICHAKTPSP

SEQ ID NO: 238347 - protein, 72 aa, Zea mays
  Clone ID: MRT4577_148963C.1.pep
FGCRCQFSCYVIVRLSSICSTQKGNGQKRSVDHIYKYGIVLVFSHEQQLLSLLLYTFLSLTSRSPALLYASC

SEQ ID NO: 238348 - protein, 186 aa, Zea mays
  Clone ID: MRT4577_148964C.1.pep
MTTAINSDRSGEGSWDPHCRPHYRHGYGYGCLRGCCCCRCLLLTLLVILVVLVALAVALVVKPRKKHLELNQELEQDLLQDLPTTSPTTVPAGAAYLSVNITLIFTVENTDKEGIRDGVTDGDAMYHGVHHGVAVGPAVEHAVHKTRLIKSLVNIHRFDERQTEAQNLMQDVMINDRIKLRINVDI

SEQ ID NO: 238349 - protein, 82 aa, Zea mays
  Clone ID: MRT4577_148965C.1.pep
TVFCRSTQFTPMIKSSSTVGLNLVDVLAWSSPVHIVAYYILAASSNGGGLSFVWPVDAAVLPRHPCACACHASGHSLVNMHQ

SEQ ID NO: 238350 - protein, 55 aa, Zea mays
  unsure (1)..(55): unsure at all Xaa locations
  Clone ID: MRT4577_148966C.1.pep
RCILALNSCPATNTLRTPSSLLQMXRAPSVGIYTNTASMHQHLKKKNSTPSRSKF

SEQ ID NO: 238351 - protein, 90 aa, Zea mays
  Clone ID: MRT4577_148967C.1.pep
VFACAREQGFNVIEVNTSDMRNGAYVRQKFEEATKSHGLEKWSQEEVINPLRDDSLDPDSGTPDRTEYQCLMSCATRVMIDCDQQKSPVG

SEQ ID NO: 238352 - protein, 100 aa, Zea mays
  Clone ID: MRT4577_148968C.1.pep
LKKKKKKKKKLKKKKKKKKKKKKKKKKKNSKKKKKKKKRFFPWAAPPLGGFLDFSFPLGAVVPFFWGAHFPFWGVFFHFLGRFFTPFCLGNPWVSPIYSL

SEQ ID NO: 238353 - protein, 85 aa, Zea mays
  Clone ID: MRT4577_148969C.1.pep
PSLIRSLEEVLILLRRPSPPALSTIHSNTLLFLVLPSAWEPPLYKRMKASQALHQMGWRNHLRSPLKSRLPLCRFFGEQSQGAPE

SEQ ID NO: 238354 - protein, 93 aa, Zea mays
  Clone ID: MRT4577_14896C.1.pep
QVSMSKVPSNRSIERVSALEVLQLAARVVCLWTDGSGGIVGCTRSMARRVLLVNRSLALLPPGPVGVYGLPLVRRRHGLGIEDVSQDAMATGL

SEQ ID NO: 238355 - protein, 80 aa, Zea mays
  Clone ID: MRT4577_148970C.1.pep
TRKLPKQFFYIQIETKNKTRSSSASSLSTTIESARAPASERIWARQRREASGRGRSSDGGQRRRRGVGGRGRRAERPGIR

SEQ ID NO: 238356 - protein, 86 aa, Zea mays
  Clone ID: MRT4577_148971C.1.pep
CSKTNKTQRMRGRNPFYGTNLKAGRWSLFFHPLCPGLCRGVPYLYRLASHPGFPGCPPPDGARPDRALDQWRGLHGAWAAPRFPAF

SEQ ID NO: 238357 - protein, 480 aa, Zea mays
  Clone ID: MRT4577_148972C.1.pep
MGSKSVDEVLDAAAAGVHYSALRLDGQASATTSGLENGHQEPFVIGVAGGASSGKSTVCKMIIDQLRDQRVVVVTQESFYYGLTDEELVHVHNYNFDHPDAFHTELLLSCMQNLKCGKAVDIPNYNFKTYKSVPNARKVNPSDVIILEGILVFHDSRLRDLMNMKIFVDTDADVRLTRRIHRDTIDKGRDLKAVLEQFSKFVKPAFEDFILPTKKYADVIIPRGGDNDVAIDLIVQHIRTKLGQHDLRKIHPNLYVIQTTYQIRGMHTIIRDAATATHDFIFYADRLIRLVVEHGLGHLPFQEKQVITPTGSVYTGVEFSKRLCGISVIRSGESMENALRACCKGIKIGKILIHREGDNGQQLIYQNLPKDIANRHVLLLDPILGTGNSAVQAISLLLKKGVQEANIIFLNLISAPQGVHVVSKRFPRVKIVTSEIEFGLNDDFRVVPGMGEFGDRYFGTDEYQSSTPFFCDDKNRVRLL

SEQ ID NO: 238358 - protein, 50 aa, Zea mays
  Clone ID: MRT4577_148973C.1.pep
TRETTLLCDHRRRPCATGKQCLQNMQAGIGTRSRRDPWYMVTSLFSHGYI

SEQ ID NO: 238359 - protein, 239 aa, Zea mays
  Clone ID: MRT4577_148974C.1.pep
MGSKSVDEVLDAAAGVHCSALRLDGPNVQFSASSEEEPTTSGLENGHQEPFVIGVAGGASSGKSTVCKMIIDQLRDQRVVAVTQESFYYGLTDEELVHVHDYNFDHPDAFHTELLLSCMQNLKHGKAVDIPNYNFKTYKSVPNARKVNPSDVIILEGILVFHDSRLRDLMNMKIFVDTDADVRLTRRIRRDTIDKGRDIKAVLDQYSKFVKPAFGDFILPTKKYADIIIPRGGDNDVAI

SEQ ID NO: 238360 - protein, 92 aa, Zea mays
  Clone ID: MRT4577_148975C.1.pep
LIEACCVISAIATHNTLFKSTSILIFLYTSTSRVHPYTMYFISHHHIRSNLYVYYCYKNSTNFYVANISDIRSRSESNSNSLYLHLLWVVNL

SEQ ID NO: 238361 - protein, 68 aa, Zea mays
  Clone ID: MRT4577_148976C.1.pep
LSLGVPFAVAGFPFCHVPAVFKSSEIVYLAGRPWWWVAPRRGVEPICGCAPVGLRRWVFRVPDLVVGF

SEQ ID NO: 238362 - protein, 51 aa, Zea mays
  Clone ID: MRT4577_148977C.1.pep
TTHSTHALLTAKQFTPLIHSTTTIYYLRQVAILLHTTLTIPSLKYKLSHDL

SEQ ID NO: 238363 - protein, 72 aa, Zea mays
  Clone ID: MRT4577_148978C.1.pep
TIHQSKVNKKREGAPPSGGNRFPIPLGLAATPGTRSFFFSRANLLRNLKGWFPHFFPSGGGGNLTRGGGFTF

SEQ ID NO: 238364 - protein, 40 aa, Zea mays
  Clone ID: MRT4577_148979C.1.pep
ARWSIHMPICTRIDPHDRCDWLIQTCTGLCQYLTRSVSRS

SEQ ID NO: 238365 - protein, 41 aa, Zea mays
  Clone ID: MRT4577_14897C.1.pep
CSFRTYHIILGLVLLFPWVVAQIRTVFHCSPFFNQPFSCFV

SEQ ID NO: 238366 - protein, 95 aa, Zea mays
  Clone ID: MRT4577_148980C.1.pep
MDHIILNDEVEPIEVVAAPDDDERQYPEFVDKWDMLEFEDYDGDIVTGAQFEEADEEEEEENIAMGVDEQGEGDEEETLAVACADLKWSARFAVP

SEQ ID NO: 238367 - protein, 104 aa, Zea mays
  unsure (1)..(104): unsure at all Xaa locations
  Clone ID: MRT4577_148981C.1.pep
RTMRDVGGGAPYPMVTRTIYDNRVVMMKVMMEARGLWEAVDTRNVERNEDWWAMEAILRAVPAEMHQSLGAKTTAKEACDNLKTMRTGSGLVKRXKIQQLRQEY

SEQ ID NO: 238368 - protein, 58 aa, Zea mays
  Clone ID: MRT4577_148982C.1.pep
EVHTSKATRKCCTIYVGKRSMNSTRTQLPYHTYKFTPQVQETVPVNHYSDPEGQHNRT

SEQ ID NO: 238369 - protein, 58 aa, Zea mays
  Clone ID: MRT4577_148983C.1.pep
PQSVGAQVMHARVLRAMKGDSLQVPRKYHYLMHMRVPAARCHDHVQARRACARHLGGH

SEQ ID NO: 238370 - protein, 199 aa, Zea mays
  unsure (1)..(199): unsure at all Xaa locations
  Clone ID: MRT4577_148984C.1.pep
MRYQAPVTEMGSHYEVEADVWSARVLLERQLVHAPNSSRTPSLWIHSRRRSASILRGTSQPPEKEGGEKNLRLAPNHLLSXLHGTLPGDYGFQPLRLSEAYGTVRFIXLSXLAYGQLNNGRYLMLCAARAILPEILRKMRIIPTQTGLARVLRGEFLPGPSYIYXGDYYTLLRFIMAFMGLLQHRRMLYWYNPGSMGKQ

SEQ ID NO: 238371 - protein, 92 aa, Zea mays
  Clone ID: MRT4577_148985C.1.pep
QSLRLSARREEDSLVSRVDLRRSVTGARRISSYRGHHAHDLRVGIHGGLQHADDSVVVLRCRSRACTHGCSLGRAGRRANSEGAPPRGGPRG

SEQ ID NO: 238372 - protein, 166 aa, Zea mays
  unsure (1)..(166): unsure at all Xaa locations
  Clone ID: MRT4577_148986C.1.pep
MSAMATTAACSLLKSXSFAGSRLPSATRTTTPSCVAGTTPRAGGGPIRESISSPKPAYDQTAIRFRRIKEAIVTRERSRSYMTDMITHGDNDEKIVXAGSAYLMCTYELYKDPTESVYVVXEPVSSSVDEWLIDKLLSGHEGEQXKDLFLHELPVXVDLTEDYVVA

SEQ ID NO: 238373 - protein, 269 aa, Zea mays
  unsure (1)..(269): unsure at all Xaa locations
  Clone ID: MRT4577_148987C.1.pep
MQEATRSASPSHDFDKHGQDHLEMVATRTPPGEPEKQQLAPVMSRGPEVHEKMNAKLFMTLVCMSFLWIGSQIPLYLFGSVLPLIYQDVGGVDRYIWFVIGYLIPNAALCPFVGALSDLFGRQKVAIVGQVALIIGPIITATANTMNIAIAGQVFSGIGAGLNELIALAGTAEVVPIKDRGKYVGLVVITILPFCPSVLWAQLIAQQSDWRYNGILVGXWNFVGLILCIFCYKDPSRLXGDTAXHVLXQVDYIXRIPSTVGITLXMMGL

SEQ ID NO: 238374 - protein, 101 aa, Zea mays
  Clone ID: MRT4577_148988C.1.pep
RSKCRQSREGPARRCSRLAFTTQSLTRSGLHPLAFLLLPSRSRTLLRTHRTDGRRAGSPAVPPPSRGSWRRMPLSPSRAAEGLPTRCPASSVLPSSTPSSL

SEQ ID NO: 238375 - protein, 108 aa, Zea mays
  unsure (1)..(108): unsure at all Xaa locations
  Clone ID: MRT4577_148989C.1.pep
PARSLGHPVGTPGALSADPETLTKNRXLKVIHXRWAMLGALGGVFXQLLARNWVKLREAWWXKAAMQSLREGGLDYLCNPSLVHGQSILSICACHVALMGSAKGYRVS

SEQ ID NO: 238376 - protein, 89 aa, Zea mays
  Clone ID: MRT4577_14898C.1.pep
REGFLGLVTPLDQVRKGHCKSARRALKRFLPISRHSKSQFCCLLVFGGKCCYKVVSKNILDPTISSSPPCPFGISKDHQALVAFWNKCN

SEQ ID NO: 238377 - protein, 71 aa, Zea mays
  Clone ID: MRT4577_148990C.1.pep
IWAFPSTFLIRVRPRIYPIHITIPNSRARLTKPPGLNLSVSTKSQCLRFHACAAPKCINTPNPGDKKRPCP

SEQ ID NO: 238378 - protein, 479 aa, Zea mays
  unsure (1)..(479): unsure at all Xaa locations
  Clone ID: MRT4577_148991C.1.pep
MALRAVELRRFLLRRIGGGEAALPPLAWRGRPASTSAPADDELAGKSAYEVLGVGETSSSAEIKASFHRLAKETHPDVAAAAGSRRFLQILAAYEILSDSQRRAHYDSYLRSQRRVVGKHPRPSQFVYPSGSGSGIVVPRESNVVEWLKWYRLTIDDIVTKKRVATGSGYFERLESELYTAIHAAYYGPDVDSMDVLPDCFEAEERSAYETSELLHLVSGRDLFGIVTVTDSVKELSDVCREKLVPSGCRSSEFTHVVSRNANKNSISMNPVDMNKQEMRYENDVPSSDSFKDIELQICGKLVATATRSPNCDCIDKSDLEEDHIHVYLVPNANISDLTHGKLLLGTITGLATTGEEGSCCVYDGHNIKTHIIMKHRTLMXYWLFEPRCYMHDTGGWYIETYGRDKKGRTIPSQRQWDGSNEHSEKRLHPAMYLAALAYRSLDLEDAGRRRWNVTSLLQWSLSHLRQLXKKVANGEKGD

SEQ ID NO: 238379 - protein, 500 aa, Zea mays
  Clone ID: MRT4577_148992C.1.pep
MALRAVELRRFLLRRIGGGEAALPPLAWRGRAASTSAPADDELAGKSAYEVLGVGETSSSAEIKASFHRLAKETHPDVAAAAGSRRFLQILAAYEILSDSQRRAHYDSYLRSQRRVVGKHPRPSQFVYPSGSGSGIVVPRESNVVEWLKWYRLTIDDIVTKKRVATGSGYFERLESELYTAIHAAYYGPDVDSMDVLPDCFEAEERSAYETSELLHLVSGRDLFGIVTVTDSVKELSDVCREKLVPSGCRSSEFTHVVSRNANKNSISMNPVDMNKQEMRYENDVPSSDSFKDIELQICGKLVATATRSPNCDCIDKSDLEEDHIHVYLVPNANISDLTHGKLLLGTITGLATTGEEGSCCVYDGHNIKTHIIMKHRTLMVKHMHWYQVGDTVSPCECRCSRARLPPSRYWLFEPRCYMHDTGGWYIETYGRDKKGRTIPSQRQWDGSNEHSEKRLHPAMYLAALAYRSLDLEDAGRRRWNVTSLLQCSVRQADIKPAQD

SEQ ID NO: 238380 - protein, 180 aa, Zea mays
  Clone ID: MRT4577_148993C.1.pep
MRKHGWQLPYHPLQVVAIAVFAALGFAFYVFFLPFVGSQTSQYVAMGLYTPLITCVVTLYIWCAATNPGDPSICKSAKLHSRMDKDGRQSHSHMDSDHGLNAADNSEKLSSMLERKDSPSWPRCSQLLCLVCLPFSCLCKRCLRSDDRHSEENMSEEGMFFCSLCEAEVLKNSKHCRVCD

SEQ ID NO: 238381 - protein, 103 aa, Zea mays
  Clone ID: MRT4577_148994C.1.pep
FTQQQIQLFSRNSFPLFGLYITHRTFSPTPYRLTTTELRIWHYVLNFRFQLFETAHLKPDTEFCNSLFSNFCVRSCQTHLNKLVQHHMGFNSTIYTTVQNLMD

SEQ ID NO: 238382 - protein, 108 aa, Zea mays
  Clone ID: MRT4577_148995C.1.pep
KKFLKAPPPHPRNLLAPKNFQKGGGPPRGQIGLLAPGNRGYWKNWASSIFSFNRTPGCGISAPPKRKGVENISWLLRPGHFEPKKTCLGGVFPQKKKKKKKKKKKRFT

SEQ ID NO: 238383 - protein, 71 aa, Zea mays
  Clone ID: MRT4577_148996C.1.pep
PAMKTMAAHDQFRASIFWVGTKGPTRGLTGRFRIICPILDRREKGVTWWTGELSQQVGGSKQPVSVYVEQG

SEQ ID NO: 238384 - protein, 67 aa, Zea mays
  Clone ID: MRT4577_148997C.1.pep
VYYMIYRGITLPNRQAFASDLMPAYNLRMARPLDDLDANTYRPTSPWLITPLTILDPQYIHFRLTTT

SEQ ID NO: 238385 - protein, 255 aa, Zea mays
  Clone ID: MRT4577_148998C.1.pep
FINRIAIKKSKKGKKATDIVVAVASKKGSVNSNNNSSNSSNNLNKKKTDEKKSENGSPAKKLLNKKNVKESTNVVVKKSKTNKNNSSGGTEYGEKPADFDDGGWFTVQSKSAKQKNKIDDSTASQTEGSSPKLQGSKNSKSPKIDSKESIAQLSSNAPNILLPDQQSKSEHQADVVKAEVVEPVTEIDNHPVDHVTNNVMVKVGVEKRSSGNIPHDVADVTAVEQGAIAFDELEEWTDAKPDRKRTNKKKTRRDI

SEQ ID NO: 238386 - protein, 43 aa, Zea mays
  Clone ID: MRT4577_148999C.1.pep
YYIIPILVNILILTLQLCILLITYLNLHSIHIYLLLIPILNNL

SEQ ID NO: 238387 - protein, 121 aa, Zea mays
  unsure (1)..(121): unsure at all Xaa locations
  Clone ID: MRT4577_14899C.1.pep
NSTLIPQQKYSHLFHPIYGVRPRPFSNARHRKHRXPHLTTTPHNSSPYQLPTPTNHPARLQQHDHDHNGHNKKHHDKERRPRAQGARHGRHRHLQSADRTEGGLGPWVGVGVGARCXDRKA

SEQ ID NO: 238388 - protein, 208 aa, Zea mays
  unsure (1)..(208): unsure at all Xaa locations
  Clone ID: MRT4577_1489C.1.pep
TRHRGKWRTVGATRRPRGRASRAGPTSRRLALRRRGXMVWQPRKFHRSRRSCTTLRPSTVTHASASPSSSXRRRTRTSARAPSQRRTAPRRSPRTRPPXAAARRERXRSPSSCXRCRGAAAPLAARXARRRPPRGRRRRARARRAPETMTKSRXSSSFPDADSRDRXRWSPRSPLAPALLLRPPGRPPPHWRDRSRSRPRRRSARRAR

SEQ ID NO: 238389 - protein, 156 aa, Zea mays
  unsure (1)..(156): unsure at all Xaa locations
  Clone ID: MRT4577_148C.1.pep
DKPMLVYEYLSKGSLDDILHGSSGVLLTLEQRLNIAAESAEGLAYMHSKTGKIILHGDVKPANILLNDCFTPKISDFGISRLIVIDKEQTDHIIGDRTYMDPVYLRDGILTDKSDVYSFGVVLLELISRKKXTYSDNNSLVRSFLDAHKNQKEEQS

SEQ ID NO: 238390 - protein, 67 aa, Zea mays
  Clone ID: MRT4577_149000C.1.pep
FFFFFFFFFLNLNRPSYLAKVLGLTQAGQIFITCGVQKTIGHFWGLIPTSENNRTSIILGAYLGFSS

SEQ ID NO: 238391 - protein, 76 aa, Zea mays
  Clone ID: MRT4577_149001C.1.pep
TFQYCKQQIRGGKVGWPQVRWAWTSARWDLATWLSVLARGDTPDYGGLKPRTTDDRRCKNEARCNTMTVSRSSLGT

SEQ ID NO: 238392 - protein, 115 aa, Zea mays
  Clone ID: MRT4577_149002C.1.pep
SKIPVGKPAPQFGFGPKPPTKEYPLRVFQGPPESWGNLVKRNFPPGGPPLALFWPLGTPPLFFYSFCGQVVFFPVPPLFGLPSPPLFRIFSPKCPCGVNIDFGAGFPDRPGVFFR

SEQ ID NO: 238393 - protein, 93 aa, Zea mays
  Clone ID: MRT4577_149003C.1.pep
HNSHICVFRTRLFLHMYMNLGRMNTTPVLHQSNFCDIFLGHYSLTSNVSGRTSSIHPLLGLLITTDALGDSLHVCLDHLFEPRQGVRKVPHAW

SEQ ID NO: 238394 - protein, 166 aa, Zea mays
  Clone ID: MRT4577_149004C.1.pep
LQYLVLTPNTLISKTVALSDMILGGHEPDLPSVDQERRNHLWNTSYLQSCSGEVRLPQLASDALPWRCPPNQGTPGAAPQPRRGRRGCGGVVWGHRTSRDWERWDGLRWKRKEASRFARLGGHALFNSAPRAGSIAGPGRRRPGGTVFPLFACFALPPGPRPAPRG

SEQ ID NO: 238395 - protein, 204 aa, Zea mays
  Clone ID: MRT4577_149005C.1.pep
MPPLAPPHGEKGGRQRQGAAAAPAPAQRSASFHGRGTEQRHHQPQKQRPKTLPDLLAGVRGASFRSGSPPPDGDAGRRTPSKVLVSVAVQQSMWPLHVMAPAEWTVADLVAAAVALYVKEGRRPLLPSTDPAAFGLHYSQFSLDSLNPKEKIMELGTRSFFLCPRSWAAGQDASSSSGTANGVTSAASGKTPAWLSYMPFWPTM

SEQ ID NO: 238396 - protein, 106 aa, Zea mays
  Clone ID: MRT4577_149006C.1.pep
TCVDTSSERNLILASSFYSTQLLATIHQACKCKRNREQRVKTKQTTLSCNNDRNICVPPICEAQTLVVLSRAGAATVSRREQQAARRGSDPMAFPGGKLPLLEAVR

SEQ ID NO: 238397 - protein, 158 aa, Zea mays
  unsure (1)..(158): unsure at all Xaa locations
  Clone ID: MRT4577_149007C.1.pep
NLXASRIPAGARVHSRGGGSSMHGVQRVDFADFSGXLKPGSCSVSAGGGDASFSDVLGAXLVTKATGENAVRAPAEAXLKAGINGFGRIGRDFLRCWGGGEDXPIDFFVLNDRRGVRNASHLLKDDSVLGTFKGDIKIGGHTDHQGAAGAHQGPAHDG

SEQ ID NO: 238398 - protein, 102 aa, Zea mays
  Clone ID: MRT4577_149008C.1.pep
KKGPPFNKKPRGEMGQTWGKINGLLGDLNFFFTKGKNGGRVPIKKGFFFKKTSPGKGKKISKRGGVFPGGPGQRPGPENKGGHLLPGGDHFKGPKKLSRGAG

SEQ ID NO: 238399 - protein, 516 aa, Zea mays
  unsure (1)..(516): unsure at all Xaa locations
  Clone ID: MRT4577_149009C.1.pep
SSITSHHHHLRLSHHHHLRLRRSQRLKATHHANRIAASSPRPALPPRHLPPCLLPGLGGPTLHKTLTTTTTTRAASQPTRSLVPILDRSPIVPLRPPTDRPLVVAPRPSGLAVADWLRGGRGALEGLPRAVLERADWIASLCDRLKLHLPKQFCGQLLRMPFPDGYPEYPTRRQFVDYLERYAAEFKIKPELGTAVXGALLRDARYDETSSGIWRVVTNGGDMKYIFHGAAAGHTAXKPAPSTRSWTCXSQGGSINQYEXTVHRAGRRRAGAARLQGHRLVHQPVPRVSFRASGDXLFRARSATLKLANPLLDLNNXEFSSGLSRPVTLYFCEALLLCKEAFFLYEIVRDHRGSSWVNLDKLGLRRPAAGPLELKKAQGRTPVLDTGALARIRAGDIAVVPAVARFRKGGQVELADGRTLDFDAVILATGYRSNVPQWLESSNDSFNKEGYPKTAFPHGWKGQSGLYAVGFTRRGLLGASTDAVRIAKDLGNVWREETKPTKRAGACHRRCISVVF

SEQ ID NO: 238400 - protein, 80 aa, Zea mays
  Clone ID: MRT4577_14900C.1.pep
GRNHSQRYIGSPPPPLPPQPQGEKAPNSSPPPLTSEKDAEGMRRRREEIREGTAAAAAGPAWRRVLRRTGSVGGSVGGRV

SEQ ID NO: 238401 - protein, 135 aa, Zea mays
  Clone ID: MRT4577_149010C.1.pep
MGGDQQLVPAAARVTPRRPMMSFRVPRRLVASRAAGGASPSPPVPVPAGLKTKKKKVAVARLGGKRRLFGAIRRLRMRWLAVLYRRTLRRLRAYYATAINDLLEGAAAIGSLRGPAGAADCAFGTAFAPVVAVGL

SEQ ID NO: 238402 - protein, 63 aa, Zea mays
  unsure (1)..(63): unsure at all Xaa locations
  Clone ID: MRT4577_149011C.1.pep
LTLGINPGXXGTQGLPRLVGLPKAIEMMLQSKFITXXEGKERGXIDEVCYYDELIKTSRLXAL

SEQ ID NO: 238403 - protein, 34 aa, Zea mays
  Clone ID: MRT4577_149012C.1.pep
LTRPRCSVACSRTTVATYTVNTVFRSRAVLADAP

SEQ ID NO: 238404 - protein, 241 aa, Zea mays
  Clone ID: MRT4577_149013C.1.pep
MAANLEDVPSLDLMHELLRRMKCSSKPDKRLIVIGPPGSGKGTQSPIIKDEYCLCHLATGDMLRAAVAAKTPLGIKAKEAMDKGELVSDDMVVGIIDEAMKKPSCQKGFILDGFPRTVTQAQKLDEMLAKQGANVDKVLNFAIDDAILEERITGRWIHSASGRTYHSKFAPPKSPGVDDVTGEPLIQRRDDTAEVLKSRLEAFHKQTEPVIDYYSKKGLVVNLPAEKPPKEVTAEVLKALS

SEQ ID NO: 238405 - protein, 42 aa, Zea mays
  Clone ID: MRT4577_149014C.1.pep
KSFIGIGGSAGRYLHWVLCVGQCCLKIIFGLNWGLWDFFWQS

SEQ ID NO: 238406 - protein, 66 aa, Zea mays
  Clone ID: MRT4577_149015C.1.pep
YYAIASTQSQHILKPKLITRERKGSCSSIRENTTTLGDSTHRKNSYTVERTTFAPKKKWVGPQTTP

SEQ ID NO: 238407 - protein, 52 aa, Zea mays
  Clone ID: MRT4577_149016C.1.pep
PDLYKETRGGSMVSEKLALCYTIFFFLLVKLAMFPLPVGCGLHSESGLCFRV

SEQ ID NO: 238408 - protein, 105 aa, Zea mays
  Clone ID: MRT4577_149017C.1.pep
MRIRRWRPNSSSRRLGSFVLCRCTCLSRSVARLGYSGTAIISRVQPISVQYGLGIPERDQEGRLITLEFDDFYLVNAYVPNSGRGLRRLIEASVGTDEDDGESNP

SEQ ID NO: 238409 - protein, 116 aa, Zea mays
  unsure (1)..(116): unsure at all Xaa locations
  Clone ID: MRT4577_149018C.1.pep
AAVLCISLVDIXADVVSHEVAACVLGGANVSEDGDAVHTDGEAHGYEVVAGPHDRSASALAAPSVLVRHCRSFVIVVETRWAWRTRVAFRVLLFIVRTSRFSYLKTTSTTRTQASK

SEQ ID NO: 238410 - protein, 66 aa, Zea mays
  unsure (1)..(66): unsure at all Xaa locations
  Clone ID: MRT4577_149019C.1.pep
INFFFXTRGAVNHFIYHYHPHKLHMPTTCGPDKPPDPELNHNFVFGQGSSFSLLVFFPLGGRKLPF

SEQ ID NO: 238411 - protein, 61 aa, Zea mays
  Clone ID: MRT4577_14901C.1.pep
VRRGPIDGVVSVSRNLARCMYCSGGVGLLSPVKIHMTPPVRSSAVGEKKLVRTLLEPNSEL

SEQ ID NO: 238412 - protein, 95 aa, Zea mays
  unsure (1)..(95): unsure at all Xaa locations
  Clone ID: MRT4577_149020C.1.pep
FFMSPIKMMLLGDDIPFLIVMSMXSXISIDIILRPIMIQNMIGKMIMLSMMLXTNMPNMMLLIMIASLILLMIMPIMNSSIILPNMMTLPQFYCD

SEQ ID NO: 238413 - protein, 51 aa, Zea mays
  Clone ID: MRT4577_149021C.1.pep
YFQIRTRVLQCFDRSGELQTQEMVLHGFLLSPFGHDERSLSCLRRLPRLLF

SEQ ID NO: 238414 - protein, 209 aa, Zea mays
  unsure (1)..(209): unsure at all Xaa locations
  Clone ID: MRT4577_149022C.1.pep
PFGAILVKMETAGMLVDRAYLSEIEKVAVAQRESAADKFRKWASKYCPDAKYMNVNSDTQIRQLFFGGIENIYKSGDFLPKSKAIKVPNNETAVSEGKXHISCKEGRIHCSLNINTETGRLSARAPNLQNQPALEKDRYKIRQAFVAAPGNTLIVADYGQLELRILAHLADCKSMLDAFKAGGDFHSRTAMNMYQHIRGAVEEEKVILE

SEQ ID NO: 238415 - protein, 421 aa, Zea mays
  unsure (1)..(421): unsure at all Xaa locations
  Clone ID: MRT4577_149023C.1.pep
SRSMKTIFGRKKIKKDGSEGKITAIERVEILQREDRELWICYSSLDSMSTLRLYESLKSKLERKPWTFDGYPRPGGSLYDFYEEYWCPFGAILVKMETAGMLVDRAYLSEIEKVAVAQRESAADKFRKWASKYCPDAKYMNVNSDTQIRQLFFGGIENIYRARQGLPKXKAIKVPNNETAVSEGKKVPKYRTIELFSIVEDLKTDIFTASGWPSVSGAALRNLAGKVPSDLVYSTDDVNDDECGIHSEISHCDLEDTSSYGTAYDAFGGGKEGKEACHAIAALCEICSINSLISNFILPLQGNHISCKEGRIHCSLNINTETGRLSARAPNLQNQPALEKDRYKIRQAFVAAPGNTLIVADYGQLELRILAHLADCKSMLDAFKAGGDFHSRTAMNMYQHIREAVEEERVILEWHPQPGQE

SEQ ID NO: 238416 - protein, 104 aa, Zea mays
  Clone ID: MRT4577_149024C.1.pep
LWGRSNTHTCRPTMMRRRIRVPPGEHRLRYTGCRSLSHPLCRRQSCDLHANCASMVRRMERKEEVVCCGQVRVSLSHSHRVWYISTQAPAAGAGAAGASRVWVW

SEQ ID NO: 238417 - protein, 80 aa, Zea mays
  Clone ID: MRT4577_149025C.1.pep
LSPKGSEPQKKTPCTAPSLGVIITTHPDKLLHCKKPIWGHERINNEAPRKWADLCYGGSSFHQACRTKLSLCNHANLHSA

SEQ ID NO: 238418 - protein, 31 aa, Zea mays
  Clone ID: MRT4577_149026C.1.pep
FLSIQFWGEVFFHGSVLSSHTLNARKETSGS

SEQ ID NO: 238419 - protein, 391 aa, Zea mays
  unsure (1)..(391): unsure at all Xaa locations
  Clone ID: MRT4577_149027C.1.pep
SRPAGIPTPSRHLHLSIGQEHGGETAFTPAVALATGRRVLLAGSRGQPGARRLRPVGSRSLGGVRDSAALIMGLLRCFTAYEKDDGVKLLIMKGKGRAFCAGGDVAAVVRSIHKDSWKYGADFFRNEFLLNYIIATYTKPQVSLLSGIVMGGGAGVSLHGRFRVATDNTVFAMPETALGLFPDIGASYFLSRLPGFYGEYVGLAGARLDGGEMLACGLATHFVQSNSLLSLEESLKKVDTSNAFAVCGIIDQFAQQPSLKESSSLNRLEIINKCFSKRTVEEIISALEVEASNSADEWVATTIQSLKKASPTSLKISLRSIREGRTQTVGECLQREYRMVCHVMRGDFSRDFFEGCRAIXLDKDRNPKWMPPRLEQVHDEAVEQYFSRIDD

SEQ ID NO: 238420 - protein, 71 aa, Zea mays
  Clone ID: MRT4577_149028C.1.pep
LLPPPAPVRTRGTFNEILGLFTTDQDADPHHKHRSPSPSGLTSAPPWAMQCPAPDWHSQDTTTTCTTTTTG

SEQ ID NO: 238421 - protein, 111 aa, Zea mays
  unsure (1)..(111): unsure at all Xaa locations
  Clone ID: MRT4577_149029C.1.pep
MFFSPGEYVGLAGARLDGGEMLACGLATHFVQSXCVCASLITPSKYSVPQSLLSLEESLKKVDTSNAFAVCGIIDQFAQQPSLKESSSLNKLEIINKCFFKKTVEENISAL

SEQ ID NO: 238422 - protein, 432 aa, Zea mays
  unsure (1)..(432): unsure at all Xaa locations
  Clone ID: MRT4577_14902C.1.pep
MGSSPMWWSGPPPSPWSRGLGKWWALVGPFVVKAVGFLLLAGLLFRVLWSFPSSPAPALQITKGKCSLFNGEWIPNPSGPAYTNASCRFIDDHQNCMMNGRPDKEYLHWKWKPYGCDLPPFDAVRFLDSMRNKGWGLIGDSILRNQVQSLLCLLSKAEEPVEVYHDNEFKNRRWHFQSYNFTVSIVWAPFLIKSGIFENEDGVSTSEIQLHLDILDANWTSQYESFDYIIISGGQWFLRTAVYWENGAVVGGHNSQNKNVAELGFEHLYRKTLQNVFNFIVSAKHKPVIFFRTWSPDHFEDGEWFSGGSCRRKLPYNKGEYREGNIERVMRQIELESFNKAVAALRGSADVDRLRLMDTYSLSSLRPDGHVGPYRTPYPFARGSSKSTPVQNDCLHWCVPGPIDAWNDLVMKMALDXHENLMDLYGVLLWSK

SEQ ID NO: 238423 - protein, 200 aa, Zea mays
  Clone ID: MRT4577_149030C.1.pep
SAIAGSSHFVQSNSLLSLEESLKKVDTSNAFAVCGIIDQFAQQPSLKESSSLNRLEIINKCFSKRTVEEIISALEVEASNSADEWVATTIQSLKKASPTSLKISLRSIREGRTQTVGECLQREYRMVCHVMRGDFSRDFFEGCRAILLDKDRNPKWMPPRLEQVHDEAVEQYFSRIDDPQWEDLNLPARRSHGRNIESKL

SEQ ID NO: 238424 - protein, 140 aa, Zea mays
  Clone ID: MRT4577_149031C.1.pep
KNPWLPPLLWPKTQEKMLYQYAAYENLIGSLRTNHKASSVCSSKSNVLLPGKWKTAQEHEERRRIPDVASPNTNRRSSISRKGSNRPRRGNSLPSDPWAEPSFFFLSLSLSLLPFVRFGFSCSISSPRLLLFTASTCRDA

SEQ ID NO: 238425 - protein, 72 aa, Zea mays
  Clone ID: MRT4577_149032C.1.pep
CRSVILTQILPGPMIKSVWLKFLEHHVSSYQPSLDVVGTKRRKMHGSGRQHSLPTRASGSQVREAGLTQSSP

SEQ ID NO: 238426 - protein, 107 aa, Zea mays
  unsure (1)..(107): unsure at all Xaa locations
  Clone ID: MRT4577_149033C.1.pep
MAAKRFGLLMLLDMCVHADSVTIVQKCSQATIPYIVSAYLLAAYAXGCENPMIHTYKILRAISDHRLTLXIVHVRQSLSLNHELPSVHQSAQIITAQQRQRLGLANL

SEQ ID NO: 238427 - protein, 102 aa, Zea mays
  unsure (1)..(102): unsure at all Xaa locations
  Clone ID: MRT4577_149034C.1.pep
TTLKEGLPLHKXEHTFYLDXSIHSFRITNYETQDTTQIHTHTCYSNFNNIIHSIINMHANLITIHNSHAHKKHLHVPLKGIKYITGIFPIFYYIHYTRIPSA

SEQ ID NO: 238428 - protein, 81 aa, Zea mays
  unsure (1)..(81): unsure at all Xaa locations
  Clone ID: MRT4577_149035C.1.pep
RSVPTPHSSLSRSRPHRSLLLEPPGAGIASIGNCSNARGDLEAXXXPXXXXAXXRXRXRXRXGASXAAXPPRAPAPPPPPP

SEQ ID NO: 238429 - protein, 63 aa, Zea mays
  unsure (1)..(63): unsure at all Xaa locations
  Clone ID: MRT4577_149036C.1.pep
KTQAPKXEQKEGGSPEIAFVLINSKVNYFPFSLLLSGSLSLGLNWCPPPPLLSQYSHVIKIHP

SEQ ID NO: 238430 - protein, 89 aa, Zea mays
  unsure (1)..(89): unsure at all Xaa locations
  Clone ID: MRT4577_149037C.1.pep
PRWLXKLSPPPCWVASKXVKACPQSRSTXGXAEXPPXQVSQSXCQRLQWLDXTNSSXQRXTSXSITXXXCAXXLXSSTEKTSSXSXXVL

SEQ ID NO: 238431 - protein, 53 aa, Zea mays
  Clone ID: MRT4577_149038C.1.pep
ERKQQRYASGSEYNIVKSAHIKYQKSKNHQNAALFTGLKSVNSTELNFLMCEF

SEQ ID NO: 238432 - protein, 305 aa, Zea mays
  unsure (1)..(305): unsure at all Xaa locations
  Clone ID: MRT4577_149039C.1.pep
MKCNACWRDLEGQAVSTTCGHLLSGADDARKILNNDGTCPICDQVLSKSHMKPMDINPGDDWTNMAMVGISPQILMKSAYRSVMFYIGQKELEMQYKMNRIVGQCRQXCELMQAKFTEKLEEVHTAYQKMAKRCQLLEQENENLNRDKHELQEKFAEKSRQKRKLDEMYDQLRNEYESVKRSALQPANNYLARPQPDLFAGMPNVMDGGDHLRQGSVDLPKTPGQRDEGWGPPPRQRHCTSGPFDLSTGSPAHAVAPPADIRPRQQTRSVFGATLNNPSSTLRNLIISPVKRPQTSRNRQHIFTL

SEQ ID NO: 238433 - protein, 55 aa, Zea mays
  Clone ID: MRT4577_14903C.1.pep
MSGSALTSFLIKNRRKKLALKGVVQISLDLARGLSYVHSKKTAHRDVKTENMLLD

SEQ ID NO: 238434 - protein, 69 aa, Zea mays
  Clone ID: MRT4577_149040C.1.pep
GETLSAHLKTFDHYTQTLTKLRFTRKDITEDDKSAFKKVLHEDGFYTIRLPSNVLDTIKKQQAVSSIKA

SEQ ID NO: 238435 - protein, 43 aa, Zea mays
  Clone ID: MRT4577_149041C.1.pep
RGRLTPGQQSHLPHPVGAVIICGAGFWSYLYKRYNHTKTADTI

SEQ ID NO: 238436 - protein, 135 aa, Zea mays
  unsure (1)..(135): unsure at all Xaa locations
  Clone ID: MRT4577_149042C.1.pep
LITNSVESVRDAGPWRDRKNESIATKYPSLNITYPSIKKHTKKKPIVKPMVNCTNTKVRMAKVTTHTSAEASRSCETIGTESSKSNHVKNQQVDHANPVALNTEQSCPLIVNSLSTLXDNHQYHLLYTTEGLACK

SEQ ID NO: 238437 - protein, 129 aa, Zea mays
  Clone ID: MRT4577_149043C.1.pep
PFRPIVLSILLDFYTFSQFIPTHSDVSMSFNSAGHLIPLQHLLILALQLHLPDHIHATTNIKVIPDNDPSVLLLAPIRNLASISRLVYIATFYICPILLYTLHDPLILPSTMIARSFSLIIYIYPMSKI

SEQ ID NO: 238438 - protein, 125 aa, Zea mays
  Clone ID: MRT4577_149044C.1.pep
YPPDPAVPRAGEQAGETCSASRGVGGEEWRSAGGEADIRHVGEAGWDPLMVDPSSYERYPSSFIASRGVYGLLLEHAEGGVERLVVVLPRRDGTSERRGADAAAGGVVGELIRISRQVAGPRNGR

SEQ ID NO: 238439 - protein, 59 aa, Zea mays
  Clone ID: MRT4577_149045C.1.pep
CYRFLKGLGQAGVTLVDKILSIAHNAEYLGPHWRGCVASEPSSVLSYLLSIGRRGSTRV

SEQ ID NO: 238440 - protein, 61 aa, Zea mays
  Clone ID: MRT4577_149046C.1.pep
RIQGLKGAMALSMKPQDLPGGLQAPQVPFQGYLSALLGLGKKKSAEGQSLGALPLNQRALP

SEQ ID NO: 238441 - protein, 112 aa, Zea mays
  Clone ID: MRT4577_149047C.1.pep
FGSSKGTIRIITTHTVVVALLLHHQTVVVPPDPAVPGAEERAGETCSASQGVGGEEWRGAGGEADARLGSPHGRSIFLRTLPLILHYLMWPPPRARGSRRRASRGSASWPRR

SEQ ID NO: 238442 - protein, 86 aa, Zea mays
  Clone ID: MRT4577_149048C.1.pep
PVVPSLTKKKKKKKKKKKKKKKKKKKKKKKKKKKKKKKKKKKKKKKKKKKGGPPKRFKPYLPLNAISNLFKSAPKFHFRGLLLKTS

SEQ ID NO: 238443 - protein, 93 aa, Zea mays
  Clone ID: MRT4577_149049C.1.pep
DPRNQKKKKKKKKKKKKKKKKKKKKKKKKKKKKKKKKKKKKKKKKKKRGAPQKVQTLRPLKWNLKPLQKGHQISINGPSFKNFGTGKTLGLPN

SEQ ID NO: 238444 - protein, 112 aa, Zea mays
  Clone ID: MRT4577_14904C.1.pep
GIPPATHTSGHTHCLTHIFPLIRHRNTKVPFNTYLPRNISHSFSHPLAPNKYSTYNKSHPNTPPSTISSLHHHHTPRLIHLIHHHYLPRYSRHSFTKLRTSPHFTSFKTSSF

SEQ ID NO: 238445 - protein, 90 aa, Zea mays
  Clone ID: MRT4577_149050C.1.pep
GKTTPINPVQGKGYGRPLGSPPAPPAASPTWPLAYYPAPASRWTWCAGCASYYADPRPCDLPPSSRSPTVAFTLPSTYTPWAEARARARP

SEQ ID NO: 238446 - protein, 190 aa, Zea mays
  unsure (1)..(190): unsure at all Xaa locations
  Clone ID: MRT4577_149051C.1.pep
TQLSTYRSTSKAASNLPLSPSLFQQSPSLSLVQSLVQTIGAQQLQQLLLLVINQVALANLSPYSQQQQFLPFNQLPTLNPFAYLQHQQLLPFSQLAIAYSQLRQLLPFNQLAALNLAAYLQQQILLPFIQLAAASHASFLTXQQLLPFYQLFAANHATLLXLQQLLPFVQLALTNPPPSYQQHIIGGALF

SEQ ID NO: 238447 - protein, 140 aa, Zea mays
  unsure (1)..(140): unsure at all Xaa locations
  Clone ID: MRT4577_149052C.1.pep
SLPKPTRHLLKWILCSTIEHQWRREIFSLHMLLALSACVANATIFPQCSQAPIASLLPPYLPSMIASVCENPTLQPYKLQQAIAASNIPLSPLLXXQSPALSVVHSLVHTIRAQQLQQLVLPVINQVALADSSSYYQQQQ

SEQ ID NO: 238448 - protein, 93 aa, Zea mays
  unsure (1)..(93): unsure at all Xaa locations
  Clone ID: MRT4577_149053C.1.pep
MAAKIFSILMLLALSACVANATIYPQYSQAPIAALLAPYLPSMTASGCENPALQPYRLQQAIATSNXTLXPLCFEQSSDLCMVHTLVQTIREQ

SEQ ID NO: 238449 - protein, 648 aa, Zea mays
  Clone ID: MRT4577_149054C.1.pep
MSSSVSIAAEWDLLSDRFYRRLTLYSPLPWSTPAAAGATSSSSGVSGAVIGRLDLSTHIVAAAPFGGPIAAVRDDSKIVQLHSEPSRRRVLLFSSSGHPIASAPWPPLLPRLHSLGFSSSLSLLALLSDGSLLRFRLPDLQPSPCSSPVPLLPPASGGVADALFWGGGVAILTEDNRVVVATDIEVDDPHPRHLADPGIGDEEHVLCMAVVEAQFVMSGSPEVLLAVGDRVIAVDEDGVQVLGEELEIGPVQKMAVSPNGKLLAAFAHDGRLLVIPTDFSRIIFEYECESALPPEQIAWCGLDSVLVYWPEVLLMVGPNGDPVQYNYDEPIKLIPECDGVRILSNSSMEFLHRVSDSTTSIFGIGSMSPAALLYDARDHYDRQSAKAYDNYQLISSSLPEAIEACIDAAGHEFDVSRQRTLLRAATYGLAFCSRFPHERFQEMCKMLRVLNAVRDPEIGMPLTIHQYKLLTTSVLIGRLINANQHLLALRISEYLNLNPEVVIMHWACEKITASTTLPDTVLLDGLLDKLRLCKGISYAAVAAHADNSGRRSIDEQDKALSKAIESGDTDLVYLVLFHIWQKVAVEKKAPLDFFGVINARPVARDLFMAYARHSKHEELKDFFLSTGRLQVGCIHNDLLVVIYHGRCP

SEQ ID NO: 238450 - protein, 58 aa, Zea mays
  Clone ID: MRT4577_149055C.1.pep
RLNSHLHCILLHNLIPLENFHETARRIYPIYTLTNSKSYKLSITALQFKSSINYLIDY

SEQ ID NO: 238451 - protein, 84 aa, Zea mays
  Clone ID: MRT4577_149056C.1.pep
TTLASACENAGILPYRLQQAIAASNIPLSPLLFQQSPALSLVQSLVQTIRAQQLQQLVLPVINQLALTNPAAFYQQPIIGGALF

SEQ ID NO: 238452 - protein, 906 aa, Zea mays
  Clone ID: MRT4577_149057C.1.pep
DLFRPARRPRRAPASPRLAVGDRPHVCPAMSSSVSIAAEWDLLSDRFYRRLTLYSPLPWSTPAAAGATSSSSGVSGAVIGRLDLSTHIVAAAPFGGPIAAVRDDSKIVQLHSEPSRRRVLLFSSSGHPIASAPWPPLLPRLHSLGFSSSLSLLALLSDGSLLRFRLPDLQPSPCSSPVPLLPPASGGVADALFWGGGVAILTEDNRVVVATDIEVDDPHPRHLADPGIGDEEHVLCMAVVEAQFVMSGSPEVLLAVGDRVIAVDEDGVQVLGEELEIGPVQKMAVSPNGKLLAAFAHDGRLLVIPTDFSRIIFEYECESALPPEQIAWCGLDSVLVYWPEVLLMVGPNGDPVQYNYDEPIKLIPECDGVRILSNSSMEFLHRVSDSTTSIFGIGSMSPAALLYDARDHYDRQSAKAYDNYQLISSSLPEAIEACIDAAGHEFDVSRQRTLLRAATYGLAFCSRFPHERFQEMCKMLRVLNAVRDPEIGMPLTIHQYKLLTTSVLIGRLINANQHLLALRISEYLNLNPEVVIMHWACEKITASTTLPDTVLLDGLLDKLRLCKGISYAAVAAHADNSGRRRLAAMLVDHESQSSKQIPLLLSIDEQDKALSKAIESGDTDLVYLVLFHIWQKVAVEKKAPLDFFGVINARPVARDLFMAYARHSKHEELKDFFLSTGRLQDAAFLLLKESWELEKNPMASKGSPLHGPQVRLIEQAHRLFAETKEHVFESKASEEHAKLLRSQHELEVSTKQPIFVGSSVSDTIKTCIAMGNERAALRVKSEFKVPDKRWYWLKTCALATVGNWDGLEKFSREKRPPGGYKPFVEACIDAGQKNEAVKYIPKLTDPRERSEAYARMGMAKEAQDAASQAKDSDELFGRLKITLAQSSAAASIFDTLRDRLSFQGAY

SEQ ID NO: 238453 - protein, 227 aa, Zea mays
  unsure (1)..(227): unsure at all Xaa locations
  Clone ID: MRT4577_149058C.1.pep
KRHAQEPRAPGDQELFLLMLCCSFVHVAVNATMCPQCLQAXIAALLPPYLPSMIXGARDNPALPPYRLPQAIAASNIPXSPLWFQHSPALSLAQSLAQTIRAQQLQQLALPVINQVALANLSPYSQQQQFLXFNQLSTLNRAAYLQQQLLPFSQLATAYSQQQQLLPFNQLAALNPAAYLQQQILLPFSQLAAASRAFFLXQQQVLPFYQQFAANPAPLLXLQQLLP

SEQ ID NO: 238454 - protein, 241 aa, Zea mays
  unsure (1)..(241): unsure at all Xaa locations
  Clone ID: MRT4577_149059C.1.pep
QQQSPGKIFSILMLLALSACVANATIFPQYSQGPIAALLPPYLPSMTASVCEKPPLQPYRLQQAIATRNLPLSPLHFQQSPDLSSAEXLEQTIRAQQLQQLVLPVISQVGLVNLSPYSQQQLLPFNQLTTLNPADYLQQQQLLPFSQLGTAYSQQXQFLPFNQLTALNPSAYFQQXILLPFGQLATTNPEFFLTKXQLLPFYLQVVANTATFLXLEQWLHFVHFALTNPAXFYLQQILWGS

SEQ ID NO: 238455 - protein, 168 aa, Zea mays
  Clone ID: MRT4577_14905C.1.pep
MQNGGFRNSLTTDAAAAAALRDRFRDPQWRACRTRRSPRPHAPPPPPPAASAFRRRDRWFHLPLHLPPAAEHLPEPSPAEPLVVDVYLAPSGGGPEEVLERWTVACEPWPSPAAAGEGLAVNRAYKRCITLLRSLYAMLRFLPAYRAFRALCASGQVYNYEMGHRVGS

SEQ ID NO: 238456 - protein, 44 aa, Zea mays
  Clone ID: MRT4577_149060C.1.pep
PQRAHRAQTSQTSNMTPLNPKMTQLTLQQRPLQPLGPDNDFPGW

SEQ ID NO: 238457 - protein, 203 aa, Zea mays
  unsure (1)..(203): unsure at all Xaa locations
  Clone ID: MRT4577_149061C.1.pep
PFFPSMIDSVCENSALHPYRLXQAIAASNLPLSPLFQQSPALSLVHSLVQTIGARQLQQLVLPVISQIALANLSPYSQQQXFLPFNQLSTLNPPTYLQQQQLLPFSQLAIVYSQQQQLLPFNQLAALNPTAYLQHQILLPFSQLAAPSRASFLTQQQLLPFYXQFAANPATLLQLQQLLPFVQLALTNPAASYQQHIIGGALF

SEQ ID NO: 238458 - protein, 77 aa, Zea mays
  Clone ID: MRT4577_149062C.1.pep
ARKSTRYGPPSRFRSWPRGEGSRRLRGGRKLGAVDIDAVPGLIVNGGRPGVPCGLVGDAARGRRPRAAFNSQGCREK

SEQ ID NO: 238459 - protein, 171 aa, Zea mays
  unsure (1)..(171): unsure at all Xaa locations
  Clone ID: MRT4577_149063C.1.pep
FERPPGQVQTIKAQQLQQLXVLPVINQVALASLSPYYQQQQFLPFNQLXTVNRAAYLEQQILPFSQLDTAYSHQQQLFPFNQLAALNPAAYLQQQILLPFSQLAAASRASLLTQQQLLPFYQQFAANPATLLQVQQLLPFVQLALANPTASYQQHIIGGALFSDCLLVVIQ

SEQ ID NO: 238460 - protein, 179 aa, Zea mays
  unsure (1)..(179): unsure at all Xaa locations
  Clone ID: MRT4577_149064C.1.pep
CYRCTRSYRLHTAQVRVAVMVLAHLAYMSAGVCAHACCEPYMIQPAMNNQRSVRLSHLRFEQYAAVCSVLHLVQTIRADTGALLELPVISQVALANLWAYSHQQQLLPFNQLSILNPAAYLQQQQLLPFSQIATAYSKQQQFLSFNQLAGLNPSADXQQQILLPFGQLATTSPAFFLTQ

SEQ ID NO: 238461 - protein, 211 aa, Zea mays
  unsure (1)..(211): unsure at all Xaa locations
  Clone ID: MRT4577_149065C.1.pep
TPACTGPLLHGRPQRSLPTAHISGFHTSTSTVATNIWSLLMLLDISACVANATILPKCXHAPIAFLVTEYLRISDKLAGIERNTQLVQTLIXWQQAIAASCIPXAPLVVQQXTDLSLVQSLVQTIRAQDVQKLVLPVINQVALANLSPYSQKQQFLPFNQLSTLNPAAYLEQQLLPFKQLNTAYSQQQQHVSFNQLAAPNPAGYLQQQILL

SEQ ID NO: 238462 - protein, 85 aa, Zea mays
  Clone ID: MRT4577_149066C.1.pep
RTARPFFSFFFFFFFGWVKFSLGGPPIQSTSFNSGAVVLIFFGDPPGNREKARDGKRPHTPHRTGPGRGPIPRITHETIKPIAAG

SEQ ID NO: 238463 - protein, 142 aa, Zea mays
  Clone ID: MRT4577_149067C.1.pep
MGEQVVTEQIQRKLEEVNATVQQHLAGVQDHINFTMQQAYFKCAYGCFDRRHTQEAISNCVENCSVPVLAANNIFESEMAKFQGMLNRSLRVCQDKFEAANLQKLKSDATRELESCVNRSIDDSLRVLPHVVDQIKSTLKIN

SEQ ID NO: 238464 - protein, 55 aa, Zea mays
  Clone ID: MRT4577_149068C.1.pep
VRQELLHANQIFAQHPMWPVIAVTGRAIEETAAVVVRILQDRIQKYSMPRISKRY

SEQ ID NO: 238465 - protein, 126 aa, Zea mays
  Clone ID: MRT4577_149069C.1.pep
GAHHTCRNHGTIGDDHRPVITSIKFVTNLDQTYWPFGAYGDGDDTSFTVPVQPLSGAIAGSSDRIGDVGDYTARTWCVTFAPSKKDFSYDVNQEAECMLDLLHTEPLTQYYLKCVLFLRLPVSLFS

SEQ ID NO: 238466 - protein, 44 aa, Zea mays
  Clone ID: MRT4577_14906C.1.pep
GSSDCSFHFSLHYRGLSGVVVLGFCLCVVSHVLFFASLFVWSPF

SEQ ID NO: 238467 - protein, 74 aa, Zea mays
  Clone ID: MRT4577_149070C.1.pep
HGLSMGRTQFMWIQRDAATVIKRKKVTVIITINNTRVNLIIEVYDKSMTPGQCNMPVDRLSDYHDLAGSSKSPR

SEQ ID NO: 238468 - protein, 72 aa, Zea mays
  unsure (1)..(72): unsure at all Xaa locations
  Clone ID: MRT4577_149071C.1.pep
GGLALRLASCALSKGPHRRRTTTARSRPXRRRPWRRGPMVLLDHCDCFFYCIGKKRDXQIYCLKARPDRLRG

SEQ ID NO: 238469 - protein, 72 aa, Zea mays
  Clone ID: MRT4577_149072C.1.pep
WITQITSSQYNKLIPQITGSQYNKLITSLQYNKRILKMKNERPLRTAKTLYIPHIEDIKVLSRCNQIRINQY

SEQ ID NO: 238470 - protein, 76 aa, Zea mays
  unsure (1)..(76): unsure at all Xaa locations
  Clone ID: MRT4577_149073C.1.pep
IDLRTKARGVLQREDDLSEGVQLVGKDALAESDKITLWTANLLRDDYXAQNAFTAYDKYXPIYIYVGMMRKIIHFI

SEQ ID NO: 238471 - protein, 105 aa, Zea mays
  Clone ID: MRT4577_149074C.1.pep
FYCRTPDLQEGLVLSANYTARNGHHVAHKIDFREGPALPVLDDLIAEEKNHGSFDFVFVDADKDNYLNYHERLLKLVKLGGLIGYDNTLWNGSVVLPDDAPMRKY

SEQ ID NO: 238472 - protein, 222 aa, Zea mays
  unsure (1)..(222): unsure at all Xaa locations
  Clone ID: MRT4577_149076C.1.pep
MATTATKTTAPAQEQQANGNGNGNGNGNGEQKTRHSEVGHKSLLKSDDLYQXQAERNEWLNLTGILVSDRGGRMIXYILDTSVYPREPESMKELREITAKHPWNLMTTSADEGQFLNMLIKLIGAKKTMEXXGVYTGYSLLATALALPEDGTILAMDINRENYELGLPCINKXGVGHKIDFREGPALPVLDDLVADRSTXGSFDFXFVDADRDNYLNYHERA

SEQ ID NO: 238473 - protein, 167 aa, Zea mays
  Clone ID: MRT4577_149077C.1.pep
MATTATEAAPAQEQQANGNGEQKTRHSEVGHKSLLKSDDLYQYILDTSVYPREPESMKELREVTAKHPWNLMTTSADEGQFLNMLIKLIGAKKTMEIGVYTGYSLLATALALPDDGTVRRCSLPFPRSATHLPEGEAASGPPTDKPRIPLSLSLLFVPPRRSWPWTS

SEQ ID NO: 238474 - protein, 59 aa, Zea mays
  Clone ID: MRT4577_149078C.1.pep
SIFIVKPEYGTFTILSSQLKLSDNQFRSYNGSTFRFIRPHKFYLKISELRSSTSFRTLG

SEQ ID NO: 238475 - protein, 122 aa, Zea mays
  Clone ID: MRT4577_149079C.1.pep
DAWADAWVRVKPSLVNIWVRLQGCAVVLVHSTCRSYKSIPEAERRGQDQVPHSHTGEDEDRPCLLLLQVGDLEKFKSVSLAMEKGHSASRVLGTGEGRRPWRELWVMRETDGECACLMCAGS

SEQ ID NO: 238476 - protein, 102 aa, Zea mays
  Clone ID: MRT4577_14907C.1.pep
MAGSSTSTFVIRWINFLTMILAILVVGFGFWMSTHNDECRRSLTIPVMGLGGVIFLMSLAGFVGAWKNISCLLWTYLIMLFVVLVAIMVFTVLAFIITNTGT

SEQ ID NO: 238477 - protein, 216 aa, Zea mays
  unsure (1)..(216): unsure at all Xaa locations
  Clone ID: MRT4577_149080C.1.pep
MATTATEATKTTAPAQEQQANGNGNGNGEQKTRHSEVGHKSLLKSDDLYQXQAGRNEWLNLTGIRVSDRGGRMIXYILDTSVYPREPESMKELREITAKHPWNLMTTSADEGQFLNMLIKLIGAKKTMEIGVYTGYSLLATALALPEDGTILAMDINRENYELGLPCINKAGVGHKIDFREGPALPVLDDLVADKEQHGSFDFAFVDADRDNYLNY

SEQ ID NO: 238478 - protein, 152 aa, Zea mays
  unsure (1)..(152): unsure at all Xaa locations
  Clone ID: MRT4577_149081C.1.pep
MFTNAQRQVERTGRSGTPRDQYLQDLVTQFQNATDEXLNVLELFLDCITEPNERLIEFGIGGICNSCVDPANALIITQCGGIPLVIQCLSSPVRNTVTYALGALYYLCNPSTKKEILKPDVVSTIREYASAGTVNNNFSNLANAFLEKHVDP

SEQ ID NO: 238479 - protein, 65 aa, Zea mays
  Clone ID: MRT4577_149082C.1.pep
FFLSNPKQGVEGAVSAMSQLHSQSVKAAIFHIVGDAKVNNRMFTETVELYIGLKNYYPHNDKRFI

SEQ ID NO: 238480 - protein, 176 aa, Zea mays
  Clone ID: MRT4577_149083C.1.pep
MFTNAQRQVERTGRSGTPRDQYLQDLVTQFQNATDEESKEKIVANLANFAYDPFNYAFMRQLNVLELFLDCITEPNERLIEFGIGGICNSCVDPANALIITQCGGIPLVIQCLSSPVRNTVTYALGALYYLCNPSTKKEILKPDVVSTIREYASAGTVNNNFSNLANAFLEKHVDP

SEQ ID NO: 238481 - protein, 61 aa, Zea mays
  Clone ID: MRT4577_149084C.1.pep
MPILYLFKKKKKKKKKKKKKKKKKKKKKKKKKKRGKKKKKKKKKKKKKKKKKKGGAFLKKK

SEQ ID NO: 238482 - protein, 42 aa, Zea mays
  Clone ID: MRT4577_149085C.1.pep
MASRNIFAGGNWKCNGTGEDVKKIVTVLNQAEVPSEDVVEVV

SEQ ID NO: 238483 - protein, 257 aa, Zea mays
  unsure (1)..(257): unsure at all Xaa locations
  Clone ID: MRT4577_149086C.1.pep
MATTATKTTAPAQEQQANGNGNGEQKTRHSEVGHKSLLKSDDLYQYILDTSVYPREPESMKELREITAKHPWNLMTTSADEGQFLNMLIKLIGAKKTMEIGVYTGYSLLATALALPEDGTILAMDINRENYELGLPCINKAGVGHKIDFREGPALPVLDDLVADKEQHGSFDFAFVDADKDNYLSYHERLLKLVRPGGLIGYDNTLWXNGSVVLPDDAPMRKYIRFYRDFVLALNSALAADDRVEICQLPVGDGVTL

SEQ ID NO: 238484 - protein, 261 aa, Zea mays
  Clone ID: MRT4577_149087C.1.pep
MATTATEAAKAAPAEQANGNANGEQKTRHSEVGHKSLLKSDDLYQYILDTSVYPREPESMKELREITAKHPWNLMTTSADEGQFLNMLIKLIGAKKTMEIGVYTGYSLLATALALPEDGTILAMDINRENYELGLPCIEKAGVAHKIDFREGPALPVLDDLIADEKNHGSFDFVFVDADKDNYLNYHDRLLKLVKLGGLIGYDNTLWNGSVVLPDDAPMRKYIRFYRDFVLVLNKALAADERVEICQLPVGDGVTLCRRVK

SEQ ID NO: 238485 - protein, 46 aa, Zea mays
  Clone ID: MRT4577_149088C.1.pep
EVSYIQRLVVWSDDPSSECAREDDLVNCKTYPISSNIMRRPSSKML

SEQ ID NO: 238486 - protein, 86 aa, Zea mays
  unsure (1)..(86): unsure at all Xaa locations
  Clone ID: MRT4577_149089C.1.pep
MFCVRSTCLCTGRALEPLSVALADGNTVEVMPSELAPATCAVLGYNIPKDLYSMAAKVGEGGPEVLEKLMXTDGXQVLSPGNELCS

SEQ ID NO: 238487 - protein, 122 aa, Zea mays
  Clone ID: MRT4577_14908C.1.pep
MAPREHHQPQEEEEEDTAGVVKLISAEGFEFVVDKKAAMVSNTLRNMLTSPGGFSETRQGEVRFPEIPTNILEKICQYFYWSLHYSSPWFNTLDGLLKSYLVQNFDVMESDKANKTVTCNVI

SEQ ID NO: 238488 - protein, 268 aa, Zea mays
  unsure (1)..(268): unsure at all Xaa locations
  Clone ID: MRT4577_149090C.1.pep
MATTATEATKTAAPAQEQQANSNGNGNGEQKTRHSEVGHKSLLKSDDLYQYILDTSVYPREPESMKELREITAKHPWNLMTTSADEGQFLNMLIKLIGAKKTMEIGVYTGYSLLATALALPEDGTILAMDINRENYELGLPCINKAGVGHKIDFREGPALPVLDDLVADKEQHGSFDFAFVDADKDNYLSYHERLLKAXVGPGGLIGYDNTLWNXGSVVLPDDAPMRKYIRFYRDFVLVLNKALAADDRVEICQLPVGDGVTLCRRVK

SEQ ID NO: 238489 - protein, 162 aa, Zea mays
  Clone ID: MRT4577_149091C.1.pep
FLVVPDDQAPDRRSFRVGSSCHDRYRVRVADFSSATRKWQILPWSEPVPTQPASGKYWLLSGRQVSGFLCWSHHKNAYKVLLDTATLQFSVIDLPYGLSGQGHLYRTGDTKDGKLCIVAAIDFSLFVWFRTPDAGGIDRWVLRHVLQLEDEVLEATEGSRNE

SEQ ID NO: 238490 - protein, 261 aa, Zea mays
  unsure (1)..(261): unsure at all Xaa locations
  Clone ID: MRT4577_149092C.1.pep
MATTATEAAPAQEQQANGNGNGEQKTRHSEVGHKSLLKSDDLYQYILDTSVYPREPESMKELREITAKHPWNLMTTSADEGQFLNMLIKLIGAKKTMEIGVYTGYSLLATALALPEDGTILAMDINRENYELGLPCIDKAGVAHKIDFREGPALPVLDDLVADKEQHGSFDFAFVDADKDNYLSYHERLLKLVRPGGLIGYDNTLWNGSVVLPDDAPMRKYIRFYRDFVLALXSALAADDRVEICXLPVGDGVTLCPRVSE

SEQ ID NO: 238491 - protein, 242 aa, Zea mays
  unsure (1)..(242): unsure at all Xaa locations
  Clone ID: MRT4577_149093C.1.pep
MATTATEAAKAAPAQEQQANGNGNGEQKTRHSEVGHKSLLKSDDLYQXQAERNEWLNLTGIXSLTAGEEXPQYILDTSVYPREPESMKELREITAKHPXILAMDINRENYELGLPCXINKAGVGHKIDXFREGPALPVLDDLVADKEQHGSFDFAFVDADKDNYLSYHERLLKLVRPGGLIGYDNTLWNGSVVLPDDAPMRKYIRFYRDFVLALNSALAADDRVEICQLPVGDGVTLCRRVK

SEQ ID NO: 238492 - protein, 82 aa, Zea mays
  unsure (1)..(82): unsure at all Xaa locations
  Clone ID: MRT4577_149094C.1.pep
ARMASLLLDNQEYTEALTLGTCLIKEVRILDDLLLLVDIDLMESKLHSFLKNLSKAKASFNTARTAANAIXIPSAQLGTIDL

SEQ ID NO: 238493 - protein, 226 aa, Zea mays
  Clone ID: MRT4577_149095C.1.pep
MFEGVVSQVLYGLLRRYVKGIQKEQLKIGIWKEEILLENVELILEAFDYLQLPFALKNGRIGKLSIRIPWKKLGWDPIIIVIEDVYVCACPREDSEWSSDSLDKREIAGKLAKLNAIELAKFSRRVTDNQTGQSFLSYISAKILDSIQVSMRNVHIVYMDTHNGQGNFVFGLEFTSLSIQTDTQKQSFTISLMTRRDEVKIIEISVGIYCHQLEEEDLCHGGALEM

SEQ ID NO: 238494 - protein, 139 aa, Zea mays
  unsure (1)..(139): unsure at all Xaa locations
  Clone ID: MRT4577_149096C.1.pep
MATKIFSLLMLLALSACVANATIFPQCSQAPIAFLLSPYLSSMIALVCENPAFXPFWVQQGIAGRNIPLLPLLVXQLPALFLGESLVQTIKGQQLEELVLPVIKQIALGKLSSFFXEQQFLSFKQLSILNPAAYLQQQL

SEQ ID NO: 238495 - protein, 148 aa, Zea mays
  unsure (1)..(148): unsure at all Xaa locations
  Clone ID: MRT4577_149097C.1.pep
AKVQSIKANHIHHLMIPVIIQVALSNLSPYSQXHKFLPFTHLSTLTLADYLQQQQLLPFSQLATTNYQQQQFLPFNQLTALNPAAYLQQQILLPFGQLATTSPASFLTQQQVLPFYQQFVANPATLLQLQLLLPFVQLALTNPAGLYS

SEQ ID NO: 238496 - protein, 155 aa, Zea mays
  unsure (1)..(155): unsure at all Xaa locations
  Clone ID: MRT4577_149098C.1.pep
KPVRAQQLQQLELPLXNQELWTNLSPYSXQQQQXLPFNQLATLNPAAYWQQRLSPFIHLATAYSQQQQLVTLKQVAALNPAAYLQQQILLPFSQLAAANRAPFLTQQQVLPFYQQVAANXPQRLLQLQQLWPFAQLALTDPADCYQQHIIGGALC

SEQ ID NO: 238497 - protein, 163 aa, Zea mays
  Clone ID: MRT4577_149099C.1.pep
GILAKHSQLTKIQRGRQPLHPVRAAEPPGPYFPIHHANTDGNLRLYSLNGSDGRWSVSWIALSQPCNIHGLCGPNGICHYFPTPTCSCPPGYVMSHPGNWSQGCRPVVDIVCTAGQAQPVKFLRLPGTDFWGSDQQHADQVSLQACKNMCRRDCTCKGFSDAW

SEQ ID NO: 238498 - protein, 81 aa, Zea mays
  unsure (1)..(81): unsure at all Xaa locations
  Clone ID: MRT4577_14909C.1.pep
SRQEGRRGRRCCHQSRGLCVAYWRILAILVVGFXGFWMSTHNDECRRSLTIPVMGLGGVIFLMSLAGIVGAWKNISCLLWT

SEQ ID NO: 238499 - protein, 94 aa, Zea mays
  Clone ID: MRT4577_1490C.1.pep
SKPGGLLSLPPPASSAGLLQVISGFVILDRLGRRPERWRPVAKRMNASRALGTRHTGQDLDPPCCRLQGNDFFHEHIHTASPHDEYLVRTPSCA

SEQ ID NO: 238500 - protein, 108 aa, Zea mays
  unsure (1)..(108): unsure at all Xaa locations
  Clone ID: MRT4577_149100C.1.pep
PSAGATITHHSQLVPVYDKRQQLLXHNQLSVLDFVDYEHTHYLVPFDQLAVPNRAALVAQQQLLPFYQQFAANPATLLQLQQLLPFVQLALTDPAASYQQHIIGGALF

SEQ ID NO: 238501 - protein, 109 aa, Zea mays
  unsure (1)..(109): unsure at all Xaa locations
  Clone ID: MRT4577_149101C.1.pep
GEPYYGDQQATYKVDSSNNNGATVETKIFYLLMLLALSTCVANATIFPQCXQAPIXSFFPTYLPXLIASACENPALEPCRLQQAIAASNIPLSPLLCQQSPAPSLVQSL

SEQ ID NO: 238502 - protein, 42 aa, Zea mays
  Clone ID: MRT4577_149102C.1.pep
GIKSFLETGHRIQNVPRATSNTHPFLFMNKRPRRVKFYNWRQ

SEQ ID NO: 238503 - protein, 98 aa, Zea mays
  Clone ID: MRT4577_149103C.1.pep
SQLGFAYFQQQQFFPFNQLAALNPPAYLHQQILLPFSELAAASRASFLTQQQLLPFYKQFGANPPPLFQIQQLLPFVQLALTNPAASYQQHIIGGALF

SEQ ID NO: 238504 - protein, 95 aa, Zea mays
  Clone ID: MRT4577_149104C.1.pep
MAAKICSMLMLLALSACSANATIFPQYSQAPIAALLPPYLSSMTASVCENPALQPYRLQQAIRTSNLPLLPLFFQPMAALSLVHSLVPTIRAQQV

SEQ ID NO: 238505 - protein, 108 aa, Zea mays
  Clone ID: MRT4577_149105C.1.pep
GIDKFDIEFVHSEVDVSYRMAVSVGAVIILVVSCNASSIFISHSRKTAKRTSGEGPLIVKEDLDLYGAVAKRGVGFQPYSGHLISLCGDSVIEVKDIISSSTAAGSQS

SEQ ID NO: 238506 - protein, 239 aa, Zea mays
  Clone ID: MRT4577_149106C.1.pep
MATKIFSLLMLLALSACVANATIFPQCSQAPIASLLPPYLPSMIASVCENPALQPYRLQQAIAASNIPLSPLFQQSPALSLVQSLVQTIKAQQLQQLVLPVINQVALANLSPYYQQQQFLPFNQLSTLNPAAYLQQQLLPFSQLATAYSHQQQLLPFNQLAALNLAAYLQQQILLPFSQLAAASRASFLTQQQLLPFYQQFAANPATLLQLQQLLPFVQLALTNPAASYQQHIIGGALF

SEQ ID NO: 238507 - protein, 129 aa, Zea mays
  unsure (1)..(129): unsure at all Xaa locations
  Clone ID: MRT4577_149107C.1.pep
PLLQHHQYFPFYQLSPLNLCVYLQQXLFPFSQLAKAYSQQQQFLPFNQLAALNPAGYLQQQILQPFSQLFAATRASLLTQQQLMPFCQQFAANPATLLXQYEQLLPFVQLALTNPTASYQQHIIGGALF

SEQ ID NO: 238508 - protein, 185 aa, Zea mays
  Clone ID: MRT4577_149108C.1.pep
MDTAASCRLLSPASSSPPPCPKQLPKRRPTFAASPQQSSPSSSAKSAAPTSSVQMQSSHLQRLATVLQCGAVWAAVEAPAALAVTGEEDIDLLGILPPLAVFAFFYFLVAPPVIMNWMRLRWYKREFVETYLQFMFTYLFYPAMMFWAPFVNFRKFPRDPTMKYPWSKPKEGTPLFKDRYPPIDS

SEQ ID NO: 238509 - protein, 117 aa, Zea mays
  unsure (1)..(117): unsure at all Xaa locations
  Clone ID: MRT4577_149109C.1.pep
MATKIFSILMLLALSAWVANATIFPQYSQAPITSLLPPYLPSMTASGCENPVLQSYRVQQAIATSNLPLSPLCFQQSTGLSLGHELPQTIKAQQMEQIRLPGIKQXSLKNLSPYSQE

SEQ ID NO: 238510 - protein, 102 aa, Zea mays
  Clone ID: MRT4577_14910C.1.pep
DAGNTSTYKNNTCPEDMIPKIGMRFISEQEAYGFYNAYAGEIGFSVRKSGCHYVGDSLIIKTRTFCCFRQGNEFHFHYNSFSTTFIFQYLWQFKLTFYTTNR

SEQ ID NO: 238511 - protein, 59 aa, Zea mays
  Clone ID: MRT4577_149110C.1.pep
GNNSPPLQVRISDFASFMAFTCSFLHCCVSCVDLDHANSLWEQMLPCHGSYSCRETLTF

SEQ ID NO: 238512 - protein, 131 aa, Zea mays
  Clone ID: MRT4577_149111C.1.pep
MQSSHLQRLATVLQCGAVWAAVEAPAALAVTGEEDIDLLGILPPLAVFAFFYFLVAPPVIMNWMRLRWYKREFVETYLQFMFTYLFYPAMMFWAPFVNFRKFPRDPTMKYPWSKPKEGTPLFKDRYPPIDS

SEQ ID NO: 238513 - protein, 190 aa, Zea mays
  Clone ID: MRT4577_149112C.1.pep
MDTVASWRLLSPPPCPQQLPKRQATFAASPQQHSASSSSAKFRLLCHLHLHDKPAASVQQSSQLQRLATVLRCGAVWAAVEAPAALAVTGEEDIDLLAILPPIAVFAFFYFLVAPPLIMNWMRLRWYKREFVETYLQFMFTYLFYPAMMFWAPFVNFRKFPRDPTMRYPWSKPKEGTPLFKDRYPPIDSY

SEQ ID NO: 238514 - protein, 196 aa, Zea mays
  Clone ID: MRT4577_149113C.1.pep
MDTAASCRLLSPASSSPPPCPKQLPKRRPTFAASQQQSPSSSAKFRLLCLLHDKSASPTTSVQMQSSQSQLQRLATVLQCGAVWAAVEAPAALAVTGEEDIDLLGILPPLAVFAFFYFLVAPPVIMNWMRLRWYKREFVETYLQFMFTYLFYPAMMFWAPFVNFRKFPRDPTMKYPWSKPKEGTPLFKDRYPPIDS

SEQ ID NO: 238515 - protein, 51 aa, Zea mays
  Clone ID: MRT4577_149114C.1.pep
MGPFGKMFLIYLNKCPALLFWEQPFQKGGQFKPFPMNRETQRYLMVFSVGF

SEQ ID NO: 238516 - protein, 134 aa, Zea mays
  Clone ID: MRT4577_149115C.1.pep
PCQECYQLLLSSLTTAVCTRGSSNVIWLKQAASDLLSSFYSTKDFCWYYAAAKTYVTLCMDSSLIFTMVFWEISPCHRMFMGHLVTLSMIKAWVICCLNIGSSHSLKVKMAGTAYGWDSITNHVNERYSVAHYY

SEQ ID NO: 238517 - protein, 121 aa, Zea mays
  Clone ID: MRT4577_149116C.1.pep
IDAERSQIQPAIGISPRILPSASARLPLSLSPLPHSGSTAAALAGSVAVAPPPARLQGPTRPPPPPLRLSGDPTPRPASVQSSREEFSAVGCPAMDRGERLGRALDAFGGNLGRWLTQRWT

SEQ ID NO: 238518 - protein, 49 aa, Zea mays
  unsure (1)..(49): unsure at all Xaa locations
  Clone ID: MRT4577_149117C.1.pep
MGRKFFVGGNWKCNGTTDQVEKIVKTLNEGNVPSXNVVEAVASPPKGSL

SEQ ID NO: 238519 - protein, 164 aa, Zea mays
  Clone ID: MRT4577_149118C.1.pep
MRDFPSCFGESGVQIADASSSSSSSAGKGAAQNLVTCLYQTHFSGRPCVISLTWSKSLMGQGLSVGVDDLSSGHCLCKADIKPWLFSKKKGSRSLDVEDGKVEIFWDLSGARFGAGPEPVEGFYVAVVFDLELALLLGDMKKDAYRKTGASQSTLNARPASRVP

SEQ ID NO: 238520 - protein, 73 aa, Zea mays
  Clone ID: MRT4577_149119C.1.pep
MGGKKKKKKKKRTLKKIKNKNKKKKKKKKKRKKEKKNEKKKKKEKNLGKPFYPPKSPGSARVGRKSRGGWGGG

SEQ ID NO: 238521 - protein, 52 aa, Zea mays
  Clone ID: MRT4577_14911C.1.pep
TRGIPPGYVPCTVNRLRGPSVTVGPLFFFFPNHLAFVETPAFVKNTPQEKRR

SEQ ID NO: 238522 - protein, 156 aa, Zea mays
  Clone ID: MRT4577_149120C.1.pep
MATPPIPANRLKQIATDACNSAIGNAEFYDHAKTEQWNSTIISSVLKAVISESTPEGASAPSFKFACNSTIVQHLLPTSALNKPRGGTETQAQEPHISTSSEATATDGKPHVGRRGMHSATGAYWDEKKDGMWTFKYDGGEGKGLDVVVMLIWVAI

SEQ ID NO: 238523 - protein, 58 aa, Zea mays
  unsure (1)..(58): unsure at all Xaa locations
  Clone ID: MRT4577_149121C.1.pep
NXILSPTFPVKSPSSYLPSVGFLRVTSHQRVTLFVCSPIKKKKKKKKKKKKKKKKTKP

SEQ ID NO: 238524 - protein, 712 aa, Zea mays
  Clone ID: MRT4577_149122C.1.pep
MSPPPCDALPTAANNIQPFLVLHKAAASSVPSSRSQRQIQTSQPSSPNRKSANRCRQPAGEECEDEGDSELYEQLRAEAFHRTWSKIQSTIDEVLRAINLKLFDQVLQWAKESFASAHAITKKHHTEVQQPYPLLTDVICRRIPTVFVLTKNAEFVDDITTFHDLAGHMKSNGCHIVKLSAAELSAKHGVGGCFRSLLGQLLSDVPDVADVSALASWYCEAENFDQPIIVIIDDLEQCSGDVLGEFVMMLSEWVFKIPVFFVMGIATTLDAPKKLLSSEALQRLEPCKLTLGSPSDRLNALVEAVLVKPCTGFCISHEVALFLRNYFFRHDGTITSFITALKLACSKHFSMEPLSFLCIGMVEEDSEEFWHDKFESLPQTIRKHAFDLPSSKNARNSCNMVEGLSRLLKSQKDWSSVLLCLYEAGRHDKVQLLDIFCEAASPDWQTENAPDNYLFASKVALLGVKSGSAKRFIAQVMNTIRYLPTEILLHILEVWSIHLKGMSEINDRVKELLSKGCGADSVRAKRKSTANTGNGVVLINEEAAALLQDVIRKYLVPAECLPFHEIVCFKNVDILRSALIGNPRRMIQLDLLRSQSHLKCSCCSRSGAAVSGSLHDTSILCSLAQEYGDMINLHDWYTAFEGIIKSTNSKAKGKSCSSPSKKKKKSNPTPLEGDGMIQARFCSAVTEMQVTGLVRMPSKRRPDLVQRIAFGP

SEQ ID NO: 238525 - protein, 202 aa, Zea mays
  Clone ID: MRT4577_149123C.1.pep
MAVGIALLLDLAARAPRSSASLHSHAAFSAAAAAAAAAALSASGVPLSARPFFGFPGFTVAHCDAGATYGSIDSPDLANDLNEKIHDSIHDLQLPIKEYPLELKPLLYAFGFKHLSMTTIRAFLLYYLPLLEPRPPTDDDDDDDLLQDDSERPPVDLVTPFHNSLKQIAREISVVTTRRAFERIAVRRVSQRTAWKLLKDAA

SEQ ID NO: 238526 - protein, 122 aa, Zea mays
  unsure (1)..(122): unsure at all Xaa locations
  Clone ID: MRT4577_149124C.1.pep
GYYPXRVLPSKTAIAPVNPTFLPRSDDEREMCARTIYCTNIDKKVTQADLKLFFESICGEVFRLRLLGDYHHSTRIAFVEFVMAESATAALNCSGVILGSLPIRVSPSKTPVRPRAPRQLMH

SEQ ID NO: 238527 - protein, 94 aa, Zea mays
  Clone ID: MRT4577_149125C.1.pep
EEDEVFANWPLLPAVVSSACSLVPCTARRRGARAHRPRFPARVPSAQHDDRARSPSSVHPRLITTVNVFSKSCLNYFIDLMNYCCKKKKKKGAA

SEQ ID NO: 238528 - protein, 248 aa, Zea mays
  unsure (1)..(248): unsure at all Xaa locations
  Clone ID: MRT4577_149126C.1.pep
MAVVEADVSYHAAPPFQEEAPGAGAGAGADAGEREMRDLEDPLSKLNPMAVEMCPALPQEPGPAKPRSCGTVVRNAELKVVDPDTGLSLGRNLPGEICIRGSQIMKGYLNDPEATARTXDVHGWLHTGDIGYVDDDDEVFIVDRVKELIKFKGFQVPPAELEALLVAHPSIADAAVVPQKDEAAGEVPVAFVVRAADADIAEDAIKDFISKQVVFYKRLHKVYFTPSIPKSASGKILRRDLRAKLAAA

SEQ ID NO: 238529 - protein, 735 aa, Zea mays
  Clone ID: MRT4577_149127C.1.pep
MNPNCPRQPPPPQQSPTPPVKSAMSPPPCDALPTAANNIQPFLVLHKAAASSVPSSRSQRQIQTSQPSSPNRKSANRCRQPAGEECEDEGDSELYEQLRAEAFHRTWSKIQSTIDEVLRAINLKLFDQVLQWAKESFASAHAITKKHHTEVQQPYPLLTDVICRRIPTVFVLTKNAEFVDDITTFHDLAGHMKSNGCHIVKLSAAELSAKHGVGGCFRSLLGQLLSDVPDVADVSALASWYCEAENFDQPIIVIIDDLEQCSGDVLGEFVMMLSEWVFKIPVFFVMGIATTLDAPKKLLSSEALQRLEPCKLTLGSPSDRLNALVEAVLVKPCAGFCISHEVALFVRNYFFRHDGTITSFITALKLACSKHFSMEPLSFLCLGMVEEDSEEFWHDKLESLPQTIWKHAFDLPSNKNARNSCNMVEGLSRLLKSQKDWSSVLLCLYEAGRHDKVQLLDIFCEAASPDWQTENAPDNYLFASKVALLGVKSGSAKRFIAQVMNTIRYLPTEILLHILEVWSIHLKGMSEINDRVKELRSKGCGADSVRAKRKSTANTGNGVVLINEEAAALLQDVIRKYLVPAECLPFHEIVCFKNVDILRSALIGNPRRMIQLDLLRSQSHLKCSCCSRSGAAVSGSLHDTSILCSLAQEYGDMINLHDWYTAFEGIIKSTNSKAKGKSCSSPSKKKKKSNPTPLEGDGMIQARFCSAVTEMQVTGLVRMPSKRRPDLVQRIAFGP

SEQ ID NO: 238530 - protein, 104 aa, Zea mays
  unsure (1)..(104): unsure at all Xaa locations
  Clone ID: MRT4577_149128C.1.pep
MPSTRGCVDAKERYRKTTVTVELQIGLKNHDPQKDKRFSGCVKSPHIPRPTRKVCMLANDEHVEGAEKMGLDYMAADVLKKMINNRTLVXRLAKKCHAVLASVA

SEQ ID NO: 238531 - protein, 50 aa, Zea mays
  Clone ID: MRT4577_149129C.1.pep
LKKKKKKKKKKKKKKKKKKKIKKKKKKKKKKKKKKKKGRAGFRSSQFYVP

SEQ ID NO: 238532 - protein, 81 aa, Zea mays
  unsure (1)..(81): unsure at all Xaa locations
  Clone ID: MRT4577_14912C.1.pep
LHAWVDRGFPQLHGISSWPFLVPEVQLPIHRKRVFASWSVDYPACIGDLDVLHWLVLPCDLGQHLFVQSCVVXLESSRCVP

SEQ ID NO: 238533 - protein, 106 aa, Zea mays
  Clone ID: MRT4577_149130C.1.pep
TGNVCVAWSDDEREMCARTIYCTNIDKKVTQADLKLFFESICGEVFRLRLLGDYHHSTRIAFVEFVMAESATAALNCSGVILGSLPIRVSPSKTPVRPRAPRQLMH

SEQ ID NO: 238534 - protein, 82 aa, Zea mays
  Clone ID: MRT4577_149131C.1.pep
MGKHKFQSQRKGNNPPQNCQKPQASEILKPLPPKQKTPLFPPKGRHKPKTNRRPPPLANWPPPVSHPPFFPLNPCPLPKSCP

SEQ ID NO: 238535 - protein, 577 aa, Zea mays
  Clone ID: MRT4577_149132C.1.pep
MITVAAPEAQPQVAAAAAAVAAPEETVFRSKLPDIDIPTHLPLHDYCFSRAAEAAGAPCLIAAATGRTYTYAETRLLCRKAAACLHGLGVAQGDRVMLLLQNSVEFVLAFFGASFLGAVTTAANPFCTPQEIHKQFSASGAKVVVTHSAYVAKLRHDAFPRIGTASGGGGVDGNALLTVLTIDGDAADTPEGCLAFWELLTSGDGDALPEVSISPDDPVALPFSSGTTGLPKGVVLTHGGQVTNVAQQVDGANPNLYMREGDVALCVLPLFHIFSLNSVLLCAMRAGAAVMLMPKFEMGAMLEGIQRWRVTVAAVVPPLVLALAKNPALEKYDLSSIRIVLSGAAPLGKDLVDALRARVPQAVFGQGYGMTEAGPVLSMCPAFAKEPAPAKPGSCGTVVRNAELKVVDPDTGLSLGRNLPGEICIRGPQIMKGYLNDPEATARTIDVHGWLHTGDIGYVDDDDEVFIVDRVKELIKFKGFQVPPAELEALLVAHPSIADAAVVPQKDEAAGEVPVAFVVRAADADIAEDAIKEFISKQVVFYKRLHKVYFTPSIPKSASGKILRRELRAKLAAAATA

SEQ ID NO: 238536 - protein, 122 aa, Zea mays
  unsure (1)..(122): unsure at all Xaa locations
  Clone ID: MRT4577_149133C.1.pep
FFPFSYLFFAYSHYQQFLPFNQLSAFNPSAYFHHQILLPFGQLASTSPTSFLKQQQLLPFYHQFVANPSSLLQLQQLLPFXHPPPPNPAAFYQQHIIGGASFRLLISCNSIMKFLGMYVASK

SEQ ID NO: 238537 - protein, 328 aa, Zea mays
  Clone ID: MRT4577_149134C.1.pep
MAVVEAAAADHAAPPLQEEAPGAGAGAGADAGEREMRDLEDLLSKLNPMAEEFVPPSLASPAALTPAPLSPAAYGFYPAGAGFAVASPGHGGVVGFPAVADAHAARGRKKGGAGGGFSGHGHPARRRTNSRTSMAQRDEIIRRTVYVSDIDHQVTEENLAALFINCGQVVDCRMCGDPNSVLRFAFIEFTDEEGARAALNLSGTVLGYYPVRVLPSKTAIAPVNPTFLPRSDDEREMCARTIYCTNIDKKVTQADLKLFFESICGEVFRLRLLGDYHHSTRIAFVEFVMAESATAALNCSGVILGSLPIRVSPSKTPVRPRAPRQLMH

SEQ ID NO: 238538 - protein, 110 aa, Zea mays
  unsure (1)..(110): unsure at all Xaa locations
  Clone ID: MRT4577_149135C.1.pep
HAGYLQKRLLPYRQLDTVLLSXQQLVLLNQLXALGGADYLHNLILLPFSQLAAAMXASFLTQQQVLPFYQQFATNPATLLQLRQLLPFVQLALTNPAXCYQQHIIGGALF

SEQ ID NO: 238539 - protein, 114 aa, Zea mays
  Clone ID: MRT4577_149136C.1.pep
SALNRGAYMEHQLFPFSQVVTAYSQQERLLPFNQLAAVTPAVYLQQQIMLPFSQLVAASRASFLTQQQLVPLYQQCAASAATLLQVQQLLPFVQLALANPAASYQRPIIGGALF

SEQ ID NO: 238540 - protein, 102 aa, Zea mays
  Clone ID: MRT4577_149137C.1.pep
LFPFSRLGFAFFQQQQLFPFNQLAPLTPPVFFQQQILLPFRELAAASCASFLTQQQLSPFFKQFGANPPPLFQLQQLLPFVHLALSNPAASFQQPIIGGAPF

SEQ ID NO: 238541 - protein, 48 aa, Zea mays
  Clone ID: MRT4577_149138C.1.pep
LTTLYHSPAIFITFKTQSNISNSLPISTFPSTLLIILSFTLHLLHTST

SEQ ID NO: 238542 - protein, 102 aa, Zea mays
  unsure (1)..(102): unsure at all Xaa locations
  Clone ID: MRT4577_149139C.1.pep
FPFSQVGTAYFQQQQFFPFNQLAALNPSXAYFQQQILLPFGQLATTSPPSFLKQHQLLPFYHQFVANPAPLLQLQQLLPFVQLALTNPAAFYQQHIIGGAIF

SEQ ID NO: 238543 - protein, 75 aa, Zea mays
  Clone ID: MRT4577_14913C.1.pep
GGSFDPLGLAEDPGAFSELKVKELKNGPLPMFSMFGFFVQAIVPGKGPLENLAGPIVGPVNNNAWAFAPNFVPGN

SEQ ID NO: 238544 - protein, 81 aa, Zea mays
  unsure (1)..(81): unsure at all Xaa locations
  Clone ID: MRT4577_149140C.1.pep
MSYYGHQTXIGFPPXQTYPKKDCYPPSXNPTTGYPPPXRANQTQGYPEQGYPHHVYPPHYAQPPXQQQQKQRPSFMERCLA

SEQ ID NO: 238545 - protein, 163 aa, Zea mays
  Clone ID: MRT4577_149141C.1.pep
KLGVQSRIEMPMEGWGEIRVINEHVPQSVLPSLYKAANAFVLPTRGEGWGRPVVEAMAMELPVIVTNWSGPTEYLTEENGYPLDVDRLTEVTEGPFKGHLCAEPSVARLRDLMRHVVDDRDEARNKGKKAREDMIKRFSPEVVARIVAEKIQQVLIHTQLTNE

SEQ ID NO: 238546 - protein, 113 aa, Zea mays
  unsure (1)..(113): unsure at all Xaa locations
  Clone ID: MRT4577_149142C.1.pep
TAKILSILMLLALSACVANATIFPQYSQAPIAALLPPYLPSMTAXVXENPALQPYRLQQAIATSNLPLSPLFFQQSPALSLGQGLGQTIRAQQLQQLVRPVIRQVALWNLSPY

SEQ ID NO: 238547 - protein, 90 aa, Zea mays
  Clone ID: MRT4577_149143C.1.pep
TLPDSMAVLPLERGVPPDAVGSRNLEDEVILYCLLLRMYKHVMTTRSKSKTPAAMELPEVANFADGEDTVQEITGQQVHGPGVGMPSPLA

SEQ ID NO: 238548 - protein, 133 aa, Zea mays
  unsure (1)..(133): unsure at all Xaa locations
  Clone ID: MRT4577_149144C.1.pep
MATKIFSLLMLLALSTCVANATIFPQCSQAPIASLLPPYLPSIIASECENPALQPYMLQQAIAASNIPLSPLLFQQSXPDLSLAQQLVQTIRAQQLQQLAITVIKQENMXKLSPYSQHQLXLPLNQLKYNETM

SEQ ID NO: 238549 - protein, 141 aa, Zea mays
  unsure (1)..(141): unsure at all Xaa locations
  Clone ID: MRT4577_149145C.1.pep
TTSGDKXNNXXDHRGXEKNXAXXXNKGHXDXEXXXXGPETHXGXKRXTXKPQTKXGXXPETNXGNKXXXEGRXXNXGXXXGXPSXXXXXXNXNQGXAQXEPXKEKSXGKXEKKGXXXPKHXXEKGXXXHXGKXXAKXTKXT

SEQ ID NO: 238550 - protein, 117 aa, Zea mays
  unsure (1)..(117): unsure at all Xaa locations
  Clone ID: MRT4577_149146C.1.pep
DQQASFKVFFSTNNRASVAGNIFSLLMLHALSACVANATIFPQCSQAPIASLLPTYLPSMIASVCENPALQPYRLQQAIAACNIPLSPLVEQSAALSLVQSLVQTITSQXLQQLLLP

SEQ ID NO: 238551 - protein, 87 aa, Zea mays
  Clone ID: MRT4577_149147C.1.pep
HGHCETFVGNGYVKRAYFVGPLSLSPSPSSPVAAGGGAYGSRCIDWLDNKPPQSVVYLCFGSLTHVSAAQSRELALGLDASEKPFLW

SEQ ID NO: 238552 - protein, 183 aa, Zea mays
  Clone ID: MRT4577_149148C.1.pep
MALLGLRVFRLATHPIGLFPAEKEDDPMWKDRVEHAKDIWAIYPGQTAHLTVMRGEAMSHLMALLEATKITLDNREELVVDLSQEMVEKDLQVEQLSTDIQELEELVGTRENTIEVLEDQLINTQRQLVEANEHLDMHHQEIQDQEANEDVDIEGGDEPASSVDTAGSGRPPSPESSVASFAH

SEQ ID NO: 238553 - protein, 125 aa, Zea mays
  unsure (1)..(125): unsure at all Xaa locations
  Clone ID: MRT4577_149149C.1.pep
PLVRKVLFFINNRSTVAGKIFSILMLLALSACVANATIFSQYSQAPIAALLSPYLPSMTALVCENPALXQPYRLQQAIATCNLPLSPLIFQQSPALSLVQSLVQTIIAQQLQLLVLPVISPVASC

SEQ ID NO: 238554 - protein, 255 aa, Zea mays
  unsure (1)..(255): unsure at all Xaa locations
  Clone ID: MRT4577_14914C.1.pep
MASAAPKPHVMVLPLPAQGHVIPLMELSHRLVDYGFKIDFINTEFNHDRIFKSMQNKGAIVPEGIHMISIPDGMDSADDRTDIGKMVGGLSAAMLGPLEEMIRTRKTKWVIADVSMSWVLELTNTVGVRIALFSAYSASVFALRMRLPKLIEDGVIDESGNVKVHEMIQLTPPIDSTEIPXVSLGSTAERRKVNIQRVIRTNRLIALAEAIICNTFREVEPEALLALLPNALPVGPLVVPMSKPTTGHFSLEDLT

SEQ ID NO: 238555 - protein, 79 aa, Zea mays
  unsure (1)..(79): unsure at all Xaa locations
  Clone ID: MRT4577_149150C.1.pep
MRETLHIQGGXCGXQIGAXFWEVVCDEHGIDTTERYTGNYDLQXERVNVYYNEASCGRXVRRAVLMDLEHGTMDSVGTG

SEQ ID NO: 238556 - protein, 803 aa, Zea mays
  Clone ID: MRT4577_149151C.1.pep
MPPDRDIEFAIELQPGAAPISKRPYRMPPAELAELKKQLQELLDKGFIRPSTSPWGCPALFVKKKDESLRMCVDYRPLNAVTIKNKYPLPRIDVLFDQLVGAKVFSKIDLRSGYHQIKIRASDIPKTAFSTRYGLEIKFLGHTISQDGISVDPEKVQEVMDWKPPTTVKQIRSFLGLAGYYRRFIPDFSRIAKPMTELLKKGVKFEWSQKCEDAFHTLRQHLTTAPVLAQPDNTKPFEVYCDASGTGLGCVLMQESRVIAYASRALRPHEQNYPTHDLELAAVVHALKIWRHYLMGAHCNIYTDHKSLKYIFTQADLNMRQRRWLELIKDYDLEVHYHPGKANVVADALSRKTQCNCMGMDVGVTTLCDELCKLNLEVVSSGNLSYISVEPTLQEQIIRAQVEDKGVQDPELRKKILDEAHLSKFSMHPGSTKMYHDLRSLYWWTRMKREIAKYISECDTCQRIKASHLKAAGPLQPLPIPSWKWEDICMDFIVGLPNTSRHHDSIWVIVDRLTKTAHFLPVHTTHRAEKYAEIYVDQIVRLHGIPKTIISDRGAPFVARFWEQLQESLGTHVIRSSAYHPQTDGQTERVNQILEDMLRACALHYGKDWDKCLSLAEFSYNNSYQSSLKMAPFEALYGRRCRTPLNWSQAGEREIFGPDLVLEAEAKVSPTKGVQRFGIKGKLAPRYIGPYEIKEACGPVAYQVELPPHMSAVHNVFHVSQLWKCVRLPTEELPEPDLEIEPDLSYQEYPVKVLDQKERSTRARSIQMYKVQWSHHSAEEATWETEDFLRSRFPDFLPKRVCT

SEQ ID NO: 238557 - protein, 156 aa, Zea mays
  unsure (1)..(156): unsure at all Xaa locations
  Clone ID: MRT4577_149152C.1.pep
AEVQTIKAQQVQQLVLPXITQVVMANLSPFYQQQQFLPFRPLSTLNRGAYLQQHVLPFSQLAPAXFHQQQVFPFNQLAAVNPDAYLQQQILSPFSQLDAASRVSFLTQQQLLPFYQQFAANPATLLQLQQMLPFVRLALTNPAASYQQHIIGGALF

SEQ ID NO: 238558 - protein, 63 aa, Zea mays
  Clone ID: MRT4577_149153C.1.pep
PGISGASSASRCWSGSGCTGNINETESCLTRDVHSRSACIRWKPLELLLFIWIHIFCPKKKKM

SEQ ID NO: 238559 - protein, 1595 aa, Zea mays
  Clone ID: MRT4577_149154C.1.pep
MAISQEDCITARQAEKKRKTPVAGPSAQPQRFRIVSDTQGRGPQQQQGRWVIRPQQQQQAPNRNQFPAQRNNQQQQYRQANDNRCFTCGNTGHYAKNCPRNQQRQGQNANQNQGKRQKVQVRQGRLNFTTMADIPEGAPVMTGIFTVLNFPAIVLFDSGASHSFISAKFSAKCQLPFHHTDGGITISTPGGRVATYQINRHVPIKFGSLIIKTTLLILGLDSVDIILGTDWLTRHRAVIDIAARAIEVHSPTCGETTLYLPDQGCTRSCAFVMIDSPVERIPVVCDYPDVFPDELPGMPPDRDIEFAIELQPGAAPISKRPYRMPPAELAELKKQLQELLDKGFIRPSTSPWGCPALFVKKKDESLRMCVDYRPLNAVTIKNKYPLPRIDVLFDQLVGAKVFSKIDLRSGYHQIKIRASDIPKTAFSTRYGLYEFLVMSFGLTNAPAYFMYLMNSVFMPELDKFVVVFIDDILVYSKNEDEHTEHLHIVLQRLRDHHLYAKLSKCEFWLKEIKFLGHTISQDGISVDPEKVQEVMDWKPPTTVKQIRSFLGLAGYYRRFIPDFSRIAKPMTELLKKGVKFEWSQKCEDAFHTLRQHLTTAPVLAQPDNTKPFEVYCDASGTGLGCVLMQESRVIAYASRALRPHEQNYPTHDLELAAVVHALKIWRHYLMGAHCNIYTDHKSLKYIFTQADLNMRQRRWLELIKDYDLEVHYHPGKANVVADALSRKTQCNCMGMDVGVTTLCDELCKLNLEVVSSGNLSYISVEPTLQEQIIRAQVEDKGVQVIKDMIKQKAEKYKCFRQDSKGILWFGDRLVVPKDPELRKKILDEAHLSKFSMHPGSTKMYHDLRSLYWWTRMKREIAKYISECDTCQRIKASHLKAAGPLQPLPIPSWKWEDICMDFIVGLPNTSRHHDSIWVIVDRLTKTAHFLPVHTTHRAEKYAEIYVDQIVRLHGIPKTIISDRGAPFVARFWEQLQESLGTHVIRSSAYHPQTDGQTERVNQILEDMLRACALHYGKDWDKCLSLAEFSYNNSYQSSLKMAPFEALYGRRCRTPLNWSQAGEREIFGPDLVLEAEAKVRVITKNLEAAQARQRSYHDKRRKPLQFEVGDHVYLKVSPTKGVQRFGIKGKLAPRYIGPYEIKEACGPVAYQVELPPHMSAVHNVFHVSQLRKCVRLPTEELPEPDLEIEPDLSYQEYPVKVLDQKERSTRARSVRMYKVQWGHHSAEEATWETEDFLRSRFPDFLPKGVDCNLADGEYILVPEQGAAQEWTLPLTRPETRSLIPVMVGTSAVTARRPVGVSEALYAKAMTSHGSSDDGNALTHTDGLAREGFPRILWEVLQGAGYTTPPQYAVQQFEKHRVPRCRVRMTLEPHPLQPGWRSLDSESFGYRAEDTIEAIALHGLTTFCGFHPLELATHPIGLFPAEKEDDPMWKDRVEHAKDIWAIYPGQTAHLTVRCMNALYRLQVMRGEAMSHLMALLEATKIMLDNREELVVDLSQEMVEKDLQVEQLSTDIQELEELVGTRENTIEVLEDQLLNTQQQLAEANEHLDMHHQEIQDQEDNEDVDIEGGDEPASSVDTAGSGRPPSPESSVASFAH

SEQ ID NO: 238560 - protein, 741 aa, Zea mays
  Clone ID: MRT4577_149155C.1.pep
LSTQPPLFTRAEDPLDADVWLRVVESKFPLLHGVCSEVTKVRFATQQLRGPARTWWDHFLAMQPEDREVEWREFKAAFRGHHIPAGIMDRKLNEFLALTQGNRTVLQYAQAFNDLCQYAGYHADTDEKKRDRFRRGLSTKLRDRLNTVRANSYNELVNMAISQEDCIKARQAEKKRKTPVVGPSAQPQRFRIVSDTQGRGPQQQQGRWVIRPQQQQQAPNRNQFPAQRNNQQQQYRQANDNRCFTCGNTGHYAKNCPRNQQRQGQNANQNQGKRQKVQVRQGRLNFTTMADIPEGAPVMTGIFTVLNFPAIVLFDSGASHSFISAKFSAKCQLPFHHTDGGITISTPGGRVATYQINRHVPIKFGSLIIKTTLLILGLDSVDIILGTDWLTRHRAVIDIAARAIEVHSPTCGETTLYLPDQGCTRSCAFVMIDSPVERILVVCDYPDVFLDELPGMPPDRDIEFAIELQPGAAPISKRPYRMPPAELAELKKQLQELLDKALFVKKKDESLRMCVDYRPLNAVTIKNKYPLPRIDVLFDQLVGAKVFSKIDLRSGYHQIKIRASDIPKTAFSTRYGLYEFLVMSFGLTNAPAYFMYLMNSVFMPELDKFVVVFIDDILVYSKNEDEHTEHLHIVLQRLRDHHLYAKLSKCEFWLKEIKFLGHTISQDGISVDPEKVQEVMDWKPPTTVKQIRSFLGLAGYYRRFIPDFSRIAKPMTELLKKGVKFELSQKCVKDFHSRGSL

SEQ ID NO: 238561 - protein, 226 aa, Zea mays
  unsure (1)..(226): unsure at all Xaa locations
  Clone ID: MRT4577_149156C.1.pep
DRAAPVPVPVPALAPAVSVQSWAERGYSVVTVQCGDRPKLLFDVACTLHDMDYVVFHGTVDTAAGRARQEFYIRRADGSPIRSEAEREVLTHRLQAAIERRSLEGVRLELCAPDRAGLLSEVTRTFRENGLLVAQAEVSTKGDQACNVFYVTDAAGKAPDRGAIDAVRERVGADRLVVSEEPRPPQQQLYPDASXQAAAAAVXGLVYLGNLVRRNLYNLGLIKSCS

SEQ ID NO: 238562 - protein, 1752 aa, Zea mays
  unsure (1)..(1752): unsure at all Xaa locations
  Clone ID: MRT4577_149157C.1.pep
MTSHGSSDDGNALSHTDGLAREGFPRILWEVLQGAGYMTPPQYAVQQFEKHRVPRCRVRMTLEPHPLQSGWRSLDSESFGYRAEDTIEAIALHGLTTFCGFHPLELATHPIGLFPTEREDDPMWKDRVEHAKDIWAIYPGQTAHLTVRCMNALYRLQVMRGEAMSHLMALLEATKITLDNREELVVDLSTEMVEKDLQVEQLSTDIQELEELVGTRENTIEVLEDQLINTQQQLAEANEHLDMHHQEIQDMEANEDVDIEGGEEPASSVDTAGSGRPPSPESNGREAASGQNERVPPPPPPPPTLQELMAQQNEILRQLAQRQPPPQHYGXRPSASPRGSYLXEFLSTQPPLFTRAEDPLDADVWLRVVESKFPLLHGACSEVTKVRFVTQQLRGPTRTWWDHFLAMQPEDREVEWREFKAAFRGHHIPAGIMDRKLNEFLALTQGNRTVLQYAQAFNDLCQYAGYHADTDEKKRDRFRRGLSTKLRDRLNTVRANSYNELVNMAISQEDCITARQAEKKRKTPVAGPSAQPQRFRIVSDTQNRGPQQQQGRWVIRPQQQQQQAPNRTQFPAQRTNQQQQQNQQRQGQNVNQNQGKRQKVQVRQGRLNFTTMADIPEGAPVMTGIFTVLNYPAIILFDSGASHSFISAKFSAKCQLPFHHTDGGITISTPGGRVATYQINRQVPIKFGSLVIRTTLLILGLDSVDIILGADWLTRHQAVLDIAARAIEIHSPAYGETVLYLPGQGCTRSCAFVMIESPVEKIPVVRDYPDVFPDELPGMPPDRDIEFAIELQPEIAPISKRPYRMPPVELAELKKQLQELLDKGFIRPSTSPWGCPALFVKKKDESLRMCVDYRPLNAVTIKNKYPLPRIDVLFDQLVGAKVFSKIDLRSGYHQIKIRASDIPKTTFSTRYGLYEFLVMSFGLTNAPAYFMYLMNSIFMPELDKFVVVFIDDILVYSKNEAEHTKHLHTVLQRLRDHQLYAKLSKCEFWLKEIKFLGHTISQDGISVDPEKVQEVMDWKPPATVRQIRSFLGLAGIAKPMTKLLKKGVKFEWSQKCEDAFHTLRQHLTTAPVLAQPDNTKPFEVYCDASGTGLGCVLMQENRVIAYASRALRPHEQNYPTHDLELAAVVDALKIWRHYLMGARCNIYTDHKSLKYIFTQADLNMRQRRWLELIKDYDLEVHYHPGKANVVADALSRKAQCNCMSMDARVTTLCDELCKLNLEVVSSGNLSYISVEPTLQERIVRAQVEDKGVQVIKDMIKQKAEKYKCFRQDSKGILWFGDRLVVPKDPELRKKILDEAHLSKFSMHPGSNKMYHDLRSLYWWTRMKREIAKYISECDTCQRIKASHLKAAGPLQPLPIPSWKWEDICMDFIVGLPNTSRHHDSIWVIVDRLTKTAHFLPVHTTHKTEKYAEIYVDQIXGALFVARFXEKLQESLGTQIIRSSAYHPQTDGQTERXFSYNNSYQSSLKMAPFEALYGRRCRTPLNWSQAGEREIFGPDLVLEAEAKVRVITKNLEVAQARQRSYHDKRRKPLQFEAGDHVYLKVSPTKGVQRFGIKGKLAPRYIGPYKIKASCGPVAYQLELPPHMSAVHNVFHVSQLRKCVRLPTEVLPEPDIEIEPDLSYQEYPVKVLDQKERSTRARSVRMYKVQWSHHSAEEATWETEDFLRSRFPDFLPKRVDCNLADREYILVPEQGAAQEVAPDPAPEPAPEDLPATALEGSLEEMVAGITWPTTLPPGWTVEWDPASAEEEHEE

SEQ ID NO: 238563 - protein, 90 aa, Zea mays
  Clone ID: MRT4577_149158C.1.pep
LTGLHHPVGQATCSSPALRLKLAKETGPKSAPEKKKEPHVGGGRSSIPMTRRPSSALRPFRRLATSTTHLTLATMSNDSRAYAGLTSPRS

SEQ ID NO: 238564 - protein, 1143 aa, Zea mays
  unsure (1)..(1143): unsure at all Xaa locations
  Clone ID: MRT4577_149159C.1.pep
MTSHGSSDEGNALTHTDGLAREGFPRILWEVLQGAGYTTPPQYAVQQFEKHRVPRCRVRMTLEPHPLQPGWRSLDSESFGYRAEDTIEAIALHGLTTFCGFHPLELATHPIGLFPAEKEDDPMWKDRVEHAKDIWAIYPGQTAHLTVRCMNALYRLQVMRGEAMSHLMALLEATKITLDNREELVVDLSQEMVEKDLQVEQLSGEIHELEELVGTRENTIEVLEDQLLNTQQQLAEANEHLDMHHQEIQDQEANEDVDIEGGDESASIGVYAVTIKNKYPLPRIDVLFDQLVGAKVFSKIDLRSGYHQIKIRASDIPKTAFSTRYGLYEFLVMSFGLTNAPAYFMYLMNSVFMPELDKFVVVFIDDILVYSKNEDEHTEHLHIVLQRLRDHHLYAKLSKCEFWLTEIKFLGHTISQDGISVDPEKVQEVMDWKPPTTVKQIRSFLGLAGYYRRFIPDFSRIAKPMTELLKKGVKFEWSQKCEDAFHTLRQHLTTAPVLAQPDNTKPFEVYCDASGTGLGCVLMQENRVIAYASRALRPHEQNYPTHDLELAAVVHALKIWRHYLMGAHCNIYTDHKSLKYIFTQADLNMRQRRWLELIKDYDLEVHYHPGKANVVADALSRKAQCNCMSMDVGMTTLCDELCKLNLEVVSSGNLSYISVEPTLQEQIVRAQVEDKGVQVIKDMIKQKXKNTNVSXDSKGILWFGDRLVVPKDPELRKKILDEAHLSKFSMHPGSNKMYHDLRSLYWWTRMKREIAKYISECDTCQRIKASHLKAAGPLQPLPIPSWKWEDICMDFIVGLPNTSRHHDSIWVIVDRLTKTAHFLPVHTTHKTEKYAEIYVDQIVRLHGIPKTIISDRGALFVARFWEKLQESLGTHVIRSSAYHPQTDGQTERVNQILEDMLRACALHYGKDWDKCLSLAEFSYNNSYQSSLKVAPFEALYGRRCRTPLNWSQAGEREIFGPDLVLEAEAKVRVITKNLEAAQARQRSYHDKRRKPLQFEVGDPVYLKVSPTKGVQIFGIKGKLAPRYIGPYEIKASCGPVAYQLELPPHMSAVHNVFHVSQLRKCVRLPTEVLPEPDIEIEPDLSYQEYPVKVLDQKERSTRARTVRMYKVQWSHHSTEEATWETEDFLRSRFPDFLPKGVGM

SEQ ID NO: 238565 - protein, 97 aa, Zea mays
  Clone ID: MRT4577_14915C.1.pep
NLRISKDTRGAGGATATRSCLAEGTCAVRMMKDKGRSPWCDWCCWLLDGLCEAGGSCLPVDRRHGQLPLLHTLAMAIELCLIFCNCGRSLTNDFHCT

SEQ ID NO: 238566 - protein, 327 aa, Zea mays
  unsure (1)..(327): unsure at all Xaa locations
  Clone ID: MRT4577_149160C.1.pep
MAGRQRRGQNERVPPPPPPPPTLQELMAQQNEILRQLAQRQPPPQHYGXRPPASPRGGHLXEFLSTQPPLFTRAEDPLDADVWLRVVESKFPLLHGVCSEVTKVRFATQQLRGPARTWWDHFLAMQPEDREVEWREFKAAFRGHHIPAGIMDRKLNEFLALTQGNRTMLQYAQAFNDLCQYAGYHADTDEKKRDRFRRGLSTKLRDRLNTVRANSYNELVNMAFFPKRTALKLDKQRRRGRPPWGPQQQQGRWVIRPQQQQQAPNRNQFPAQRNNQQQQYRQANDNRCFTCGNTGHYAKNCPRNQQRQGQNANQNQGKRQKVQVRQI

SEQ ID NO: 238567 - protein, 95 aa, Zea mays
  Clone ID: MRT4577_149161C.1.pep
TGGPGSATLGSQFPHNKTEMLGGETQHNPPRAGKPHIFLSFALGGHFPQNISTTKNPGGGDPGTQQPPFLFKRRKPPGFKLNHHRFKSKVTAPSF

SEQ ID NO: 238568 - protein, 104 aa, Zea mays
  Clone ID: MRT4577_149162C.1.pep
HTVWRHGAPPSYDAVNALFEAERTQEWPAGSLEEIVQNAIKTWEMELSHKARLSDFKSVSPGRFRLSVNGGRARSGEETLAVGSYNALLDSPLLARAGAYDASA

SEQ ID NO: 238569 - protein, 1676 aa, Zea mays
  unsure (1)..(1676): unsure at all Xaa locations
  Clone ID: MRT4577_149163C.1.pep
MTSHGSSDDGNALSHTDGLAREGFPRILWEVLQGAGYMTPPQYAVQQFEKHRVPRCRVRMTLEPHPLQSGWRSLDSESFGYRAEDTIEAIALHGLTTFCGFHPLELATHPIGLFPTEREDDPMWKDRVEHAKDIWAIYPGQTAHLTVRCMNALYRLQVMRGEAMSHLMALLEATKITLDNREELVVDLSTEMVEKDLQVEQLSTDIQELEELVGTRENTIEVLEDQLINTQQQLAEANEHLDMHHQEIQDMEANEDVDIEGGEEPASSVDTAGSGRPPSPESNGREAASGQNERVPPPPPPPPTLQELMAQQNEILRQLAQRQPPPQHYGGGDHQRHPAAATYQEFLSTQPPLFTRAEDPLDADVWLRVVESKFPLLHGACSEVTKVRFVTQQLRGPTRTWWDHFLAMQPEDREVEWREFKAAFRGHHIPAGIMDRKLNEFLALTQGNRTVLQYAQAFNDLCQYAGYHADTDEKKRDRFRRGLSTKLHDRLNTVRANSYNELVNMAIFQEDCITARQAEKKRKTPVAGPSAQPQRFRIVSDTQNRGPQQQQGRWVIRPQQQQQQAPNRTQFPAQRTNQQQQQYRQANDNRCFTCGNTGHYAKNCPRNQQRQGQNVNQNQGKRQKVQVRQGRLNFTTMADIPEGAPVMTGIFTVLNYPAIILFDSGASHSFISAKFSAKCQLPFHHTDGGITISTPGGRVATYQINRQVPIKFGSLVIRTTLLILGLDNVDIILGADWLTRHQAVLDIAARAIEIHSPAYGETVLYLPGQGCTRSCAFVMIESPVEKIPVVRDYPDVFPDELPGMPPDRDIEFAIELQPEIAPISKRPYRMPPVELAELKKQLQELLDKGFIRPSTSPWGCPALFVKKKDESLRMCVDYRPLNAVTIKNKYPLPRIDVLFDQLVGAKVFSKIDLRSGYHQIKIRASDIPKTTFSTRYGLYEFLVMSFGLTNAPAYFMYLMNSVFMPELDKFVVVFIDDILVYSKNEAEHTKHLHTVLQRLRDHQLYAKLSKCEFWLKEIKFLGHTISQDGISVDPEKVQEVMDWKPPATVRQIRSFLGLAGIAKPMTELLKKGVKYEWSQKCEDAFHTLRQHLTTAPVLAQPDNTKPFEVYCDASGTGLGCVLMQENRVIAYASRALRPHEQNYPTHDLELAAVVHALKIWRHYLMGAHCNIYTDHKSLKCFEQKGPVQLYEHGCGSYHPIVRAQVEDKGVQVIKXDQAKGRKIQXFRQDSKGILWFGDRLVVPKDPELRKKILDEAHLSKFSMHPGSNKMYHDLRSLYWWTRMKREIAEYISECDTCQRIKASHLKVAGPLQPLPIPSWKWEDICMDFIVGLPNTSRHHDSIWVIVDRLTKTAHFLPVHTTHKTEKYAEIYIDQIVRLHGIPKTIISDRGALFVARFCEKLQESLGTQVIRSSAYHPQTDGQTERVNQILEDMLRACALHYGKDWDKCLSLAEFSYNNSYQSSLKMAPFEALYGRRCRTPLNWSQAGEREIFGPDLVLEAEEKVRVITKNLEAAQARQKSYHDKRRKPLQFEVGDHVYLKVSPTKGVQRFGIKGKLAPRYIGPYEIKASCGPVAYQLELPPHMSAVHNVFHVSQLRKCVRLPTEVLPEPDLEIEPDLSYQEYPDKVLDQKERSTRARSVRMYKVQWSHHSAEEATWETKDFLRSHFPDFLPKGVGM

SEQ ID NO: 238570 - protein, 197 aa, Zea mays
  Clone ID: MRT4577_149164C.1.pep
MTLEPHPLQPGWCSLDSESFGYRAEDTIEAIALHGLTTFCGFHPLELATHPIGLFPAEKEDDPMWKDRVEHAKDIWAIYPGQTAHLTVRCMNALYRLQPEDREVEWREFKAAFRGHHIPAGIMDRKLNEFLALTQGNRTVLQYAQAFNDLCQYAGYHADTDEKKRDRFRRGLSTKLRDRLNTVRANSYNELVNMAIS

SEQ ID NO: 238571 - protein, 90 aa, Zea mays
  Clone ID: MRT4577_149165C.1.pep
RDWGHDRTNDSEAFGKVVDNYLCPACGALNTRVTAYETGGSKNANAIDARNARKEELKNDEIMGKDLPIVIVDRIINLSGLYFYLRHVYS

SEQ ID NO: 238572 - protein, 46 aa, Zea mays
  Clone ID: MRT4577_149166C.1.pep
GTLPGVSCISSIETYKLGKDTENGIPPLHTTLTYLMAKVHKLTTQF

SEQ ID NO: 238573 - protein, 107 aa, Zea mays
  Clone ID: MRT4577_149167C.1.pep
KLTQLCPKQFLHDACLRTYTESKDVSHFEPKKKTASSERSPAHTETEQGVMCWNRIGTEPSYCRRREELMRGSRRTPVRWKLDFSNHCWKAECQSGPNQRAHPEHSI

SEQ ID NO: 238574 - protein, 60 aa, Zea mays
  Clone ID: MRT4577_149168C.1.pep
PPSPLQYHPISTLHLTPPSSVLGLSVTAIARKLTSTQPFTVTRMTNKRRLPGELHFIRRP

SEQ ID NO: 238575 - protein, 71 aa, Zea mays
  Clone ID: MRT4577_149169C.1.pep
HSGGPTPPFICSKPKQVVWGSLTRELGAIIFSFACVAFTLWSMGLTWGEKITQAPLVGLVSCFVKIFKSLS

SEQ ID NO: 238576 - protein, 76 aa, Zea mays
  Clone ID: MRT4577_14916C.1.pep
ISASCPQAISRHPMSFAPPPCRRSPLFICRLERVQSTTYEEQKSTLPPVLDGICTALVPTVKAALVYINIQGVFHQ

SEQ ID NO: 238577 - protein, 84 aa, Zea mays
  Clone ID: MRT4577_149170C.1.pep
CSIASPVCHGPYSSIAHSLRYGGPYSSTVVICLVCRIQVEAQPGRTDCGGFLPISARYHGFWASLPDITPPMCHPPLNPIIHSA

SEQ ID NO: 238578 - protein, 91 aa, Zea mays
  Clone ID: MRT4577_149171C.1.pep
PQPEYGHMSPPDSKSPHIIKLDERGHRRCMKAHLMAYTEIHPIPEIDMLHARQSRSSYHIFNSQTPRSPVHACNLSLPTGAVNVTPTSHYA

SEQ ID NO: 238579 - protein, 122 aa, Zea mays
  unsure (1)..(122): unsure at all Xaa locations
  Clone ID: MRT4577_149172C.1.pep
MATKRYSLLMLLALSACDANATIFPXCSQAPIASLFPPYLPSMIASVCENPTLXPYRLQQAIGASNIPLSPLFQQSPALSLVQTLEHTITAQPAEQLGLAATNQVALANLFAYSQXQQYLTF

SEQ ID NO: 238580 - protein, 112 aa, Zea mays
  unsure (1)..(112): unsure at all Xaa locations
  Clone ID: MRT4577_149173C.1.pep
DWENQAFKPYRFQQALXTRQLTLXPWFFKQWPALFWGQXWVQTIREHQLQKLGLPGISQVVLANLFPYFKNHQFFQLNQRFTLNLVVNWQNHQLLHLSRLVTAYFKKHHFFQ

SEQ ID NO: 238581 - protein, 120 aa, Zea mays
  unsure (1)..(120): unsure at all Xaa locations
  Clone ID: MRT4577_149174C.1.pep
PFIHLYTLTFYDYFQHHHVLPFSQLXFAYAQQQQFLPYNQLSAVNPFAYFQQQILLPFGQLDTTSPASCLTQQQLLPFYQQFVANPATLLQLQQMLPFVQLDLSNPAAFYQQHIIGGALF

SEQ ID NO: 238582 - protein, 157 aa, Zea mays
  unsure (1)..(157): unsure at all Xaa locations
  Clone ID: MRT4577_149175C.1.pep
AEVQTSXAQQLQQLXVLPVINQVDLANLFPYYQQLRFLPFSQLYTLNPVAYLQQQLLPFSQVATAYFHXQELLPFNQLAAMNPAAYFQQQILLPFSQLAAANGGSFLTQQQLLPFYQQFAANPATLFQIQQLLPFVQLGLTKPAASYQRHIIGGALF

SEQ ID NO: 238583 - protein, 139 aa, Zea mays
  Clone ID: MRT4577_149176C.1.pep
MAAKICSIVMLLALSACVANATILPQYSQAPIAALLPSYLPSMTASLCENPALQPYMLQQAIATCNLPLSPLFFQQSPALSLVQSLVQTITAQQLQQLMLPMIRQVAFAKLSPYSHQQQFLSFKPMSTLNPACYFQQQQ

SEQ ID NO: 238584 - protein, 141 aa, Zea mays
  unsure (1)..(141): unsure at all Xaa locations
  Clone ID: MRT4577_149177C.1.pep
GPIENLSTQGHVDEDLVADPSXTSDAGIDDQLNDLDPSNEVRYSLDTFXRLLEKPSXDNXHSASYVYLYIKNLAAVVHADNDDELLKDDERADKRPPSKVNHHDFADGQTMNDKPIQTFCYNLDDVANPTFHYISHGHNDI

SEQ ID NO: 238585 - protein, 132 aa, Zea mays
  unsure (1)..(132): unsure at all Xaa locations
  Clone ID: MRT4577_149178C.1.pep
METKIFSLLMLLALSTCVANATILPQCSQAPIACLFPPYLASIIAXVCENPALQPYRLEQAIVASNIPLSALVCQQSPALCLVLGLVQTMRGHQVQXLVLTVINQXVVGNLSGYFAQQQCVGWKELGTLKPW

SEQ ID NO: 238586 - protein, 91 aa, Zea mays
  Clone ID: MRT4577_149179C.1.pep
RKVLVEARMGGSRSRTGVGYRTGGRRHGGRRTTTTVTMVTVVSCCLSTSGPASTPSPPSACTPRHWRRPMESTLASFAKHAFASSSLADAW

SEQ ID NO: 238587 - protein, 66 aa, Zea mays
  Clone ID: MRT4577_14917C.1.pep
VISVTLCATSTVLACIASMNHYLSSSLAARGWLVPTPWARFHLSRLYPVGTTIFSHTLVLLLLMRD

SEQ ID NO: 238588 - protein, 144 aa, Zea mays
  Clone ID: MRT4577_149180C.1.pep
MATKIFSLLMLLALSACVANATIFPQCSQAPIASLLPPYLPSMIASVCENPALQPYRLQQAIAASNIPLSPLLFQQSPALSLVQSLVQTIRAQQLQQQLLPFYPQNVANIVAFLQQQQLLPFSQHALTNPTTLLQPPTIGGAIF

SEQ ID NO: 238589 - protein, 117 aa, Zea mays
  Clone ID: MRT4577_149181C.1.pep
SEDGGSRSRTGVGYRTGGRRHGGRRTTTTVTMVTVVSCCLSTSGPASTPSPPSACTPRHWRRPTESTLASFAKHAFTSSSLAQNPRLFPKLKEGSGSFLLSRASGGIRRKLRTAARG

SEQ ID NO: 238590 - protein, 148 aa, Zea mays
  unsure (1)..(148): unsure at all Xaa locations
  Clone ID: MRT4577_149182C.1.pep
QQVQQLVLXVISRVALANLSPXYQHHQFFPFYQLSTLNHVGYLQQXLLPFSQLATAYSHQQQLLPFNQLAALNPAGYLQQQILLPFSQLVAASRASLLTQQQLLPFYQQFAANPATLLQLQQLLPFVQLALTNPAASYQQHIIGGALF

SEQ ID NO: 238591 - protein, 123 aa, Zea mays
  unsure (1)..(123): unsure at all Xaa locations
  Clone ID: MRT4577_149183C.1.pep
FFAGAGHTIRAHHLHQLELPVINQVALANLDPXYSQQQRWLPFNKLHTLNPAAYLQQQLLPFSQLATAYSQEQQLIPFNQXPALNPAAYLQQQILRPFSQLAAANRASFLTQQHVADSSTIQF

SEQ ID NO: 238592 - protein, 79 aa, Zea mays
  Clone ID: MRT4577_149184C.1.pep
SCDDALVLAAHARHMFREDVVPEGEEEGLGAEIAVVIISKRPLSSLQAARPRGRMDCCQNIGGCLQWEASWRQARLIIE

SEQ ID NO: 238593 - protein, 122 aa, Zea mays
  unsure (1)..(122): unsure at all Xaa locations
  Clone ID: MRT4577_149185C.1.pep
MELLLFQQSRALFLVQSLVRPLRAQHLQQLVLPVINQVXAFANLSPYSXQQQFFPFNQLSTLNPAAYLQQQLLPFSQLASVYFRNNNFFXFNQLAALNPXCLFEQQXLLPXSQLAAXNRASF

SEQ ID NO: 238594 - protein, 81 aa, Zea mays
  unsure (1)..(81): unsure at all Xaa locations
  Clone ID: MRT4577_149186C.1.pep
SDIIDLGFQCNNRATXATKGXSHRKPHAPSARDANATRAXQGPQXPKXTXHTPNXPTTTRAGXENPXXQPNRRQHAXAASN

SEQ ID NO: 238595 - protein, 167 aa, Zea mays
  Clone ID: MRT4577_149187C.1.pep
RFLFPPYLPSIIALVCENPPLEPYTLEQAIAASNIPLSPLMCQHSPALSLVHSLEHTIKAQQLQQLELPVINQAALANLSPYSPQQQSLPFNQLSTLNPAAYLQEQLVPSSQLATAYSEQQHLLPFNQLAALNPAAYLQQQLLLPFSQLATASRASFLTQQQLLPFY

SEQ ID NO: 238596 - protein, 96 aa, Zea mays
  Clone ID: MRT4577_149188C.1.pep
IPSTDRVALYITCQALVRNRHGHVPGLAGINRDRQPKSKFSATGAPEPLLISQFSGLRIRAPTFASGTMCSWVSCPQVWLTLRLILVCYRLACLLR

SEQ ID NO: 238597 - protein, 44 aa, Zea mays
  Clone ID: MRT4577_149189C.1.pep
CVCLLIRRNQMKVQRRRRRFSSAQLSHLLQWCWNFASISPATSS

SEQ ID NO: 238598 - protein, 54 aa, Zea mays
  Clone ID: MRT4577_14918C.1.pep
MASSSVVADMELDRPNLEDALPPDSLPQAATMNLQLRDLLDISPVLPRHRCHSR

SEQ ID NO: 238599 - protein, 105 aa, Zea mays
  Clone ID: MRT4577_149190C.1.pep
PVPSPSRGPFLSVDKHAVPPCSSSGQPRSSTGHQLPLNHCRINFQFHSRGSLEISSSSAVTPNLRFTDWLSTLLILSVSNQQASPPSLNCSLTCARKFSWSCLLS

SEQ ID NO: 238600 - protein, 146 aa, Zea mays
  unsure (1)..(146): unsure at all Xaa locations
  Clone ID: MRT4577_149191C.1.pep
AFGRPFLPLPRFRSGRLPWRAPGSSRPSLAGSPSRAAFLHLAVCRGARIAPRLLCXLGARLLWRLAAGASIGLCRLGGRTGPPKLKGPQVNLTRSASGTARAERGGPTPEARETAGEGARRRPIEPSASVLPSRRRGGVGQPSAVE

SEQ ID NO: 238601 - protein, 85 aa, Zea mays
  Clone ID: MRT4577_149192C.1.pep
SPACPSVSTRISTLPSCSSSLLALLHRRRGLAGVVPALAAVVARAAPLSSPLRTRPQVSSHSALLRLLLVARLESWLALSPVVRR

SEQ ID NO: 238602 - protein, 169 aa, Zea mays
  Clone ID: MRT4577_149193C.1.pep
RVRQRSVADSTVVAAACLVACSSGVICCTPALVPTPGSRWRSRACSLSLRCTRSHPSGFAHARVCRRAVEPVLPCSTSSLPFWWPLSLWCWTTFHHLVALAIDFVGPFHVKPASSAIVTQLLAPRVLVNFLGRVCRADQRFSSPLSPSPTQPCCSLVVVHSYFPPPYAS

SEQ ID NO: 238603 - protein, 81 aa, Zea mays
  Clone ID: MRT4577_149194C.1.pep
SNTCNLVTIYRRSQDPNSIRPLCEPPTTNTMSVGDAFAPDRHTLNQLESAKLIVRIPVIATRHLYRDRPDASRRRANRHTY

SEQ ID NO: 238604 - protein, 83 aa, Zea mays
  Clone ID: MRT4577_149195C.1.pep
VSVVRRRSLDEQPLSWYLIGLSIYIILRVSPRLGSTWLVFRITRLINVPFQQLTRSHKIGSDFPIQPICRALGKYRAASFVFI

SEQ ID NO: 238605 - protein, 64 aa, Zea mays
  Clone ID: MRT4577_149196C.1.pep
AAEILLPNFTSYKNFILFYRSDYRSISLKYMLMTVLNKKIKTGYTYIRRPSPPALNTIISSTKL

SEQ ID NO: 238606 - protein, 62 aa, Zea mays
  unsure (1)..(62): unsure at all Xaa locations
  Clone ID: MRT4577_149197C.1.pep
SNKRKKATGETRMIFKKPFDKSRLYLKSEYSDRITITFQRKKNIFILQLVLTLSESPTYTXQ

SEQ ID NO: 238607 - protein, 41 aa, Zea mays
  Clone ID: MRT4577_149198C.1.pep
VTMSLYRYNTPVATCVHINVHLGPTFSAMMYVEILRTGLST

SEQ ID NO: 238608 - protein, 93 aa, Zea mays
  unsure (1)..(93): unsure at all Xaa locations
  Clone ID: MRT4577_149199C.1.pep
CCVCLCPRHRIRPTAKIALLLASSLAKSFLSSRHKIHLDTIXVVVPRVVKKSQESGEDGVSSAIFPKRSTNCLDRKIATDLADSCQLWKRCDN

SEQ ID NO: 238609 - protein, 52 aa, Zea mays
  Clone ID: MRT4577_14919C.1.pep
TNNVCIKRQWIVHSTLVQQQAISMVISKSLVRCRPIPALKCRARFIVTSINA

SEQ ID NO: 238610 - protein, 72 aa, Zea mays
  Clone ID: MRT4577_1491C.1.pep
MALSVKKKKKKKKKKKKKKKKKKKKKKKKNKKKKKKGPLEQQVLYPFNGGKIGGGAQNTDKNTIPEGKRVTA

SEQ ID NO: 238611 - protein, 112 aa, Zea mays
  Clone ID: MRT4577_149200C.1.pep
TRRSTSSFFIAAPWLQLFPRRRAALRHLAGHGAPHSHLPHLPWPRSSSSSRARPLGTRSPALKPSPRSCRPTSTSALCPLVASARLDGPFACCSQKIYHLILYDALGELCDN

SEQ ID NO: 238612 - protein, 108 aa, Zea mays
  Clone ID: MRT4577_149201C.1.pep
FFFFFFLKRISRKGNQFSRKEMHQQFSTQLLSPNASNKVIKILKHQGGGECTRAFLNNTRLVFVKRCPLDDHPLSWYSFNYPSSDSSISIIMRSSPRLGSTWLVFHIT

SEQ ID NO: 238613 - protein, 73 aa, Zea mays
  Clone ID: MRT4577_149202C.1.pep
RNAPGGLLNRFQCNPKEPPTQRLIPVPGPCPCRAPLHYDTPYPHNHLPCAGTLKCPINTPRGPRANFPHHYAI

SEQ ID NO: 238614 - protein, 145 aa, Zea mays
  unsure (1)..(145): unsure at all Xaa locations
  Clone ID: MRT4577_149203C.1.pep
MMDAAKMSLETYVXDEHLLCDIQGQHSRGTYAYGXTDTVNCVQRTAVPELXTTIMANIVNTLNXQGXLSTTGLMLEPTXLLGIPCDAGAAIRSKKKSXRITAKKTRRGLSVTLYIKPLTPTTSNMDVERLRHYLLGQGMKLLRTS

SEQ ID NO: 238615 - protein, 83 aa, Zea mays
  Clone ID: MRT4577_149204C.1.pep
VVVPRVAKNSKSRVKMEPAAWCSPSTRQKARTSCATQVQFVEIIQSKKRSSAINYRRKEGSWMTSTGTRSRACDYRVELVRVC

SEQ ID NO: 238616 - protein, 36 aa, Zea mays
  Clone ID: MRT4577_149205C.1.pep
MAHEIIRKSEKDTHEAREAAKAVEKTAELERRIGIV

SEQ ID NO: 238617 - protein, 97 aa, Zea mays
  Clone ID: MRT4577_149206C.1.pep
PEVLLSSGNDHYARIWDTRKLEANSPLASLAHGRVVNSGYFSPRSGNKILTTCQDNRIRVWDYILGDLQSPSREIVHSHDFNRHLTPFKAEWDPRFQ

SEQ ID NO: 238618 - protein, 77 aa, Zea mays
  Clone ID: MRT4577_149207C.1.pep
ACKYTCILFCSDEHVIDHRVAPLLYYWHLQRSDLFQGMSGYTSDQFLVSNAQCGPSLFWWPSRQWPLKSHSGGLEPN

SEQ ID NO: 238619 - protein, 85 aa, Zea mays
  unsure (1)..(85): unsure at all Xaa locations
  Clone ID: MRT4577_149208C.1.pep
MTLVRMPCRLCCFLLVVAASAAVSGRGRVVTTLPGYEGRLPFHLKTWYVXVDNDSRTDLFYYFVRAKSYADHSYTPFVLRIPCWQ

SEQ ID NO: 238620 - protein, 103 aa, Zea mays
  Clone ID: MRT4577_149209C.1.pep
LFCLAQKVLPSLVFWRRFTSIAYYVHPKVPSSVSNRCNKKGPKSVANHLHSKRALCVCTCVLDTFFWCASAGLSCLGMLPLPVVERILVDRGSLCSALSLSSS

SEQ ID NO: 238621 - protein, 86 aa, Zea mays
  unsure (1)..(86): unsure at all Xaa locations
  Clone ID: MRT4577_14920C.1.pep
MKMVIALVLCLALSVDSTCAMHMPCPCAGLEVLYGSRPXLTTMMCARSLYPYAEYLRQPXCSPLTTAPYYTGCGLTSAMFHTIRQQ

SEQ ID NO: 238622 - protein, 160 aa, Zea mays
  unsure (1)..(160): unsure at all Xaa locations
  Clone ID: MRT4577_149210C.1.pep
MASSLADVLSTFLGTRLKDPAPQNERIVDRFVFGLNDXEKPAPNKVEKTSTSSDRPLWIPGAEEPDYLNVSLDDYYWFDPFGLVKPVQNLQIQLDSLEHNLLKNDAGGIIGTRXESSEVKSTPLQPYSEEYGLQRVHKCELIHGRXGMIATLGGLYVKGL

SEQ ID NO: 238623 - protein, 97 aa, Zea mays
  Clone ID: MRT4577_149211C.1.pep
MDSTGTGAGGKGKKGAAWRKVGGPRKKSVSRSVKANLQLHVGLIGRYLKKGRYAHRVNTNAPMYLDAVLEYLAAEVLVLYINAGSVNKMTSIITLHV

SEQ ID NO: 238624 - protein, 182 aa, Zea mays
  unsure (1)..(182): unsure at all Xaa locations
  Clone ID: MRT4577_149212C.1.pep
IFSLLMLLALSTCVANATIXPQCSQAPIAPLFPPYLPSIIAIVCENPSLQPYRLQQAIAASNIPLSPXVXQQSPDLSLEQSLEQTIRAQQLQQLMLPVINQVALANLSPYYTXQQFIAFNQLPTLNPAVYLQQQLLPFIQLATGYCQHQQLLTFNQMIVLNPAAYXQQQILLPFIQLATASR

SEQ ID NO: 238625 - protein, 36 aa, Zea mays
  Clone ID: MRT4577_149213C.1.pep
LKHMGKVHLCPYDVFVGKAPQRSHPVFNKTAEVPDC

SEQ ID NO: 238626 - protein, 94 aa, Zea mays
  Clone ID: MRT4577_149214C.1.pep
HTTALGRVVKRPERVVLAPHRSAVPMQPYLPPYYTASSPWRPHSPSTTRSSRGGLRPSWHFMTCRTVPGHGAVAGDGIGHDSAVSPSTRLVADE

SEQ ID NO: 238627 - protein, 63 aa, Zea mays
  unsure (1)..(63): unsure at all Xaa locations
  Clone ID: MRT4577_149215C.1.pep
STSSTEHTNPLRTLEGRGNIQCKKTHTGQVXXNENVPERAPNYTXFFIISIDDEGFCRQQPFV

SEQ ID NO: 238628 - protein, 93 aa, Zea mays
  Clone ID: MRT4577_149216C.1.pep
AFLQQQQFFPFTQLAALNPPAFFQQQILLPFSELAAASRASFLTQQQLLPFYKQFAANPPPLLQLHQLSPFVQLALTNPAASYQQHIIGGAPF

SEQ ID NO: 238629 - protein, 62 aa, Zea mays
  Clone ID: MRT4577_149217C.1.pep
DILALHLLASSSNMFLFALSACPSLKLSTCCVVSETENFSNYNRWARPVLSSATSVPLYRQL

SEQ ID NO: 238630 - protein, 122 aa, Zea mays
  Clone ID: MRT4577_149218C.1.pep
NSKQQQLFPLNQLAALNPAAYLQQQILLPFSQLGAANRASFLTKQQLLPFNQQFGANPATLLQLQQLLPFVQLALTDRGASYQQHIIGGALLLDGLLVVIQKKSFLDKEWGHPEIRSYISRF

SEQ ID NO: 238631 - protein, 186 aa, Zea mays
  unsure (1)..(186): unsure at all Xaa locations
  Clone ID: MRT4577_149219C.1.pep
MATKILSLLMLLALSACVANATIFPQCSQAPIASLLPPYLGIXYRLAAMXCKSQALQXPIGLQQAIGASNIPLSPLFQQSPALSLVQSLVQTIMSQQLQQLVLPVINQVAVANLSPYSQQQQFLPFNQLPTLNRADHLQQQLLPFSQLATAYSEPHQLLPCNLWARLNSPAYLHHHILLPLSQLVA

SEQ ID NO: 238632 - protein, 89 aa, Zea mays
  unsure (1)..(89): unsure at all Xaa locations
  Clone ID: MRT4577_14921C.1.pep
MDTKIFSLLMLPALSTCVANPTILPXCLQASIASLFPPYLSLIIASGCENPILXPFWLQQGFSVSNIPXLSPLLXNNCQPLFLVQSLVT

SEQ ID NO: 238633 - protein, 140 aa, Zea mays
  unsure (1)..(140): unsure at all Xaa locations
  Clone ID: MRT4577_149220C.1.pep
SQQAQFLPLMKLFKLKFENCSQQQXLPFRQVVFAXAQQQKFLPFNQLAALNPFAYFQQQILIPFGQLATTSPASFLTQQQLLPFYQQFVANPAPLLQMQQLLPFVQLDLRNKKALPPPPIIGDAFFRLVISCNSIMKFFG

SEQ ID NO: 238634 - protein, 53 aa, Zea mays
  Clone ID: MRT4577_149221C.1.pep
PILSICIPYKNVFTAYTTRLSCDKQDLFLLIWCVAAVSSKGPPWINELLHLRH

SEQ ID NO: 238635 - protein, 137 aa, Zea mays
  Clone ID: MRT4577_149222C.1.pep
QVVLANLFPYFQQQQFFPFNQLFTLNPAAYLQQQQFFPFSQLVSAYAQQQQFFPFNQLAALNPFVFFQQQILLPFGQLGTTSPASFLTQQQLLPFYQQFVANPATLLQLQQLLPFVQLALTNPAAFFQQPIIGDALF

SEQ ID NO: 238636 - protein, 221 aa, Zea mays
  unsure (1)..(221): unsure at all Xaa locations
  Clone ID: MRT4577_149223C.1.pep
KVAPSSTNRATLATKISYLLMLLAXLCACGANATTLPQCSQAPIASLIPPYLASMIASVCENPALQPYRLQQAIAASNIPLSPLTIEQSTALSLVQSLVQTIRAQQXLQQLVLPXVINQGALANLSPYSKQQQFLPFNQLSTLNPAAYLQHQLXPFRQLATVYSQKQQLLSCNQTAALNTAAYSQQQILLPCSQVAAANRASFLTQXNXLSFYQTIAAKPA

SEQ ID NO: 238637 - protein, 90 aa, Zea mays
  Clone ID: MRT4577_149224C.1.pep
QQQQLFPFNQLAALNPPAYLQQQILLPFSELAAPSCASFLTQQQLFPFYKQFGANPPPLFQIQQLLPFVQLALTNPAASYQQHIIGGAPF

SEQ ID NO: 238638 - protein, 91 aa, Zea mays
  Clone ID: MRT4577_149225C.1.pep
SRTPGPTPWPQIIFSRWRRRARKVFDSVLRLSRVIGILFLTTQVFLRDKTPKKEGSGQHALGNSLPLWGKHSFFERGLYGRGKYPFYTGWG

SEQ ID NO: 238639 - protein, 130 aa, Zea mays
  unsure (1)..(130): unsure at all Xaa locations
  Clone ID: MRT4577_149226C.1.pep
PIEVVISFSDTHVTNTAQPADHPQRQLSTHHTHLAPVYDKRQQLLXHTQLSVLDSVDYXTNIILLPFNQLCCXNRXASFLTQQQLLPFYQQFAANPATLLQLQQLLPFVQLALTDPAASYQQHIIGGALF

SEQ ID NO: 238640 - protein, 199 aa, Zea mays
  unsure (1)..(199): unsure at all Xaa locations
  Clone ID: MRT4577_149227C.1.pep
MATKIFTLLMLLXALSTCVANATIFPQCSQAPIAFIFAPYLPSIIAAIXENPAIQPYRLKQAISASYIPLSSLLFQQSPALSLMQSLVQTIRAQQLLQLVLPLINQVALANLSPYSXNNNLLPFNHLYTLNPAAYLQQQLLPLTQLATAYSXQQQLLPFNQLSALNHAAYLXRKHYLPFSLIAAAHRASFLTQQQMMSF

SEQ ID NO: 238641 - protein, 88 aa, Zea mays
  Clone ID: MRT4577_149228C.1.pep
TRPWRGRGMTTNSSSNYSSRTPRVADRNLRVAELATSTKETTMMLLMKMIVVAEVEGRRTRRDRGCRRIFDNILKTGRPRGSQSPIGV

SEQ ID NO: 238642 - protein, 74 aa, Zea mays
  unsure (1)..(74): unsure at all Xaa locations
  Clone ID: MRT4577_149229C.1.pep
EVLVFLPGLVHFQQNRGHGXAXVLSAFNIQCQGTQAIAITLLGATPPVAPTVLAEAFRVGSGEVKPTKASFGPK

SEQ ID NO: 238643 - protein, 61 aa, Zea mays
  unsure (1)..(61): unsure at all Xaa locations
  Clone ID: MRT4577_14922C.1.pep
ISVMLFYSMNTIDVDEVTVDIVKFQKLTDELTMLNLMGQIPATVDDRFKLFXSNAIFRYLA

SEQ ID NO: 238644 - protein, 319 aa, Zea mays
  Clone ID: MRT4577_149230C.1.pep
LLETKGIFLAEEKPDHDFLADIRAGQVMKTEVESLEQSLTLAQVLPIMSNSHHRGFPVVQGGKLVGVFTQTDLANAAQESVHIALKQIMTPNPITVDPEAPLSDVLYLLNRYQLSRLPVVEGDNKLVGIITRTDIIREEVSQLGGQIIHPPHPAYSVYQTRSPLVGEGRILLPIRDSDSALVLFQIAAAIAKKQNYEIDCLQVVKVSKAQSPSVQRVQWQRQRQLMQKLERIARHQRVLFHTEIKLAYSITDTILDTIQTRHSDLLILEWQGEMPIGGQIFGQITDQWWYPNVLNPALSLHFEYKNSYLALNPDRETYF

SEQ ID NO: 238645 - protein, 81 aa, Zea mays
  Clone ID: MRT4577_149231C.1.pep
TAVAAALFFFFFFFFFFFFFFFFFFEKNNISFNMPHFRSTTPDHFILTITFFSLYQKKRGGEKMKSFQRLYKNMPPFPKLS

SEQ ID NO: 238646 - protein, 107 aa, Zea mays
  Clone ID: MRT4577_149232C.1.pep
HHEAPLGGPLWGNIRRRNLFWEYSGETLSFMLLGRVGLRGQVKRIPSIPDSKNEALPSLILGTEPLCSGLGNLERGGFGFCLVAKLTERSVTGQAGWEQNGSPRVIF

SEQ ID NO: 238647 - protein, 260 aa, Zea mays
  Clone ID: MRT4577_149233C.1.pep
KRKKKKKKKKKKKKKKLPRNPADPALPRFLPAESSSLHPFRSPASRTSTATEPRASSMKDPFEADVEEQDSPPESPAPPEDEPGAAGPAEDPEDYDGGPPPRQPSAPASHAAGAKAKARVHREQQEDDDEDEDQIEVDLEKLPSSTGDPDKLAKMNAILSQFTQQQMNRYESFRRSGFQKSNMKRLLASITGSQKISIPTSIVVSGIAKIFVGELIETARVVMSERKDSGPIRPCHIREAYRRLKLEGKIPRRSVPRLFR

SEQ ID NO: 238648 - protein, 220 aa, Zea mays
  Clone ID: MRT4577_149234C.1.pep
SVTRPLAHPPPPRRSMKDPFEAAVEEQDSPPESPAPPEEEPGAAGPADDAEDYDGGPPPRQPSAPASHAASAAAKAKGRVQREQQEDDDDDEDQMEVDLEKLPSNTGDPDKLAKMNAILSQFTQQQMNRYESFRRSGFQKSNMKRLLASITGSQKISIPTSIVVSGIAKIFVGELIETARVVMSERKDSGPIRPCHIREAYRRLKLEGKIPRRSVPRLFR

SEQ ID NO: 238649 - protein, 63 aa, Zea mays
  Clone ID: MRT4577_149235C.1.pep
QIKRSFQSIEGLYINNISFQSSLVLFFSRFYYFSFSLQGSSNIYYFCNISKLQIRIYRSCTVF

SEQ ID NO: 238650 - protein, 62 aa, Zea mays
  Clone ID: MRT4577_149236C.1.pep
LSIALTHRYVSLVVASLLLLGVLVVGAVIVRDVGETFHDSCIKTQFPTICVHSLAANLYSHN

SEQ ID NO: 238651 - protein, 81 aa, Zea mays
  Clone ID: MRT4577_149237C.1.pep
QVQNYKITVVRWFSEMIPYIYYDISDRSSALLVGLTTGVSLGRGLAHGQFSSLLFYGGCIVVNGVGNGLGRLVKSGCNVTG

SEQ ID NO: 238652 - protein, 144 aa, Zea mays
  unsure (1)..(144): unsure at all Xaa locations
  Clone ID: MRT4577_149238C.1.pep
LGSRSRRHFNRTTCRADYSYRXRHRFFQWKKPFAEASHAHEIALEIIFIEANCPISAILKRARVLLEKNSNNIAAFVTNHGCLNYIQESLRSSILHLLRVFTMXERCIAGFCRDGXAEGYIPAVRFKVLKVSGXSLLSLSEEMK

SEQ ID NO: 238653 - protein, 503 aa, Zea mays
  unsure (1)..(503): unsure at all Xaa locations
  Clone ID: MRT4577_149239C.1.pep
MSPSKKQLTNNNDSLYWSNEKYDYSCSWLDDRAMISALLDVVIEEDSARALSPLPLVAGVEAELHPVSVGHKSMDAEMKQPLEGSMSLNIDSEGEPHIGNGSIVVENPASDLVKSESDRIKTFYQTVLSAIMVFVTAALSSYKDMKPLYSTTSHGKAHLSNLLVDEGLFIFMTFLCAMVLMMSEFVVHQHGPAGPWSGAGFXILVAVTGVMLIVADTILLIVTNRSNMLLSVLLVPXCCLFGVAVSVGAWMQESLPSSELGSRYDSAMKGTFDIATVGTIVSFTLQGGIVFGYLKTPDSNQVKHDPPLDLAACYATSTLSLTGMTMCAMPLAYLPNGMLEVLVRVVERLRSAVLAALAMMALVVSVEFLDGFVVVSFFPDAVTIALYYVVKLFSACQPREEISQLDFTFRIVAAAGFTLMTGLYAAFTGTDHYGFNLKTAMFILLLAVVSSLSRLAIPLXCLRREWEESSSXIVSIALSFPLLALLAAIPLVFKVFVDHYINR

SEQ ID NO: 238654 - protein, 215 aa, Zea mays
  Clone ID: MRT4577_14923C.1.pep
MGPPFFLLFLVLTAAAVVSSAPRREAFRRDPGHPHWHHGAFHDVEDSVRADVRRMLHTRAEVPFQVPLEVNVVLIGFNGDGGYRYSLDGHKLEEFLKMGFPLHRPSCFETGEPIDIEHHIMYNVISAGQPELISLEKSLKEAMQPAGIARDSEYGRELPLFEVEATAVESIFQRLYSFIFDMEPGYPANDMDRPVPVAIFIVNFVRLEWILETRS

SEQ ID NO: 238655 - protein, 43 aa, Zea mays
  unsure (1)..(43): unsure at all Xaa locations
  Clone ID: MRT4577_149240C.1.pep
GICNPIIRXMSQDQGSGMGAPSGMYEDALSGGIGAGPKIEEVD

SEQ ID NO: 238656 - protein, 251 aa, Zea mays
  unsure (1)..(251): unsure at all Xaa locations
  Clone ID: MRT4577_149241C.1.pep
KGESITTIEPPLPTKIVAFLMLLALSTWVANATIFLQCXQAPIASLLPQYLPSIIASICENPALQPYRLQQAIAASNIPLSPLVFQQSPALSLVQSLAQTIRAQQLQQLVLPVISQVALXSLSPYSQQQQFLPFNQLSALNPAAYLQQQQLLPFSQLATAYSQQQQLLPFNQLAALNPAAYLQQQILLPFCQLVAASRASLTQQQLLPFYQQFAANPTTLLQLQQLLPFVQLALTNPAASYQQHIISGALF

SEQ ID NO: 238657 - protein, 114 aa, Zea mays
  Clone ID: MRT4577_149242C.1.pep
MPHEGYYEASLRPPALDDAPAAKDWGEVLLDRVAYMVDKKNHTSVNLQFKRDLDGKEVDLWVTLCFARPPRLSYFCCHASCPNDKEEDTRLFFREPFVFATEGNLAVITLCHGR

SEQ ID NO: 238658 - protein, 252 aa, Zea mays
  unsure (1)..(252): unsure at all Xaa locations
  Clone ID: MRT4577_149243C.1.pep
LSAYNRATTTNTVGSIIMLLALYACAANATILPQCSQAPIAFIITTYLASMIAXLCENRALQPYTLQQAIAACNIPLSPLQFQQSPALSLVQSLVQTIMAQQLQQLVLPVINQVALANLSPYSQQHQFLPFNQLSTLNPAAYLQQQLLPLRQLATAYSQEQQLVAFNQLAGLNPAGYLQEEILLPLSQLAVGNRACLLTQXQVLSLYQQFVVNPGTVXQLQQWGGLEQLGWTDPVGCYQQHMIGGDLLKMGH

SEQ ID NO: 238659 - protein, 241 aa, Zea mays
  unsure (1)..(241): unsure at all Xaa locations
  Clone ID: MRT4577_149244C.1.pep
MATKILHLLMLAALXACVANASIHPQCSHAPIAFLLXPPYLTSMIATVCENXSLQPYRLQHAIVASSIPLSLLXFHQSAALSLVQTXLHTIKAQQLQQLVLHVINQVVLATLYSLXQQQQFLPLYPLYTMTPADYLQQQLLPFSQLATAYYDQQQFFPFNQLAALNPVVYLQQQILLPFKQLAAASSVSFLTQQQLLPFYQQFAANPATLLQLQQLLPFVQLALTNPAASCRQHIIGGALF

SEQ ID NO: 238660 - protein, 287 aa, Zea mays
  Clone ID: MRT4577_149245C.1.pep
MRRCAEAIARAVVEFLDAVILAFIRSCFGARPRRGSGLRDALVRGDRAAEVIWDEEGLVRDGRFHEDLADGCGIDEELRREASYLKLCGTISETPAELRNEQSYENNLETTNECDSKLTYGPPANCKLLFEANSSQGQRNPRCEERHSLRSILNSEDAGRHHGAEYVPRSASSEKRLFQNMQHKPLDSGGSPFPTPLVLRDDMQTPGTAYASHRGTSISGKRVRTRKQFIYPVLRSIENRLQQIELTEDSSPLASSDPLKERDLGADSTKDPTQASSTSAHASADAW

SEQ ID NO: 238661 - protein, 190 aa, Zea mays
  unsure (1)..(190): unsure at all Xaa locations
  Clone ID: MRT4577_149246C.1.pep
KPPSLQPYRLQQAIAASNIPLSPLLFQQSPALSLVQSLVQTIRAQQLQQLVLPVINQVALANLSPYSQQQQFLPFNQLSTLNRAAYLQQQLLPFSQLATAYSQQQQLLPFNQLAALNPAAYLQQQILLPFSQLAAASRAFFLTQQQLLPLYQQFAANPATLLXLQQLLPLANLLCKPRVSXPQHILGWPF

SEQ ID NO: 238662 - protein, 258 aa, Zea mays
  unsure (1)..(258): unsure at all Xaa locations
  Clone ID: MRT4577_149247C.1.pep
GPTSIILEIWKCNFLFLVGHIHNPKNLIIESQLTSNLKEGTTHDFSHGRRAFLLPKYVAQMVASVCENPGLQPYTLTHAITASTIPVSTLMTQQSPVLSLVQSLVQTIMAQQLQQLVLPLINQVALANLSPYSQQQQFLPFNQLTTLNPAAHLEQQLLPFSQLATGYSQQQQLPSFNQLAALNPAGYLQRQILLPFNQLAAANRASFLTQQQVVXFLQQVGGNPATLLQLPQLVAFGQLALTEPAGSYQXHIIGGGPL

SEQ ID NO: 238663 - protein, 104 aa, Zea mays
  unsure (1)..(104): unsure at all Xaa locations
  Clone ID: MRT4577_149248C.1.pep
MGDDSLAVACGQVVGGXSHRNEVVXRLVNSIYMLGATXXSDHAGPDGNGLGGADAANQSVSGGAAAWRWEDRTADKAHRWYAEVYLGLDLVRHGAVFVRLSQIL

SEQ ID NO: 238664 - protein, 143 aa, Zea mays
  Clone ID: MRT4577_149249C.1.pep
GPSSPHPPPKSLSGRPGFPPPWFTPPPPTQRGFPPGSPPRGFPTAFPFWFCLFEPRAAGKKHQLFALPPSVPGRGGFPCPGLGKKPRTPSQSPYVRAVVIRLFSVPPKKRYFGVSKKKKKKKKKKKKKKKKKKKKEKKKLARG

SEQ ID NO: 238665 - protein, 43 aa, Zea mays
  Clone ID: MRT4577_14924C.1.pep
VTFFNLSLKFALTRSRTQDLRSATRKECYSDHLTNSARDPFAP

SEQ ID NO: 238666 - protein, 256 aa, Zea mays
  unsure (1)..(256): unsure at all Xaa locations
  Clone ID: MRT4577_149250C.1.pep
TYKSGNTVTTIERQWPPINQTSLMLLAPLYMQLHNATPPPKCSQLLIACLFPTYLXKRIHLNMCKTKALQPYRLQTAIXTSNIPLSTLLLQQSPALSLVQTLGQTIRAQQLQQLVLPLINQVALANLSPYSQQQQFLPFNQLSTXNPAAYLQQQLLPFSQLATDYSQQQQLLPFNQLAALNPAAYLQXQILLPFTELAAASRASFLTQQQLMPFHKQFAANPAPLLQLQQLLPFVPLGLTNPAASYHLHIIGGPLF

SEQ ID NO: 238667 - protein, 74 aa, Zea mays
  Clone ID: MRT4577_149251C.1.pep
VRHGLGTIATSVLLLYCVDRLYPQTHVIVYLTCRSIAVSTLGSSFITSGIPLNVTLHRSNSLIYHIHGHSTCMQ

SEQ ID NO: 238668 - protein, 127 aa, Zea mays
  unsure (1)..(127): unsure at all Xaa locations
  Clone ID: MRT4577_149252C.1.pep
MRQCISIHIRKNGIQQRNAXCKLHCLEHGIHADAHMPGDYXIGXSDDAFTPYYSDTXAAKHVTRAXIYDDLEPTVINDVKTETYSQIVLPEQLIQAKENASNNFDRELYCIGYESVELRNDRIKNHA

SEQ ID NO: 238669 - protein, 227 aa, Zea mays
  unsure (1)..(227): unsure at all Xaa locations
  Clone ID: MRT4577_149253C.1.pep
MRATMESEILAIVMLIVLYTXVANTTMFAQXLHAEIGXLFSPYLPSIIATVWENPALQPYRLXQAIAKSNIPVSTLLCKQSPALSLVQSLVQTIRAQQLQQLVLPEINQVAMANLSPYSPQQQFLPFNQLSTLNPAAYLQQQLSPFNQLATGYSQQQQFLSFNQLTGGNPAGYLQAPQLLPFNQLGGSPDGFLLEQQXLLAFHLEAVENNGSFLRQQQMVAFYPQGG

SEQ ID NO: 238670 - protein, 82 aa, Zea mays
  Clone ID: MRT4577_149254C.1.pep
PGLQEWGTWIHLRGELTLQSVQSRITHQFSLPKTSSEMASIDKFLQFQDAVPCKIRAKRGCATHPRSIAERVGEFIFFHRFP

SEQ ID NO: 238671 - protein, 240 aa, Zea mays
  Clone ID: MRT4577_149255C.1.pep
METKIFSLLMLLALSTCVANATIFPQCSQAPIASLFPPYLPSIIASVCENPALQPYRLQQAIAASNIPLSPLLCQQSPAPSLVQSLVQTIRAQQLQQLVLPVINQVALANLSPYSPQQQFLPFNQLSTLNPAAYLQQQLLPFSQLATAYSQQQQLLPFNQLAALNPAAYLQQQILLPFSQLATASRASFLTQQQLLPFYQQFAANPATLLQLQQLLPFNQLALTNPAAFYQQPIIGGALF

SEQ ID NO: 238672 - protein, 60 aa, Zea mays
  unsure (1)..(60): unsure at all Xaa locations
  Clone ID: MRT4577_149256C.1.pep
VHIGXLYGAXXWNRETEIVLYDETPGVSVSXVXLGSLSMVITTXSMRRSDXLRFVKDLSV

SEQ ID NO: 238673 - protein, 235 aa, Zea mays
  unsure (1)..(235): unsure at all Xaa locations
  Clone ID: MRT4577_149257C.1.pep
MAAKIFSILMLLALSACVANATIFPQYSQAPIAALLPPYLPSMTASVCENPALQPYRLQQAIATSNLPLSPLFFQQSPALSLVESLVQTIRAQQLQQLVLPVISQVALANLSPYSQQQQFLSLNQMCTLNPVVYLQQQQLLLYTQQICSVLLQQHIFLSXHQGPALNLSVYSQQQTLLPLAQVATTNPAFFLTQQQLLAFYQQFVANPATFXQLQQVLPFVQLXLTNPAVFYQHT

SEQ ID NO: 238674 - protein, 107 aa, Zea mays
  unsure (1)..(107): unsure at all Xaa locations
  Clone ID: MRT4577_149258C.1.pep
MILGYLRFLFIIPESYYRYCSIFHCIFLKFLXYCLSFIFIXYLIIFLHFFXSFIFYFIFSFIFFIFFIFLFFFYLFFFFFFFLFFFSFFFFFFFFIFFYYLFLFIFF

SEQ ID NO: 238675 - protein, 475 aa, Zea mays
  Clone ID: MRT4577_149259C.1.pep
HASADAWDETLPGLTSVASGKAVELFARMLHHPDEIRAPGDTAGTETEHQLGLLPHQLRGSLPKCDLFVELNNSSVNCTACSVAVLSEYRRRGLDFVMQAINYPAYLKDFTGISDSKRPDTCPKIPPNISVNSDKISDVRCLLLGAGTLGCDVARILMDCGVRKITVVDSGHVVVSNLARQSLYTSDDRGAPKATAILGHLVERCPSVDAQGIKMEIPMPGHPVSPGEAAGVLQDCERLKELVLSHDAIFLLTDTRESRWLPTLLCTNENKIAITAALGYDSYLVMRHGAGPGISCEASSVVTAIDKMSTEDALGRQRLGCYFCNDVIAPVDSVSNRTLDQQCTVTRPGLASIASGRAADLFRRMLHHPDGIHAPGEIAGTGSGHEHGLLPHQMRGSLSQYNILTLLGYSSSNCTACSHAVLYQYRRRGMDFVMQVINEPTYLEDLTGLTELMKSASCSQVEWVDEIDEDDFVEV

SEQ ID NO: 238676 - protein, 53 aa, Zea mays
  Clone ID: MRT4577_14925C.1.pep
LSMVAEISTNQVPRKKNPYRFPQSLGFLSKWQNCYNNYLHESPANDLLTASAS

SEQ ID NO: 238677 - protein, 428 aa, Zea mays
  Clone ID: MRT4577_149260C.1.pep
MSTVAAAPTVVKSAPELVAPVGPTPGGTLPLSSIDKTAAVRVSVDFIQVFPPAVGAGGDKDAAVAAMRDGFAKALVPYYPVAGRIADASPGEPVVECTGQGVWFVEAAASCALADVNYLERPLLIPKEELLPRPPPEEKLEDLVLMAQVTKFACGGFAVGICFSHLVFDGQGAAQFLKAAGEMARGLPAPSVAPVWDRDAIPDPPKLPRGPPPSFTAFSFVTQVVEISPESIARIKDDFKDATGQTCSTFDAVTAVVFKCRALAMALPDDAEVRLGFAASTRHLLHGVLPSVDGYYGNCVYPVGITRTSKAIREASLPEVVGVMREAKEALTTRFTDWMRGGAKDDHYNVPLDYGTVTVSDWSRVGFNEVDYGFGEPGYVFTLNDDVNIVASVIYLKPPAPKRGIRLMLRCVEEPHAAAFAEELAKFA

SEQ ID NO: 238678 - protein, 88 aa, Zea mays
  Clone ID: MRT4577_149261C.1.pep
TAVGHCCCNLSTSFLILGGGLPQFQLKALLAVFTYTDFSIFGSNICNFTLKASIGLCFLALFFRKRQWLIQTTFCCISKKFRNNRSPC

SEQ ID NO: 238679 - protein, 123 aa, Zea mays
  Clone ID: MRT4577_149262C.1.pep
MVQVVVCGHAFILAHVQLMVQQLGTVVVEGHKVQDIERWRQLAVLVLLFLSTLATRSFRLTRSVVSRYPPGISCGRCGRPSACPTTTYRSAYSRCHTSRRWTRRRQTRPAVSHWSGRGRGPRR

SEQ ID NO: 238680 - protein, 58 aa, Zea mays
  Clone ID: MRT4577_149263C.1.pep
KKRGVLTPPKLNPALHNYTLQQSQTLPWVFPFSAFKSKLFSMHFPNFPLINRLCKKLF

SEQ ID NO: 238681 - protein, 98 aa, Zea mays
  unsure (1)..(98): unsure at all Xaa locations
  Clone ID: MRT4577_149264C.1.pep
VSVASFFPGFLCVGPVXGFVPGCXLVAFPRXLGXLPVGPFPGVLALVVVGLCSXLFFXXXSASFVWPVFLPWVFLGPFRVGCPGPXVFLLFFXXPFRL

SEQ ID NO: 238682 - protein, 70 aa, Zea mays
  Clone ID: MRT4577_149265C.1.pep
MSTSLEITPFVRRPAPGKAGKPIAIRSNFFEVLQLPDITVHHYDVTITPDVPPPVNRKVFTQLLETYRDS

SEQ ID NO: 238683 - protein, 177 aa, Zea mays
  Clone ID: MRT4577_149266C.1.pep
MDELVCPAASSCSSPSPTSFFAAGHVPELEFVSWDVPEEWMEGTDWFDEPLDGDEGSRSAGNDLSGEPPAPAPKRRRGRKPGPRTNGPTLSHVEAERQRRDKLNRRFCELRAAVPTVSRMDKASLLADAVTYIGELRDRVEQLEAEAKQASAAVTTAVAAASHSFAPLHEKLGLEVR

SEQ ID NO: 238684 - protein, 70 aa, Zea mays
  unsure (1)..(70): unsure at all Xaa locations
  Clone ID: MRT4577_149267C.1.pep
SGRRLGRCVGAGLPLCLFPAWVSXAPLCVPVLLWPRAXPPPPPVVPPPXRGWLGSSCSPLLAGLPFLPGA

SEQ ID NO: 238685 - protein, 267 aa, Zea mays
  unsure (1)..(267): unsure at all Xaa locations
  Clone ID: MRT4577_149268C.1.pep
MDTSLAAAAVTAEASAPATASTEPSAAPDASPAASSSSAAAAGAEDLAGGVASLSLDERFDLLMSIGEECIQPDELKRLLQNKPVPICYDGFEPSGRMHIAQGVVKAINVNKMIRAGCKVKIWIADWFAQLNNKMGGDLKKIQTVGRYMIEIWKAAGMNLDGVEFLWSSEEINRRANEYWPLVMDIGRKNNIKRITRCCTIMGRSDNEELTAAQIFYPCMQCADIFFPEADICQXGMDXRKGYMLARXYCDDIKRKKQPXILSHHML

SEQ ID NO: 238686 - protein, 100 aa, Zea mays
  Clone ID: MRT4577_149269C.1.pep
HASAHAFAHASAFVYLSTVLLIAFGFHGFCLHYLIFVMHPHFLCRRHALLLPKISCTETHPKIAQLLEHHKPNVSLLMLKCAECDSFSATENFEKDGGSS

SEQ ID NO: 238687 - protein, 70 aa, Zea mays
  Clone ID: MRT4577_14926C.1.pep
FSGGTLALSAVPKGPGVPTLRHSLANLWPCRDGFQRPPALVLLLSQEGCVRALHGELEACGPPINSIYFM

SEQ ID NO: 238688 - protein, 73 aa, Zea mays
  Clone ID: MRT4577_149270C.1.pep
PRGFFCKFRCWGLAQKGFLGPLWAPQGLWFKTGVLSLHPGFFFRVWVFHRTLFSPGGEKKKKNKKGGENGGKF

SEQ ID NO: 238689 - protein, 90 aa, Zea mays
  Clone ID: MRT4577_149271C.1.pep
QSPVSGTHVRHGPKPPAWAKDHIMIIMASWDGNGSEPMLHHHEDTPLYSEGRRDPEQRPRELAWTVAIEQHSLLGPRGLSARGVLTKLHH

SEQ ID NO: 238690 - protein, 180 aa, Zea mays
  Clone ID: MRT4577_149272C.1.pep
GQSLAIVGAGGGLGSIAVQYAKAMGIHAIAIDGGEEKEKMCMSLGAQTFIDFTKTKNIVADVKATTNDGLGLHAALLVAAAEKPFQQATQYIRSKGTVVCIGLPAGAQFSAPVFDTVVRMIQIKGSYVGNRADTAEAIDFFRRGLIKVPFKTVGLSELNEVFKLMKAGQVAGRYVVDTSR

SEQ ID NO: 238691 - protein, 203 aa, Zea mays
  unsure (1)..(203): unsure at all Xaa locations
  Clone ID: MRT4577_149273C.1.pep
GAENDPEXLVDLQYSLAKSYASTPELRKTWLDSMARIHVKNGDLSEAAMCYVHVTALVAEYLTRKGMFRQGCTAFRVITPNIDEEASMMEDVGMQDVHFNEDVLMELLEQCADGLWKAERYELIADIYKLIIPIYEKRRDFERLAHLYDTLHRAYSKVTEVMHSGRRLLGTYFRVAFFGQAAQYQFTDSETDVEGFFEDEDGK

SEQ ID NO: 238692 - protein, 240 aa, Zea mays
  unsure (1)..(240): unsure at all Xaa locations
  Clone ID: MRT4577_149274C.1.pep
MAAKIGSILTLLALSACVANATIFPQYXQAPIAALLPPYLPSMTASVCENPALQPYRLQQAIATSNLPLSPLFFQQSPALSLVQSLVQTIRAQQLQQLVLPVISQVALANLSSYSXQQQFLPFNQLSTLNPAGYLQQQLLPFSQLATGYSQQQQLLSFNQLAALNPAAYLQQQILLPFNQLAVANRAPFLXQQQVLXFFHQFAGKPATLLQLQQLVAFAQLALTEPXASNNNTLLGGGLF

SEQ ID NO: 238693 - protein, 163 aa, Zea mays
  unsure (1)..(163): unsure at all Xaa locations
  Clone ID: MRT4577_149275C.1.pep
SLSLVQSLVQXIKVQQLQNLVLPVISQVALANLSPYSQQQQFLPFNQLSTLNPAAYLQQQQLLPFNXLATAYSQQQQFIPFNQLAALNPATYLQQQILLPFGQLATTSPASFLTPQQLLPLYQQFVANPATLLQLQQLLHFVQLALTNPSASYQQHIIGGALF

SEQ ID NO: 238694 - protein, 159 aa, Zea mays
  unsure (1)..(159): unsure at all Xaa locations
  Clone ID: MRT4577_149276C.1.pep
GRRAHHERTAGASTPCLAENNQRAQANLLAYCQHQXYLTCNQLSALEPCLVIXQYQLLPXHQITTAYSHKQQLLTXNQIXAALNPDDYWQKHKLLPYSQLAEGRRATFLTQKQKLAFYQQFAANPATLLQLQQLLPFVQLALTNPAASYQQHIIGGALF

SEQ ID NO: 238695 - protein, 84 aa, Zea mays
  Clone ID: MRT4577_149277C.1.pep
GSHREPPHPGTRIKEGSEMAPTPRVKTEGSTRETGAGKGLGQTGGGGRACPRPAIQKGRGVRKRNPQGGGRHQGGDPGHGLRPY

SEQ ID NO: 238696 - protein, 221 aa, Zea mays
  unsure (1)..(221): unsure at all Xaa locations
  Clone ID: MRT4577_149278C.1.pep
MGANRHFPYATNSIAFLFSPYLSXIIASVCENPAFXPYMVQQAIAASNIPLSPLFQQSPALSLVQSLVQTIRAQQLQQLVLPVINQVALANLSPYSQQQQFLPFNQLSTLNLAAYLQQQLLPFSQLATAYSQQQQFLPFNQLAALNPSAYFQQQILLPFSQLAAASRASFLTQQQLLPFYQQFAANPATLLQLQQLLPFVQLALTNPAASYQQPIIGGALF

SEQ ID NO: 238697 - protein, 241 aa, Zea mays
  unsure (1)..(241): unsure at all Xaa locations
  Clone ID: MRT4577_149279C.1.pep
MAAKIFSILMLLALSSCVPNATIFPPYSQAPIAALLPPYLPXLTASVCENPALQPYRLQQAIATNNLPLSHLFFQQSPALSLVQSLVQTIRAQQLQQLVLPVISXVALANLSPYSQQQQFLPFNQLSTLNPAAYLQQQQLLPFSQLATAYSQQQQFLPFNQLAALNPSAYFQQQILLPFGQLATTSPASFLTQQQVLPFYQQFVANPATLLQLQQLLPFVQLALTNPAAFYQQHIIGGALF

SEQ ID NO: 238698 - protein, 37 aa, Zea mays
  Clone ID: MRT4577_14927C.1.pep
LEPIRLEDSSIAFGKVHVPHRTLVSRIFTCLQILPQS

SEQ ID NO: 238699 - protein, 143 aa, Zea mays
  unsure (1)..(143): unsure at all Xaa locations
  Clone ID: MRT4577_149281C.1.pep
GTTIGEPRGTKIFSFLMLLALSTWVANAKIFPKCSQXAPIGFLFSPNLHKXIASGCEKPSXLKPYRLQQAIAASNIPLSPLLCQQSPALSLVQSLVQTIRAQQLQQLVLPVIKQVTLAKLSSYFSEQPFLSFXNQLFNLNLVV

SEQ ID NO: 238700 - protein, 162 aa, Zea mays
  unsure (1)..(162): unsure at all Xaa locations
  Clone ID: MRT4577_149282C.1.pep
KAECLAVRSSFWWSEAAKNRNKQGHGVLPGPPPMLRPPFLLGPSMQLDELAAFAPRPQLPQQPSYVKSAAPTVVKRPLAQHTPELTAMVPASVRVKRESALPKPKPKVQQQQQLSTASISRPSVTLIRSDARPSSAAPKPXSMDDSYLAFLEDMKELGALDG

SEQ ID NO: 238701 - protein, 38 aa, Zea mays
  Clone ID: MRT4577_149283C.1.pep
CLIRLSLLGPLIWLLRTGWAHVWFMRNIAKRRPFRTRC

SEQ ID NO: 238702 - protein, 254 aa, Zea mays
  unsure (1)..(254): unsure at all Xaa locations
  Clone ID: MRT4577_149285C.1.pep
KAESRINNRATLATKIFSLLMLLALSACDANRXTFFPQCSQAPIAXSLVPPYLPSMIATVCENPTLQPYRLQQAITGSIIPLSPSLXQSPALSLXQSLSQTITAQQLQQLVLPVINQVPLTNLTAYSQQQQFLTFNQLSTLTPXAAYLQHTYYHISQLATAYSQQQQLLSFNQPVXLNPAVYVQQHILLPFIQLAAASRACFLTQKQLLPFYQQVAANPXATLLQLQQLLPFVQLALTNPAASYQQHMIGGALF

SEQ ID NO: 238703 - protein, 106 aa, Zea mays
  Clone ID: MRT4577_149286C.1.pep
KPKVFKGTDFNFKCKFLSRLTGGGGRKPPNFSQDTNKGFLKPKPGLTGKKIFASRSVFLLLVAGIIGALWGDLLVVFFQGGQVLGCLGKIPLFNALAEVPMDKPPL

SEQ ID NO: 238704 - protein, 168 aa, Zea mays
  unsure (1)..(168): unsure at all Xaa locations
  Clone ID: MRT4577_149287C.1.pep
EFGTRAVQRVAKAINFKTCNALLLKVNQIGSVTESIEAVRMSKRAGWGVMASHRSGETEDTFIADLSVGLSTXLSTGQDTVESNVLRTDLVSMTPFQGQIKTGAPCRSERLAKYNQXARAQTFFVSQPGYALPLKPNVRGLQLLRIEEELGDAAVYAGAKFRAPVEPY

SEQ ID NO: 238705 - protein, 247 aa, Zea mays
  Clone ID: MRT4577_149288C.1.pep
RAIGANILSILMLLALSPCVANATIFPQYSQAPIAALLPPYLSSMTASVYENPVLQPYTLQQALATSNLPLSPLLFQQSPALSLVQSLVQTIRAQQLQQLVLPVINQVALANLSPYSQQQQFLPFNQLSTLNPAAYLQAQQLLPFNQLVRSPAAFLLQQQLLPFHLQVVANIAAFLQQQQQLLPFYPQVVGNINAFLQQQQLLPFYPQDVANNVAFLQQQQLLPFNQLALTNPTTLLQQPTIGGAIF

SEQ ID NO: 238706 - protein, 284 aa, Zea mays
  unsure (1)..(284): unsure at all Xaa locations
  Clone ID: MRT4577_149289C.1.pep
DATNVGDEGGFAPNIQENKEGLELLKAAIEKAGYTGKVVIGMDVAASEFFGEKDKTYDLNFKEEVRITTSYYVFVVLFTXAIAIPYVILXGMVIHEHLFYINMYSLSWXNNDGSNKISGDSLKDLYKSFVSEYPIESIEDPFDQDDWSTYAKLTDEIGQKVQIVGDDLLVTNXXTRVAKAINEKTCNALLLKVNQIGSVTESIEAVRMSKRAGWGVMASHRSGETEDTFIADLSVGLSTGQIKTGAPCRSERLAKYNQLLRIEEELGDAAVYAGAKFRAPVEPY

SEQ ID NO: 238707 - protein, 143 aa, Zea mays
  unsure (1)..(143): unsure at all Xaa locations
  Clone ID: MRT4577_14928C.1.pep
PFPAPNPPPRKNPRRSSPWELFXPPKLVGKPPFPKTVGPLKPPAGSKLGQPLQPSRLPPQLPNPEKTPKKPPPTPKPNYLAPGXGPPGLNPPPPGFKKKGGPSPLGPGVNFDAPGFFPPGNKIPGPFFPLKEYFGLGPRFALF

SEQ ID NO: 238708 - protein, 242 aa, Zea mays
  unsure (1)..(242): unsure at all Xaa locations
  Clone ID: MRT4577_149290C.1.pep
MATKIFSILMLLALSACVANATIFPQHSQAPIASLLPPYLPSMTASGCENPVLQSYRLQQAIATSNLPLSPLFFQQSPALSLVQSLVQTIRAQQLQQLVLPVISQVALANLSPYSQQQQFLPFNQLSTLNPAAYLQQQQLLPFSQLATAYSQQQQFLPYNQLYALNPSAYFQQLILLPIXQLATTSPASFLTQQQLLXPCYQQIVANPATLLQLQQLLPFVQLALPNPAAFYQQHIIGGALL

SEQ ID NO: 238709 - protein, 106 aa, Zea mays
  Clone ID: MRT4577_149291C.1.pep
VLGVRLPFSLLATAYCQHQHLFPFNQLAALFPAVFLQQQILLPFSQLVGAPRVSFLSQRQLLPFFLQFAAGPAPLLQLHPLLPFVHLALTGRAASYQQHIIGGALF

SEQ ID NO: 238710 - protein, 131 aa, Zea mays
  Clone ID: MRT4577_149292C.1.pep
SIPESFHQDYNVFGLPFSPRGNVSDMGMASVKSPARFNSTKYEYAGGFSGAYDINAVNGLRERQFPSLDSYSNGLFDVSASKPWLNGFPSPSVMSLGVNPNGYPPQVADYPSLGNGVNGVSLWRPHANGRW

SEQ ID NO: 238711 - protein, 127 aa, Zea mays
  Clone ID: MRT4577_149293C.1.pep
RDPQRLLPRLLDTCAQNGLHFEHALFVPNQSQYNKLGSLASPPSAGGEIDLSWQLSLQKVWGNLPHHNKGLNDVNSSGATSVFESLPLAIKWLRETAQQNQSIQFQVLVTGSLHLVGDVLRLLKNNK

SEQ ID NO: 238712 - protein, 87 aa, Zea mays
  Clone ID: MRT4577_149294C.1.pep
KKKKKKKKKKKKKKKKKKKKKKKKKKKKKKKKKKKKKKNFFFPGGPFKRGIFAIFLPPGGLFSFLLKGPFPLFLSLFKIICPWFYTV

SEQ ID NO: 238713 - protein, 93 aa, Zea mays
  unsure (1)..(93): unsure at all Xaa locations
  Clone ID: MRT4577_149295C.1.pep
GEAQPWLSTSTEGLKIPMTPTSSFVSPPPPTASPHSNRTTPPEAAQNGQXPMAALILVADNAGGSHASKDANQVHSTTRRNSNSPPSPSSMNQ

SEQ ID NO: 238714 - protein, 133 aa, Zea mays
  unsure (1)..(133): unsure at all Xaa locations
  Clone ID: MRT4577_149296C.1.pep
RGLLIPQERKHLFILSYTXGFYLEKTMFHTKGFGSITTSSSALDLVALSNEALSISIPHKKSIIETNTIRLALHRQTWGLRAKIRPARDHGTLFYQIGGDLVQNRLLSNNPIDPISIYIKRQSCQEAAFSLAK

SEQ ID NO: 238715 - protein, 92 aa, Zea mays
  Clone ID: MRT4577_149297C.1.pep
QHGSAPLPPRGSPRLSTPGAPPARHRPSSLAHGGRRRRGGGDDLIHRTGVPVSSADRVVLFTLSVPPLVEHFNQYIKISDWAADRHGIRNAE

SEQ ID NO: 238716 - protein, 104 aa, Zea mays
  unsure (1)..(104): unsure at all Xaa locations
  Clone ID: MRT4577_149298C.1.pep
NRHREVSVVSFSLHDCSNIYXLTSTISGPADSPYXGRTFVIDIRLPHEYPFXPSKIHFITKVWYPNXGRQNGSICLYILKDQFTPSLXTFKTALPSLQTLLFYF

SEQ ID NO: 238717 - protein, 49 aa, Zea mays
  Clone ID: MRT4577_149299C.1.pep
NILLNRPVGKQYFKGIHFHESTFTFICFIVSYSYYNRCVLLLLQFPGSL

SEQ ID NO: 238718 - protein, 71 aa, Zea mays
  Clone ID: MRT4577_14929C.1.pep
MSKMKNPRTFEEQTECIMNTLLTDFLTPTFQAANRNLPDADEPCSGEDYSFDVAIVAGRLRMLGDKFNGEL

SEQ ID NO: 238719 - protein, 101 aa, Zea mays
  Clone ID: MRT4577_1492C.1.pep
MLSQITRRHVEVVADHQTMRICGVHQWARDVEAALATNARDAQFVSETFFDAAALLYPYFGVPGFMTTMCLAISNLASLEAFVRQVSKTWECRVCVSHETK

SEQ ID NO: 238720 - protein, 252 aa, Zea mays
  unsure (1)..(252): unsure at all Xaa locations
  Clone ID: MRT4577_149300C.1.pep
VRLQVPVRNSRVDPRVRFDTRAPMAAQGMVETRVFLQYLPAIRALWEDSGIQNAYDRRREFQLGESVKYFLDNLDKLGVPDYIPSQQDILLARRPTKGIHEYDFEIKNVPFKMVDVGGQRSERKRWFECFDSVTSILFLVSSSEFDQVLMEDRQTNRLTESLNIFETIVNNRVFSNVSIILFLNKTDLLEEKVQVVSIKDYFLEFEGDPHCLRDVQKFLVECFRXKRRDQQQRPXLYHHFTTAINTEKHXLV

SEQ ID NO: 238721 - protein, 83 aa, Zea mays
  Clone ID: MRT4577_149301C.1.pep
RVWVVALALLALAASANSTHPTCSCGWQPPPTVHLPSTVHLPSAVYLSPAVHLASPVHLPPAVHLPPAVHVPSAVHLSSAPCH

SEQ ID NO: 238722 - protein, 68 aa, Zea mays
  Clone ID: MRT4577_149302C.1.pep
STFNPSLPVHLCEITCETSMTIKLLRLMLAAIALISRVICTQTGGCNCAHHLNDAHLHTPACHDTHFL

SEQ ID NO: 238723 - protein, 65 aa, Zea mays
  unsure (1)..(65): unsure at all Xaa locations
  Clone ID: MRT4577_149303C.1.pep
KKHTYDLQTIKKIQQKRSVAKRMGLKDLKMGYNIDIHYYSVRLKAAHKFLKXGDHVKIIVNLKGP

SEQ ID NO: 238724 - protein, 105 aa, Zea mays
  Clone ID: MRT4577_149304C.1.pep
DWGLVVVGNCEGETFLVGNKVWGVFGQGFIWLSLREVGRPGGSGLGFISGVRGSMGGGRPIFFFLLVFFLWFRWFFFCFFFVFFFCSPNPKRGTYICGYVILEKR

SEQ ID NO: 238725 - protein, 60 aa, Zea mays
  Clone ID: MRT4577_149305C.1.pep
KTMVDPHKNTFWTVDSLRNDNNKSEAHDDSNREILNGVTLQLDHRASNELLPRSMATNVP

SEQ ID NO: 238726 - protein, 145 aa, Zea mays
  Clone ID: MRT4577_149306C.1.pep
MAAKIFSILMLLALSACVANATIFPQYSQAPIAALLPPYLPSMTALVCENPALQPYRIQQAIATSNLPLSHLFFQQSPALSLVQSLVQTIRAEQLQQLVLPVISQVALANLSPYSQQQQLLPFNQLALTNPTAFYQQPIIGGALF

SEQ ID NO: 238727 - protein, 90 aa, Zea mays
  unsure (1)..(90): unsure at all Xaa locations
  Clone ID: MRT4577_149307C.1.pep
KKKKKKKKRKRKKKGGKKKKKXKKKKKKKKKKKKKKKKINKKKKGGPFLKDPIFLPRPSNVLPFFWGPLISIPGPGFTTGGPVKPLGFPT

SEQ ID NO: 238728 - protein, 176 aa, Zea mays
  Clone ID: MRT4577_149308C.1.pep
MAAQEGGMRLVSHPIAAHDGRLPRQYTAEGQGAKKDMSPPLEWYGVPEGARSLALLVQDIDADPSVPWTHWVVANIPPATRGLPEGFSGAAGPGAGAGRDQLGGLQEGVNDWKQPGWRGPVPPSHGHRIQFKLYALDDEVHLGNKVTRDKLMEAIDGHVLEEAELIAVFQGVVANN

SEQ ID NO: 238729 - protein, 275 aa, Zea mays
  unsure (1)..(275): unsure at all Xaa locations
  Clone ID: MRT4577_149309C.1.pep
RLHVPGPLLHGRPTRSETSKQHRKCISLATTHPQWQNNILSLLXYLLFTTCVANATIFPQCSQAPVASLLPPYLXPAIIASMCXNPALQPYRLQQAIAASNIPLSPLLFQQSPALSLVQSLVQTIKAQQLQQLVLPVINQVALANLSPYSQQQQFLPFNQLSTLNPAAYLQQQLLPFSQLATAYSQQQQLLPFNQLAALNPAAYLQQQILLPFNQLGXQNGAXFLNPQPVLAFXQQFGGYPGTLLPLPQLVAFGQLALTDPXASXQQHIIGGALF

SEQ ID NO: 238730 - protein, 52 aa, Zea mays
  Clone ID: MRT4577_14930C.1.pep
LGGNRCHLPYRKQWPPEGVKDFCGSTGDGSITWSRLGFQRMYLPSGEKALNA

SEQ ID NO: 238731 - protein, 108 aa, Zea mays
  Clone ID: MRT4577_149310C.1.pep
PEHQQSTRALRRHTDVALRHTNRRHQWLTTTELDYCSEEVRSVAPAGFGRLVRWSTCSTSIKEEVQSDSRSESHVAGSQPLPTPWLPRWPRLLGARDQLLGGLLLLDR

SEQ ID NO: 238732 - protein, 87 aa, Zea mays
  Clone ID: MRT4577_149311C.1.pep
QFVQYMQLSALNPCVYFQQQILLPFGQLATTSTASFLAQQQLLPLYQQFVANPATLLQLQQLMPFVQLALSNPAAFYQQHIIGGAIF

SEQ ID NO: 238733 - protein, 240 aa, Zea mays
  Clone ID: MRT4577_149312C.1.pep
METKIFSLLMLLALSTCVANATIFPQCSQAPIASLFPPYLPSIIASVCENPALQPYRLQQAIAASNIPLSPLLCQQSPALSLVQSLVQTIRAQQLQQLVLPVINQVALANLSPYSPQQQFLPFNQLSTLNPAAYLQQQLLPFSQLATAYSQQQQLLPFNQLAALNPAAYLQQQILLPFSQLATASRASFLTQQQLLPFYQQFAANPATLLQLQQLLPFVQLALTNPAASYQQHIIGGALF

SEQ ID NO: 238734 - protein, 199 aa, Zea mays
  unsure (1)..(199): unsure at all Xaa locations
  Clone ID: MRT4577_149313C.1.pep
VTASGRENPSLEPYRLKQAITTGNLPLSPLLFQQSPALSSVQSLXQTIRAQQLQQLVLPAISQAALANLAPYSQQQQFLPFNQLSTLNPAAYLQQQQLLPFSQLATAYSQQQQFLPFNQFAALNPSAYFQQQILLPFGQLATTSPASFLTQQQLLPFYQQFVANPATLLQLQQLLPFVQLALTNPAAFYQQHIIGGAIF

SEQ ID NO: 238735 - protein, 57 aa, Zea mays
  Clone ID: MRT4577_149314C.1.pep
AIPKAIGDVPSSSQAAPVLDLEIQMQLLRDFKAALAVQDIPRITALQEKMKRVLTSA

SEQ ID NO: 238736 - protein, 622 aa, Zea mays
  Clone ID: MRT4577_149315C.1.pep
MATPSAVGAACLLLARAAWPAAVGDRARPRRLQRVLRRRCVAELSREGPAPRPLPPALLAPPLVPGFLAPPAEPTGEPASTPPPVPDAGLGDLGLEPEGIAEGSIDNTVVVASEQDSEIVVGKEQARAKVTQSIVFVTGEASPYAKSGGLGDVCGSLPVALAARGHRVMVVMPRYLNGTSDKNYANAFYTEKHIRIPCFGGEHEVTFFHEYRDSVDWVFVDHPSYHRPGNLYGDKFGAFGDNQFRYTLLCYAACEAPLILELGGYIYGQNCMFVVNDWHASLVPVLLAAKYRPYGVYKDSRSILVIHNLAHQGVEPASTYPDLGLPPEWYGALEWVFPEWARRHALDKGEAVNFLKGAVVTADRIVTVSKGYSWEVTTAEGGQGLNELLSSRKSVLNGIVNGIDINDWNPATDKCIPCHYSVDDLSGKAKCKGALQKELGLPIRPDVPLIGFIGRLDYQKGIDLIQLIIPDLMREDVQFVMLGSGDPELEDWMRSTESIFKDKFRGWVGFSVPVSHRITAGCDILLMPSRFEPCGLNQLYAMQYGTVPVVHATGGLRDTVENFNPFGENGEQGTGWAFAPLTTENMFVDIANCNIYIQGTQVLLGRANEARHVKRLHVGPCR

SEQ ID NO: 238737 - protein, 125 aa, Zea mays
  unsure (1)..(125): unsure at all Xaa locations
  Clone ID: MRT4577_149316C.1.pep
FQQFFSFNQQGGGGPCFFIXDQQLLPKNQVATTNFKQQQRXPPNQWADWKPLVFCKNKVLLPLSQLAAANRASFLTQQQLLPFYQQFADKTATLLQLQQLLPFVQLALTDPAGSYQQHIIGGALF

SEQ ID NO: 238738 - protein, 110 aa, Zea mays
  Clone ID: MRT4577_149317C.1.pep
MAPKIDPNEIKIIYLRATGGEVGASSALAPKIGPLGLSPKKVGEDIAKATGDWKGLRVTVQLTIQNRQAKVSVVPSASSLVIKALNEPPMDRKKEKNIKHTGNVSFDEIV

SEQ ID NO: 238739 - protein, 145 aa, Zea mays
  Clone ID: MRT4577_149318C.1.pep
PATATKRQPVLNHLALSTCPANATILPQCSQAPIASLLAPYLPSIIASIYENPALQPYTLQQAIAASNIPLSPLMIQQSAALSMLQSLVQTIRAQQLQQLVLPLINQVALANLSPYSQQQQFLPFNQLSTLNPALQQPIVGGAIF

SEQ ID NO: 238740 - protein, 100 aa, Zea mays
  Clone ID: MRT4577_149319C.1.pep
KGKRGRPFFLEKRTGTGLEISPHPIPMGNFTQGFCWLPTPGPSRGTPGTIFPTILVTFPTENHPFTCYNKCKLSGPTTGIAEKTRDRPRGDLHFWAPPPG

SEQ ID NO: 238741 - protein, 125 aa, Zea mays
  Clone ID: MRT4577_14931C.1.pep
RFRVLCWLGDDDEAEVITTAEFHPSSCSMLAYGSSSGLVRLVDLRRSALCDHSVRMFQDRENRPQPSTFFSEIISCITDLKFTGDGEHLLTRDYMNLKLWDLRVETSPVATYKVHEFLRPKLSEL

SEQ ID NO: 238742 - protein, 240 aa, Zea mays
  Clone ID: MRT4577_149320C.1.pep
MATKIFSLLMLLALSACVANATIFPQCSQAPIASLLPPYLPSMIASVCENPALQPYRLQQAIAASNIPLSPLLFQQSPALSLVQSLVQTIRAQQLQQLVLPVINQVALANLSPYSQQQQFLPFNQLSTLNPAAYLQQQLLPFSQLATAYSQQQQLLPFNQLAALNPAAYLQQQILLPFSQLAAANRASFLTQQQLLPFYQQFAANPATLLQLQQLLPFVQLALTDPAASYQQHIIGGALF

SEQ ID NO: 238743 - protein, 241 aa, Zea mays
  Clone ID: MRT4577_149321C.1.pep
MAAKIFSILMLLALSACVANATIFPQYSQAPIAALLPPYLPSMTALVCENPALQPYRIQQAIATSNLPLSHLFFQQSPALSLVQSLVQTIRAEQLQQLVLPVISQVALANLSPYSQQQQFLPFNQLSILNPAAYLQQQQLLPFSQLATAYSQQQQFLPFNQLAALNPSAYFQQQILLPFGQLATTSPASFLTQQQVLPFYQQFVANPATLLQLQQLLPFVQLALTNPAAFYQQHIIGGALF

SEQ ID NO: 238744 - protein, 28 aa, Zea mays
  Clone ID: MRT4577_149322C.1.pep
LDLYSRLKNPRTFSAISLHRLRPAALLL

SEQ ID NO: 238745 - protein, 37 aa, Zea mays
  Clone ID: MRT4577_149323C.1.pep
TCKKRLTSICDLANGKIKRLQLTPTKDLLPTNGRNPC

SEQ ID NO: 238746 - protein, 46 aa, Zea mays
  Clone ID: MRT4577_149324C.1.pep
GSRKEIGRGSGFVAVEIPFTPRAKRVLELSLEEARQLGIIFTYLHS

SEQ ID NO: 238747 - protein, 169 aa, Zea mays
  Clone ID: MRT4577_149325C.1.pep
MSQSLRPYLQCVRSSLTAALTLSNFASQTAERHNVPEIEAQTSPEVLLQPLTIARNENERVLIEPSINSVRISIKIKQADEIEHILVHKFTRFLTQRAESFFILRRKPIKGYDISFLITNFHTEEMLKHKLVDFIIQFMEEVDKEISEMKLFLNARARFVAESFLTPFD

SEQ ID NO: 238748 - protein, 70 aa, Zea mays
  Clone ID: MRT4577_149326C.1.pep
KRQTSEITEEACQLPTESDELTVDASSDEDGRLVVRASLCCDDRADLLPDLVRALKALRLRALKAEITTL

SEQ ID NO: 238749 - protein, 231 aa, Zea mays
  Clone ID: MRT4577_149327C.1.pep
MDRATMSSNQAGKVLKKGKKKQAKDELDRQKQAEKKRRRLEKALANSAAIISELEKKKQQKKEEQQRLDEEGAAIAEAVALHVLIGEDSDEPCHLMLNKHHIRCNHWAPSAAFEFTVDAQPAEVYPSEDGLVCGSHAYAPRAPKGRRADWGIGQALPCWGEVSDLQGPYYQGTFRQSVTCPGFIAAQAVSSLQIREESPEVTSPSHGADAAATVVNRMLGGTSRLNLYRGI

SEQ ID NO: 238750 - protein, 209 aa, Zea mays
  Clone ID: MRT4577_149328C.1.pep
QKGISRDHWHKRRATGGKRKPLRKKRKFELGRPAANTKLGARRIHTVRTRGGNKKFRALRLDQGNFSWGSECCTRKTRLIDVVYNASNNELVRTKTLVKNAIVVIDATPFRQWYEAHYAIPIGRKKGAKLTDADEALLNKKRSKKVENKYKNRQRVAKVEPALEEQFQTTRLLACVSSRPGQCGRADGYILEGKELEFYMRKIKAKKGK

SEQ ID NO: 238751 - protein, 89 aa, Zea mays
  unsure (1)..(89): unsure at all Xaa locations
  Clone ID: MRT4577_149329C.1.pep
MAVASAWAKPGSWALAAEEQDDLPPPPPPVSASDFPDLSTAATTKDPKKKKXQTVSLASFNIVKFDLPSSRGTTPDMVLSLPTGPRERT

SEQ ID NO: 238752 - protein, 50 aa, Zea mays
  Clone ID: MRT4577_14932C.1.pep
TPHVLVLQCPNEHGTRQSGKGTSGQHLNNNISLSCIWHNYASTLQIASSC

SEQ ID NO: 238753 - protein, 48 aa, Zea mays
  Clone ID: MRT4577_149330C.1.pep
DSSCDMDVLSDWWVYMEFWVVMLPNHSITDVVGDLGHDMKEGHDEEGP

SEQ ID NO: 238754 - protein, 147 aa, Zea mays
  unsure (1)..(147): unsure at all Xaa locations
  Clone ID: MRT4577_149331C.1.pep
MEGKEEDGRLGANRYSERQPIGTAAHGTEEKDYQEPPPAPLFQAQELTSCPFYRFAIAELVATFXMVLYISILTDMRVTKPPMKCATERIHRIPGASPGMIXGLRHWTGGISGGHINPVVTFRLLLARKVSITRGLFYMDMQCLLCI

SEQ ID NO: 238755 - protein, 240 aa, Zea mays
  Clone ID: MRT4577_149332C.1.pep
MATKIFSLLMLLALSTCVANATIFPQCSQAPIASLLPAYLPSIIASICENPALQPYRLQQAIAASNIPLSPLLFQQSPALSLVQSLVQTIRAQQLQQLVLPVINQVALANLSPYSQQQQFLPFNQLSTLNPAAYLQQQLLPFSQLATAYSQQQQLLPFNQLAALNPAAYLQQQILLPFSELAAASRASFLTQQQLLPFYKQFAANPATLLQLQQLLPFVQLALTNPAASYQQHIIGGALF

SEQ ID NO: 238756 - protein, 240 aa, Zea mays
  unsure (1)..(240): unsure at all Xaa locations
  Clone ID: MRT4577_149333C.1.pep
MATKIFSLLMLLALSACVANATIFPQCSQAPIASLLPPYLPSMIASVCENPALQPYRLQQAIAASNIPLSPLFQQSPALSLVQSLVQTXIKAQQLQQLVLPVINQVALANLSPYSQQQQCLPFNQLSTLNRAAYLQQQLLPFSQLATAYSQQQQLLPFNQLAALNPAAYLQQQILLPFSQLAAASRASFLTQQQLLPFYQQFAANPATLLQLPQLVAFGPLALTXPEXSXQQHNNGGALF

SEQ ID NO: 238757 - protein, 241 aa, Zea mays
  Clone ID: MRT4577_149334C.1.pep
MAAKIFSILMLLALSACVANATIFPQYSQAPIAALLPPYLPSMTASVCENPALQPYRLQQAIATSNLPLSPLFFQQSPALSLVQSLVQTIRAQQLQQLVLPVISQVALANLSPYSQQQQFLPFNQLSTLNPAAYLQQQQLLPFSQLATAYSQQQQFLPFNQFAALNPSAYFQQQILLPFGQLATTSPASFLTQQQLLPFYQQFVANPATLLQLQQLLPFVQLALTNPAAFYQQHIIGGALF

SEQ ID NO: 238758 - protein, 52 aa, Zea mays
  Clone ID: MRT4577_149335C.1.pep
YLICEPHVLNLFLICIKYDYVSSQHAGIVRVLYWSLSLYRTSFRKKKKKKRP

SEQ ID NO: 238759 - protein, 622 aa, Zea mays
  Clone ID: MRT4577_149336C.1.pep
MADGAEMDEEAMRAFFPLSFGKAAPRPSSATSSAHSNTLRKPQNPSNPKPSASTAADDDGAAMIGPPRPPPAPAGEEDDEDGGGIMIGPPRPPPPSARGEGDDGDGMIGPPRPPPADDEDVDDDEDDDEEEMEDDGEGGFNRIPLSNEIVLRGHNKVVSALAVDHTGSRVLSGSYDYTVRMYDFQGMNSKLQSFRQLEPFEGHQVRSLSWSPTSDRFLCVTGSAQAKIYDRDGLTLGEFVKGDMYIRDLKNTKGHISGLTGGEWNPKSKETILTSSEDGSMRLWDVSDFTSQKQVIKPKLVRPMRIPVTSCAWDHEGKRIVGGIGDGSIQVWTIKAGWGSRPDIHVEKTHTEDITGVKFSTDGQSLLSRSMDSTLKIWDLRRMKTPLKVFEDLPNHYAETNAAFSSDEQLIFTGTSIEKDGDNGGLLCFFDRKKLELVSRVGISAHYSVIRCLWHPRINQVFATVGDKKEGGTHILYDPSISQRGALVCVGRAPRKKSVDDFEVQPVIHNPHALPLFRDQPSRKRQREKILKDPLKSHKPEAPVNGPGFGGRVGTTKGSLLTQYLLKEGGLIKETWMDEDPREAILKYADAAEKDPKFIAPAYSQTQPKPVFAESDSDNEEK

SEQ ID NO: 238760 - protein, 240 aa, Zea mays
  Clone ID: MRT4577_149337C.1.pep
MATKIFSLLMLLALSTCVANATIFPQCSQAPIASLLPPYLPSIIASICENPALQPYRLQQAIAASNIPLSPLLFQQSPALSLVQSLVQTIRAQQLQQLVLPLINQVALANLSPYSQQQQFLPFNQLSTLNPAAYLQQQLLPFSQLATAYSQQQQLLPFNQLAALNPAAYLQQQILLPFSQLAAANRASFLTQQQLLPFYQQFAANPATLLQLQQLLPFVQLALTDPAASYQQHIIGGALF

SEQ ID NO: 238761 - protein, 34 aa, Zea mays
  Clone ID: MRT4577_149338C.1.pep
IQELEIYIKYTLISFTDWHNSVKLINISLSSITY

SEQ ID NO: 238762 - protein, 67 aa, Zea mays
  unsure (1)..(67): unsure at all Xaa locations
  Clone ID: MRT4577_149339C.1.pep
LGFGYNRKCCLPFFGALDMAFRVLDLVVXVGIVVVATDAEEEVRRRSLFVTLPFKFQVRVPVAVVVV

SEQ ID NO: 238763 - protein, 67 aa, Zea mays
  Clone ID: MRT4577_14933C.1.pep
RGREAALKMKQILLTPPIWFLHNSPMLALGYHPCCGAKGAPDCFYSDPGVTANLLYYDEACCLVFHV

SEQ ID NO: 238764 - protein, 56 aa, Zea mays
  Clone ID: MRT4577_149340C.1.pep
NITGSSSPYFEPTTLVIHFSFGERVNYLTMQRDPQFFTCKKIEKGTPHFNFLCFAL

SEQ ID NO: 238765 - protein, 68 aa, Zea mays
  unsure (1)..(68): unsure at all Xaa locations
  Clone ID: MRT4577_149341C.1.pep
NQYPHLIFDSKNFXLKSHLXSHQVFFYFKKYFYNKFTPFKKSLPIPEINNYPIKVILSYNIHYVIFKS

SEQ ID NO: 238766 - protein, 56 aa, Zea mays
  Clone ID: MRT4577_149342C.1.pep
KKKKKKKNIYLKKKKKKKNGRLYIKKYILKKTSNQFKISHSFFPLLTTSYLLFTTT

SEQ ID NO: 238767 - protein, 403 aa, Zea mays
  Clone ID: MRT4577_149343C.1.pep
MTNLPWWRADASELVAVTAMGVWEAVLAGGGRRFIKRKDSDAGETGRALEELRSSLYNEMHSAEGAKRQQQRFCGPSVALTFNFAVAVGIIMANKMVMGSVGFKFPIALSLIHYAVAFVLMATLKTLSLLPVAPPSKSTPFSSIFALGAVMSLSTGLANVSLKHNSVGFYQMAKIAVTPTIVVAEFMLFQKKVSSKKAVTLAVVSFGVAVATVTDLEFNFFGACVALAWIVPSAVNKILWSSLQQSGNWTALALMWKTTPITIFFLLTLMPLLDPPGLLLFNWNFRNSCAVIISALFGFLLQWSGALALGATSALSHVVLGQFKTIVIMLSGYLIFGSDPGITSVCGAVLALGGMSFYTYLGLKKDPATSGKKAPSRQNSFMARPKVAADDSDDADSEQDDTV

SEQ ID NO: 238768 - protein, 60 aa, Zea mays
  Clone ID: MRT4577_149344C.1.pep
MASYPDWHSYPGAAGHVTGPYPGGYYPGPPHGGGQYGSGFPPGGYRAPDPGGADGYPSAG

SEQ ID NO: 238769 - protein, 37 aa, Zea mays
  Clone ID: MRT4577_149345C.1.pep
RTKLFFLVKKTPVGQQVKKTPFYPQWLNFFYKNRWEI

SEQ ID NO: 238770 - protein, 87 aa, Zea mays
  Clone ID: MRT4577_149346C.1.pep
YLVGFFRSNLLNPVNFYPLVILCKCGWIIMPPPPPPCLACGYKKKKMGGTGVNRYPKMHACKCSFLVEKKKKKKNKKNIKKKPPTPA

SEQ ID NO: 238771 - protein, 155 aa, Zea mays
  unsure (1)..(155): unsure at all Xaa locations
  Clone ID: MRT4577_149347C.1.pep
MRLTGSALDAXALQSMARNLDVSGDHRLLYCKGRGRFATLEEDRVRDLPLPDGGLLPSLPPYVEVEQXHDTPNAMAPSPLAQGLPXDGSFVCSFYKMTXCISTRSHXLYETDPLTSFNALIIFTGSCKNVAAATKDLANDGYSLPLYPAKSGVLN

SEQ ID NO: 238772 - protein, 55 aa, Zea mays
  Clone ID: MRT4577_149348C.1.pep
RYPLQKDFTHQLECQYEQDPRKLAPLHAHSFWYMFCQRVLYGSVTPPEKKPINRT

SEQ ID NO: 238773 - protein, 84 aa, Zea mays
  unsure (1)..(84): unsure at all Xaa locations
  Clone ID: MRT4577_149349C.1.pep
MTTRFKTNRXKRGLVCAGHGRIGKLRMHPGGRRNAGXMHHHRILFDKYHPGFFGKVGMRYFHKLRYIFYCPIVNIDKLWALLPQ

SEQ ID NO: 238774 - protein, 36 aa, Zea mays
  Clone ID: MRT4577_14934C.1.pep
TLFKIFVHDEVALRRAHYRLDLSSRHTIVPHIERLH

SEQ ID NO: 238775 - protein, 66 aa, Zea mays
  Clone ID: MRT4577_149350C.1.pep
PRVPTGRISRTGFPSIPEADSTYIHSSPHIRSAGMIGLQMINCQTWIHSQGEITVINVMRDQNRLT

SEQ ID NO: 238776 - protein, 44 aa, Zea mays
  Clone ID: MRT4577_149351C.1.pep
KLKYIHRFTITPAPSCSIIYSDTGDCSRQTQRCFNHSRHLGRPP

SEQ ID NO: 238777 - protein, 66 aa, Zea mays
  Clone ID: MRT4577_149352C.1.pep
RCPTTKKEDPQITNYLDSINIFTFPSNNNFYRRKPNTTTPNYNKTPKHTSEPSKRSPPILKQSKLF

SEQ ID NO: 238778 - protein, 66 aa, Zea mays
  Clone ID: MRT4577_149353C.1.pep
KIIAAIHSQSLGFATPSCPSRSPPLPGRLGHHLTRVQSNSPDLYSSSAVFWFTNLAHLIYPIVPFT

SEQ ID NO: 238779 - protein, 54 aa, Zea mays
  Clone ID: MRT4577_149354C.1.pep
GQHNILRSVYIHVQGRTQKSKKFTANPSGNLIQEPKKKTGDPITNYTVSLLRER

SEQ ID NO: 238780 - protein, 139 aa, Zea mays
  unsure (1)..(139): unsure at all Xaa locations
  Clone ID: MRT4577_149355C.1.pep
FKARVQMFSEAGLFYMVHXTMVHTQSMLPVIDLQVIFMGLVXGVRINALVGVGQDINLYPGGQFFDSVGLNNDTVTFPKLKVKEIKSARLAMXSMFGFFVQAIVTGKGPLKNLLHHLPAPVASNAWVXYPAKFAPGSLS

SEQ ID NO: 238781 - protein, 87 aa, Zea mays
  unsure (1)..(87): unsure at all Xaa locations
  Clone ID: MRT4577_149356C.1.pep
YNPTRKRDRPYSILNNTLFSTTFNNVNIEANRFEHLTTSKHKTQNPLHSPDITTTTHLAYEKTNDIHIXIDGGGEAFASWGLSLPVS

SEQ ID NO: 238782 - protein, 58 aa, Zea mays
  unsure (1)..(58): unsure at all Xaa locations
  Clone ID: MRT4577_149357C.1.pep
FPPPIRIRPRTHIRSVVLAPSTGSRVVSSLKYYKHTPVWEFVFASRDFTQKGPQRXAA

SEQ ID NO: 238783 - protein, 270 aa, Zea mays
  unsure (1)..(270): unsure at all Xaa locations
  Clone ID: MRT4577_149358C.1.pep
NCFTRLHKVSSVKKPCKGILLFGPPGTGKTMLAKAVATEAGANFINISMSSISSKWLGEGEKFVKAVFXSLASKIAPSVIFVDEVDGMLGRRENPGEHEAMRKMKNEFMVNWDGLRTREKERVLVLAATNRPFDLDEAVVRRLPRRLMVNLPDASNRRKILSVILAKEDLADDVDLETIANLTEGYSGSDLKNLCVTAAHRPIREILEKEKKERASAEAENRSLPPSHTSNDVRALRTSDFIHAYQVGLYSQQYFVQFCILCLLMRDLIG

SEQ ID NO: 238784 - protein, 580 aa, Zea mays
  unsure (1)..(580): unsure at all Xaa locations
  Clone ID: MRT4577_149359C.1.pep
FKHPFDVIVEFISEEIRHGPLILFLKDTEKICGNNDSYYGLKSKLKHFPAGAFIIGSQIQPDNRKEKANVSSPSLSKFRYSQAILGLTLQDIDGGNDNNKETSKAMKHLIKLFPNKVILEAPQAEMELSRWNQMLNRDIEVLKGNANISKIRSFLTRLGLECTDLEAILVTDRILTNECIDKIIGFALSHQLKNCTNPDPPLGSVQFALSSGSLKHGVDMLKSIQSGSKSSTKRKSLKDIATENEFEKSLLADVTPPHEIGVTFEDIGALESVKDTLKELVMLPLQRPELFNRGQLMKPCKGILLFGPPGTGKTMLAKAVATEAGANFINISMSSISSKWLGEGEKFVKAVFSLASKIAPSVIFVDEVDGMLGRRENPGEHEAMRKMKNEFMVNWDGLRTREKERVLVLAATNRPFDLDEAVIRRLPRRLMVNLPDASNRRKILSVILAKEDLADDVDLETIANLTEGYSGSDLKNLCVTAAHRPIREILEKEKKELQXVSSGFAHMQERASAEAENRSLPPSHTSNDVRALRTSDFIHAHEQVCASVPSDSSNMSELVQWNDLYGEGGSRKKTTLSYFM

SEQ ID NO: 238785 - protein, 95 aa, Zea mays
  Clone ID: MRT4577_14935C.1.pep
GRVDHPRRCSVFPYHPWRASAGEERRAEGVVLWIPHTIESLVASAQEKLGLPGPAASRLRLLCEDGARVLDVDMVNDGQKLYLVGGEDGDQEGGQ

SEQ ID NO: 238786 - protein, 422 aa, Zea mays
  Clone ID: MRT4577_149360C.1.pep
MQTFKMRSFLTRVGLECTDLEAILVKDRVLTNECIDKIIGFALSHQLKNCTNPDPPLSNVQFVLSSESLKHGIDMLESIQSGSKSSTKRKSLKDIATENEFEKRLLADVIPPHEIGVTFEDIGALESVKDTLKELVMLPLQRPELFNRGQLMKPCKGILLFGPPGTGKTMLAKAVATEAGANFINISMSSISSKWLGEGEKFVKAVFSLASKIAPSVIFVDEVDGMLGRRENPGEHEAMRKMKNEFMVNWDGLRTKEKERVLVLAATNRPFDLDEAVIRRLPRRLMVNLPDASNRRKILSVILAKEDLADDVDLEAIANLTEGYSGSDLKNLCVTAAHRPIREILEKEKKERASAETENRPLPLSHTSNDVRALRISDFIHAHEQVCASVSSDSSNMNELVQWNDLYGEGGSRKKTTLSYFM

SEQ ID NO: 238787 - protein, 140 aa, Zea mays
  Clone ID: MRT4577_149361C.1.pep
TRLMVNLPDASNRRKILSVILAKEDLADDVDLEAIANLTEGYSGSDLKNLCVTAAHRPIREILEKEKKERASAETENRSLPPSHTSNDVRALRISDFIHAHEQVCASVPSDSSNMNELVQWNDLYGEGGSRKKTTLSYFM

SEQ ID NO: 238788 - protein, 152 aa, Zea mays
  unsure (1)..(152): unsure at all Xaa locations
  Clone ID: MRT4577_149362C.1.pep
REREAEIXGRPTTRGRGHAHHGATGAXRAVIQNYIFLLNPCRSSSXRRRRERSRRAGLTARKRADGIRGKAEGKGTLGTAQKRAEGKHLALSSSPVSMMEEEESRGERGLTTLRSSPASSRVKEALDLRTRRAREVPCPAEDDIIRLIWRDE

SEQ ID NO: 238789 - protein, 74 aa, Zea mays
  Clone ID: MRT4577_149363C.1.pep
ERETPQPSESGRSAVLVDQKGRATVPCMQRADEAFGTAPIRLRSTNRGLGVVVLCHRRHAQIVYRLLVRARAHG

SEQ ID NO: 238790 - protein, 90 aa, Zea mays
  unsure (1)..(90): unsure at all Xaa locations
  Clone ID: MRT4577_149364C.1.pep
YCRRSDRRECAKEIADDYFVCLVGDMIXEEALAKYXTMFNSLDGVRDEIGGSSTAWAGWTRVWTVEEKRYCDLLNKYMYIIGRVDMRQIE

SEQ ID NO: 238791 - protein, 164 aa, Zea mays
  unsure (1)..(164): unsure at all Xaa locations
  Clone ID: MRT4577_149365C.1.pep
MSTLTLDDKSHSILTLALTDTNVAKFYEFLGMSLVKKLEFPDNKFDLYFFGYDSPNALSHNKSTFDRQGLIELTHNYGTENDPEYKVNNGNQDPHRGFGHXLGIAVDNIQAACQRIEDAGYKFQKKLTDGRMRNIAFRLDPDGNWGPKVVARNDYQETENVKED

SEQ ID NO: 238792 - protein, 99 aa, Zea mays
  Clone ID: MRT4577_149366C.1.pep
GKTLKQTGCIDWGGGGQFIWGKRNHTKTGIKNDRPGRRGVIKGNILPGGLGQRTLQKIGEKKGGEKNSQTKLLQGEKGVFSQFRGGELEHKGRKRTWKH

SEQ ID NO: 238793 - protein, 95 aa, Zea mays
  unsure (1)..(95): unsure at all Xaa locations
  Clone ID: MRT4577_149367C.1.pep
LSATTAPLRXIGSLSEFSALMSSASLSMLQNATFDDFMYAVSFMTHPVGTSIRSPRAPTDANLNVAINGFCHIXLNFLRCXHGHCDTSPLHVISI

SEQ ID NO: 238794 - protein, 216 aa, Zea mays
  unsure (1)..(216): unsure at all Xaa locations
  Clone ID: MRT4577_149368C.1.pep
MGLAAGGFKLFGKVITQCAESAPPASLVARERDDPDERDQPVVKREAAAASDSDSAVXRRQAAALRRAGRERGQQGAASPAXRQPQQQDTAEARAAASAPPLPCPRCRSRNTKFCYFNNYNVNQPRHFCKDCHRYWTAGGALRNVPVGAGRRKNRPLGAAPIPLAVSVPAQHLQHPQHPAAAAGHGLGLPGQHPSCPTSPSPAYAGRWPVCPDRRF

SEQ ID NO: 238795 - protein, 172 aa, Zea mays
  Clone ID: MRT4577_149369C.1.pep
LSGAPGDSDSNSSPSGFLGSRRAIIHRTVRCAPDMSGAPRKRGLRNSPASGSGGSRSAKIHRTVRCAPDCPVYQRSNGSLRRQRLPAVHLMRAQRAQTSDLPMLAHRTSNSTCPVCTGHPGGPTSQKLQRLESNGSDDEAGGTGLSGVHRTVRCAIEQTGSQRPLLGGRAPP

SEQ ID NO: 238796 - protein, 89 aa, Zea mays
  Clone ID: MRT4577_14936C.1.pep
MTRGGGGQGGKEEPGKVMGPLFPRLHVSDAGKGGGPRAPPRNKMALYEQFTVPSNRFSSPAASARAAGASLVPSTAAAQVTSHFDYDWC

SEQ ID NO: 238797 - protein, 105 aa, Zea mays
  Clone ID: MRT4577_149370C.1.pep
FSKCGDLSSASAIMGNPQVKAHGKKVINAFNDGLKHLDNLKGTFAHLSELHCDKLHVDPENFRLLGNMIVIVLGHHLGKEFTPSAQAAFQKVVAGVASALAHKYH

SEQ ID NO: 238798 - protein, 106 aa, Zea mays
  Clone ID: MRT4577_149371C.1.pep
QSLLGHAWGLWAGEKSIKLPNERMTGPFPPPQVQKWVRVGLLGGQKNPTPRPLMFQGLFMLASPDAASLPTPKQPGFAARGVLMGTDPSSPQPACGGFSRAPPPLL

SEQ ID NO: 238799 - protein, 121 aa, Zea mays
  Clone ID: MRT4577_149372C.1.pep
WLWNFGLIYVLVDVRAGIEAKQFCNCIYISCASLSFYLCVFFFLLFALLLLLFGCSAVTVHWVDDDHDHSPKAASTGDLGAGKLNSSLCPMCNEPSSELKLITGAEPVICSTYAEDKAAKV

SEQ ID NO: 238800 - protein, 108 aa, Zea mays
  Clone ID: MRT4577_149373C.1.pep
RSALTALSPQCIPIYSPFVLFLLFVRAATCAHIITQRSLSYSPIITHSLTTYSKVLLTHTCARALHATTRSCGERYTTPKCTITNTTLDIYHYTPYQRSTDTTVYYQL

SEQ ID NO: 238801 - protein, 46 aa, Zea mays
  Clone ID: MRT4577_149374C.1.pep
VSMAFYSFVILQNLLICGFGADEGTAIHLVVSWTHHQSVVLSMLAS

SEQ ID NO: 238802 - protein, 56 aa, Zea mays
  Clone ID: MRT4577_149375C.1.pep
TFFFMITDTPTVSSACTCIYTHIKGGGICYHVLVSMYGLTPLVLPSFLVFSILQIL

SEQ ID NO: 238803 - protein, 80 aa, Zea mays
  Clone ID: MRT4577_149376C.1.pep
LALCIALPATRLPVPLPLPVVFFILPPRALLLPRAPSVSPLFSRIFFFPFSLFRPVFPFPGIAKFFPGLGLGLGLSPMSG

SEQ ID NO: 238804 - protein, 73 aa, Zea mays
  unsure (1)..(73): unsure at all Xaa locations
  Clone ID: MRT4577_149377C.1.pep
PHPPPHPPPPPPPPPPPPPXPHPPPPPXTPPPPPPSNPAPPPPPPSHPVPPSRPVPPHPTPQXSHPPAXPSPP

SEQ ID NO: 238805 - protein, 73 aa, Zea mays
  Clone ID: MRT4577_149378C.1.pep
HLSAPAKKTIVGVVFSLRRRPLVSGQAHLHSYQSSSDCTGWVIAYQGLSACYFSRVEGAQYQVSKYVGGGLLV

SEQ ID NO: 238806 - protein, 53 aa, Zea mays
  unsure (1)..(53): unsure at all Xaa locations
  Clone ID: MRT4577_149379C.1.pep
MAGRGCFLFTRESVNXGLPGRLCDQVPDAVLDACLADDPARLVARQTRTGTNM

SEQ ID NO: 238807 - protein, 105 aa, Zea mays
  unsure (1)..(105): unsure at all Xaa locations
  Clone ID: MRT4577_14937C.1.pep
MQEDLEFLVEKKKKKKKKKKKKKKQLYSDAHARNTHVCLARSHLRSSSWRRRRVAPLASADGVKSVPIPGAKEAASGAKMFDREADAGHDPVSGLPADPXPDARP

SEQ ID NO: 238808 - protein, 71 aa, Zea mays
  Clone ID: MRT4577_149380C.1.pep
HASEKKKKKKKKKKKKKKEKRKKKKKKKKKKKHKHKKKKKKKKKKNKKNVLLQLKSPTLNSLKLNLKLFFW

SEQ ID NO: 238809 - protein, 68 aa, Zea mays
  unsure (1)..(68): unsure at all Xaa locations
  Clone ID: MRT4577_149381C.1.pep
IKIGINGFRRIPRLVDRVALESDYVGVCPXNDPLISTDYLTYMFKYDTVHRQRKHHKVXLKDYKTLFF

SEQ ID NO: 238810 - protein, 56 aa, Zea mays
  unsure (1)..(56): unsure at all Xaa locations
  Clone ID: MRT4577_149382C.1.pep
DTKKNTLNLFTIFIPAXVDDVLDDIHDGLDVAEDLRLGPIANDSSAAGPXDEAETE

SEQ ID NO: 238811 - protein, 36 aa, Zea mays
  Clone ID: MRT4577_149383C.1.pep
TWRPAAATIAGATTSIARTYLLFYPLQRGGGFTFLF

SEQ ID NO: 238812 - protein, 88 aa, Zea mays
  Clone ID: MRT4577_149384C.1.pep
SLSSKASRPPPTTRFLLFGAPLLNAPIVYVERAQNMLSVLVCAECLYEEMVSWRRGCRRYQTIRVSPRARERETTPEDIERVGVTRGS

SEQ ID NO: 238813 - protein, 103 aa, Zea mays
  unsure (1)..(103): unsure at all Xaa locations
  Clone ID: MRT4577_149385C.1.pep
DLSTATDLVRSSNAMFRVLLFHFKNTRXEVFSLRKGSLTNAKSFLEDVISHYHAIPFRMYCGGFFLISHSYSFHSNFSLTLFFSILLYSFYVPFLINFLFQFH

SEQ ID NO: 238814 - protein, 177 aa, Zea mays
  Clone ID: MRT4577_149386C.1.pep
MVEAKILVLVAVLALLQVSSTVARRHGKPDPCDEDDANTDDLPGGLRHKRTPHPRSHHCAPAHHGGRGGGTPAVMTVNGFKRGESGGGPAECDGHFHGDDELIVALSTEWYAHGRRCHRRIRITSAHHGRTVEARVVDECDSSRGCRHNIVDSSPAVWRALGLDTDIGQVPVTWSDA

SEQ ID NO: 238815 - protein, 38 aa, Zea mays
  Clone ID: MRT4577_149387C.1.pep
IHVLAHNSFKGPDAPIQVHGHLKVFEHGARIGPEIQHE

SEQ ID NO: 238816 - protein, 65 aa, Zea mays
  Clone ID: MRT4577_149389C.1.pep
RESHCSRDKRSPDVLACSTVETLQAGAGAETLLARGQSTARVCHGGSGEADACADEPGGHHGASR

SEQ ID NO: 238817 - protein, 45 aa, Zea mays
  Clone ID: MRT4577_14938C.1.pep
FCIMSLLSRCNSLIIHGHVIFLSIDNASSQKISLLWRLIGLPSKP

SEQ ID NO: 238818 - protein, 187 aa, Zea mays
  Clone ID: MRT4577_149390C.1.pep
MGNCKSSSRALLGKAHVVPDPEWRIRDFGKTHVPDFEWRIDDFSSLLKTGSKRATSGPFHCSGYNWDLQVSLMHKEAGSVTPYVALRLASSTLSLVPAHTVHAVFELSICNHSKGMYYGCKASYNFDFKNFYSKEHCLIPLKKLLKSSAFLVDDGCVFAVEILKIDVCSPEKKAVVVQKKATTVQNL

SEQ ID NO: 238819 - protein, 212 aa, Zea mays
  unsure (1)..(212): unsure at all Xaa locations
  Clone ID: MRT4577_149391C.1.pep
DGPISDNAGGIVEMAGMSHKIXERTYALGAADNTTVAIRKGFAIGSGALVSLVLFGAFVSRAGVKVVDVLSXKVFIGLIVGDMFLYWFSVMTMKSVGSVALKMVEEVRRQFNTILGLMEXTGKPDYATYVKICTDASINEMIPRGALVMLTPXIVGXLFGIETLSGVLAGALIFGVXFCFGQIAISTSNTVLHXDNAKKYIKRHRHLKFTGK

SEQ ID NO: 238820 - protein, 110 aa, Zea mays
  Clone ID: MRT4577_149392C.1.pep
KQASNPFGGHVAGEVLVRAHGAISCILIVQQESLAENGEMSGTSASSTCFTNDTDVQSPRSTRVFVLKDHSQLGNAHLGLVNLVKDTTQFVARTMYDLIIDLNDGVLNTL

SEQ ID NO: 238821 - protein, 52 aa, Zea mays
  Clone ID: MRT4577_149393C.1.pep
FFFFFFFFFFFFFFFFFFFFFFFLSKKDKIWLETTNTGGKLFRGGEKGSHPI

SEQ ID NO: 238822 - protein, 52 aa, Zea mays
  Clone ID: MRT4577_149394C.1.pep
ASPFLVVLAFVVRVHLACRTSLSFFFNHRRPHGELVQTPSPCAPLVLLHPFF

SEQ ID NO: 238823 - protein, 145 aa, Zea mays
  Clone ID: MRT4577_149395C.1.pep
FCLYGAIHMIQVFGSYGAFLIMLFSASSWVFHLAMLFGSSEVSHLLMVLGSSGIFHLLLMFGSSEVSHLLMVFGSPGAFLLLLVFGSQWMLPVFGSPGLHMVFGSHGAFHFYRMAVGSSRRQKYHQKIWSVGIWIASILLLRDLT

SEQ ID NO: 238824 - protein, 85 aa, Zea mays
  Clone ID: MRT4577_149396C.1.pep
THMMSRRAPLTCDDNQTHRHAGLALHHRGHRHRLQSPNGRAGAMPRRCVQLRITYSQSPNALGAKDLPARLLDLRNLRRAHQTAA

SEQ ID NO: 238825 - protein, 61 aa, Zea mays
  Clone ID: MRT4577_149397C.1.pep
TSAHKGVSFEAERCSLIISSPDACAPSMTAFTLTNLAARSIVEQFPSHGVQVFIYRYIEKC

SEQ ID NO: 238826 - protein, 99 aa, Zea mays
  Clone ID: MRT4577_149398C.1.pep
AGFAPRAIVQVSYAIGVPDPLSVFVDRYGPGAFPPKEFLKFVKENFVFRPGMFFITLALKKGGNGRSLKTAASGPFGRDAPPFPWGVVNPPKAENPFFA

SEQ ID NO: 238827 - protein, 175 aa, Zea mays
  Clone ID: MRT4577_149399C.1.pep
RENFGVESYTGATGYNNWKNAIKSFDVHVGNIDSAHNKARRCFDDFKNQRQSVSHVMSQVSRKQEEEYLRRLIIVLGVIRFLLLQGLAFRGHDECTSSNNRGNFLEMFEWYKMKDSSAKKLFDSTPKNCMLTSPEIQKQICEACAEETKKVILAEIGDKKFAIIIDEARDTSIKE

SEQ ID NO: 238828 - protein, 138 aa, Zea mays
  unsure (1)..(138): unsure at all Xaa locations
  Clone ID: MRT4577_14939C.1.pep
RKKIECKKEKKEEEKNIKKXKMKKKRVYDRRKLKXENRKKKREKKKKKXKNKKIKKSEKKKEVCKRKINKKKKEKIKEXKEKKXKINNKKIREKKXKRKTRKKKEKMKIEKQKKKKXEKRSPEKKTKTTKKSNNKHAS

SEQ ID NO: 238829 - protein, 187 aa, Zea mays
  unsure (1)..(187): unsure at all Xaa locations
  Clone ID: MRT4577_1493C.1.pep
RPVPVYEXTLEGLQAAYSGSMPYVKDGLVFYNKHAHYQAGITPLALVWKDETCSQYVIDTNNKGEIPSEQHLVLELLEDGKVVTSDDPHVVFGSLDSAFIQTSNLRPGNLLRFAVRDESVKLVDGKMHIDQLQFVGKPNRARAFADSHSKVLFQYAARHVPLRIEDLVASIQSNNMEVESTDVEMQD

SEQ ID NO: 238830 - protein, 324 aa, Zea mays
  Clone ID: MRT4577_149400C.1.pep
CTAHSGVSRSWHCCSRPTAYSSISRVRVAPAAFLPARYNFEGYIPRSCSSSLQIYSRSSMLNLPPSSALTVSSQLTSSDVAQRSEEWFALRKDKLTTSTFSTALGFWAGNRRAELWNEKVFGATETKLADTARSAMDWGTHHESVAIEQYTNITGRHVGTFGFAVHAEASSGWLGASPDGVLGCGLDGGILEVKCPFNKGKPELALPWRAMPYYYMPQVQGLMEIMGRDWAELYCWTPSGSSLFRVPRDRAYWELLHEALRDFWWGDVVPARELALLGKHDEARSFEPRPKHRLTNLVLYRSRKLASEAKLLWMDVGGRVEFFQ

SEQ ID NO: 238831 - protein, 178 aa, Zea mays
  unsure (1)..(178): unsure at all Xaa locations
  Clone ID: MRT4577_149401C.1.pep
CCCLLSRSHLVILLRADCCANRSRYLPATCPSPSPCHPRRELKTHRRNRRGLDHEYNNNLLPNDWNKPFPGSSHATGIALKNIAIEAPXPHSAIRKXGRALLVNTAKKIGAFTPNDWWMNYIGDNDDALIAECAHKADSETRYCLSARTQGLSRSVPVVTYSLVSLSCENYRQLSGLH

SEQ ID NO: 238832 - protein, 102 aa, Zea mays
  Clone ID: MRT4577_149402C.1.pep
FGSRIYPPAGCLAGDFPIALRMASVGREGIGEFLRPLHWRFLFQGGDCGYPHTQGQAADRVEVYRASMVAGDRSTMVKGIRPDHISFSPDRPTIDYCRLRII

SEQ ID NO: 238833 - protein, 38 aa, Zea mays
  Clone ID: MRT4577_149403C.1.pep
TYQGYTSVSWCSSLHITGSGRSSDNSPAGGIIVERTLL

SEQ ID NO: 238834 - protein, 197 aa, Zea mays
  Clone ID: MRT4577_149404C.1.pep
MVASGGHEDVSFRDNVLQGKDLKTLHQSLEGTDGVDLGHKDIIMGDHMREMKNNAIVCNIGHFDNEIDMLGLETYPGRKRITIKPQTDRWVFPETNTGIIVLAEGRLMNLGCATGHPSFVMSCSFTNQVIAQLELWKEKSSGKYEKKVYVLPKHLDEKVAALHLGKLGAKLTKLTKSQADYISVPIEGPYKPAHYRY

SEQ ID NO: 238835 - protein, 159 aa, Zea mays
  Clone ID: MRT4577_149405C.1.pep
KLFFFFFFFFFFFYKLFFFLFFLTSQAAGARGEGQNTGGGEKRVRAGARGRGKPGQRATPGQRGNRKQYTQTHQTGEKKEKPGGPKEERNPQKKRGAPGPLTNRKTRRARGKKEWANPRGQGEGLWGPGPLSAARANSPLKGGGGERHKLTERRKGGHP

SEQ ID NO: 238836 - protein, 60 aa, Zea mays
  Clone ID: MRT4577_149406C.1.pep
SRPEVNPLNAEKGDAQGIRRIQKLRNITRNRGSTLNISKGACSELKNHEDAEVIRRDKRY

SEQ ID NO: 238837 - protein, 63 aa, Zea mays
  Clone ID: MRT4577_149408C.1.pep
LTFTLISSTNLSSHSTKAHHQLLTLLPLTQSHIPNLYYNKPPPHRHNSQLKTPTMNSTQYQLT

SEQ ID NO: 238838 - protein, 35 aa, Zea mays
  Clone ID: MRT4577_149409C.1.pep
RYSSPKYNQPYLLITVAEHQLFVLRSLREIKIKQW

SEQ ID NO: 238839 - protein, 46 aa, Zea mays
  Clone ID: MRT4577_14940C.1.pep
FSMHVFFSFSVFSKLTLKDSSNHLVQMAQDCIYFAYPVLLGSIVFL

SEQ ID NO: 238840 - protein, 517 aa, Zea mays
  unsure (1)..(517): unsure at all Xaa locations
  Clone ID: MRT4577_149411C.1.pep
MALSVEKTASGREYKVKDLSQADFGRLELELAEVEMPGLMACRAEFGPSQPFKGARISGSLHMTIQTAVLIETLTALGAEVRWCSCNIFSTQDHAAAAIARDSAAVFAWKGETLEEYWWCTERCLDWGAGGXGPDLIVDDGGDATLLIHEGVKAEEDYEKTGKIPDPESTDNAEFKIVLTIIRDGLKADPKKYRKMKERLVGVSEETTTGVKRLYQMQETGALLFPAINVNDSVTKSKFDNLYGCRHSLPDGLMRATDVMIAGKVAVVCGYGDVGKGCAAALKQAGARVIVTEIDPICALQALMEGLQVLPLEDVVSEADIFVTTTGNKDIIMVDHMRKMKNNAIVCNIGHFDNEIDMLGLETYPGVKRITIKPQTDRWVFPETNTGIIVLAEGRLMNLGCATGHPSFVMSCSFTNQVXWNWWYCHIYGDLIYVNXWLAMPHYXSTLDLMMQVIAQLELWKEKSSGKYEKKVYVLPKHLDEKVAALHLGKLGAKLTKLTKSQADYISVPIEGPYKPA

SEQ ID NO: 238841 - protein, 72 aa, Zea mays
  Clone ID: MRT4577_149412C.1.pep
TNYSQAHNYQPTHPPANHPQYTPYITASSNQPSNYIDTQCLRLNATLRRTLDITPYLGQTPHQYLSPYQRYL

SEQ ID NO: 238842 - protein, 265 aa, Zea mays
  unsure (1)..(265): unsure at all Xaa locations
  Clone ID: MRT4577_149413C.1.pep
MALSVEKTSSGREYKVKDLSQADFGRLEIELAEVEMPGLMACRAEFGPSKPFAGARISGSLHMTIQTAVLIETLTALGXAEVRWCSCNIFSTQDHAXAAAIARDSAAVFAWXKGETLEEXYWWCTERCLDWGEAGGPDLIVDDGGDATLLIXHEGVKAEEDYEKTGKIPXDPESTDNAEFKIVLTIIRDGLKADPKKYRKMKERLVGVSEETTTGVKRLYQMQETGALLFPAINVNDSVTKSKVILACLSLDPFHFRSDVLVVRI

SEQ ID NO: 238843 - protein, 95 aa, Zea mays
  Clone ID: MRT4577_149414C.1.pep
KKEKHCNLRFIKTSVLRALAHPDQTAMSTPLTDSFCSNARYHMGPPNMSDKVLPLLLHLGFAPICLHGSGLTTGHDHPHRWALCAMGLRSQFYRT

SEQ ID NO: 238844 - protein, 51 aa, Zea mays
  Clone ID: MRT4577_149415C.1.pep
NSRLMVILKIVSSFFKIAHLQLVTGNHSYVGNLSITGFSFSDQCYLIPITK

SEQ ID NO: 238845 - protein, 123 aa, Zea mays
  unsure (1)..(123): unsure at all Xaa locations
  Clone ID: MRT4577_149416C.1.pep
DYNVHKESTLHLRENIMGGMHNLTKTCXGTSMTLERTXSNPLDNTKAKSQNKEGATPDKKPLISAGXNLGAARTLXPYTNKKESTLHLILCRRRGTRTLAKTLTGTPLADEPTLTMLRMLKES

SEQ ID NO: 238846 - protein, 74 aa, Zea mays
  unsure (1)..(74): unsure at all Xaa locations
  Clone ID: MRT4577_149417C.1.pep
RPRGRTRGHWARRYCLGLGIAGTIRLVXTAAAGGVTCRLVETQTRVWPAAVPSGSLTSQSGGGVXGTRRRGGSA

SEQ ID NO: 238847 - protein, 65 aa, Zea mays
  unsure (1)..(65): unsure at all Xaa locations
  Clone ID: MRT4577_149418C.1.pep
KRGCDKKLVTLTVDHKEEDLARDTGCCTARQQLPGEGSLERSLADAAHLHNKLYHXGVGDDLERK

SEQ ID NO: 238848 - protein, 113 aa, Zea mays
  Clone ID: MRT4577_149419C.1.pep
AISSVVLEREENSQDFFFLCGAAQRNDVCGIQVWDMITIVDGVNGLRMQVDGQEMEGQELGELVGQGKEKLVVLEAGEMEDLHGFGSRGELVWHKLQFGTTSRYVRLCRNPLR

SEQ ID NO: 238849 - protein, 77 aa, Zea mays
  Clone ID: MRT4577_14941C.1.pep
LLQFSMKGAISKVTHKAPSKLILKRNGVRTSFQEASMCHVGLSTSSLVSVSAIISGLPANIVSYFKWVQNIPGFMLC

SEQ ID NO: 238850 - protein, 90 aa, Zea mays
  Clone ID: MRT4577_149420C.1.pep
MIDDRRIDRIGSRRELDLRDEERRRDLILEREKELEWERERELRDFRDRERERERERERDLERLLREREREREREHERERERERLRERRE

SEQ ID NO: 238851 - protein, 130 aa, Zea mays
  unsure (1)..(130): unsure at all Xaa locations
  Clone ID: MRT4577_149421C.1.pep
FYFLRIATYRGQIGLLNSRGLFXFXILWQSDLIHCQLILIYVRGKRRLYSATKYILHSAVGSSILLIGVLGMELYGCNAPALDLERLITLSYPATLEILLYFGFIIAYAVRIXIIPLHTWLTEIHGEAHY

SEQ ID NO: 238852 - protein, 56 aa, Zea mays
  Clone ID: MRT4577_149422C.1.pep
LEDKPPPLPKGNPWTKKLPQHLSPVGTGVPPPAQDSPEAELSSPKIIKAGKLKTKK

SEQ ID NO: 238853 - protein, 567 aa, Zea mays
  unsure (1)..(567): unsure at all Xaa locations
  Clone ID: MRT4577_149423C.1.pep
MVLITLVRDYIDRMLHDIPGMKVLVLDPQTVGMVSVVYSQSDLLRKEVFLVETMDNASSSRESMAHLKAVYFLRPSANNVQKLRRHLAMPRFAEYHLFFSSILKVPQIQILADSDEQEVVQQVQEFYADFCAIDPYHFTLNIQNNHMYMLPTVVDPPGMQGFCDRAVDGIASVFLALKRRPVIRYQRTSDVAKRIAQETARLMYEQESGLFDFRRTXENSSLLLVIDRRDDPVTPLLWXFANIPKDQQEVGLSSVQDDFFRANMFENFGDLGMNLKRMVDDFQHLSKSSLNLQSIGDMAKFGSNYPEYRKTHGNVTKHVNLVSXQSRIGEERKLMLVYETYQELACTSGQAAAFEAVTSLLNNESVSDIDRLRLVMLYALRYEKESPVQLMQLFNKLASHSAKYKSGRPVQLMQLXALIREQATCMGTVVQFLLKQAGIDKRTGDLYGNRDLLNIARNMARGLKGVENVYTQHQPLLFQTMEGIVKGRLRDADYPLVGNHFQQGRPQDVVIFIVGGTTYEEARSVALYNAANPGVRFFLGGSVVLSSKRFLEDLGEAQRISKSSTII

SEQ ID NO: 238854 - protein, 37 aa, Zea mays
  Clone ID: MRT4577_149424C.1.pep
IDLVKTLIKIKCGMCIVCSNSLSSPMYNTVCIVKSSY

SEQ ID NO: 238855 - protein, 139 aa, Zea mays
  unsure (1)..(139): unsure at all Xaa locations
  Clone ID: MRT4577_149425C.1.pep
PLFRPGYALRYEKEXPVQLMQLFNKLASHSAKYKSGGVENVYTQHQPLLFQTMXGIVKGRLRDADYPLAGNHFQQGRPQDVVIFIVGGTTYEEARSVALYNAANPGVRFFLGGSVVLSSKRFLEDLGEAQRISKSSTII

SEQ ID NO: 238856 - protein, 163 aa, Zea mays
  unsure (1)..(163): unsure at all Xaa locations
  Clone ID: MRT4577_149426C.1.pep
MRGGGFPEDKNMMMHESLLQATRGDLFEHIDELLDFPNEDCAAAERLLDDPAPVSALLARMXPTPPRRKXLDQAAGRAQHDASAIDFFSAVGNYEVDTKDVVGEHICSCDNVDMDMAHLECMNXLVDDVSIPHEIEVTGAIVDREAPIMNIYALANKVLMPPD

SEQ ID NO: 238857 - protein, 303 aa, Zea mays
  unsure (1)..(303): unsure at all Xaa locations
  Clone ID: MRT4577_149427C.1.pep
PILLQLLKVPQFNTRCSDEQXVVQQVQXFYADFXSXDPYHFTLNIQNNHMYMLPTVVDPPGMQGFCDRAADGIASVFLALKRRPVIRYQRTSDVAKRIAQETARLMYEQESGLFDFRRTENSSLLLVIDRRDDPVTPLLNQWTYQAMVHELIGIENNKVDLMGFANIPKDQQEVVLSSVQDDFFRANMFENFGDLGMNLKRMVDDFQHLSKSSLNLQSIGDMAKFVSNYPEYRKTHGNVTKHVNLVSELSKIVEERKLMLVSQTEQELACTSGQAAAFEAVTSLLNNESVSDIDRLRLVMLYA

SEQ ID NO: 238858 - protein, 164 aa, Zea mays
  unsure (1)..(164): unsure at all Xaa locations
  Clone ID: MRT4577_149428C.1.pep
MQLVQFLLKQAGIDKRTGDLYGNRDLLNIARNMARGLKVCIEVLRMDVTXILLLLMHLLVXGVENVYTQHQPLLFQTMEGIVKGRLRDADYPLVGNHFQQGRPQDVVIFIVGGTTYEEARSVALYNAANPGVRFFLGGSVVLSSKRFLEDLGEAQRISKSSTII

SEQ ID NO: 238859 - protein, 58 aa, Zea mays
  Clone ID: MRT4577_149429C.1.pep
FYKNGATLGFRAQPGNAPPVPVGGPILPWGGHVKTWVLCGNSFPLGENAKRSPFPQKV

SEQ ID NO: 238860 - protein, 109 aa, Zea mays
  Clone ID: MRT4577_14942C.1.pep
CFTCTLVQTNFCAIFCPFKSPFIVSSHINFSLLLSHFSLLSHLRIQNALVPLEDFIGYIQTISTSFLQLALPLPYHIYHRSKLITFLYGHKPNATHTFPQHLSIKHVFF

SEQ ID NO: 238861 - protein, 64 aa, Zea mays
  Clone ID: MRT4577_149430C.1.pep
VTRQRGTLFTGIIRQVPPTPASKKITSTHIGPNCSMITHSARLCSLEPFGVLEDLYGGMLLQSW

SEQ ID NO: 238862 - protein, 65 aa, Zea mays
  Clone ID: MRT4577_149431C.1.pep
VCSSGKLIMMPSSVAPGPFLFHVSAPSHDVSAWSCALAISFWTQPPFLPWHLDRFCSLCFLDMLM

SEQ ID NO: 238863 - protein, 99 aa, Zea mays
  Clone ID: MRT4577_149432C.1.pep
SSLVGGRPLLFFFGQRSCLCSAEQATPLNALLQNVHLDHHRKPPLAAASTNLLQDVARGLLINGQDSTTAVMLGTDAEPSTPCDNEQFRRRACGEVRMA

SEQ ID NO: 238864 - protein, 93 aa, Zea mays
  Clone ID: MRT4577_149433C.1.pep
MDAASIRGLLYHEEQEGKLCSVHCVNTALQGPLLSEFDLDALAVYLDQPELLVMLKGYLSSGAGYAAAGDFFVQREGSHNVSLGQDYSIPVQH

SEQ ID NO: 238865 - protein, 126 aa, Zea mays
  unsure (1)..(126): unsure at all Xaa locations
  Clone ID: MRT4577_149434C.1.pep
VIYLVSNTYILVFSVPQHLRAGANIKSGIYVFGRISRLVATVALQSDYVXLFSVNDPFISTDYMTYMFKYDTVHGQWKHHEVKVKDSTTLLFVEKEVAVFGCTNPVEIPWGSVGAEYVVESTGVFT

SEQ ID NO: 238866 - protein, 34 aa, Zea mays
  Clone ID: MRT4577_149435C.1.pep
PRSDATPRHSSPPVLRHPSSIKPPCSLRPSSPLS

SEQ ID NO: 238867 - protein, 323 aa, Zea mays
  unsure (1)..(323): unsure at all Xaa locations
  Clone ID: MRT4577_149436C.1.pep
WVHSGPAGSKFPAPLLMNTVHFALQAGLSKLIIWFQPKGPEAAVDMGWKDYFMRVVPTALGTALDINLSNASLVFISVTFATMCXISLPDILVALCFCXRLENPSIKLLGIIVVISTGVLLTVSKETEFDFWGFIFVTLAAVMSGFRWSMTQILLQKDNYGLKNPITLMSHVTPVMAIATMILSLLLDPWSEFQKNSYFDNPWHVMRSCLLMLIGGSLAFFMVLTEYILISATSAITVTIAGVVKEAVTILVAVFYFHDEFTWLKGFGLFTIMVGVSLFNWYKYEKFKRGHINEDDVSSPFTGDVKYIIIDDLEYQNEFEEDT

SEQ ID NO: 238868 - protein, 76 aa, Zea mays
  Clone ID: MRT4577_149437C.1.pep
IRAECLFTIRVLSGKKMYFLQIRGWTSQMVVWTSLFPARNLGKTSCSSSQCPHFCLERRILKHKNIRVIVLKKKVR

SEQ ID NO: 238869 - protein, 109 aa, Zea mays
  unsure (1)..(109): unsure at all Xaa locations
  Clone ID: MRT4577_149438C.1.pep
RRNPSSSPAAARERAISGHERRAGPREPPPPTKAAENRTGRLVSPPIFSKVLKHGGHVNACRWIVAGNCGPQWSSNKEVSRLXQXXRTTQVNRISLEREVSTKATLRSV

SEQ ID NO: 238870 - protein, 333 aa, Zea mays
  unsure (1)..(333): unsure at all Xaa locations
  Clone ID: MRT4577_149439C.1.pep
RPGCLTLYNKTLLGDKLGKFPAPLLMNTVHFALQAGLSKLIIFLQSRGPRPXVEMGWKDYFIRVVPTALGTALDINLSNASLVFISGTFATMCXISLPDIPVAFCVCIXVENASIKLLGIIGVISTGVLLTVSKETEFDFLGFIFVTLAAVMSGFRWSMTQILLQKDTYGLKNPITLMSHVTPAMAIATMILSLLLDPWSEFQKXSYFDNRADVMGSCLLMLIGGTLAFFMVLTEYILISATSAITVTIAGVVKESVTILVAVFYFHDEFTWLKGVGLFTIMVGVSLFNWYKYEKFKRGHIDEDDANSPCTGDVKYIILDDLEYQDEFEEEDT

SEQ ID NO: 238871 - protein, 71 aa, Zea mays
  Clone ID: MRT4577_14943C.1.pep
LLAFSSLIFSSRLSLVDSRIRFLEKWWVGKRSWRLRRRREMELKNTKKDRKLHSVVTCSIVTGSEWKRRRG

SEQ ID NO: 238872 - protein, 95 aa, Zea mays
  unsure (1)..(95): unsure at all Xaa locations
  Clone ID: MRT4577_149440C.1.pep
GHLLAYIQSPLGGFVCKTVETLLRALSAATSVSLAVANAVWXGIXSVGRPSNKHLSIFETLFGRNMLRACKIVNKRGFRRVTGPPSGRSVFLVLG

SEQ ID NO: 238873 - protein, 71 aa, Zea mays
  Clone ID: MRT4577_149441C.1.pep
LAFRQVMQYQGCSVSGKDPNVCYQCSSCNVRSLLYGTQWKKIIVRSLSKAANCSYSSVTANESTYLLKLPQ

SEQ ID NO: 238874 - protein, 75 aa, Zea mays
  Clone ID: MRT4577_149442C.1.pep
FGGGDIPPPLPPYKTEGPHYSQHFSLKTRGGKKILVFRSPHAFFKKKLFFFFQKISSHKKQNLANPFNLYKKYQF

SEQ ID NO: 238875 - protein, 91 aa, Zea mays
  unsure (1)..(91): unsure at all Xaa locations
  Clone ID: MRT4577_149443C.1.pep
FVESSVLKTPLSNKRPPVVSPSSPHTGGKKXSAVHVPTPRPAKCKTFVNNDQSVKSPKFGPPSGVPCQSFNKSFISYPALQAHSXAQHSGK

SEQ ID NO: 238876 - protein, 131 aa, Zea mays
  Clone ID: MRT4577_149444C.1.pep
KRKADNEKRVTSMHAAIVTMQQDQQFQRLLFHLSHQLQRWPASQVLHPALKCAALFVSEATQSPMAAALASVPPPLFSYRLESIMRQQQLDTKLQLDRQLQDILIIFCLLWKHTVRAQGKVWSSLPRPRSE

SEQ ID NO: 238877 - protein, 71 aa, Zea mays
  Clone ID: MRT4577_149445C.1.pep
LVTVEAISYDLIQNKAKGRCGAMARGNGVREGRRLSLQQERMRFLGDPLLQCSVGQDESVGFSWEVSTPTH

SEQ ID NO: 238878 - protein, 120 aa, Zea mays
  unsure (1)..(120): unsure at all Xaa locations
  Clone ID: MRT4577_149446C.1.pep
MMGCFTGLRSKKKKSPLVASKKHGDARDTSLRLPEPEAHVPSLQSAPPSFRNRAKICQSANKVSYSRARVLSAPSSLILADQDGLPYAEFDDQDDPRGKAGPIKAHXRTTTPMPLPLPPP

SEQ ID NO: 238879 - protein, 268 aa, Zea mays
  unsure (1)..(268): unsure at all Xaa locations
  Clone ID: MRT4577_149447C.1.pep
KSTETNVLCSDWNSWKDSIIWFDGATDAVGIQFFLKNVHPRMKAAASALFGLPNSLYARPNTFGELMRAIISPSSKVQEAVDWALKGVNPDIVLHMRMMANRPVRARKAAVLCIKKALQISHIKGTALVALVSDTPAFVKEIKSDISEFAEVLNFDYKLFCQDXSLEIVGNDKPLDFRSRDWGSAPRWVAFVDFFIAAQARYAVVTGAHRRVGTTYAQLITALAAANRHGREPSGANFTFLSSVHSNLLVEGLSTQVGWGHIWNRYAG

SEQ ID NO: 238880 - protein, 86 aa, Zea mays
  unsure (1)..(86): unsure at all Xaa locations
  Clone ID: MRT4577_149448C.1.pep
CTHSSFPYLQNSVLYYSQFTFSQTGSLIHTGGSFTNHXQTSFSDPLLLILTYPITNHHTIKYSKLTNIPTIAFLDTHYSIPYAYIV

SEQ ID NO: 238881 - protein, 62 aa, Zea mays
  Clone ID: MRT4577_149449C.1.pep
PPTSCAQEPLFFAWGEETTTPSSIIHPSLKDDVMNALNESMSTSIPQYLIMPIIYHYNYSTY

SEQ ID NO: 238882 - protein, 178 aa, Zea mays
  unsure (1)..(178): unsure at all Xaa locations
  Clone ID: MRT4577_14944C.1.pep
MPPKKTTAPGAALQPLDTNQDTLSLREARSQKRKATSPTLQEEELDQQIRDLEIINQQVQRKNEKMARLADLQKKIDEATEEXELQAIPWPQSYKXPPQLPMYDGHSNPKQFLMSYEATISSYGGNAAVMAKSFVMAVRNVAQTWYSSLRPGTITSWKKLKDMLVTSFQGFQTKPVIA

SEQ ID NO: 238883 - protein, 74 aa, Zea mays
  unsure (1)..(74): unsure at all Xaa locations
  Clone ID: MRT4577_149450C.1.pep
RAGTARTXEAAKPEGGGQLSSDQHMRQHHQSXQKNRATPPQLXQSAANYEEPPGRLMEAARISGHKAGIHAVSG

SEQ ID NO: 238884 - protein, 51 aa, Zea mays
  Clone ID: MRT4577_149451C.1.pep
MRVALVTLALLDLAASATFTHTSGGCRCQPPPAVHLPPTVPFPPSVNLPTS

SEQ ID NO: 238885 - protein, 142 aa, Zea mays
  unsure (1)..(142): unsure at all Xaa locations
  Clone ID: MRT4577_149452C.1.pep
TRPRAYVFAYEPHSVLPIGVCALADHTGFLPLPKIKALASTAVFYVPFVRQIWTWLGLVPASRRNFYEYLAAGYSCIIVPGGVQELLYMECDSEVAFLKSRKGFVKIAMEMGQPLVPVFCFGQSXAYKWWKPSGKLYLRISR

SEQ ID NO: 238886 - protein, 55 aa, Zea mays
  Clone ID: MRT4577_149453C.1.pep
VKKAFHHTNIQQGLRCPHHFGKVTRRIWHKGRYFFPFFTDRPGKWTQGTGCFPLR

SEQ ID NO: 238887 - protein, 65 aa, Zea mays
  Clone ID: MRT4577_149454C.1.pep
QRPPRPQRRACHMSRALRADILGWASESRGETESAGITMSCACCDFFHSQKSQLLKKPGLGRPMA

SEQ ID NO: 238888 - protein, 87 aa, Zea mays
  unsure (1)..(87): unsure at all Xaa locations
  Clone ID: MRT4577_149455C.1.pep
MATGLVVGDNIHCITKEAIRWLXRRGGEKRIWVIIYQETRGLLNNLLENMVQNXIXYSNDTRIKIVSGMDVKYNLKMHGQTLYGVGC

SEQ ID NO: 238889 - protein, 45 aa, Zea mays
  Clone ID: MRT4577_149456C.1.pep
GWLLLQAIRLWVKRFTYGRNGAHKTHRKAMPWSSVTISSSRAFSV

SEQ ID NO: 238890 - protein, 40 aa, Zea mays
  Clone ID: MRT4577_149457C.1.pep
TPSSRCGSPSRSTTRPAPPLCTANASRRTRVCVRAVSPHD

SEQ ID NO: 238891 - protein, 398 aa, Zea mays
  Clone ID: MRT4577_149458C.1.pep
LIHSLGTAAQCPSQPLALPPTRTSSAPSPEADRGRGHGVHPVHLPAEHGGVEEGVAAGGGAGERPRRRGSGAEDAAAGRGEAGPGVAAAVAVEPRGAGERERAGGSHLLVQVRQQGRRGCRHLRQPGQGRLRPRRRRAVLHTGVAAAAVLRFWEEIANRALLDPKLCRKLVHITVGLVFFLMWPLFSSDDVFAPSLAPLIIIINIMKVTVIGLGFVKAEGVVNSMTRHGDRRELLKGPLYYACAITLTTIVFWRTSPISIAVICNLCAGDGVADIAGRRFGHVKLPHNPEKSYAGSIAMFLAGFIASVLFMCYFNIFGFVEKSWSMVAAFGVISLAAAVVESLPISTRLDDNLTVSVASVLVGALVFYSIGARNLCCMSSEVRRSIPATVGMVFAGSS

SEQ ID NO: 238892 - protein, 167 aa, Zea mays
  unsure (1)..(167): unsure at all Xaa locations
  Clone ID: MRT4577_149459C.1.pep
MILNARRMFMYVISCLVEVPLNLIWFIVLVHDSRCRKEDSLELNDIEASNKYNIDTTGLVCCWPSEEVLAYYCINHSDVFRSKKVLELGSGYGLAGLVIAASTNADEVVISDGNPQVAECILLNIXTFGETKVKSLILHWDKEQASEMLNTFDIIVASDCTFFKQFH

SEQ ID NO: 238893 - protein, 88 aa, Zea mays
  unsure (1)..(88): unsure at all Xaa locations
  Clone ID: MRT4577_14945C.1.pep
RPVSPSVHISLTLYTKHMLVPVAIDLELLTMSTHXLCQSIALLGCDLPSCQVAVSSVCYDFDRALFKLHVQLQRVHVSSIGVYSLGLD

SEQ ID NO: 238894 - protein, 144 aa, Zea mays
  Clone ID: MRT4577_149460C.1.pep
PADIQKNISINAETFGETKVKSLILHWDKEQASEMLNTFDIIVASDCTFFKQFHKGLARTVKSLLKHSATSQAIFLSPKRGDSLDKFLGIIKENGLSCELIENYDPTVWNLHKKLVAGEDRTWPNYDKEHCYPLLVRIGYFSEF

SEQ ID NO: 238895 - protein, 120 aa, Zea mays
  Clone ID: MRT4577_149461C.1.pep
PLFVFNMAFMGFPEPPRLQDWYNPGSMGNQYFLGLEKFFGGSGDPSYPGGPLFNPLGLGKPEKEMNELKLKEIKNGRLPMLPILGYFIQGLVPGVGPFQNLLDPLADPVNKKVLPTPKFP

SEQ ID NO: 238896 - protein, 46 aa, Zea mays
  Clone ID: MRT4577_149462C.1.pep
KAFKVPIYPFIKTENNGTEPLRSCLQGMGIQHKLNNLQALERKNPF

SEQ ID NO: 238897 - protein, 126 aa, Zea mays
  Clone ID: MRT4577_149463C.1.pep
SVCLRPGVLSFRHLSLGVGRFFFWSGWLGFFPFWRSVCGRPSIFVIFLPRSPRQFFLFVLPSLFFVCVCGPPPPSLRLCLCPCFPLGCELVFLHYERPTVYNKNHQKNSKEKNKKKKKKKSLCPSA

SEQ ID NO: 238898 - protein, 178 aa, Zea mays
  unsure (1)..(178): unsure at all Xaa locations
  Clone ID: MRT4577_149464C.1.pep
KKQAAAKVSPPGKRAGSPTQKKEVSTPTRHPKLNQQSPAPGKGWGNGTGKQIPTGNTYGHENPQPGTEPGTPRKGRQWAGKRPKRGPGPGTKKKPKNRAPIKRRAKXPEKPPKPKARKPSPPKKPSREKKKPKEKNQKKKKKKKKKKKKKKKKKKNKKKKKKKKKKSLYTCPGGRSKG

SEQ ID NO: 238899 - protein, 110 aa, Zea mays
  unsure (1)..(110): unsure at all Xaa locations
  Clone ID: MRT4577_149465C.1.pep
GKKGQMKEAQGLFSKIKGSGVKPDIVTYHIFIKSYVAQXMFEEAIDLIRYLVTQGCRPNERTFNSILQGYSRHGRMVEAKSFLSNLPKIYPGISKQEKQRLSELLAKHTS

SEQ ID NO: 238900 - protein, 100 aa, Zea mays
  Clone ID: MRT4577_149466C.1.pep
ISTCHCHRTVARRKDRKSCEGARSPRLGSNPVESLNLVTIADTTQDERWLSLVVVEALVISMWTLVHEGTSVSWCWQEVILDRPLASVLDAYQPIQFFMF

SEQ ID NO: 238901 - protein, 64 aa, Zea mays
  Clone ID: MRT4577_149467C.1.pep
INRDTIFIFFCKRKEHVLALQFLFFLSLPCLLRTWSRWVGILIQASNKAGHLGSMCVGQLSVLS

SEQ ID NO: 238902 - protein, 110 aa, Zea mays
  Clone ID: MRT4577_149468C.1.pep
QHPPHLRTICLGHVSGSMRMRTRSSRVWFFSQDPCAWPMRLCDASWMYVGLWMPALHRSAPAGCPPTGLTRQVLVHPGAHCQYRYTEYRRRCSIRPPRAPSRCRPASAKR

SEQ ID NO: 238903 - protein, 70 aa, Zea mays
  unsure (1)..(70): unsure at all Xaa locations
  Clone ID: MRT4577_149469C.1.pep
MREILHIQGGQCGNQIGSNFWEVVCDEHGIDPTGRYVGTSDLQLERVNVYYNEASCXRFVPRAVLMDLEP

SEQ ID NO: 238904 - protein, 32 aa, Zea mays
  Clone ID: MRT4577_14946C.1.pep
ISLVNFDDSTYILKTSCKLTIMFHRKIMTILF

SEQ ID NO: 238905 - protein, 157 aa, Zea mays
  unsure (1)..(157): unsure at all Xaa locations
  Clone ID: MRT4577_149470C.1.pep
RGQRPNPISCVSCVSSVVLKGRETGSLHLLAPLLLTGGKGADLVIRGNVVLNTDVLDPALMRSGRLDRKIEFPHPSEEARARILQIHSRKMNVNPDVNFXELARSTDDFNGAQLKAVCVEAGMLALRRDATEVTHEDFNEGIAHVQAKKKSSLNYYA

SEQ ID NO: 238906 - protein, 87 aa, Zea mays
  Clone ID: MRT4577_149471C.1.pep
FIMLIYNSSTRACSSSCIDDCDGEDIHDGVAQLLRSLPIIDGLTLTNQIVQQRKESLPVLSISDLPKPAHLHALHRRRCTTTAISRE

SEQ ID NO: 238907 - protein, 78 aa, Zea mays
  Clone ID: MRT4577_149472C.1.pep
INPCMYSSYAQRSKRMACHCKQETEFSSFSQSKIMAENITPTYKLTKRRHKLQPKEGPPPASVHQHWAKWRHWLRPCS

SEQ ID NO: 238908 - protein, 64 aa, Zea mays
  unsure (1)..(64): unsure at all Xaa locations
  Clone ID: MRT4577_149473C.1.pep
SAPSPPPPAGRHPPRAREQHGRLRAAXXXAGRPRPPRGRRXVTXPTGSATPRASPTASYWXAPS

SEQ ID NO: 238909 - protein, 72 aa, Zea mays
  unsure (1)..(72): unsure at all Xaa locations
  Clone ID: MRT4577_149474C.1.pep
LAEPKYGVIRNYSLHISQDPTFNFNEXKCYIRIVPPPPKDLVVSRIIIQNSGFSKRILHVYLLLLPIKMCFV

SEQ ID NO: 238910 - protein, 124 aa, Zea mays
  Clone ID: MRT4577_149475C.1.pep
CIHIYFPTVNLINHDFHLSNYFIHILYRISSALYSMQILYSCILILITFYKSRHAISFLNANLYTLFKILIFNSFNLTQLIYAFLILLYHNNFLLLLFLLLNYTHLLFKKNIFIIFLNKKNKNF

SEQ ID NO: 238911 - protein, 77 aa, Zea mays
  unsure (1)..(77): unsure at all Xaa locations
  Clone ID: MRT4577_149476C.1.pep
KKKKKFFAKEDQTTLTTSKXXADNKKKKGPIDRTKQKGTSRXKGKTPEEIRKTFNIKNDFPPGEEEEKKKEKKWAFQ

SEQ ID NO: 238912 - protein, 101 aa, Zea mays
  Clone ID: MRT4577_149477C.1.pep
WQDCWLHGKSIEDLAPRVLAAVPKRTASSRTVRDALMDMRWIADIKGALTVGVLADYLTLWNTLSTVQLHPERDDNHIFRFAQDGKYSAKAAYESIFICSI

SEQ ID NO: 238913 - protein, 68 aa, Zea mays
  Clone ID: MRT4577_149478C.1.pep
RTQGLVIRGSCFLPPRKKVLPKINFFPWECLKLCWGNPSGWLSINGSYFGRFMCPRKTFNKISSPFCL

SEQ ID NO: 238914 - protein, 69 aa, Zea mays
  Clone ID: MRT4577_149479C.1.pep
FDPLAWGTGFPENIKELRPKEIKNGRLPMVAVMGAWFQAEYPGPGPIDNLFGHLADPGPATIFQAFSPK

SEQ ID NO: 238915 - protein, 227 aa, Zea mays
  Clone ID: MRT4577_14947C.1.pep
RTSGPSGGLSSTRPNAARGFLSHALGVPDRPRPRPNAANSRLPTASFQRRKLAGVIYTASASPSSSSPSSSPFPEREACAGIIYSPLPRCAEPFLEWRKTRKQKMAWMSDQPCRSYIIDGSCKYGSDCLFSHGLDLFGRIEMQIRALLHVPDVYQVPVEHLPWSRPELGIMLRQVGMGWDSWSPNEFARAFHTICVVYNSYGYYAILVGECFTLPGLLTLQSKCDGC

SEQ ID NO: 238916 - protein, 40 aa, Zea mays
  Clone ID: MRT4577_149480C.1.pep
VAFKTHHTTHITNLTYNSIPNITPTITLKPILSKYSITNI

SEQ ID NO: 238917 - protein, 105 aa, Zea mays
  unsure (1)..(105): unsure at all Xaa locations
  Clone ID: MRT4577_149481C.1.pep
IRRGAARRDDPSFPSLPCDRVGIVSRNLNSMDWALQHNDWXQNRDPTQLNRIASHSPLLRWHHRGQDRTDCPTQQQPKLNMEWDAHWSMKFSACGVDVTRNLNTT

SEQ ID NO: 238918 - protein, 50 aa, Zea mays
  Clone ID: MRT4577_149482C.1.pep
FFFFFFFIFIYVSYLKIARGYLITGFVKIPIAMPKQSAFPLSPSYIILIN

SEQ ID NO: 238919 - protein, 131 aa, Zea mays
  unsure (1)..(131): unsure at all Xaa locations
  Clone ID: MRT4577_149483C.1.pep
ANERQPTTLLPTNLSPALVLRXENPRPQPYRSQQAERGGIXPRSPLVRQQSGDLLXXXPVRHILTQNMKPQQLQQQGLANLXAYSHEQQILPFNQLAAXNSASYLQQRQIPFSQVPDGYPHEILSCCQLEA

SEQ ID NO: 238920 - protein, 83 aa, Zea mays
  Clone ID: MRT4577_149484C.1.pep
MARTKQTARKSTGGKAPRKQLATKAARKSAPTTGGVKKPHRYRPGTVALREIRKYQKSTELLIRKLPFQRLVREIAQDFKTDL

SEQ ID NO: 238921 - protein, 57 aa, Zea mays
  Clone ID: MRT4577_149485C.1.pep
CTRNTARDSAHSQMNTAMPSGTSHRSCMCHALTIADVSYASIHRRALDSCFHTLLHN

SEQ ID NO: 238922 - protein, 59 aa, Zea mays
  unsure (1)..(59): unsure at all Xaa locations
  Clone ID: MRT4577_149486C.1.pep
FDNFPLFLGSRLIQSLPILGPCCSIKIKQKINVSALGXXXXXXKKKKKRAPALEDTTLR

SEQ ID NO: 238923 - protein, 47 aa, Zea mays
  Clone ID: MRT4577_149487C.1.pep
SKPWEGGITRIFTRSLQKAMTTTASRATSQNTNQGHLYIIAEREAFD

SEQ ID NO: 238924 - protein, 80 aa, Zea mays
  Clone ID: MRT4577_149488C.1.pep
WLGSRLFSVVRKGGRTWPWVVSASRLFCLQNIEIFFSRAVSNKSPVNLVQCLPAPSKLFISSLVMLPHFFLKTVIRAANS

SEQ ID NO: 238925 - protein, 497 aa, Zea mays
  Clone ID: MRT4577_149489C.1.pep
ACIYIVSLTLLVLLLDASRRRRTTGGGSSSTEEHKLPPGSLGLPFLGETLQLYSQNPKVFFASRLKRYGEVFKTHVLGCPCVILASPEAARMVLVSQAHLFKPTYPPSKERMIGAQALFFHQGDYHLRLRRLVKGWLGPDALRGLVPDVEAAVASTLDGWEGRVTSTFHTMKRLTFDVGVIAIFGHRLAGHVKEELRRNYFTMEKGYNSFPIPVACTSYSQAIKARQRLGAVLSGILAERRARRSDDDDDHGLLNALMRSRDDSGAAPPLSDDQIADNVIGVLFAAQDTTASVLTWILKFLHDNPKLLEAVKVEQMAAYEENDGGRLPLTWAQTRKMSITHLVILESLRLASIIAFTFREAVEDVHYQGFLIPKGWKVMPLFSNLHYSPDYFEDPHKFDPSRFKVAPRPGTFLPFGSGVHACPGNDLAKLEMLVLIHRLVTTYRWEVVGSSDDVTYSPFPVPKRGLLARLSRATTGSAVVGRAPPLDIGGPAGASYS

SEQ ID NO: 238926 - protein, 101 aa, Zea mays
  Clone ID: MRT4577_14948C.1.pep
ITVPGRKWLANGWNTVGRPLRSSQQSLVCKPHQGTDSGGLLDRQEQGGGRFSPGHACRSTEQGHGGMLRTLIKTTQRVASVTHRIAHTLWRASQDSLTTRT

SEQ ID NO: 238927 - protein, 122 aa, Zea mays
  Clone ID: MRT4577_149490C.1.pep
TTRSPTRPRDLQLRQPTRGTARRRPAVRAGRLQADSGGGQYRKASAAGQRGACFFRSGHDGSCSVHAICGHSSASHPRRLGVVVVHFVRVITSLLTTTPAQGFSADGDDTSTMDRRASSHGH

SEQ ID NO: 238928 - protein, 214 aa, Zea mays
  Clone ID: MRT4577_149491C.1.pep
NLLLVTVALACAPSPLGTFSSFALLFFVVLWPPPPFPAFLSSLSPPAPMSPPSSPSSTATSATFSSAKRVRMNSSPSEVRRPPLLSRGCSRRDSASLTGEPNRKPCSGQSTPMAKLTRADATRSPAVPLLRPPRTFSSSALTTMRSSSVVVSSSFSAMASTTATAAFSTTVASSTGGGAAYVNVGVTALSTWSSSSPAVSSLSSKSESASASTS

SEQ ID NO: 238929 - protein, 88 aa, Zea mays
  unsure (1)..(88): unsure at all Xaa locations
  Clone ID: MRT4577_149492C.1.pep
PGGTPTRKATGTRAKERKSKNTPPPRKGEXPPRAPRRRRPPRHALARPRRAPRRPPAAGPRWRPPSPPPSPPPSRPPRPPPRPPPPPA

SEQ ID NO: 238930 - protein, 112 aa, Zea mays
  Clone ID: MRT4577_149493C.1.pep
GAQASATVTKSKFHKIGPGVHRKVYPESAALARNLTKKSRKRGSGAYHKPEPARGKLRCLKEQRAPGFGCCASRASFGGAASPIDGDDDDELNGSKSGHWIKTDAEYLVLEL

SEQ ID NO: 238931 - protein, 584 aa, Zea mays
  Clone ID: MRT4577_149494C.1.pep
PSSPLSPTNGGSVKIVQMTPITSAMTTAKWLREVISSLPEKPSSKLQQLMSSCDRDLTNAVTERVSIVLEAIFPTKSSADRGGSLGLNCANAFDTLWADARKMEASKLYYRVLEAICRAELQNSNVNNLTPLLSNERFHRCLIACSAELVLATHKTVIMMFPAVLESTGLTSFDLSKIIENFVRHEETLPRELKRHLNSLEEQILESMAWEKGSSLYNSLIVARPSVASEINRFGLLAESMPSLDDLVARQNIHIEGLPATPSKKRAAGRDDNADPRSPKRPCNESRSTVVEHNLQTPPPKQCHMVLTSLKAKCHPLQSTFASPTVSNPVGGNEKCADVTIQIFFSKILKLAAIRIRNLCERIQYMEQTERVYNVFKQILDQQTTLFFNRHMHQLILCCLYGVAKVCQLELSFREILNNYKKEAQCKPEVFLSIYIGSRNHNGVLISRHVDIITFYNEVFVPAAKPFLVSLISSGTRPEDKKNASGQVPGSPKLSPFPNLPDMSPKKVSASHNVYVSPLRQTKMDLLLSPSSRSFYACIGEGTHAYQSPSKDLAAINSRLNYNGRRVNSRLNFDMVCLMLTLLL

SEQ ID NO: 238932 - protein, 103 aa, Zea mays
  Clone ID: MRT4577_149495C.1.pep
ANHSFGILSKQSHFEHPKNISTHLLICASSKYRQFRLALHADFTPTCHQIVEVANVQNYMGSLRRSCSKPMESTVCRFLQIFPDQIPIAAAAARSATPPRLPS

SEQ ID NO: 238933 - protein, 89 aa, Zea mays
  Clone ID: MRT4577_149496C.1.pep
PSHSTATPNLPLCADGSVSATHSVDTRRKGGCSRSIQSEMRSAERRSSCCLRTTPELPGANVLNGDSISDFPYLACRNRCDVRLFGITR

SEQ ID NO: 238934 - protein, 420 aa, Zea mays
  Clone ID: MRT4577_149497C.1.pep
ELKRHLNSLEEQILESMAWEKGSSLYNSLIVARPSVASEINRFGLLAESMPSLDDLVARQNIHIEGLPATPSKKRAAGRDDNADPRSPKRPCNESRSTVVEHNLQTPPPKQCHMVLTSLKAKCHPLQSTFASPTVSNPVGGNEKCADVTIQIFFSKILKLAAIRIRNLCERIQYMEQTERVYNVFKQILDQQTTLFFNRHMHQLILCCLYGVAKVCQLELSFREILNNYKKEAQCKPEVFLSIYIGSRNHNGVLISRHVDIITFYNEVFVPAAKPFLVSLISSGTRPEDKKNASGQVPGSPKLSPFPNLPDMSPKKVSASHNVYVSPLRQTKMDLLLSPSSRSFYACIGEGTHAYQSPSKDLAAINSRLNYNGRRVNSRLNFDMVSDSVVAGSLGQPNGGSTSLDPAAAFSPLSKRKPDT

SEQ ID NO: 238935 - protein, 343 aa, Zea mays
  unsure (1)..(343): unsure at all Xaa locations
  Clone ID: MRT4577_149498C.1.pep
RDDNADPRSPKRPCNESRSTVVEHNLQTPPPKQCHMVLTSLKAKCHPLQSTFASPTVSNPVGGNEKCADVTIQIFFSKILKLAAIRIRNLCERIQYMEQTERVYNVFKQILDQQTTLFFNRHIDQLILCCLYGVAKVCQLELSFREILNNYKKEAQCKPEVFLSIYIGSRNHNGVLISRHVDIITFYNEVFVPAAKPFLVSLISSGTRPEDKKNASGQVPGSPKLSPFPNLPDMSPKKVSASHNVYVSPXLRQTKMDLLLSPSSRSFYACIGEGTHAYQSPSKDLAAINSRLNYNGRRVNSRLNFDMVSDSVVAGSLGQPNGGSTSLDPAAAFSPLSKRKPDT

SEQ ID NO: 238936 - protein, 61 aa, Zea mays
  Clone ID: MRT4577_149499C.1.pep
PTRPKIIETRKWGFPKLTRPVFLKYKSKGKIVPEGVNANLFGNHGRLHKRAPGKAFFKGVV

SEQ ID NO: 238937 - protein, 133 aa, Zea mays
  unsure (1)..(133): unsure at all Xaa locations
  Clone ID: MRT4577_14949C.1.pep
MSTRLLPLPGAETMXTCADNKDDKNLYIISVKEIKGRXLIRLLYACVGNINMXAVKEGKTDLRKKVMPNIIYRQCKPSSHKDGDYMNLEDNDAVIENAKVEMKGCAYSGPIGKEGADLRPTINRAANAIVGDV

SEQ ID NO: 238938 - protein, 433 aa, Zea mays
  Clone ID: MRT4577_1494C.1.pep
MDQLVNFIIRPPRADYSPNDDLLEQEFMLKGRWFLRKDLEVKNGQGKKLQCSHYMPVVIPEGKALPCVIYCHGNSGCRADASEAAIILLPSNITVFTLDFSGSGLSEGEHVTLGWNEREDLKAVVNYLRTDGNVSCIGLWGRSMGAVTSLMYGAEDPSIAGMVLDSPFSNLVDLMMELVDTYKYPLPKFTVKLAIQHMRKIVKRKASFDIMDLDTIQVAKQCFVPALFGHATEDDFILPHHSDKIYESYIGDKNIIKFDGDHNSPRPQFYFDSITIFFHNVLNPPEVAEDHYFMTPHGSLGQGHWDTEQDIEYRFSQSPTGTANATTTEDAIAQLRSRRLMSRMEVPSGATTEDRTDRTEGFDSDLGPSSSSVSTATPPNGRNGRLLTPTSDDGEYVEYSFDSLSDMPHTVEDEDRMLMQAILESLKDYEQSN

SEQ ID NO: 238939 - protein, 69 aa, Zea mays
  Clone ID: MRT4577_149500C.1.pep
TIEVSMGSTHGQVEHRHKIAKMKDGYSNAPDLEDLFLMLNVGSACTWTLYTRVRIQYEAHIRYDSTCSR

SEQ ID NO: 238940 - protein, 152 aa, Zea mays
  unsure (1)..(152): unsure at all Xaa locations
  Clone ID: MRT4577_149501C.1.pep
KKKEKKKKNNTTKKKTPKHTKKKKKQKKKKKTRQKQQHSTPPKKKKHHKKENKKNXEKDNHPKKPKNKTXTKKHRRXKRRRRHRPKSRAGRSTMAPPTSSPPRRWRRWRASSKPRRDERKAARRASSLGTSWKGIRRRDTVRCRGAEVALIR

SEQ ID NO: 238941 - protein, 40 aa, Zea mays
  Clone ID: MRT4577_149502C.1.pep
LFNQIVFFLFESQYIFLLTHVDPSNLLIFSASILAGFSKL

SEQ ID NO: 238942 - protein, 75 aa, Zea mays
  Clone ID: MRT4577_149503C.1.pep
YTRTHYGAKFDGLRWSAKKHAHSYLVKRAQTWTISETVILHGILSKRGMNTRDNSATRCRCTKPTLGLAGMHLPQ

SEQ ID NO: 238943 - protein, 452 aa, Zea mays
  Clone ID: MRT4577_149504C.1.pep
MMKWGLSSGTPADSYYEVRSDCTDGVPKSKFKIKAGKTLSARKWQAAFSPDGCLDIASVLSRIQRGGVHPTVRGEVWEFLLGCFDPRSTFDEREEIRQIRRIQYDRWKEDCRQMDSHVGSGKVITAPLITEDGRPIKDPLVLLEATSDTNTSGDAPTTSINGNEIDESAERITDKQIIEWKLTLHQIGLDVLRTDRTMVFYENKENLSKLWDILAVYAWIDKDVGYCQGMSDLCSPMIVLLKDEADAFWCFEKLMRRLRGNFKCTDQSVGVSNQLQHLASIIQVLDPKLHDHLETLGGGDYLFAFRMFMVLFRREVSFGDSLYLWEMMWALEYDPDIFFATCEEQGAVHKNKVSKSKLKGLRHFGKWDKDKDKEDDKNGAEDGEDGPVPISVFMVASVLKEKREKLLQEARGLDDLIRILNDVNGNLDAKKACAGALKLHKKYLKKVQAKKP

SEQ ID NO: 238944 - protein, 77 aa, Zea mays
  unsure (1)..(77): unsure at all Xaa locations
  Clone ID: MRT4577_149505C.1.pep
TDSVNGERCGTNNCRNGHSLEKLRSCISEGALIEDRLLMGADYYXTQTAKKLNAQKGGILIGLVKNSSITRATIHKN

SEQ ID NO: 238945 - protein, 55 aa, Zea mays
  Clone ID: MRT4577_149506C.1.pep
SAEVGSHSTIVHYNPGNSYVHHTCTCEVAIGVSNQGLSGISAWTPANLCFVCVRG

SEQ ID NO: 238946 - protein, 84 aa, Zea mays
  Clone ID: MRT4577_149507C.1.pep
LKLYMSLQIPTSLMRVLSHSLLLASWHCKVFFMNLIDMFEEKFISLSLSFLTLSSMACSLYKELEVSLSARHFQYIKLARSRLC

SEQ ID NO: 238947 - protein, 227 aa, Zea mays
  unsure (1)..(227): unsure at all Xaa locations
  Clone ID: MRT4577_149508C.1.pep
LFYFAGMETTSVLLTWTMVVLSMHPDWQHRAREEVLHVLGHTTTAPDYDALSRLRIVXSSAAVQTHRHILITANRSIYCGCNAXTMVLYEVLRLYTPLTALQRQTYKPMELGGVRYPAGVMLMLPLLCIHHDMDVWGPDASEFRPERFAEGVSKGSRDAPAFFPFGWGPGTWVGQNFALLEAKMGLAMILQRFALELSPAXRQAPFPHGMLQPEHGAQIVLRARGLP

SEQ ID NO: 238948 - protein, 50 aa, Zea mays
  Clone ID: MRT4577_149509C.1.pep
SVPLGWAFLCERVPFLASLFRTGHLSLASPLKLINVLSIPHIIFLNQFIF

SEQ ID NO: 238949 - protein, 118 aa, Zea mays
  Clone ID: MRT4577_14950C.1.pep
HEEDHVNDPQEAWQEVDPDEYSYEELVALGEVVGTENRGLSADALASLPSVTYKMQSVQDGNTEQCVICRVELEEGESLIALPCKHLYHPECINQWLQINKVCPMCSAEVSTSSNKEP

SEQ ID NO: 238950 - protein, 33 aa, Zea mays
  unsure (1)..(33): unsure at all Xaa locations
  Clone ID: MRT4577_149510C.1.pep
LNSKSSXNHSRXXNXXSLAKRXLKCRXIXLALG

SEQ ID NO: 238951 - protein, 65 aa, Zea mays
  unsure (1)..(65): unsure at all Xaa locations
  Clone ID: MRT4577_149512C.1.pep
NPGPTHAAEPGQHXHAQALSSSXGCLQDGDLLHGDGRYPHQGGLHRRGPHEHAQDREQAQRGTGQ

SEQ ID NO: 238952 - protein, 133 aa, Zea mays
  unsure (1)..(133): unsure at all Xaa locations
  Clone ID: MRT4577_149513C.1.pep
TEPQYPGRPTRIVSRPGRHPGAGENQRPGPTKQAGQAQAPASNKPHGREATSPRXRHPRPQPRTRPRPPRRPKKRPRRRPRRQPPTSPKRPPPPPRPRGTSQPPRRRPSQLPTKSPKPPPRRPRKKPQRRQSP

SEQ ID NO: 238953 - protein, 113 aa, Zea mays
  unsure (1)..(113): unsure at all Xaa locations
  Clone ID: MRT4577_149514C.1.pep
PGGTHAYGPNSVLARSPNRGHWDVGNGGASEAYXVSAHAVILLQPRLRLQAHPGEGDGRDPGAAADPDHQGQARPAASIPWSIGAEPVGCRCYLSCTSVKSLRVLHLRRSMFF

SEQ ID NO: 238954 - protein, 64 aa, Zea mays
  Clone ID: MRT4577_149515C.1.pep
SKLCLPGYPKWCKPPPFGGKQNPLGFPRGAVCPFRTPLPFLTLLKMARKTLCPRVPHPAKSLSF

SEQ ID NO: 238955 - protein, 92 aa, Zea mays
  unsure (1)..(92): unsure at all Xaa locations
  Clone ID: MRT4577_149516C.1.pep
MAAADLKKGNARLPAEVNRVLYLRSVMFNISSEEMDYFFIKSGAILXIRMGAXKDTHGTDYVDYEDIYDAQNDVDHLYRYYDDDRYLIVLYY

SEQ ID NO: 238956 - protein, 90 aa, Zea mays
  Clone ID: MRT4577_149517C.1.pep
MSSSDGGQSRKRLVVGVLSVCLLVAMVIGTVMFFVSEKAGYDSELRKRIMSKTMRSVELFCAPADYQGTCHETLETALSRTDPAKHPHAA

SEQ ID NO: 238957 - protein, 56 aa, Zea mays
  unsure (1)..(56): unsure at all Xaa locations
  Clone ID: MRT4577_149518C.1.pep
EAHVSDSEFHCLCVCADSSSRVKIEDCXIVSGDDCVAVKNGLDEYGIKVNMPDEHI

SEQ ID NO: 238958 - protein, 46 aa, Zea mays
  Clone ID: MRT4577_149519C.1.pep
GCQVLNKAGAYIVPRYSSYINLTYLHSIHTGEFSHKHNFLLKKKKT

SEQ ID NO: 238959 - protein, 111 aa, Zea mays
  Clone ID: MRT4577_14951C.1.pep
MHACYASEKKKKKSGRQRNQKTAGDLASVMRSLEEEIASFDEAAEAPAPELGFLLEASDDELGLPPASSSEEEEAGRAGAHEPPPALDGQIWGFEDEIVDGGGFGGYSPEA

SEQ ID NO: 238960 - protein, 128 aa, Zea mays
  Clone ID: MRT4577_149520C.1.pep
NSRNSSTRKGREARRSPISPAVKMVNVPKTKKTYCKNKECKKHTLHKVTQYKKGKDSLSAQGKRRYDRKQSGYGGQTKPVFHKKAKTTKKIVLKLQCQSCKHYSQRAIKRCKHFEIGGDKKGKGTSLF

SEQ ID NO: 238961 - protein, 251 aa, Zea mays
  unsure (1)..(251): unsure at all Xaa locations
  Clone ID: MRT4577_149521C.1.pep
IHRFCHTRGRDRPLRSNSAWPPPPPSPPTTRPTPTSSTSSSTTTTPPPASPTTHPSQSXQAPPEGSGKGGAGVHTAVKQVQWASFGGGADDGPDPFAHLSGGAGDDDGFLVTTAGTQTASDHAFFGGTQSLAXGDGPGLXAGSNSSNQHNVSGQHDQXAAAALQXDSADPMSLEAMYPGWKYDEASQQWYQLDDSVNSTGNAAQVLDNSTRYAQQQQQLHASYLHNSVHSGLETIAEEGTTATGAVSSWGQ

SEQ ID NO: 238962 - protein, 67 aa, Zea mays
  Clone ID: MRT4577_149522C.1.pep
KKVEQWTKAFEQSITLICVLFMQCPQYYHCLKVLRYQNKNFRLLYNCDRDGVQFIFLKWQTKYADLY

SEQ ID NO: 238963 - protein, 97 aa, Zea mays
  Clone ID: MRT4577_149523C.1.pep
LPAEKLLASPAPNSDLRLAGKTARAFKILHLVRPLLGSLTKRANRQIRTYHSKEKLSTLLSSLFIFLVSSHLPLHGIHSTTEPRSFLLHAGYPPIKP

SEQ ID NO: 238964 - protein, 109 aa, Zea mays
  Clone ID: MRT4577_149524C.1.pep
KTTCPFHAVLESPNFLIARFWPSNNTRFLIPLLRCWSSATCCLRALADRLALRSRDHAGAAALQLYLAGFRVLRTSRADLHSSLDRRRTCAFLSSRSDRRRSVCHTVMP

SEQ ID NO: 238965 - protein, 90 aa, Zea mays
  unsure (1)..(90): unsure at all Xaa locations
  Clone ID: MRT4577_149525C.1.pep
MAPLLAADMNHAAIHAALRNHLXGSNNDTFSRHHLPSSSPQSIKRICNLRFTTRSGEVHHRNEGQMLRPXRIPERYWFPSDFTVSRLHFI

SEQ ID NO: 238966 - protein, 92 aa, Zea mays
  unsure (1)..(92): unsure at all Xaa locations
  Clone ID: MRT4577_149526C.1.pep
VIKADDVVGPEVXKLVSALPNGNVVLLENVRFYKEEEKNDPEFAKKLASLADLYVNDAFGTAHRAHASTEGVTKFLKPSVAGFLLQKELDYL

SEQ ID NO: 238967 - protein, 79 aa, Zea mays
  Clone ID: MRT4577_149527C.1.pep
HRYEPGILSWSLRSNPMEQPALDAPTHLYSGETVLGTCTTEPEMGMRAERGEPPLPLSCSYSDCCTLNLGRLKNETLRF

SEQ ID NO: 238968 - protein, 101 aa, Zea mays
  Clone ID: MRT4577_149528C.1.pep
TPRYVAPLEPPVLLLTLEIPVTKVILQILETSRYSYDADNRDHVPRRKLSSGERLVGPYNHELPRDTPRRNSGGTTGLSSRRRPPFLLSFSLSARQWRRTR

SEQ ID NO: 238969 - protein, 89 aa, Zea mays
  Clone ID: MRT4577_149529C.1.pep
RGSGLWVCPLKLFQIKTPCRAPGPRCSKPGACGCPPPPLLRTGFLIIFFPGAPPFGSAPKKKKKKKKKKKKKKKKKKKKKKKKKTPPPP

SEQ ID NO: 238970 - protein, 171 aa, Zea mays
  Clone ID: MRT4577_14952C.1.pep
MDFMPVGRGGEKGVLAVDCEGCAALYSASSQTLSTIPTLRAPKVQPIFFPVGDSRLYVMDRKPRRDPRRCFVALIRGRESGLRCRMAWHWRSLQPPPYLPPTRWDDDDDDDDSDLNDDRQAMVDDGSKSSMVVEGELGDIAGHTVVGDSKIWISTAGAGTYTFDTGRPVDG

SEQ ID NO: 238971 - protein, 83 aa, Zea mays
  unsure (1)..(83): unsure at all Xaa locations
  Clone ID: MRT4577_149530C.1.pep
KPRGDPRVRDDCVHYAKMTXEIGEQVRMFVYDLLVXTNPTRLFKAIKEKSCNALMXIKVNQIRXSLTDSFDAINISTFYHLLF

SEQ ID NO: 238972 - protein, 221 aa, Zea mays
  Clone ID: MRT4577_149531C.1.pep
MHVCLCACREVMHAMWRPQKFKAIYLLATLYVLTLTLPSASAAYWAFGDELLTHSNALSLLPRDAWRDAAVVLMLIHQFITFGFACTPLYFVWEKLIGLHDCRSLCKRAAARLPVVVPIWFLAIIFPFFGPINSAVGSLLVSFTVYIIPAMAHMVTFRSPQSRENAVERPPRFAGGWTGAYVINSFVVAWVLVVGFGFGGWASITNFVQQVSTFGLFAKCY

SEQ ID NO: 238973 - protein, 228 aa, Zea mays
  unsure (1)..(228): unsure at all Xaa locations
  Clone ID: MRT4577_149532C.1.pep
MASETSVADEKAPAGLSRYEADAEDGQDGGGGDGKSRLSGLLWHGGSAYDAWFSCASNQVAQVLLTLPYSFAQLGMVSGILFQLFYGLLGSWTAYLISILYLEYRTRKEKDKVDFRNHVIQWFEVLDGLLGRHWRNVGLAFNCTFLLFGSVIQLIGCASNIYYVNDHLDKRTWTYIFGACCATTVFIPSFHNYRVWSFLGLLMTTYTXWYIAVALLMHXQAAGVKHSG

SEQ ID NO: 238974 - protein, 530 aa, Zea mays
  unsure (1)..(530): unsure at all Xaa locations
  Clone ID: MRT4577_149533C.1.pep
MAAGGGGSIADEKAPVAEAFGGHLEAAEMTEAEEEHSGGGGVKSRLSGLLWHGGSAYDAWFSCASNQVAQVLLTLPYSFAQLGMLSGVLFQLFYGLLGSWTAYLISILYLEYRTRREREKAADFRNHVIQWFEVLDGLLGRHWRNAGLAFNCTFLLFGSVIQLIGCASNIYYVNDRLDKRTWTYVFGACCATTVFIPSFHNYRVWSFLGLVMTTYTAWYMAVASLVHGQVEGVQHSGPTRIVLYFTGATNILYTFGGHAVTVEIMHAMWRPQKFKAIYLLATLYVLTLTLPSAAASYWAFGDELLTHSNALALLPRTPFRDAAVVLMLIHQFITFGFACTPLYFVWEKLIGLHDCRSLCKRAAARLPVVVPIWFLAIIFPFFGPINSAVGSLLVSFTVYIIPALAHMVTFRSPQSRENAVERPPRFAGGWTGAYVINSFVVAWVLVVGFGFGGWASITNFVQQVNTFGLFAKCYQCPPHLTAAPPAAFMPPPXHQWPRRPPCHRRRRRSMPPASSSLRCQPRFRLRLRRR

SEQ ID NO: 238975 - protein, 198 aa, Zea mays
  Clone ID: MRT4577_149534C.1.pep
MSRFGRSGQPENRESFSLLVLNVSFRTTADDLFPLFDRYGKVLDIYIPRDHRTGDPRGFAFVRYNYEDEAQDAIDGLDGMRFDGRALMVQFAKYGPNAEKIHRGRITEENPKPRGRCRSRSLRQRYREDYWDRDYRRRSQSRSRERYEQAGYRDGDHRRHRTHSISPDYDRKRNRHRAPHEGIPSKPRDGRAACSGSP

SEQ ID NO: 238976 - protein, 218 aa, Zea mays
  Clone ID: MRT4577_149535C.1.pep
MAMSRFGRSGQPENRESFSLLVLNVSFRTTADDLFPLFDRYGKVLDIYIPRDHRTGDPRGFAFVRYNYEDEARDAIDGLDGMRFDGRALMVQFAKYGPNAEKIHRGRITEENPKPRGRCRSRSPRQRYREDYRDRDYRRRSQSRSRERYEQAGYRDGDHRRHRTHSISPDYDRKRNRHSGSPVLKRPSHSRSRSPRRAPHEGIPSKPRDGRAACSGSP

SEQ ID NO: 238977 - protein, 233 aa, Zea mays
  Clone ID: MRT4577_149536C.1.pep
MSKKIVVKLDLHDNKDKQKALKAISVLVGIDAVSVDMAAHKMTVIGTVDPVQVVSKLRSKSWAAHIDSVGPAKEPEKKEEKKDGGGEKKDGGGGEGKKEEGDGKKDGGGGGDGKKDGEGKKEDGDGKKQDGEGKKEDGDGKKDDKKDGGGGGAEEKKPAAAVPPILPFPPLHQLPPQYMHMITNDYMSQYHHRPPPPPPVAYHPYAAPPPPPPQYYYVRNMSMEENPNSCAIC

SEQ ID NO: 238978 - protein, 75 aa, Zea mays
  unsure (1)..(75): unsure at all Xaa locations
  Clone ID: MRT4577_149537C.1.pep
MQKYARDILRRADMENCKSVPTPLCXTDKLSRHHGNKLGDKDAFVYRSIVGALQYLTLTRPDXSFAXNKVCQVLA

SEQ ID NO: 238979 - protein, 42 aa, Zea mays
  Clone ID: MRT4577_149538C.1.pep
CLSKLPVLFHNFVSEKFLVLNASMTSTQLQQCLNNLLAQLSI

SEQ ID NO: 238980 - protein, 47 aa, Zea mays
  Clone ID: MRT4577_149539C.1.pep
RGTQPPLVSVVCYYGQHYHCIAFKSGRCVMYDDQTFKVIGSCGDSLV

SEQ ID NO: 238981 - protein, 123 aa, Zea mays
  unsure (1)..(123): unsure at all Xaa locations
  Clone ID: MRT4577_14953C.1.pep
MDPTAALFLALSLLLAATPHGCEPNXSGPVVPSPPVXVPTRPKHILQRCPIDILXVKECANVLGLDKVRLPQYEQCCPLLEALVELDTILCLCTGIKGNDRDIYLKVPLNLXFILNNCGRICP

SEQ ID NO: 238982 - protein, 143 aa, Zea mays
  Clone ID: MRT4577_149540C.1.pep
GSGAPPQLDARLGWAWRESSRPERGPGRRRRTGLQPPGSATKVRHRYPTSPVRYPPRLFWFYLMLVALAPCEKCFVDWIYVCTMGAERECSGWSFDYAYARNEMHIRGVCGRGLVVGPGGLEIFLLASSDAWIGGMIAYCHQN

SEQ ID NO: 238983 - protein, 89 aa, Zea mays
  Clone ID: MRT4577_149541C.1.pep
MALLKTGSKSTLVVAVVWLLIATLATADGATQKKLQGACEKIVKGACSEKVCGGMCAMIGSNAVGSCKVDGRVSYCCCQQKTPTHIGVH

SEQ ID NO: 238984 - protein, 34 aa, Zea mays
  Clone ID: MRT4577_149542C.1.pep
DAWGHHSVLMFVFSSSKRRAPLEIYSSPCRHGRS

SEQ ID NO: 238985 - protein, 57 aa, Zea mays
  Clone ID: MRT4577_149543C.1.pep
HSERGRLTLRVGRQHRGRPPAAAKVRAHPDCALTVADHNDVDGRGVNMPPCVRIRRR

SEQ ID NO: 238986 - protein, 298 aa, Zea mays
  unsure (1)..(298): unsure at all Xaa locations
  Clone ID: MRT4577_149544C.1.pep
MHKDKTHDDPTGPHSSHTASTADPTVHNTSTTHTGSTGLTGNSHSTHGTTGYSDPTGXTTLTWPTRLTQGSTXRVGTAGNLGSNTHATHGTTGTHGVTGTHGVTGTHGSTGYSDPTGPHDSRMANKADPRVDSDRVGTAGNLGSNTHATHGTTGTHGVTGTHGVTGTHGVTGTHGSTGYSDPTGPHDSRMANKTDPRVESDRVGTAGNMGTGSHTTGSHGLTGTHGTTGTHGTTGTHGTTGTHGVTGTHGSSGYSDPTGPHDSHMANKLDPRVDSDRVGPLATRECRLWNPDRHWQLG

SEQ ID NO: 238987 - protein, 161 aa, Zea mays
  unsure (1)..(161): unsure at all Xaa locations
  Clone ID: MRT4577_149545C.1.pep
NRPPQKRPPPPHWAPEXFPPGGGNQGGDPGGSPQKKGGQLGGENPXGGAGRDKEGGAVPFNTNNLENQGXKIIPPPRGGNLKSPLLGGGPPGXTKKKVKGPKPXGAPWRSPAGVPGGGXKKKIGPREIPRGKNLPPPXPGGGKNTGIKWIGGLKHLFQREP

SEQ ID NO: 238988 - protein, 147 aa, Zea mays
  Clone ID: MRT4577_149546C.1.pep
PSILNGRRHQEGEEMGAERNHEAIQTREPPGEEESVVSIREPSTGIHRSFGQAAYRGDPWLDCPSRTADSGGAGDDDGTQPTSPEPDGGDALLLRIPAFSLFDKDGDDEQATVETEVQQVEIAEQELIEGEEQVVQEEPQGEEYDLI

SEQ ID NO: 238989 - protein, 129 aa, Zea mays
  unsure (1)..(129): unsure at all Xaa locations
  Clone ID: MRT4577_149547C.1.pep
RDWDASVFTDFGPMVVLVHNRYKRPQENETARAELTKAIEMFWEHNLPSPRCVAVDACAEPDLVDALKVSGFPEILFTNAGRIIHREKVVRSAEAWSRMMAFFXYYKAARPPFLCEADGKGQEKVPLMS

SEQ ID NO: 238990 - protein, 87 aa, Zea mays
  Clone ID: MRT4577_149548C.1.pep
ESTSLATGAAAEHWGHHLQGLLHPTPEVAGTPYLGYALCSTMSLWPLYPPNDDAATLLLQRLPCHEHGDHSPEDARRHEASTSSSSH

SEQ ID NO: 238991 - protein, 116 aa, Zea mays
  Clone ID: MRT4577_149549C.1.pep
TRRDFLLHAYYQQSVTTNCDTAQGEVCRDPRLDPDRLAGVRADDDGRCGASGQLGERDYRLCSAPGALDHSAEVRASHDACTTNFTRGREIDCKLTEPKNTASGRRKEKVCSTLDN

SEQ ID NO: 238992 - protein, 68 aa, Zea mays
  Clone ID: MRT4577_14954C.1.pep
YASRNLAVVATLCCSSTSERRTLTGEAALKPDNTAYSVSTWHRSQTSLCAAEPPTRHCSIATPPRAFY

SEQ ID NO: 238993 - protein, 111 aa, Zea mays
  Clone ID: MRT4577_149550C.1.pep
HYLNWFQLFYAMLGVCAKDVFFRIAQVGPAAMPNHGPAQLLLCASSPRRRAHFPPLTMATSAAAASMRSSMTRFGVHELVGARPWPDTVSLQKCRETRRGGTGYRWVGVGD

SEQ ID NO: 238994 - protein, 169 aa, Zea mays
  Clone ID: MRT4577_149551C.1.pep
PASAHASAHASAHASAHASAQPPSSVISGYGGFGSSSNIQGNFTLNQSTGTASALGFDEALSRQYKNTSQYMALQQGDNSGMWVHGSGSRAASTLPPNHFYGYQGQSQLGGFARAQQPQPSQFGGHGYPTVYQSQGQEHPQNLAEGSLNGFQVTPSQPSHPSWQHQHTY

SEQ ID NO: 238995 - protein, 82 aa, Zea mays
  unsure (1)..(82): unsure at all Xaa locations
  Clone ID: MRT4577_149552C.1.pep
MNDKAYGPQELIAKHKKILEGRLPHPKNTECPYWKGQDPRRRPTTLIWGKTYDAXGIYRSLGGHVYHARTGTLDSWMTEPAA

SEQ ID NO: 238996 - protein, 62 aa, Zea mays
  Clone ID: MRT4577_149553C.1.pep
PPLYRGRKSRLACTRSRAWASTRPPGRWQKTRSWVAADGLRCMSDLMVHYLKQHRIILCCDA

SEQ ID NO: 238997 - protein, 69 aa, Zea mays
  Clone ID: MRT4577_149554C.1.pep
AIGRAPRLPVPFLPYSPPPVLPTCSSGSLAHYGLSVRNGPPSAHPWRLIRLVRTRRDIRQGVGHGSGSC

SEQ ID NO: 238998 - protein, 856 aa, Zea mays
  Clone ID: MRT4577_149555C.1.pep
MSGGGAGGKGAAAPVPAGSRKLVQRLKEIVNRPEAEIYAALRECGMDPDEAVSRLLSQDTFQEVKSKRDKKKEIKEVPETRYRSANSSTNRSLRSGADRGGRSNSVHSSSTDNMTSRPPVSGSCTASVNSNQMQTIASSSANKHMVTDGLAVSLQSSSGFQHGGWSGTPGQLSMVDIVKMGRPQGKASSKPVVTADRGYAGQYPSLPSTNQNLKQSGSMVSPAELDKGLQPAQNLVQVKNHGHFTADSKLPYGTDWSPQDGPTSENQSSQPEPSGDPSLYESSFQSSTLVTDVVNSHENSHLELDENNTFAMRSTPASERHLEPSDSIPEYNDGILNNSSSYQPHNYSYTEQDVEDSSADVSAAAENFQSLSLHNDELAAKKTAEDNPAVIIPDHLQVTNTECVSLSFGSFGSGAFSGLLPQNTTDSNVEFLVREDSATVDPIDARNQDYYESGAVTSPAEENLEAMLGTNMENVDAPSVSQANELSQDVLDPSELKYDVPSVSSHAYSNMNTPQPSKIEDPQGNNQAHTLSHLSNMMQANPLSTSSLLGSNQNHPSLHGLEFDLPYLEAKYNAGSTTNPRPAISMQEALKAGVFSNARSTQSLPSTSIPTGHPLPQQLAHHPYSQPTLAPITHFPNIVGYPPYLPQNYAAYLSSGTFQQAYPSNGAFHQSAAALLGSGMKYSAPEYKNNLSATGLQQQHQPQPQPPSSVISGYGGFGSSSNIQGNFTLNQSTGTGSTLVFDDALGRQYKDTSQHIALQQPDNSGMWLHGSGSRAATLPPNHFYGYQGQSQLGGFGQAQQQQPSQFGGHGYPTFYQSQGGLTQEHHPQNLAEGSLNGFQVAPSQPSHPSWQHQHTY

SEQ ID NO: 238999 - protein, 79 aa, Zea mays
  unsure (1)..(79): unsure at all Xaa locations
  Clone ID: MRT4577_149556C.1.pep
HILRHLLPLLMPLTTINSSMQFXLKQQWFSNLLSVPTLMLQQLFTSPIYPSHMLLIIPRFMPHLTIIPIPKIKPSIIIP

SEQ ID NO: 239000 - protein, 190 aa, Zea mays
  unsure (1)..(190): unsure at all Xaa locations
  Clone ID: MRT4577_149557C.1.pep
DCNHYFNNSQAFRASMCFMLDPRDGRNTAFVQFPQRFDGVDPTDRYANHNRVFFDGTMLSLNGLQGPSYLGTGTMFRRAALYGMEPPRWRAAGSVKVIDDDXXXGKEYGRSTLFINAVLDDAXNQERSITPVSLDDDXTXXVSSEVASLMTCAYEDGTTWGRDVGWVYNIATXDVVTGFRMHRQGWRSIY

SEQ ID NO: 239001 - protein, 60 aa, Zea mays
  unsure (1)..(60): unsure at all Xaa locations
  Clone ID: MRT4577_149558C.1.pep
RTCVVTGKWCLDGHCPAVESKNSDTRDXDCMIVSNSLVMDVVNTGDRSGITLLNSKFFHS

SEQ ID NO: 239002 - protein, 186 aa, Zea mays
  Clone ID: MRT4577_149559C.1.pep
YIPRFVAREKAWEWFDYLDNAIPWTRPEIRVFGRSAIQPRDVCYVADEGLTDLRYSGHQHLPHSWDEFPVLKDILKVVHEALPGSYFNSLLLNRYKTGSDYVSWHADDEPLYGPTPEIASVTFGCERDFLLRKKPTKSQATSGSGEAGRKRLKVDAPQKPHHFLLKHGSLLVMRGYTQRDWQHSVP

SEQ ID NO: 239003 - protein, 69 aa, Zea mays
  Clone ID: MRT4577_14955C.1.pep
KSPVFNSIKFSSFGPPSGPFGNSTHGEINSTQVFSIFQEACFGVKNFRGPGLSNYFGKPCTGVPKNPPV

SEQ ID NO: 239004 - protein, 61 aa, Zea mays
  Clone ID: MRT4577_149560C.1.pep
LRCVWQLQLFIETQIDVVSPPFSIRGSNTSSVTTLQLKAATSLIPPGSLGNVQENHVQAHT

SEQ ID NO: 239005 - protein, 74 aa, Zea mays
  Clone ID: MRT4577_149561C.1.pep
DLPMSSNLQDRLCLFWTNSTYARHSCVRHSGYSARYVGIGYTVQLHVCEYVPAPNVSVLPNGARFVFSPKKNKQ

SEQ ID NO: 239006 - protein, 211 aa, Zea mays
  Clone ID: MRT4577_149562C.1.pep
ARVPSRRALRCPSFLPSRRFPSPVRAPFPFPWPRAPGFPSTQPRPCSARRGRRSLTVLSSSSDWSMPRVRVSLCASLSARSRSAELDPCCALSPMPLPPCSFLSQARGRLARAPLLLQPIPRLPCPLHTRSSPQLSSVVVASRRSCSDSISPAPAPSRRLLEFVSLRPACSSWTRAAAHVQLPCRILFQLARDARRPACSARAAFGLPACP

SEQ ID NO: 239007 - protein, 45 aa, Zea mays
  Clone ID: MRT4577_149563C.1.pep
CRIEDSLSLSDLRLEKPMVYWPSYMLNIFLDYKKSYQYFCNSSRI

SEQ ID NO: 239008 - protein, 36 aa, Zea mays
  Clone ID: MRT4577_149564C.1.pep
SNKEIPTLTGGDDRIPGRCLYRRQGHVLGHSNRIYF

SEQ ID NO: 239009 - protein, 232 aa, Zea mays
  Clone ID: MRT4577_149565C.1.pep
RVRPRVREGRDDGALTDDELVTLCAELWNGGTDTTATAIEWGMARIVDSPSIQARLHEEVMQQVGDARPVDDKDTDAMPYLQAFVKELLRKHPPTYFSLTHAAVQPGCKLAGYDVPVDANLDIFLPTISEDPKLWDRPTEFDPDRFVSGGETADMTGSAGIRMIPFGAGRRICPGLAMGTTHIALMVARMVQAFEWRAHPSQPQLDFKDKVEFTVVMDRPLLAAVKPRNLAF

SEQ ID NO: 239010 - protein, 111 aa, Zea mays
  unsure (1)..(111): unsure at all Xaa locations
  Clone ID: MRT4577_149566C.1.pep
CDYFEGVXCDTRGRVGTMSLQGKGLAGAVPPADAMLPALTGLYLHYNALRGEIPRELAALTGLAELYLGVNNLSGPVPAKLGRLGSLQVLXLGYNQVTGSISTQLGQLNKL

SEQ ID NO: 239011 - protein, 690 aa, Zea mays
  Clone ID: MRT4577_149567C.1.pep
MVKWDGAEFQFLWGLSILVLFHSCQSMKNNSLKINLDFKQDKNFGEFIVHGLDDKRPGDQVLRVLSSLTTEVFFSNNFISVDICQQLLQALTYADCSSAPIIHLFTQIIRFCPDNFFEVEAFVFSAIELLSQYLGLILQCRDGSSQNNSSNTLISELSIASETMAYRIKGEYLWKLVMLVVSTSHQSFQQVSANLCFSNIICFLQNIFPFMRKIFRERVESDGECTSPKVVFGAMVGLVGYFYVECDKKISLLENKISDSYKLLNKILLFCLGEATALAKLVPEIIYRSENVSNNDVLLWGSFRLCVQVIQGSFRSTNIQVHMLGLQVLRSYAQKELTEGSETKLDSFMMLLTELLGDLFLVMETTLKECSNKKSVSVVDECLKLLFLFHTLAQSKKYRQDATTLLLEALLMVFSLSSDTVSQELAEVNTISRKLFSHFIQIPSVAIQIKDIMLSAPAERRLQLQDMVRASVSQGQITVPVATSAHSEQNIQDSCSKNPGSTSEASDCVATHGNNDNEVVDDDWDDDWDAFQSLPAIANDGVDSGEISLTTRYNEQIPQENSSYGSCNADITARAMEDITCVDKELEEPSDLQFSSTEQQPKHDLPGSSHEGCAKLERHPSVDCKEQLADDETADELQQQVHEDTDHVNKDSEVLSAEIHGVKLDILDEDVEDDSPMNSNNLSDIAEEES

SEQ ID NO: 239012 - protein, 42 aa, Zea mays
  unsure (1)..(42): unsure at all Xaa locations
  Clone ID: MRT4577_149568C.1.pep
GWNGLFIYFLXDWXFKSSWEPFFXECWILXLXNGIMGGDDLS

SEQ ID NO: 239013 - protein, 56 aa, Zea mays
  Clone ID: MRT4577_149569C.1.pep
IGRPFFFRLPFFFFFFFFFFFVFIFFFFFFFFFFFYFENFLSIGVIPGGITEFVPY

SEQ ID NO: 239014 - protein, 222 aa, Zea mays
  Clone ID: MRT4577_14956C.1.pep
MDQRKAIFRAKLRETKEKQQRRIDPALVRYNEFDQPICRVCNITLKSEALWPAHQVSRKHHEAKAAAADKATTLTGSRGSNAKLEQPLEPQERKSSTLPTKFFDNQGAKRKSDDTISEGRSVRHEVAVIQPKTIGASTDKSSVRMDQMSKKGSQSNTSVQGILPGNFFDYGEDEAPAPAPAPKELSTSQIHTKVKGVPDGFFDHNKSSSGMQPNEPSSEAAQ

SEQ ID NO: 239015 - protein, 93 aa, Zea mays
  Clone ID: MRT4577_149570C.1.pep
PTRSPTRALDQLKPRMYLGPGYIDLPEKLRNSNRSDQTEADITCHCMVMYNLSIALLWNCIIVCIFQDVHFMTSDGNSTVHTIWTGEIDLMTR

SEQ ID NO: 239016 - protein, 376 aa, Zea mays
  Clone ID: MRT4577_149571C.1.pep
MANEEKLFKMGNADTDTAALHNEWDDALCPICMDHPHNAVLLLCSSHDKGCRSYICDTSYRHSNCLDRFKKMKVNDGDSPSQSSSSMPRGTRNQNVVHRSRFGLTRESRRLHIDISEPDEASDHQDASHRPAAIVGEQEENSYNEGPDLTLETHEVGINGSSVSSDVSSLNQLLCPLCRGVVSGWKIIKEARQYLDGKSRACSREACMFSGNYREIRRHARRVHPTTRPADVDPSRRRAWHHLEHQRDYADIVSAIRSAMPGAVVLGDYAIEGGEIFSHDRETSEPSGSLLTTFFLFHMLSSSPIRSGDEPRGTSRGLRRQRRRYLWGENLLGLQYDDDDDDDDNEGEEDEVDAVDEVQRPRSRRRFIRSRSEERA

SEQ ID NO: 239017 - protein, 287 aa, Zea mays
  Clone ID: MRT4577_149572C.1.pep
MENKELFKMGSADTDTAALHKEWDDVLCPICMDHPHNAVLLLCSSHDKGCRSYICDTSYRHSNCLDRFKKMKVNDEDSPSQSSSSMPRGTGNQNVVQRSRFGPTRESPRLHIDISVPDETSDHQDASHRPAAIVGEQEENIYNEGPDLTLETHEVGINGSSVSSDVSSLNQLLCPLCRGVVSGWKIIKEARQYLDGKSRACSREACMFSGNYREIRRHARRVHPTTRPADVDPSRRRAWHHLEHQRDYADIVSAIRSAMPGAVVLGDYAIEGGEIFPHLHNVLGPLL

SEQ ID NO: 239018 - protein, 879 aa, Zea mays
  Clone ID: MRT4577_149573C.1.pep
MGPAKGSRTINKTTVKGYEDQQQHDDPSSSSKAKQKKRKISDLDPKWSKDELTRFYEAYRQHGKDWKKISIAIGGKSSDMVRSLYSAHRTFLSLPEHQATAMGFIALVTGHHNASEKTTSHRGYDHIARASGKARKHGEQQKSIDGPDLHNCHEGEITGFSASFKKRYYGELVRNSRNHAVQRRTPLIPVIAPADRSTIDEPTPGIENVINFNSTKRKYEAANHGCAVAPTNKYSSDRVSGFAETYKADQGHSYLDTMEIGDIAMCQQHFKKTRIQQTVEESQTGIVEHETTMASKEGNKLVSSVNNNQILIDSISEDDMLVLDVLNSLVNAPSKMSELEINIPSGSLGKTDSVLREEGHPTIDLSKQGKPVRKSSASKTRKKKPKKILGAEVPAEAQKKCDDNLVLPETLRVGITDDSSLCTDSGRARTPEASEDISAEVPNTQTEAKPEFIMSGRTRLKSQMHCKTKPMSCNEGSDNFQAKKLLHCLSSEPLRRWCTYEWFYSAVDYPWFSNNEFVHYLDHAKLSHLSRLTRSEWSAIRSSLGKPRRFSNHFLAVEKEKLEDYREKVRKIYAQLNDGSRDSLPADLARPFSIGQQVIVRHPSSRELCDGKVVMMGPDCYKVHFDDPDLGVDTVKDTDCMPVNWLHNRPDNMRRNYLSNDVYNILEMDHIPDLTPSENGNHAINGTTVFEELKSLRLTSDRQPKAESIIHSERPPYRSTSDGPTSSSGFSCPDNNAGHNGELESYVAAFFENSLSQARQMVDDYIQANSGGSDDEKVCMLNQVTGCLGSDSRGVQLPSDLISNCIATVISIKRLSDSRHPFGNVAGVLEHALSMLRPSCPQNLGVYTEIKRDLCTIANQIFALVPTASGNCSPPVSPM

SEQ ID NO: 239019 - protein, 60 aa, Zea mays
  Clone ID: MRT4577_149574C.1.pep
LKLGAASLVGGLPGKAHYHRKCLSEESCPKQFIFSGGGGAPPPRPGGIFRFFRGKRPFPP

SEQ ID NO: 239020 - protein, 117 aa, Zea mays
  unsure (1)..(117): unsure at all Xaa locations
  Clone ID: MRT4577_149575C.1.pep
GAGAHVLHVXQLGAAPAHYLTGEHPHHFRSATRVLSGXDPETFAENRELEVIHSRWAMLGASHCGLPELLARNGAWFGEAVWLKARSHLFSXGGLDYLXSPGLVHAQGLLCLWPWQA

SEQ ID NO: 239021 - protein, 56 aa, Zea mays
  Clone ID: MRT4577_149576C.1.pep
SCRFPVNCQGNPFPILGPGFKEDLLQRPSCRSKNGGSVDLSLKCSRAVCLAHRPLT

SEQ ID NO: 239022 - protein, 139 aa, Zea mays
  unsure (1)..(139): unsure at all Xaa locations
  Clone ID: MRT4577_149577C.1.pep
NTHTVDAAVIDAGTTARHDKYEIFVETLKGTXIAIKGHMSTTIDDVXAKIYHNERIPPYDEPVIFRGKLLDHAXTLQDYKIPTDATLHLELLLQGGIVQASLPHVLRMNNHHKMSCPKXYARVDARGDDXRNNKCGTSD

SEQ ID NO: 239023 - protein, 1301 aa, Zea mays
  Clone ID: MRT4577_149578C.1.pep
MSDETKNELKKRRASHNKENVVHHEYSKVLDPKERKRIRERARCATQTKEQRTLRNMKPFQKRARENYRIRQQVMLSKDSIAIENPTFTPELVWSSTDAEAPTGSLFSSELMAIPELIPTPFVPTPSVTEDVETKKLTKSPRRQRHLCTVPATNSDKMTEGVDVGKQHLTSSTITTNEDADETVLFKKDDDDEEGYLFAGQDGESGEDIEIDETQDAFTVNPDVPDLYDKVYSNIPKETHLLSTVADCDYCKAKKFQYEPPGFCCRNGQINLAAFETPLQLRRLWEFSDADARHFRDNIRFFNGHFSFTSMYCCLDSMTTNMDCGIYTFRAHGMMYHNVRSFGREVGAEHKHLELYFYDDDPSLEHRYRKCRQQQFEKDKVVIKQLVEILKGNPYSEHLRSMGHVDNIEDYHIALNLDQTLNQKLYNSPITSEVAAIWIEGSERRGQFSNSVMLHGKDRSSHGIRSYHGCYDALSYPLFFPKGELGWHANIPKSNVSMDEVDAYRDQHRRSDANNDDTERPSHLCVSVPDYYCYRFQICPSIFNPILHGKQLFQQFAVDTYIKIESSRLDFICKNQDRLRADLYKGLVDSLHEGENRADKIGKRTVLSTSFIGGPRDMRRRYMDAMALDRPDLVVRIFHAKLEELKKRLTKHHILGKIRAYVYVMEFQKRGLPHVHFLLIMQRKYKLTCPDQYDHLISAEIPDKKKYPELYKMVIKHMMHGPCGLLNPKCPCTKGRASCENHYPRAFSNATSQGKDSYPIYRRRDDGRKETVRGCELDNRWVVPYNPYLLRLFNCHINVEACGSIKAVKYLFKYIYKGHDRASVAVTDANKADGDVDEIKQYRDARWVTPLEALWRIFSFDLSQNSPPVMQLQLHLENMHMVSFHERAKVNHVVQRPGADRSMLTAYFEANGLHKEARGILYRDFPEWYTLQQGKVWQRRKRNTGGQVGRIVSAHPAEGERFYLRLLLNHVTGATSYADLRTVDGDTLPTFREAAQRRGLLEADDTIDECLNEAAIYQMPSALRRLFATILVYCEPNDVAELWQRHLDSMSEDYHCSTQSKIHVQQMVLIDIRNILQSMGKDIKTFPLPAIIDRYDDLHGTDREIYEEESIVPTTEDVALKETLNEEQRSAYDKILSVVDTNNGGVFFVDGPGGTGKTYLYKALLAALRSQDKIAVATATSGVAASILPGGRTAHSRFKIPLTIDDGAFKRKQFPIRLSFAMTVNKSQGQTIPNVGVYLPEPVFSHGQLYVALSRATARSKVKILAIPVHDEKKKKGVERNSAINGATYTKNIVYKEVLTS

SEQ ID NO: 239024 - protein, 75 aa, Zea mays
  Clone ID: MRT4577_149579C.1.pep
GWDMRGNLVGSRKVNRTDCLHGDLVCSSDTTHQVRSFLRPRILYPKWLHPGQITNASLTPEHPGLPLSMAYLCLE

SEQ ID NO: 239025 - protein, 158 aa, Zea mays
  Clone ID: MRT4577_14957C.1.pep
VKSPVQHVAFSPKDSNMFASAQDKTVKIWDWHSGNCKSTLSGHSDLVLCLDYFSQGDQLYLITGSRDKTAKIWDCKTRSCVRTLEGHTDVVNVACCHPDLLILITGSLNGSVRLWDLNRSTTFRYDLFDMNYMFLQVVTAPTATALAGRDSMSCADYY

SEQ ID NO: 239026 - protein, 1771 aa, Zea mays
  Clone ID: MRT4577_149580C.1.pep
MDPFNNNDVRPPLRELSSNTLEDDCPDVAIGDGSIIDCTIPCGITLGYNWLGGCDDARQRKRERERARYATMSDEKKNELKRRRQSSKNENVVHHERSKGASAQTGHQHDSNPSSEVLDARERKRIREQIRFATLTREQRALRNTTPCQKSARENYSRRQQAMLAQDSIAIENPKFTPELVWSSADSQPPTVSLSSSKDMVISELSATPFVYASLQTKDVDMDKMTQSPRRQRHEHHVSSGERQSLISRQNQKFQSAIRRNFATATRDHGMEGESTSPCPVTAPHSDIMTEGADVGMQRQITPNVTTNDADEGVLFVENHDEDVLFEDDDEEDGYLFAGQDGESIEDIEIDETQDAFTVNPDVPDLYDKVYSNIPEETHLLSTVADCGYCKAKKFQYEPPGFCCRNGQIDLAPFETPPQLRRLWECSDADARHFRDNIRFFNGHFSFTSLYCCLDSMTTNMDCGIYTFRAHGMMYHNVRSFGREVGAEHKHLELYFYDDDPSLEHRYRKCRQEQFEKDKAVIKQLVEILKGNPYSEHLRSMGNVDNIEDYHIALNLDQTLNQKLYNVPITSEVAAVWIEGSERRGQFSNSVMLHGKDRSSHGIRSYHGCYDALSYPLFFPKGELGWHANIPKSNVSMDEVDAYRDQHRRSDANNDDTERPSHLCVSVRDYYCYRFQIRPSIFNPILHGKRLFQQFAVDTYIKIESSHLDFIRKNQDRLRADLYKGLVDSLHEGENRADKIGKRTVLSTSFIGGPRDMRRRYMDAMALVRKFGKPDIFLTMTCNPNWDEITRELLPMQSPQDRPDLVVRIFRAKLEELKKRLTKHHILGKIRAYVYVVEFQKRGLPHVHFLLIMQRKYKLTCPDQYDHLISAEIPDKKKYPELYKMVIKHMMHGPCGLLNPKCPCTKGRASCKNHYPRAFSNATSQGKDSYPIYRRRDDGRKETVRGCELDNRWVVPYNPYLLRLFNCHINVEACGSIKAVKYLFKYIYKGHDRASVAVTDANKADGDVDEIKQYRDARWVTPPEALWRIFSFDLSQNSPPVMQLQLHLENMHMVSFHERAKVNHVVQRPGADRSMLTAYFEANRLHEEARGILYRDFPEWYTLQQGKVWQRRKRNTGGQVGRIVSAHPAEGERFYLRLLLNHVTGATSYADLRTVDGETLPSFREAAQRRGLLEADDTIDECLNEAAIYQMPSALRRLFATILVYCEPNDVAELWQRHLDSMSEDYHRSTQSKTHVQQMVLIDIRNILQSMGKDIKTFPLPAIIDKYDESHGTDREIYEEESIEPTAEDVAMKETLNEEQRFAYDKILSVVDTNNGGVFFVDGPGGTGKTYLYKALLAALRSQDKIAVATATSGVAASILPGGRTAHSRFKIPLTIDDGAVCSFTKQSGTAKLLQKASLIIWDEASMTKRQAIEALDNSMRDIMGRPGLPFGGRTVVFGGDFRQVLPVVRKGSRAQIVAASLRSSYLWESMCHLKLVQNMRAQSDPWFAEYLLRVGGGTEEANNDGDVRLPDEVCVPYTGNDCDLDRLIDDIYPNLNANMSNTSYITSRAILSTRNDWVDMINMRMIDRFQGEQMMYHSFDTAVDDPNNYYPSEFLNTLTPNGLPPHVLKLKVGCPIMLLRNIDPANGLCNGTRLVVRGFQKNSIDAEIVLGQHAGMRIFLPRIPLCPSDDEMFPFQFKRKQFPIRLSFAMTVNKAQGQTIPNVGVYLPEPVFSHGQLYVALSRATARSKVKILAIPVHDEKKKKKGVERNSAINGATYTKNIVYKELPIV

SEQ ID NO: 239027 - protein, 72 aa, Zea mays
  Clone ID: MRT4577_149581C.1.pep
CPHSHSTSTTPTCGAAAAAASPQLPAHFSSASSAGHSHGGCGSWAKCVCSPATHAGSIKCRLHRINSQGHCH

SEQ ID NO: 239028 - protein, 102 aa, Zea mays
  unsure (1)..(102): unsure at all Xaa locations
  Clone ID: MRT4577_149582C.1.pep
PLLATAMTMNHAGHPGPNHETFSRHHLFCSPQNSKPRCNLSFRPRAERVSGQNNGSQVLSAXGDVPQRSMFPPDFVFGASTSAYQIEGGWNEDGKGPSSWDY

SEQ ID NO: 239029 - protein, 71 aa, Zea mays
  Clone ID: MRT4577_149583C.1.pep
PRISPQTAPASSWGEYKDGPFPWIWLVTTASSTSRLVGVACEGLGGRQAQVLWVSSGDKRVCGRWHPSNSL

SEQ ID NO: 239030 - protein, 105 aa, Zea mays
  Clone ID: MRT4577_149584C.1.pep
MAIKHNQQIQKNHFHKDWQRYVRVHFDQPGKKKSRRNARVAKAAKVAPRPVDKLRPVVRCPTIKYNRRVRPGRGLSLDELKAAGIPPKYARAIGLSALPSRPRPF

SEQ ID NO: 239031 - protein, 65 aa, Zea mays
  Clone ID: MRT4577_149585C.1.pep
DEHHYDFTNGIQWGTIVQYLTRGEVGDKVLIGHMVENCGNLSGLNASTALTDIIDIIYQTTGLSG

SEQ ID NO: 239032 - protein, 212 aa, Zea mays
  Clone ID: MRT4577_149586C.1.pep
MVKARPKPTPVKAAPEVIFDPMASGARKPLRPGAPSASKEWHSFMGSSLSDMYRKPVLEKSADTSDEEPDIDIMKLLKDVEIIGAPTFKGRKQIENRRVVELGGKSVKKHRTPLSVAKPALKNQKKREQKKMEEEKLLGIFRKRDKDTKPHKTRPEDRVLRATEGRFRNGILNVKHLLAPPKPSGKDMSEPKMRKDKHKGKGKQKGGRRKRR

SEQ ID NO: 239033 - protein, 157 aa, Zea mays
  unsure (1)..(157): unsure at all Xaa locations
  Clone ID: MRT4577_149587C.1.pep
FDHEGXIHYDGMLIYTGMYEIIXSTDDIGVTRALESGVGLGKLSGRDAEISKLVEVGXYDISDEEFENYFMRYKEVGDKRKRVTDEDIKSLLSDGCSRRRLFVSLAGVLVDCGSLGLSTAAAKLIRSDVGGSMPCGLWIGPGGASYAVGALLLQIRT

SEQ ID NO: 239034 - protein, 213 aa, Zea mays
  unsure (1)..(213): unsure at all Xaa locations
  Clone ID: MRT4577_149588C.1.pep
MVKARPKPTPVKAAPEVIFDPMASGARKPRRPGAPSASKEWHSFMGSSLSDMYRKPVLEKSADTSDEEPDIDIMKLLKDVXESFGAPTFKGRKQIENRRVVELGGKSVKKHRTPLSVAKPALKNQKKREQKKMEEEKLLGIFRKRDKDTKPHKTRPEDRVLRATEGRFRNGILNVKHLLAPPKPSGKDMSEPKMRKDKHKGKGKQKGGRRKRR

SEQ ID NO: 239035 - protein, 58 aa, Zea mays
  Clone ID: MRT4577_149589C.1.pep
VDPHRVKSFSGPNDHSRDQSDESLSLARHSSMSFWYLHEVQKTEDWYKQFTDREEAES

SEQ ID NO: 239036 - protein, 37 aa, Zea mays
  Clone ID: MRT4577_14958C.1.pep
LDVAGLPLTITTRILRPRGLPSYDQRFYCARWVFYRN

SEQ ID NO: 239037 - protein, 166 aa, Zea mays
  unsure (1)..(166): unsure at all Xaa locations
  Clone ID: MRT4577_149590C.1.pep
NTNHQQLQEPGGKGLEISRSSTQAIDRPRAVGGALLVVARTAGTTDHRRRCQQYRASACMLPPHPPPRAPERRPEAAAAAEAVTASPATLPQLVVVAAAAAAVQLQLSCSRCWCCSWWWCWSRRRCWREGRRRRRARTWTGRGAGPRRRPRXGGGAAXPLXPEXPG

SEQ ID NO: 239038 - protein, 62 aa, Zea mays
  Clone ID: MRT4577_149591C.1.pep
IYNKYILLYFFFFFHYFFFFFFIQNPQLSCFICYKRSPCHTLYSLNNGNSVILLNIAFAIIQ

SEQ ID NO: 239039 - protein, 215 aa, Zea mays
  Clone ID: MRT4577_149592C.1.pep
MVVDAGVGVGGGGGGAGTCAVGGFVWDVLLWRRGRADVSACLLAGTVSSWLLLYGGYTLVSLASNVLLLLLTVLFLWAKAARLLNRPQPPVPELRVPQQAVDEAAALLRSALDAASDAFRDIALGRDSLLFYRVFLCLWSVSIVGSVTDFPTACYASVVAALTIPALYHRHQECIATYMSFAYMNLRMYEMAYERLSMKCFLKVRDWTMELLKDP

SEQ ID NO: 239040 - protein, 83 aa, Zea mays
  Clone ID: MRT4577_149593C.1.pep
GKLSGPSAPGSESHPSKVPQRSRIFHQPDDHVRQPQARCLVPPCRQCYHPRTVGPLRRALHVLNRSLPALIKDVRMTPLVLSS

SEQ ID NO: 239041 - protein, 876 aa, Zea mays
  unsure (1)..(876): unsure at all Xaa locations
  Clone ID: MRT4577_149594C.1.pep
MGSHDGEDEELPPPPXPVPPDVIPIKAEDAVGESPAKQILKPKRLLMDRPGIGRKGQPTQLYSNHFKVAVKSTEDVFFHYYVNLKYEDDRPVDGKGIGRKVIDKLQQTYRAELSNKDFAYDGEKSLFTVGGLPQKKNEFTVVLEDVSTGKTAANGSPGGNDSPGGGDRKRVRRPYQTKTFKVEINFAAEVPMSAIGQVIRGEVCLPPLDLGFGVXGCRGFHSSFRGTQSGLSLNVDVSTTMIVKPGPVIDFLLSNQNVNDPSRIDWQKAKRALKGLRIRTTPANSEFKIFGLSERICKEQTFPLRQRNGSNGDCDTIEITVYDYYAKKGIDLKYSGDFPCINTGKAKRPTYFPIELCSLVPLQRYTKALSTLQRSSLVEKSRQKPEERMTVLNDALQRSNYDSDPMLRACGVSVAPKFTQVEGRILQAPKLKAGNGDDIFSRNGRWNFTNRKFYETCSVNKWAVVNFSARCDVRNLIRDLMRNASAKGIQMEEPFDVFEESPSMRRAPVSRRVDDMFGQIKSKLPGAPRFLLCLLPERKNCEIYGPWKRKCLAEFGIVTQCLAPLRVNDPYLLNLLMKINAKLGGLNSLLQVEASSSIPHVSQVPTIILGMDVSHGHPGQDRPSVAAVVSSRQWPLISRYRASVHTQSARLEMMSSLFKPRGTDDDGLIRESLIDFYTSSGKRKPEHIIIFRDGVSESQFTQVINIELDQIIEACKFLDEKWSPKFTVIVAQKNHHTKFFQTASPDNVLPGTVVDSKVCHPKNFDFYMCAHAGMIGTTRPTHYHVLHDEIGFNADEMQEFVHSLSYVYQRSTTAISVVAPVCYAHLAAAQVSTFLRLEEMSDASSSQGGGHTSAGSAPVPELPRLHDKVRSSMFFC

SEQ ID NO: 239042 - protein, 294 aa, Zea mays
  Clone ID: MRT4577_149595C.1.pep
LGGLNSLLQVEASSSIPHVSQVPTIILGMDVSHGHPGQDRPSVAAVVSSRQWPLISRYRASVHTQSARLEMMSSLFKPRGTDDDGLIRESLIDFYTSSGKRKPEHIIIFRDGVSESQFTQVINIELDQIIEACKFLDEKWSPKFTVIVAQKNHHTKFFQTASPDNVLPGTVVDSKVCHPKNFDFYMCAHAGMIGTTRPTHYHVLHDEIGFNADEMQEFVHSLSYVYQRSTTAISVVAPVCYAHLAAAQVSTFLRLEEMSDASSSQGGGHTSAGSAPVPELPRLHDKVRSSMFFC

SEQ ID NO: 239043 - protein, 246 aa, Zea mays
  Clone ID: MRT4577_149596C.1.pep
QLQTFSVQQGSAMDTRLAPSSFGIPPASLQAIPYAMLLALVPAYELLLVPLARRLTGARAGIAPLQRIGVGLCLVALSMASAAAVERRRRDGGRRQQQQLSVLWLVPQFFVFGLSELFTNVGLMEFFYEQASSTAGTAAHMQAFFMAFFYCSFSFGFYLSSVLVSLVNRATAGGGRPGWLGDNDLNKDRLDLFYWVLAALSVLNFFCYLLCARWYNSGAAGSGPDGACAPGGEVASEEEDDGKGLI

SEQ ID NO: 239044 - protein, 173 aa, Zea mays
  unsure (1)..(173): unsure at all Xaa locations
  Clone ID: MRT4577_149597C.1.pep
MLVLVLAAAAAPGHVPSEDSVLSPTFSLSQLLLRIGRPRLDLLTNISGSESDRIAAAVWDVLLWRRGRADVSACLLAGTVSSWLLLYGGYTLVSLAXXVLLLLLTVLFLWAKAARLLNRPQPPVPELRVPQQAVDEAAALLRSALDAASDAFRDIALGRDSLLFYRVFLCLWS

SEQ ID NO: 239045 - protein, 32 aa, Zea mays
  Clone ID: MRT4577_149598C.1.pep
KKKKKKKKKKKKKKKKKKKKKKKTKKKKKKAA

SEQ ID NO: 239046 - protein, 331 aa, Zea mays
  Clone ID: MRT4577_149599C.1.pep
MGSYDGEDEELPPPPPVPPDVIPIKAEDAVGESPAKQILKPKRLLMDRPGIGSRHEPTQLYSNHFKVAVKSTEDVFFHYYVNLKYEDDRPVDGKGIGRKVIDKLQQTYRAELSNKDFAYDGEKSLFTVGGLPQKKNEFTVVLEDVSTGKTAANGSPGGNDSPGGGDRKRVRRPYQTKTFKVEINFAAEVPMSAIGQVIRGEESENSLEALRVLDIILRQHSAEQGCLLVKQSFFYNNPSCFVDLGGGVMGCRGFHSSFRGTQSGLSLNVDVSTTMIVKPGPVIDFLLSNQNVNDPSRIDWQKAKRALKGLRIRTTPANSEFKIFGLSERIC

SEQ ID NO: 239047 - protein, 48 aa, Zea mays
  Clone ID: MRT4577_14959C.1.pep
PCLIPTRVSLGPGVGLPSAPVSIITPRCRRACPSITHAGFVQAVLARL

SEQ ID NO: 239048 - protein, 71 aa, Zea mays
  Clone ID: MRT4577_1495C.1.pep
RELSKDPPSTSTAGSAQDDIFHWQLILMSPPNTSICSMMSSFGTCHLTTRLPFSPLQQVSYNMRATTSSDL

SEQ ID NO: 239049 - protein, 187 aa, Zea mays
  unsure (1)..(187): unsure at all Xaa locations
  Clone ID: MRT4577_149600C.1.pep
KFLPEKWSPKFTVIVAQKNHHTKFFQTASPXNVXXGNMFIFVIXKGVWXCGDNNKSRPPXAGTVVDSKVCHPKNFDFYMCAHAGMIGTTRPTHNQNQHDAIGFSADEMQEFVHSLSYVYQRSTTAISVVAPVCYAHLAAAQVSTFLRLEEMSDASSSQGGGHTSAGSAPVPELPRLHDKVRSSMFFC

SEQ ID NO: 239050 - protein, 97 aa, Zea mays
  Clone ID: MRT4577_149601C.1.pep
PCPCFCAPSVSVHIVRRLGSCQCASWHRDITTVSTCAWCPTVPQVVRSSCKSTVFPLVVRACCINRLGHCYSSQLGNGVGMGLVAISKETHERAAAN

SEQ ID NO: 239051 - protein, 78 aa, Zea mays
  Clone ID: MRT4577_149602C.1.pep
WKVSSILVQSEQSLIPCVQTLAIRHELADVDTCRRGVQDMGIALHYELRVAKSDRSRFIAKRSREGRPRRVHIGTCPG

SEQ ID NO: 239052 - protein, 105 aa, Zea mays
  unsure (1)..(105): unsure at all Xaa locations
  Clone ID: MRT4577_149603C.1.pep
KXXXKXYXIXCXXSFXIXVXFXXXFHXTXXKPIXXXIHSXHXXKSXXXKIIISYFGXXXPYLMQXXXVHXVPXKCYNIILXPIMKYNGIXXQAIXXGXXVXKSPX

SEQ ID NO: 239053 - protein, 75 aa, Zea mays
  Clone ID: MRT4577_149604C.1.pep
GGTPMFPGLADRMSKEIPPLGPSSMKIKGVAPPKKKYSVWIGGSILGSVSPFQQMWISKAEFPEFGPSLGPRKCF

SEQ ID NO: 239054 - protein, 227 aa, Zea mays
  Clone ID: MRT4577_149605C.1.pep
METGTLHSPTLPLRFTQSHTPADQPGARWHCGSAHTAMRKDAAAAGIAPGSAPAFLCFDLKPFLAALTVLTLLAAAWQLRPYQSLLASPFSAACPQPTAGVSLPRALAVHAKKGSSATNSTASSSPSPPPGPERREFHAVGSAAALFVQMGAYRGGPYTFAVVGLASKPTHVYGKPWFRCEWEPSDASSPPMRAAKTYHMLPDWGYGRVYTGGVGNCTFPRVPNADS

SEQ ID NO: 239055 - protein, 149 aa, Zea mays
  unsure (1)..(149): unsure at all Xaa locations
  Clone ID: MRT4577_149606C.1.pep
SSTHASTQPLHSWLALKEGMQSFVNTLSRKTITLEAEEXDTIHNAXALTQDRDXGVAPDQQMIIFAGKHLGDRRTLADCNIXQKESTIHLMLCLKGGMQIFVKTLTGKTITLEAESSDTIDNVKVKIQDMVGFPSDQERLILCWXQLED

SEQ ID NO: 239056 - protein, 57 aa, Zea mays
  Clone ID: MRT4577_149607C.1.pep
SFFPIEVFITACLPQASACPIVASCCYLIPAAGFAYKDQAALVSFHPPSQCWFHFVL

SEQ ID NO: 239057 - protein, 149 aa, Zea mays
  Clone ID: MRT4577_149608C.1.pep
MDHAADTFRTDLMTITRHVLNEQSRHPESRGDLTILLSHIVLGCKFVASAVNKAGLAKLTGLAGETNVQGEEQKKLDVLSNEVFVNALVSSGRTCVLVSEEDEKATFVDPKLRGKYCVCFDPLDGSSNIDCGVSIGTIFGIYMIKTQTP

SEQ ID NO: 239058 - protein, 123 aa, Zea mays
  Clone ID: MRT4577_149609C.1.pep
LCACTSAGGRACTRCSIVLTVGYPLCDALHAGGFLFYAAAVGGAIVTAASVSDAVVGHKYLMRPRFHADVGGVGAHGWAHRDDAACGSGPGECSGELMEGGGGCVDASDIVAAGLVEEAEAGI

SEQ ID NO: 239059 - protein, 73 aa, Zea mays
  Clone ID: MRT4577_14960C.1.pep
VTITIYVPEIGCLLCDSMSQDSCAGHRQSDMAIQKLCHATRDPISAHYQYILKSLVKESSCPLWDANDAVLDA

SEQ ID NO: 239060 - protein, 144 aa, Zea mays
  Clone ID: MRT4577_149610C.1.pep
GLRLAQKYAVRCGGGENHRFGLYDTVMLKENHIRAAGSLAAAVAAARRQWPALPLVVEVEDLAQLRQALEAGCERILLDDFSPDLRREAVRITAGRIPLEVSGSVGLGGLRSIAEDGVDCISIGGLTKHVQAIDLSLKLGPPPG

SEQ ID NO: 239061 - protein, 70 aa, Zea mays
  Clone ID: MRT4577_149611C.1.pep
RAHVTTTTTRCSDRERPIRARARRPGPQGKRRQRNGRRQRGISTARVGGRALRPGLLRREKAINGVRRRA

SEQ ID NO: 239062 - protein, 194 aa, Zea mays
  Clone ID: MRT4577_149612C.1.pep
LVDHVLIVTVDAGSFSGCKAVHPHCYLLEVKSMDMNRAKTFGTPEYVEMIWLKLSIQQRVLELGYNFLFTDADILWLRNPFQRISVYADMSCSVDNSKMAPALLDCENNVGFYYMKSTNRSVEMVRYWRAARARFDGNLIEQVVFNKIKYELISRLGARIQPLETEYISGFCDFQDHFDRVCTVHANCCMGLEN

SEQ ID NO: 239063 - protein, 48 aa, Zea mays
  Clone ID: MRT4577_149613C.1.pep
ILVGCSCELAMSIFNQALPAMQHKRDQVWPCPVSKNGDQQMVLASCRI

SEQ ID NO: 239064 - protein, 170 aa, Zea mays
  Clone ID: MRT4577_149614C.1.pep
MATVMQKIKDIEDEMSKTQKNKATAHHLGLLKAKLAKLRRELLTPTTKGGGGAGEGFDVTKSGDARVGLVGFPSVGKSTLLNKLTGTFSEVASYEFTTLTCIPGVIMYKGAKVQLLDLPGIIEGAKDGKGRGRQVISTARTCNVILIVLDAIKPITHKRLIEKELEGFAI

SEQ ID NO: 239065 - protein, 106 aa, Zea mays
  Clone ID: MRT4577_149615C.1.pep
ACKLQATFVFYYDLGKHTKAETYHLFFFKTTGSLGGEAQRPTFTGYSTSQRRLFTSISPEPFKKTSAEALSQRAPFGRVVAGTSTHGGSVDGSARRATGGFVGGTP

SEQ ID NO: 239066 - protein, 71 aa, Zea mays
  unsure (1)..(71): unsure at all Xaa locations
  Clone ID: MRT4577_149616C.1.pep
DXXLFXXSHKDIXTLYXLFGAXAXIXGTAXXXXIRAEXGXXGXLLXNXHIYXGIVXAHAXVIIXFIVIXXI

SEQ ID NO: 239067 - protein, 108 aa, Zea mays
  Clone ID: MRT4577_149617C.1.pep
MGASDSQYAPFGVKKINDNAYAIDLLVEYGVSSSFNGVDLKPYAGKDEDLSWRTTSIQEGEDDEDLNPNKGVATPTEPAQAPPGLLTRARARELNFVMILKNEGPEVS

SEQ ID NO: 239068 - protein, 79 aa, Zea mays
  Clone ID: MRT4577_149618C.1.pep
IPPRPLFPSPIQSRAPSLFPLYPHISHILFPHQPPIIFPKSHPPFQNSFNKFTKFIQTPTLNRTPNFFFNPQKTRFVFL

SEQ ID NO: 239069 - protein, 200 aa, Zea mays
  Clone ID: MRT4577_149619C.1.pep
MMTHEWAANLALAGLSLAPLVVNVNPNVNVVLTACLTVYVGCYRSVKPTPPSETMSKEHAMRFPLVGSAMLLSLFLLFKFLSKDLVNAVLTAYFFILGIVALSATLLPSIKRFLPKEWNDNLIVWRAPLFHSLSVEFTKSQIVASIPGFFFCLWYASKKHWLANNVLGLAFCIQGIEMLSLGSFKTGAILLGGLFVYDIF

SEQ ID NO: 239070 - protein, 85 aa, Zea mays
  Clone ID: MRT4577_14961C.1.pep
LPFHVQGVENFVFFLRQHQLLPFYPRVVGNINAFLHQQQLLPFYPHNVANIVAFLQQHQLLPFSHHALANPPPLLQSPPIGGAIF

SEQ ID NO: 239071 - protein, 347 aa, Zea mays
  Clone ID: MRT4577_149620C.1.pep
MRAHERAASLALACLSLAPLLVNVNPNVNVVLTACLTVYVGCYRSVKPTPPSETMSKEHAMRFPLVGSAMLLSLFLLFKFLSKDLVNAVLTAYFFILGIVALSATLLPSIKRFLPKEWNDNLIVWRAPFFHSLSVEFTKSQIVASIPGFFFCLWYASKKHWLANNVLGLAFCIQGIEMLSLGSFKTGAILLGGLFVYDIFWVFFTPVMVSVAKSFDAPIKLLFPTADAERPFSMLGLGDIVIPGIFVALALRFDVSRGTKKRYFNSAFLGYAVGMTVTIVVMNWFQAAQPALLYLVPGVIGFVAVPCLWYGEVKQLLEFDESKTESEEGSTEEEQDDDSSKGNKKVD

SEQ ID NO: 239072 - protein, 54 aa, Zea mays
  Clone ID: MRT4577_149621C.1.pep
KSHILSARCVAINRGLEEDISSLLVQPRSCTCQRVTASSLGVLSGGIVVFPPLR

SEQ ID NO: 239073 - protein, 89 aa, Zea mays
  Clone ID: MRT4577_149622C.1.pep
KTGEMPELIRVPHPQLSVLLDKKAKIKISMEIGKSGRSPPVGGSLQSRILVLLWVLGARPSRSVALSELLASRLPDGHWDFFPRLLYYV

SEQ ID NO: 239074 - protein, 679 aa, Zea mays
  unsure (1)..(679): unsure at all Xaa locations
  Clone ID: MRT4577_149623C.1.pep
MAASLLLRAVRRRELASPLGSLGANLQSTCAANICSKWGNFARPFSAKAAGNEVIGIDLGTTNSCVAVMEGKNPKVIENAEGARTTPSVVAFTQKGERLVGTPAKRQAVTNPQNTFFGTKRMIGRRFDDPQTQKEMKMVPYKIVKAPNGDAWVETTDGKQYSPSQVGAFVLTKMKETAESYLGKSVSKAVITVPAYFNDAQRQATKDAGRIAGLDVERIINEPTAAALSYGMNNKEGLIAVFDLGGGTFDISILEISNGVFEVKATNGDTFLGGEDFDNTLLEFLVSDFKKTEGIDLSKDRLALQRLREAAEKAKVELSSTSQTEINLPFITADASGAKHLNITLTRSKFESLVHNLIERTRDPCKNCLKDAGISTKEVDEVLLVGGMTRVPKVQEVVSEIFVKSPSKGVNPDEAVAMGAAIQGGILRGDVKELLLLDVTPLSLGIETLGGIFTRLINRNTTIPTKKSQVFSTAADNQTQVGIRVLQGEREMAADNKLLGEFDLVGIPPAPQDLPQIEVAFEXIDCNGIVTVAAKDKAPGKEQNITIRSSGGLSEADIQKMVQEAELHAQKDQERKALIDIRNTADTTIYSIEKSLGEYRDKIPAEVASEIEAAIADLRQEMASDDIEKIKAKLEAANKAVSKIGQHMSGGGSGDSQSGSGPQGGGDQAPEAEYEEVKK

SEQ ID NO: 239075 - protein, 56 aa, Zea mays
  Clone ID: MRT4577_149624C.1.pep
SDDIEKIKAKLEAANKAVSKIGQHMSGGGSGDSQSGSGPQGGGGQAPEAEYEEVKK

SEQ ID NO: 239076 - protein, 269 aa, Zea mays
  Clone ID: MRT4577_149625C.1.pep
GSNNRWQAVGAALQGGILRGEVKELLLLDVTPLSLGIETLGGIFTRLINRNTTIPTKKSQVFSTAADNQTQVGIRVLQGEREMATDNKLLGEFDLVGIPPAPRGLPQIEVTFDIDANGIVTVSAKDKATGKEQNITIRSSGGLSEADIQKMVQEAELHAQKDQERKALIDIRNNADTTIYSIEKSLGEYRDKIPAEVASEIEAAIADLRQEMASDDIEKIKAKLEAANKAVSKIGQHMSGGGSGGSQSGSGPQGGGDQAPEAEYEEVKK

SEQ ID NO: 239077 - protein, 326 aa, Zea mays
  Clone ID: MRT4577_149627C.1.pep
MNVGHAAHLSGQTAHMNQVPGSGVGIGVGGSDGLPQHQPMQEMAALSGMDQQFVMLRTAMRDKISDYIGRKQSPGDWRKRLPELAKRLEEILYRKFPNKHEYYNMMKGPVEPQLQFAIKTLSAQNQHNQQNPQMTRQISSSSSYGAMIPTPGMTQGTSAGSRTPYVTETNALSSSGACMVPQNANMGTSMQGPMSNGYQHLNTNISQNSTTNNVESTMGSVGVQRQLSHMIPTPGFSNQQNVPSNPDYSNGTGYFNGESAVAPHMQHQKQFPSNHNSNQIQHIGGHNNSGIHSSLLDNSSAYGLSDGHMNGGIGVHGSNMQLTNRT

SEQ ID NO: 239078 - protein, 189 aa, Zea mays
  unsure (1)..(189): unsure at all Xaa locations
  Clone ID: MRT4577_149628C.1.pep
AKDNQKXIHSNERCAAGIXQAIDTFKLGPNISPRDLQFPYAKGASFXPTDAVVKFYVLYEKWRRAEVPKSDSVIKYFKNITHANGVTIHPAGLELSLHASIDALGSCYGDKEGRKYRAWVDRLFITQTGSDSWVGRFDLWESEGDVRVCSLSSLALILKAESPEGFVLTHIQKTWLNGYSSGVEQAFKL

SEQ ID NO: 239079 - protein, 78 aa, Zea mays
  unsure (1)..(78): unsure at all Xaa locations
  Clone ID: MRT4577_14962C.1.pep
VXVFIRRRSSRSFPKGQSSSSISPQPNSKSQRAKLSRDVLACVKGVEGSGVRALAPRHRKVLACIILLHNLVAHLQVA

SEQ ID NO: 239080 - protein, 73 aa, Zea mays
  Clone ID: MRT4577_149630C.1.pep
KSVSCIQKKKKKKKKKKKKKKKKKKKKKKKKKKKKKKKKKKKKKKKKKKKGGGRFLGDQIFLPGVCKLKVFLW

SEQ ID NO: 239081 - protein, 131 aa, Zea mays
  unsure (1)..(131): unsure at all Xaa locations
  Clone ID: MRT4577_149631C.1.pep
YIINGTLRTNKGTQHTCELEVLDLCAEXATATIXPKCSXAAIAILLSTYISPAENQMCENPVVETXKMQQAIATSIIPLSPMVIQQPSALXQQLPLVHWVAQKIKVQQLQQLVLANFAVYFXQHQLFSFNQ

SEQ ID NO: 239082 - protein, 48 aa, Zea mays
  Clone ID: MRT4577_149632C.1.pep
VAYLSVRMYHVTIDHDDVNGLAVHRDFISCVLQHCWKASQSSLLLCVI

SEQ ID NO: 239083 - protein, 31 aa, Zea mays
  Clone ID: MRT4577_149633C.1.pep
TGALWRMDLERRGTRWRLTSCHTEMDDSMHF

SEQ ID NO: 239084 - protein, 140 aa, Zea mays
  Clone ID: MRT4577_149634C.1.pep
MVEELWWEEVEEHRWERWRSSSEPSVTMSESRSKLMPRAAGPVKVLKNNDNAYVLGLLMEYGVSSSFNVADLKPYAGEDEELPSRTTLIQEGEDDEDINPTKGMATPTEPAQAPPGPLTRARARELNFVMILKDEGPEVS

SEQ ID NO: 239085 - protein, 26 aa, Zea mays
  Clone ID: MRT4577_149635C.1.pep
SNLKSSMCPLSLFTYSGSNHMIGIVI

SEQ ID NO: 239086 - protein, 39 aa, Zea mays
  Clone ID: MRT4577_149636C.1.pep
TYPISINNPLYVYKTLSIVSYIITFNNFLYPLHYTHFTT

SEQ ID NO: 239087 - protein, 221 aa, Zea mays
  Clone ID: MRT4577_149637C.1.pep
MAASPLPRWAPTPSPTRPLRVSSAGDQTAVSWSSWSWAFCRSFIGSAVVYPPWRRSTPPPPPAGDPAAANAAADDGRRHGRFCSHPLDCVGARDCSLPEDGGGGREVFLTWEDLSVTASSSTGGKAKPAVILDKISGYARPGEVLAVMGPSGCGKTTLLDALAGRLGSDKKRTAGNILINGRREKLAFGTSAYVTQETLLMATLTVTEAVHYSAQLQLPDS

SEQ ID NO: 239088 - protein, 171 aa, Zea mays
  unsure (1)..(171): unsure at all Xaa locations
  Clone ID: MRT4577_149638C.1.pep
GRVGKHLGANLKDILRVPDTFLEPGSIILNGSNLAAKRGERLAVAGFYGFLKNLAKAKWLGDFSQQRTVLAIDGGLSKHYRRFSACLXATLTDLLGKEVAXWVVAKLANDGSGIGVALFVVSPSQFVEAAYFRSSGVLVYLFFCFPPFPPSMEKPPSCDWHFFFFFPSRGI

SEQ ID NO: 239089 - protein, 68 aa, Zea mays
  unsure (1)..(68): unsure at all Xaa locations
  Clone ID: MRT4577_149639C.1.pep
SGSVCLXVVXRPWGPVFALVPVFAVFLPXLLLCPGPSGPLXXXXAALXXRXRPAXXXXVGSLPGRPLR

SEQ ID NO: 239090 - protein, 91 aa, Zea mays
  unsure (1)..(91): unsure at all Xaa locations
  Clone ID: MRT4577_14963C.1.pep
CWVIVXRSNAPILYTDPTLGGSLMRDGTEYVTRYSRKSLPVLPSAGEPINPSAWRXFYNTAEDSRGPIYTLWRTEXGGFMITPMAGACPEK

SEQ ID NO: 239091 - protein, 35 aa, Zea mays
  Clone ID: MRT4577_149640C.1.pep
CAGTECVPLAIEPVHMLEAPLFASLFGMTLSAKTP

SEQ ID NO: 239092 - protein, 81 aa, Zea mays
  Clone ID: MRT4577_149641C.1.pep
SVKHVIAVCNTICSITSTVQFITCVVSHRGLHKAHLLVNIPHIRMAICFIVNFNLSSTSYCEHREVSGKITHSSSHTSAEA

SEQ ID NO: 239093 - protein, 344 aa, Zea mays
  unsure (1)..(344): unsure at all Xaa locations
  Clone ID: MRT4577_149642C.1.pep
MWESVALTLAGTAGNNIGKVLQKKGTLILPPLSLKLKVVKAYASNQLWISGFLMDMCGAALMLTALSQAPVSVVQPIAGCGLAILCVFSHFYLKEVMNGLDWIAITLAGLGTIGVGVGGEEQKVDQIPLLNIPWLVLSIVILFVXAQHLASYVXKKQRREQELTGPEVIEEIIYGLESGILFGISSVISKMGFVMSEMGFPKIVVPAAISCSVCCSAVGFVYQTRGLKHGRAIVVSTCTSVASIVSGVVAGMIALDEHLPKAPTARFFLLLGWFFIITGVILLVSSTRLIARLPRSVQKYLKSNIERTHSIRRPGSARGKDPIPTTTIHTSSLHLLASPTKEKA

SEQ ID NO: 239094 - protein, 80 aa, Zea mays
  Clone ID: MRT4577_149643C.1.pep
RWVDPRVRNSNKLVFNGHEIYPSAVVSKPRVDVQGGDLRSFFTLVMTDPDVPGPSDPYLREHLHWIVTDIPGTTDASFGR

SEQ ID NO: 239095 - protein, 53 aa, Zea mays
  Clone ID: MRT4577_149644C.1.pep
MAATIQSEKARQIFDRRGNPTDQVDPVCLDRTFARAAVPSGALTGVYEALEVR

SEQ ID NO: 239096 - protein, 76 aa, Zea mays
  unsure (1)..(76): unsure at all Xaa locations
  Clone ID: MRT4577_149645C.1.pep
KKLFAEEVICTGNTMLLPPLSVAPDGFVLWGNILLARKPTYSAWVTSISSNLNQVKCQRENLFWGLFTXLSGLCIC

SEQ ID NO: 239097 - protein, 157 aa, Zea mays
  unsure (1)..(157): unsure at all Xaa locations
  Clone ID: MRT4577_149646C.1.pep
HAPPAARDAHRAARAEQXEKXXXKQXKGGXSAKKXGKXKKPGKGGXXTRKSXGXXXKTAREAXEGTNXDKKXRSTGTAASRGRXXXGTXHXXKKNRTTXXRRNERHPAKKDQRXEKRHRNKPAHSPPSPREKEGDQDSXGQXRPPTKXARKGGKDRP

SEQ ID NO: 239098 - protein, 65 aa, Zea mays
  Clone ID: MRT4577_149647C.1.pep
VQVLAFPSFSKSCVFINPGGVYPLSSGLEVGPLQKTKSRGFGVVFVPPGWFSFCFTKCKFSLENK

SEQ ID NO: 239099 - protein, 40 aa, Zea mays
  Clone ID: MRT4577_149648C.1.pep
PPPPCGLDLAPATRCLLSQGPSSIAKHLLFICLWNTPHIP

SEQ ID NO: 239100 - protein, 132 aa, Zea mays
  Clone ID: MRT4577_149649C.1.pep
AKPGVTLFSPVEVLGPKMFPPGNCFRQKSCPLFFFLANRPFLPLFFFKKPQFRALFFFSPRFFGFPMGVAFISVPPPPKFTLFFGVLKPFFPFFGERLFPVPGAVFPFVWGPPPPPFGGGWKTLFFLLPAFF

SEQ ID NO: 239101 - protein, 67 aa, Zea mays
  Clone ID: MRT4577_14964C.1.pep
SRHKMIGVCGFGFVSRRRVKRSFLAAAHNQSLGIFIWIGFNWLSLPMLCLKYPHITVIFPVVDPFNP

SEQ ID NO: 239102 - protein, 33 aa, Zea mays
  Clone ID: MRT4577_149650C.1.pep
PYISLFPGCSNLDPQPQCLPPGYAFSAYILRVL

SEQ ID NO: 239103 - protein, 72 aa, Zea mays
  unsure (1)..(72): unsure at all Xaa locations
  Clone ID: MRT4577_149651C.1.pep
FTTSYLPSPITDFPLNNQLNPLENITTYYILTHITTFTLIRSLPTXIKXCPLTPPQSLNNPYIQITTIISSP

SEQ ID NO: 239104 - protein, 50 aa, Zea mays
  Clone ID: MRT4577_149652C.1.pep
LSPEKPAQSSLCTPCLDDAGPAVQSGAGGDAGGAESCVGGTCARRCRVGL

SEQ ID NO: 239105 - protein, 176 aa, Zea mays
  unsure (1)..(176): unsure at all Xaa locations
  Clone ID: MRT4577_149653C.1.pep
FWEDMMREHSLLQGTCDDLFDHIDDLLDFPSEDSAVAVLLVDMPVSGSPLSASIINXPRRQVTLVPPAAPGQYDASAXLLHRHGELCVQDQGLRARHXASCDDIDMDMAKLEWLSGLLYDASIPQDTVLSGSSAGGAAAIMKSSALSAGALLAADKMYDALLFSXSSTISVLEPAV

SEQ ID NO: 239106 - protein, 51 aa, Zea mays
  Clone ID: MRT4577_149654C.1.pep
IFTGTQHISTYSSQKHLDYKIHKMLVFLPFYSHLLRELHVKSFYVSKFQHN

SEQ ID NO: 239107 - protein, 45 aa, Zea mays
  Clone ID: MRT4577_149655C.1.pep
NKASRGEELTEKSCSVIVTQQNRISFRVQAVGHSVVSLAQCMLCS

SEQ ID NO: 239108 - protein, 99 aa, Zea mays
  unsure (1)..(99): unsure at all Xaa locations
  Clone ID: MRT4577_149656C.1.pep
SGNPXQVYIAEMNYYSIAPYQLDFSCKGFGSLXKTGLNDKIRHCGIMDVQFRKVRCKYPAGQKIVFHIEKGCNPNYLDVLGEYVADDGDIVLMEIQDKL

SEQ ID NO: 239109 - protein, 101 aa, Zea mays
  Clone ID: MRT4577_149657C.1.pep
PQKAPGQKMPASGYRQKAPPRGPGGALRKLPPLLGPLGVPREAGKKFAPPWVCPLFRKGLACPEAAPPFFLFAKKPQFWAGPLGLRFPVEGSKWKPPFCRS

SEQ ID NO: 239110 - protein, 103 aa, Zea mays
  Clone ID: MRT4577_149658C.1.pep
SHMQRVQEQPPMMDHNPTVVKEINMGRISLGPTYLMISLALISTFRHPRCVLFVLQGMHYVLVNLLLPLLHHGALRNTASLTCPFAFIDQTHFPLSSCKRHAV

SEQ ID NO: 239111 - protein, 46 aa, Zea mays
  Clone ID: MRT4577_149659C.1.pep
HLYPGGFLTEQGQSQKPLKAIPPRGGPLPFLRARFSQFGNLQTCPK

SEQ ID NO: 239112 - protein, 102 aa, Zea mays
  Clone ID: MRT4577_14965C.1.pep
SSFLPSKMLWLAAPMLRLRMAEEELVSAGQGILLWACPAQLLENSHICSPNGQSFITSHRQDVKNWSVTARETASTIRERVTTTVNAVEKHEPFSLSLFPAL

SEQ ID NO: 239113 - protein, 53 aa, Zea mays
  Clone ID: MRT4577_149660C.1.pep
NEFRFNYKKSIMLQERVRKLGTYKTPAPLYFFFFIKIKFFYIIFYFFSNASLP

SEQ ID NO: 239114 - protein, 81 aa, Zea mays
  Clone ID: MRT4577_149661C.1.pep
IDQSCKMSSRIHSISATTLGQQTLTYNHNLGLPINTLTPLKHTFRKLKRNGPSGRAKKRLHYQRRDGTKPDDDKALGGRSI

SEQ ID NO: 239115 - protein, 171 aa, Zea mays
  unsure (1)..(171): unsure at all Xaa locations
  Clone ID: MRT4577_149662C.1.pep
PRVRDIRSTIEDHVRGFTEPTSDKLLPDLLPQDQHVFTLVLDLNETLVYSDWQRERGWRTFKRPGVDAFLEHMSKLYEVVVYSDQPPMYVEPVFERLNSRGTISHRLSRPATKYVDGKHYRDLSKLNRNPAKXIYLSAHALESCLQHENCVEIKPFKLEDKNDTQLLDLIP

SEQ ID NO: 239116 - protein, 240 aa, Zea mays
  Clone ID: MRT4577_149663C.1.pep
MSRLLLRHRSFLLPGARSDASHPFTAASSSSRSSYTSRFSPLAYHASAAATAAGAQSEGAAAESTPAAGDQPSSTPPPAARGRWGLLKFGALAAVAGAIGGVGYVTYAYSLNEVEEKTREFRKNPRLLIPEDASTFEKYKAMVYSTAMKVPVSAIELYLDIRSTIEDHVRGFTEPTSDKLLPDLLPQDQHVFTLVLDLNETLVYSDWQRERGWRTFKRPGVMRFWTYVKLYGKCVVSDQP

SEQ ID NO: 239117 - protein, 236 aa, Zea mays
  unsure (1)..(236): unsure at all Xaa locations
  Clone ID: MRT4577_149664C.1.pep
PLFLRRRLGVQAVVQCLVSPYRFKNHGANDVHSCLYIPFFAKRERGWRTFKRPGVDAFLEHMSKLYEVVVYSDXHLWLVDLFXHLDYYLMXNLYEYFVGVQYVEPVFERLNSRGTISHRLSRPATKYVDGKHYRDLSKLNRNPAQVIYLSAHALESCLQHENCVEIKPFKLEDKNDTQLLDLIPFLEYVAMARPSDIRTVLASYQGHDVAAKFIERSKEHQRRVQEQSKLGRLWRR

SEQ ID NO: 239118 - protein, 159 aa, Zea mays
  unsure (1)..(159): unsure at all Xaa locations
  Clone ID: MRT4577_149665C.1.pep
KARAEAPPVRPREAYKQVQNFDWSSGADWKTAANILFTVPPKRKEFGXVYLVAQYARREIKRMEGEAEEKRKKDEELEKQKQVEEESAKEDADSKLSKVLDRLDTLEGVVKEIVDDKRKLSSPDLPTKEEVAKKNEASPAKASDSRSYGQPVVAANSKD

SEQ ID NO: 239119 - protein, 188 aa, Zea mays
  Clone ID: MRT4577_149666C.1.pep
KKRLSTSDFEGNVRNHQESSDNTKAKDCSPIISQHEKALQDIYPDDETIGSIIRNVKKKRLVTSNFSANVEAQESLRNINPQDETGGSKIMDASVNHGSDPVNNSGNTVEDELLDDFEIELVNNGGNTVEAELLDDFEVELDDHEHTGQRIPDDEIMAESGKATNSDAKGRAGLKRRPRMVIDDEDDD

SEQ ID NO: 239120 - protein, 247 aa, Zea mays
  Clone ID: MRT4577_149667C.1.pep
MLPALRPRRRLPVASLLRRLLSDSTPSSSGTGESDLMAAAAAKARAEAAARARVEAYKQVQNFDWSSGADWKTAANILFTVPPKRKEFGLDFHLVQLFFVCMPSLAVYLVAQYARREIKRMEGEAEEKRKKDEELEKQKQVEEESAKEDADSKLSKVLDRLDTLEGVVKEIVDDKRKLSSPDLPTKEEVAKKNEASPAKASDSRSYGQPVVAANSKDTNYASNAPANTAKPNNKGIGDKAFPVESES

SEQ ID NO: 239121 - protein, 105 aa, Zea mays
  Clone ID: MRT4577_149668C.1.pep
THESTHASAKSTVTWTALISGYAQDNQVEPCLHLFALMRQSVCKPNDTTFGGILIVCTNHPFLVLGKILQPQQLKMGFGSNFNFSIPLTPFYPNSGTMCKPQLFF

SEQ ID NO: 239122 - protein, 100 aa, Zea mays
  unsure (1)..(100): unsure at all Xaa locations
  Clone ID: MRT4577_149669C.1.pep
PRPXLVGSRRXXPGXRVGPWRSAGWLARXXPPCRXGSAPPPPGVRPSSGLXCXAGGXSPARLXVRGLXLXLGPPLLPSFSAPAPAAASPPPSACPWXXVR

SEQ ID NO: 239123 - protein, 210 aa, Zea mays
  unsure (1)..(210): unsure at all Xaa locations
  Clone ID: MRT4577_14966C.1.pep
MADKATVVPPRDPWPFSTITVEELEALITDGLIHPLSDRPQPEWMAPRSEANPTPPLGYVVSFIPFHERGFGMPASHFMRALPHYYRVELHNFNPNSIAQPAIFAAVCEGFLGIHPHWDLWTHLFSEEFFAASTDVKKVRMVVRAGGCTHQLRSGQAAQYIPASIVSSNKGWQNQWFYLRNDDRMLPPFSQRVVTAAGNNWRWGXPHART

SEQ ID NO: 239124 - protein, 41 aa, Zea mays
  Clone ID: MRT4577_149670C.1.pep
NLLGMRFPKFFILTIQMVMSLIMLVKIYIPCVPATPGGFFF

SEQ ID NO: 239125 - protein, 48 aa, Zea mays
  Clone ID: MRT4577_149671C.1.pep
LNNKKRCSLHLQRITAICNLKLMGRKPLPYKTAPAVCPQPKSTPHACT

SEQ ID NO: 239126 - protein, 47 aa, Zea mays
  unsure (1)..(47): unsure at all Xaa locations
  Clone ID: MRT4577_149672C.1.pep
GFVTFRAPHAAMRACVDPAPGMDGRRGNXNLVLLGVKRPRTDTPLYG

SEQ ID NO: 239127 - protein, 103 aa, Zea mays
  Clone ID: MRT4577_149673C.1.pep
ELEWNIKWTEILSALPSSLMTKETQKIARLFKKVIIRRKRIEGTNVEYLLDFGKRENIPPVISKHGPKLQESSSERNRYWLSKVHVPLNLLKAYKAKTLAGLL

SEQ ID NO: 239128 - protein, 30 aa, Zea mays
  Clone ID: MRT4577_149674C.1.pep
YFMSDAYMACDQQYKFSVDVKEAETDSDSD

SEQ ID NO: 239129 - protein, 111 aa, Zea mays
  Clone ID: MRT4577_149675C.1.pep
IKLVKTTFFSARSSLNRIIHTVHCNKNSQKKSPANKPNHYFEPLRAQNFYRWPYSRKFDRRDPTSLGTKNTTPRVQTPLKKNGGAQPEPLKQERAGYTNKKKRFFILQKNP

SEQ ID NO: 239130 - protein, 129 aa, Zea mays
  Clone ID: MRT4577_149676C.1.pep
SAVTRLCVNRKEAAQDQKSTRHRTPPPERSQRQRPIYPTDGLLHCDSHRSMCLAILSLAVLTAAGDEQFEASPGQCIPSQQHSHLNWLINQEVKHAENPCKPLCQQQYTMLQHCNRQKESNQGQYSLRS

SEQ ID NO: 239131 - protein, 76 aa, Zea mays
  Clone ID: MRT4577_149677C.1.pep
PTMWSYKTTPVRLAMKTTTTTTTSAGRYEPRSPAQLHACHPFHLLPDLQPPSQPPIIYLVRISLVNPFFRGISKKS

SEQ ID NO: 239132 - protein, 72 aa, Zea mays
  Clone ID: MRT4577_149678C.1.pep
KHPHVDSVCFVYRYSSDHEVWPHVMVGESLYRMPQFFLQRVHGRRKVVIPLRGLLWYGHVVLDNRFESVLGV

SEQ ID NO: 239133 - protein, 181 aa, Zea mays
  unsure (1)..(181): unsure at all Xaa locations
  Clone ID: MRT4577_149679C.1.pep
DFLIHSPLPAPIELLPPHHRAHGVTTLTDDRIAESKEAFRLFDKDGEGRITTXKELGTVVRSMGENPTEDELQDMINEVDDDGNSTIHCPEMLNLMGRICXHDTDSEEELKECLTVCLDKDQKGCISAAELRHGMTNLGEKLTXDEVDEMIRXADADXDGQINYEEIVKVMHGQERHRTII

SEQ ID NO: 239134 - protein, 200 aa, Zea mays
  Clone ID: MRT4577_14967C.1.pep
PRVRPKQIRERGANNITEVSGYPHVRPTALHVQNSSTSNVSQFDTPSPAAAQTSIMPPPRGRNVHAYQNTISGDAPTKQKANGVSQPLRRKYMDEARLKKVSGRVFNSDAMPLRSQRLKDTTTNSNTSQIGGNGTDHLSGKLRVNSSTQSKLCSTAIRSVQVRKGKPRATENFDEGSRYEVIDEMWTDNMSGTSSSVSTA

SEQ ID NO: 239135 - protein, 135 aa, Zea mays
  Clone ID: MRT4577_149680C.1.pep
PPRCCGSPPSSPVPTPRRRRRHLLSLPPFTPSLSSRVPAYLSVGEEEGDKARSVGRGLSDLAAASPFVRSFVGISRHGRRRAAPGPRAGTGSGSCSCHRPCRGYDSRIYGRWGLGMDNRDRPRGRNGYYGYGNES

SEQ ID NO: 239136 - protein, 97 aa, Zea mays
  Clone ID: MRT4577_149681C.1.pep
NVVAVAPPPNNVLAHQFLLLSIRGGRVLTLFFGTKQKFFCRSPPPKLVFDVVQRQLTIKVGLLPPGRKQTKNIGNKHSYPACTPKPFQLLSGKNCAK

SEQ ID NO: 239137 - protein, 72 aa, Zea mays
  Clone ID: MRT4577_149682C.1.pep
RGLGRVHAKPNFAVLGPIGGRSGLVTMQCVVFDIDVTWKTLSLLYLICLYQILFWGGGSLFKRLAPFVVGNI

SEQ ID NO: 239138 - protein, 163 aa, Zea mays
  Clone ID: MRT4577_149683C.1.pep
MAAVAPPPAPAPAPVPAPAPATGPVADQTTDLLQKLSLDSQPKPADATQPAAATAKKQGAAASQPLSVAIPPEPSITPVIQDFTDPNLFYLPAYYYGGYDSSMSEWDDYPRYLNSDGVEIAPAVYGDIYGYGYAPYGAYSPATSPSSTGDGQMFGAQHYQYPA

SEQ ID NO: 239139 - protein, 85 aa, Zea mays
  Clone ID: MRT4577_149684C.1.pep
CFDLDHASRIWSSRTKDGGRQRRSRAGGVDLARYHGHRGSPERAMQVPGDERRQWLRRCPVSASKKRICDVAAWRHERGEVLRLG

SEQ ID NO: 239140 - protein, 252 aa, Zea mays
  unsure (1)..(252): unsure at all Xaa locations
  Clone ID: MRT4577_149685C.1.pep
MMLQVFVIKSYSEXDIHKSVKYNVWASTTNGNKKLDAAYQEAQSKGSACPIFLFFSVNTSGQFVGLAEMTGAVDFEKTLGYWQQDKWNGSFSVKWHIVKDVPNNILKHIILENNENKPVTNSRDTQEIHLEQGLQMLKIFREHVSKTSILDDFAFYESRQKLMQDKRSKQQQVQKQVWDSRTPISVTGSEQQQEAANGKPNPSVPNGVPAEVKAAKASAENGTATPAISYAAKVAQAATEKPVLANGVAKTG

SEQ ID NO: 239141 - protein, 693 aa, Zea mays
  Clone ID: MRT4577_149686C.1.pep
MAAVAPPPAPAPAPVPAPAPATVPVADQTTDLLQKLSLDSQPKAADATQPAAATAKKQGAAASQPLSVAIPPEPSITPVIQDFTDPNLFYLPAYYYGGYDSSMSEWDDYPRYLNSDGVEIAPAVYGDIYGYGYAPYGAYSPATSPVPTVDGQMFGAQHYQYPTAYFQPPTPVPSTTQSDLQSSKNPEKPAAKADPAKTTNGVPNGTAHSNSGTVPLASSQQNSSLTPDGTYRAPLLGGVPSAGYLDTTYGYDSTGAHFAWYDGSAYANGQQRATTTNHFPSSTFGNGSPARYQNKSTTTPQMGMQNRRPTTTSPAPTYPNRMYPSSRPYTQYGNSIKTGLPYGSNGYDSRIYGRWGLGMDNRYRPRGRNGYYGYGNESQDGTIELNRGPRSGRFKNQKLYGHTVTIAVKGQSLPSGESKDDSAVPDRAQFNRDDFPVQYDAAKFFVIKSYSEDDIHKSVKYNVWASTTNGNKKLDAAYQEAQSKGSACPIFLFFSVNTSGQFVGVAEMTGAVDFEKTLGYWQQDKWNGSFSVKWHIVKDVPNNILKHIILENNENKPVTNSRDTQEIHLEQGLQMLKIFKEHVSKTSILDDFAFYESRQKLMQDKRSKQQQVQKQVWDSRTPISVTGSEQQQEAANGKPNPSVPAPNGVPAEVKAAKASAENGTATPAISYAAKVAQAATEKPVLANGDAKTG

SEQ ID NO: 239142 - protein, 172 aa, Zea mays
  Clone ID: MRT4577_149687C.1.pep
SALLRKLAVGPLSPRIVVNTSLFTLFTPVDTEVSPAHGHIIAPAMLYLCRCSVVQDSCCRRGARVSPHSLPGCPASLGQPPVAVVVPCSSVDAGAPGSWCPRWPSGCTGCSGWRPCSAGGCSASAAAPRGSAPSNTRSRHRASPGRTRTARLVHRHAFPGLRAENSLSLSVC

SEQ ID NO: 239143 - protein, 152 aa, Zea mays
  unsure (1)..(152): unsure at all Xaa locations
  Clone ID: MRT4577_149688C.1.pep
FSWVCWSVGLCAAGVCLFRRSGRFPVSPVCLAGGARCVWSGFRSPCPPGFGLFVFVXVVRAPLSCCSGAGLPCSWSRVVVLFLAVFLASVEHPSRTSPEASGHVSISVPGLLPNVLGPQPALRLSFRCNSRFLVRSCCLPPNPXEAPPPSSS

SEQ ID NO: 239144 - protein, 61 aa, Zea mays
  Clone ID: MRT4577_149689C.1.pep
MACMHIVQVNLDSNSPIALLVSMINVARISDLIYKCEDASTLSYSLKGIIGSMYVLSVCAS

SEQ ID NO: 239145 - protein, 168 aa, Zea mays
  Clone ID: MRT4577_14968C.1.pep
ERFDASSIAEADGARFDYFCNKVYPKIQDLDEGGLLLFVSSYFEYIRISNFLKSKEASFCRIGEATSQQDISRARLWFFEGKKKILLYSERSHFYHRYKIRGTKHLLVYSLPGRKEFYPELVNMLGESENRKCNVLFSRLDLLKLERIVGTSSARRLISSEKGMFVFC

SEQ ID NO: 239146 - protein, 101 aa, Zea mays
  Clone ID: MRT4577_149690C.1.pep
VGIFCFSIFFWVQKAPANSFLHWPPPWGIRGPPPQIGGPPGAPRESASLGVPHSRPGGFFALKVSTWGGALGPPTGNPPISGGLLKNPPGCLKGGFPHLGG

SEQ ID NO: 239147 - protein, 185 aa, Zea mays
  Clone ID: MRT4577_149691C.1.pep
EAWRSYMASGGLPISSWIVWINIYVALVFSIMDILREWVIPNRPHWMKCRCIVGKRWCPLPKASKEEIEQFDDYVWDKVRLTYWAISAAYFGIAAGHTCINSVFFVRYLSYFEERLPDGISMHGRRRLASEILLWVAFGIKTFGALCMVVRSQLSRRPKGWMNGQSLGRLERAKPSGADGGKHTD

SEQ ID NO: 239148 - protein, 115 aa, Zea mays
  Clone ID: MRT4577_149692C.1.pep
NLPARFSNSLPNIIPTGQMTLENLNQWSLEQSNIYMNMPIDQVDWALLAKQWITMQQNVYQTSTNLSPTFNNINQLILTHQNSMQILRPPIPPNLPLMQHSPYVTQNHNILPFNI

SEQ ID NO: 239149 - protein, 48 aa, Zea mays
  Clone ID: MRT4577_149693C.1.pep
SSGRRSLGAGFQSLPLSHEAPIRAQARPCMGVTTPSWTADSTGSLIVV

SEQ ID NO: 239150 - protein, 49 aa, Zea mays
  Clone ID: MRT4577_149694C.1.pep
SSNRKQLKVKIYILTPRCSLGASSKYKRIYALMQYCRTSQTLLFSRLLL

SEQ ID NO: 239151 - protein, 129 aa, Zea mays
  unsure (1)..(129): unsure at all Xaa locations
  Clone ID: MRT4577_149695C.1.pep
AFHLHLHPTVARHVDYARRARLGAVRAQSAPAAAAGGADTSTTSRRLEEERAVEHVKSGMELQLXTGSTAAFDEAEIXSLLGCDKLDKIVWVPTSKHNLEQAQTIXIPLYTLYYNPVIDLCIDGAYEVD

SEQ ID NO: 239152 - protein, 96 aa, Zea mays
  Clone ID: MRT4577_149696C.1.pep
TSGSLGCQRYSGRVVYTTRSALIERLQCSWRVLLGLLHRAYQPACPCLCSMLGVRPGCIAGAISMWMSCVVDGSAPSQYMLLSPAVLCVVVVLLCM

SEQ ID NO: 239153 - protein, 142 aa, Zea mays
  unsure (1)..(142): unsure at all Xaa locations
  Clone ID: MRT4577_149697C.1.pep
NTDHANHNPYSKPATTDPNRVHDRVRCIPHHEDINEPRCSWLQCSSPAPALTEXNTPGICLXAVTPALHSTTIHTGGXQVIPTGRTAIYASYLTANPTLLQPXNLGAIQPPQNALRGIYAEQNQMRGHAFEEMHRHGTPLYN

SEQ ID NO: 239154 - protein, 57 aa, Zea mays
  Clone ID: MRT4577_149698C.1.pep
QAFFFFLFCFFFQTSFCPLISYLSTIRVHAGNCSHCHPRRWGTLSNDWGENERAKDR

SEQ ID NO: 239155 - protein, 117 aa, Zea mays
  Clone ID: MRT4577_149699C.1.pep
FLYRRRYLTEYKHMLPAPVFLVPSIPIHGATPNDRSARAVIYAQRQSAPAPPPSSSPASVADRGAAGAALQYLHSCRQTPCMSLSTSHLYCTVLYYDAETGQANTRKTKGRQRDSAA

SEQ ID NO: 239156 - protein, 87 aa, Zea mays
  unsure (1)..(87): unsure at all Xaa locations
  Clone ID: MRT4577_14969C.1.pep
VINNMGCETKSSAXHALLHAGLEPPQLVLRRRRPXXASCPAPMGRRRRRTGLHSSPSHKASPRPRSSATVGRRCAAAGRCALVIGGR

SEQ ID NO: 239157 - protein, 620 aa, Zea mays
  unsure (1)..(620): unsure at all Xaa locations
  Clone ID: MRT4577_1496C.1.pep
MDQLVNFIIRPPRADYSPNDDLLEQEFMLKGRWFLRKDLEDKQTGHATLRCNSGGDLXLPLHHSSLLQSRHHVVSVASSPRPPRSFQPRQTSKHVKNGQGKKLQCSHYMPVVIPEGKALPCVIYCHGNSGCRADASEAAIILLPSNITVFTLDFSGSGLSEGEHVTLGWNEREDLKAVVNYLRTDGNVSCIGLWGRSMGAVTSLMYGAEDPSIAGMVLDSPFSNLVDLMMELVDTYKYPLPKFTVKLAIQHMRKIVKRKASFDIMDLDTIQVAKQCFVPALFGHATEDDFILPHHSDKIYESYIGDKNIIKFDGDHNSPRPQFYFDSITIFFHNVLNPPEVAEDHYFMTPHGSLGQGHWDTEQDIEYRFSQSPTGTANATTTEDAIAQLRSRRLMSRMEVPSGATTEDRTDRTEGFDSDLGPSSSSVSTATPPNGRNGRLLTPTSDDGEYVEYSFDSLSDMPHTVEDEDRMLMQAILESLKDYEQSNTKNVQSTASDPASKANGTVKDCNGVAAAALEQDASSFDAPDKHTNVPNSGEKVSEGQSTDCNAGKSSASVSASGSSEPLAPTQMVNGQPASVDSQKVTQNANGEDGTRATLVVQKSRTGGLIEKWGSFFKNND

SEQ ID NO: 239158 - protein, 344 aa, Zea mays
  Clone ID: MRT4577_149700C.1.pep
HASDHASVHASGHACAHAFKHVKSLRKKSLWSKNLEEVMGKLVDIAHFLHLEIHNAFGLSDSEESQEPTKRRNRLGSAGLALHYANIISQIDTLVSRSSSVPPNTRDALYQSLPPTIKSSLRSKLHSFGVKEELTVSQIKAEMEKTLRWLVPIASNTTKAHHGFGWVGEWANTGSDVNCKPNGQIDLIRIETLYHADKEKTEAYILELVIRLHHLISQTKTANGERSPIKSPVQSPTQRGASITLSPNIKNSNSSPLLTQEDQDMLSDVKYRTFIPGISKSQEFYTKEIHHNQSRLSKSNSHSPSSGNRKEALSIRRLLPVIDFEIDRTKALDVIDRVDDLRVQ

SEQ ID NO: 239159 - protein, 50 aa, Zea mays
  Clone ID: MRT4577_149701C.1.pep
VRRTWHSSTLMQYKCELIPLLVTCFFNYYYFCYIHTITQAKEKNRRPSNQ

SEQ ID NO: 239160 - protein, 267 aa, Zea mays
  Clone ID: MRT4577_149702C.1.pep
YTTILRIREKKRSSVHGVSRASSVPSNTRDTLYQSLPPTIKSSLRSKLHSFGVKEELTVSQIKAEMEKTLRWLAPIASNTTKAHHGFGWVGEWASTGLDVNCKPTGQLDLTRIETLYHADKEKTEAYILELVIWLHHLISLSKTANGERSPIKSPVRSPTQRGASITLSPNKNSSNSSPLLTQEDQDMLRDVKYRKFIPGISKSQEFDTKERHNKQSRLSKSNSHSPSSGNRKETLSIRRLLPVIDFEIDRIKALDMIDRVDDLRVQ

SEQ ID NO: 239161 - protein, 42 aa, Zea mays
  Clone ID: MRT4577_149703C.1.pep
HGGSRMSAPPLANELGGAGHLKVRRTHRACCLGPVRVEPRAE

SEQ ID NO: 239162 - protein, 88 aa, Zea mays
  Clone ID: MRT4577_149704C.1.pep
AGPKRNLGHGFSQHIHALRVPQLMCEKTHGSYGGWTMYTCRTPSSRLISTEYRIATVSKILTTAKLCELHVQTLTLPTAAYIIRRWRL

SEQ ID NO: 239163 - protein, 134 aa, Zea mays
  Clone ID: MRT4577_149705C.1.pep
SDPYSFISLHWWLNTTALPCTTVAPWLEAPLDLAEFAAWTPVGHGEAWIPRRWETTVSNFGHPGRSSSTEALYTRSIRPDEAPWYPTWASNNVVARSDGGGVEFLSSLSCVTATKHGCMGGSESCAPTRPRTRG

SEQ ID NO: 239164 - protein, 100 aa, Zea mays
  Clone ID: MRT4577_149706C.1.pep
SLAALPLKFELELFGLSLRLCYSQEERSGKTSGNNDCTLVRNIGGAKTSSGGNPRAAEPAPRGATGHAIPMGRSRPTSGSPECWGRPRWDGRRENERFYW

SEQ ID NO: 239165 - protein, 235 aa, Zea mays
  unsure (1)..(235): unsure at all Xaa locations
  Clone ID: MRT4577_149707C.1.pep
LLGGGGDGARARPLLGLGLALLLLAPSRRLASAAPVEDGLLMNGDFETAPPGGFVKSASVSEGAAIPSWMINGTVELISAGQHQGGMILIVPQGDHAVRLGNDAGIGQVVEVEKGSEYAITFSAARTCAQLESLNISAGSVSQTVDLQTLYSIEGWDAYALAFQAVDEQASIEFRNPGMEDDPTCGPILDNVAIKKLFXPDKAKENMVINGXDFEEGPWMFPXTSFGVLLPTTST

SEQ ID NO: 239166 - protein, 48 aa, Zea mays
  Clone ID: MRT4577_149708C.1.pep
LFVSLLSTTELPGEYVRIEGCTMLRPSSYTVHPVTKYTPVGTPCSDLS

SEQ ID NO: 239167 - protein, 65 aa, Zea mays
  unsure (1)..(65): unsure at all Xaa locations
  Clone ID: MRT4577_149709C.1.pep
RPXYHSFRRRTRTLDRKYPTSHSRPLACSHKGGGGLLAGDVLIRVIWQVRCKHKRSRTSALQGLA

SEQ ID NO: 239168 - protein, 66 aa, Zea mays
  Clone ID: MRT4577_14970C.1.pep
SFDFFFICWNISSTANIVGNTCFNCGKSLKLLLEHLQIVDNAYKVAVPLFETRFLIEMKQHWRKFT

SEQ ID NO: 239169 - protein, 73 aa, Zea mays
  Clone ID: MRT4577_149710C.1.pep
PLVKLGGEQFLPGMAAPFKKGPLGKPGTIAPTHKLKEWGPPGGRVLMCLPTCGFFQCVSVACYPKIIGPAPEK

SEQ ID NO: 239170 - protein, 76 aa, Zea mays
  Clone ID: MRT4577_149711C.1.pep
RLGSNLVCPNGVVSCVIRMFKRSHLLVSKGLFLYRKRGRYLRNIFKKCGVPNVYYMVLGLIVTVYGFYPTPMVGFS

SEQ ID NO: 239171 - protein, 144 aa, Zea mays
  Clone ID: MRT4577_149712C.1.pep
VSMVHCSMVIVTQCPFMYNISCCEYADRVCVHFKLYIVCSVFALTGIVVLCLSGGPALSAACPFPPIPAELPTRRMLCSQRRTQYPAPSMRSRAADAVVDRGQFRLGNARSAASGPAGKTDLALPAACPSGRHVCNEFHDERAF

SEQ ID NO: 239172 - protein, 68 aa, Zea mays
  Clone ID: MRT4577_149713C.1.pep
GRVDFFFFFFFLFCFSRRNRVDKWCFGSSRVAHQYNIRAGFFIITISCRTSHRSHHDAFPGIGKACRS

SEQ ID NO: 239173 - protein, 33 aa, Zea mays
  Clone ID: MRT4577_149714C.1.pep
MGKYVELLDMGVRIAARFHSHCPQTARLYYHPP

SEQ ID NO: 239174 - protein, 126 aa, Zea mays
  unsure (1)..(126): unsure at all Xaa locations
  Clone ID: MRT4577_149715C.1.pep
HTFILLLGLCSGPVAQALDDRAWVRDISTTLSLQGIHXYLMLWDIMEGLVLSQEEDHHIWRHEASGRFSSKSCYKSFFRGSITFEPWRRAWKXWAPLKCKVFLWLAIKNKCWTADRLERRGMXHPT

SEQ ID NO: 239175 - protein, 78 aa, Zea mays
  Clone ID: MRT4577_149716C.1.pep
MGKYVELLDMGVRIAARFHSHCPQTARLYYHPPAGGPAAAGDGRKGDSATAATAAAAVMLKQQAHRFDASEIILHTVV

SEQ ID NO: 239176 - protein, 80 aa, Zea mays
  Clone ID: MRT4577_149717C.1.pep
ARVGKYVELLDMGVRIAARFHSHCPQTARLYYHPPAGGPAAAGDGRKGDSATAATAAAAVMLKQQAHRFDASEIILHTVV

SEQ ID NO: 239177 - protein, 133 aa, Zea mays
  unsure (1)..(133): unsure at all Xaa locations
  Clone ID: MRT4577_149718C.1.pep
MSYRGGRGGGGPNSHRGRGRGGGGGAGRRGGGGGRGEQRWWDPEWRAERLRQMHGEVEKGDENEWWNKIGQLREGSQQELXDKRKFGRDGQNILADMAQRQGIYFNAYNKGKTLGFSKVPLPDYRADLDDRDG

SEQ ID NO: 239178 - protein, 79 aa, Zea mays
  unsure (1)..(79): unsure at all Xaa locations
  Clone ID: MRT4577_149719C.1.pep
ALGXXAXGAXXPCAXXXLXASRXXSXXAXGASARRPPXPXXGRSRPXGPCXWLXPPGXRAAAGRLXAPFPPGGVLXPLX

SEQ ID NO: 239179 - protein, 104 aa, Zea mays
  unsure (1)..(104): unsure at all Xaa locations
  Clone ID: MRT4577_14971C.1.pep
GVSTGNWGCGAFGGNPEIKSMIQWIAASQALRPFVNYYTFEHVSLQRLEEVIQWIRLHGWTVGELWHMLMEYSSQRLXRKTHKGFLAWLLPSDRPKNQVHYMSE

SEQ ID NO: 239180 - protein, 58 aa, Zea mays
  Clone ID: MRT4577_149720C.1.pep
RNDQELGKLLTGVTIARVLVLPNINPVLLPKKTAEKASSGGSKEAKSPKKAVKSPKKA

SEQ ID NO: 239181 - protein, 65 aa, Zea mays
  unsure (1)..(65): unsure at all Xaa locations
  Clone ID: MRT4577_149721C.1.pep
ALCALASLAVARVACCLVRVXAVGWPXXSVGVPSAAASCTGAGXFRLCQPVKPLCRGXPSPCLSP

SEQ ID NO: 239182 - protein, 164 aa, Zea mays
  unsure (1)..(164): unsure at all Xaa locations
  Clone ID: MRT4577_149722C.1.pep
MALTTIELAGLAAXGQEPCPHIAHKGLPISVHNRTTSKVDETVQRAKVERNLPDYGFHDPASIVKYIQKSREVIMLGKGEAPDDQTIATLAAHLKKGDCIIYGGNERYQNTDRRDKTWRSRGHLYLDMAVSGGQEGGRNRPSLXMPGGSLQAYKXQKDIDLKEA

SEQ ID NO: 239183 - protein, 130 aa, Zea mays
  unsure (1)..(130): unsure at all Xaa locations
  Clone ID: MRT4577_149723C.1.pep
FSSTIARLYFERLHSTDEGMAGGSVRGGSNCPPLVVTKKPRRMERYPYRMFASTVLEGVLLGWLSRAAHVPWMSSGARWXAWVELSAGGVWICFYWAVTLAWSCLVFLPLPPSRESSCYGTCDGSCLNGR

SEQ ID NO: 239184 - protein, 86 aa, Zea mays
  Clone ID: MRT4577_149724C.1.pep
RGLFQANIGFFLPALVYGYPYFFWSSLGSGYTSLNPNFCVQDRHKDLGKLSVAGKRTVSLFNYKISQCKHEGMWSLAWPTVWNSVA

SEQ ID NO: 239185 - protein, 61 aa, Zea mays
  Clone ID: MRT4577_149725C.1.pep
PPPPSLSWILALPLSMVSYLSPSRVKSCRYGLSKICIFTRHRSVGSVGCQRPFGRGGMRRA

SEQ ID NO: 239186 - protein, 132 aa, Zea mays
  Clone ID: MRT4577_149726C.1.pep
WRWPPGADGRGGTRQRQHQRRWQRMGRDAWLERAWRMRKHRRQLQEEVVPVVVLGGGGDSPASRGGVAMDMEEVRACLDLSLDLPCDWTVEIPSYYALSGVDTAISGGNSRDSAGIWRISSLGDDSKDVNAL

SEQ ID NO: 239187 - protein, 71 aa, Zea mays
  Clone ID: MRT4577_149727C.1.pep
DPILKYRTLTPETYSNILQQGSYFIKTHQTVIGLSLPGLKYSTPSTRAISSFSTLFLIFYFLNNMIYFLII

SEQ ID NO: 239188 - protein, 151 aa, Zea mays
  Clone ID: MRT4577_149728C.1.pep
QPSSTLLLLTTNNMRFQTVVAALLVATLAHAQTPPTPPTMPEPPSMPAPPSIPAPPSMPEPPKIPSPPVVEVPSGECLTCLNGAMKSVPACSKVDYIWGSLGNLPKDQKDCICALAASSTWVDTCKATCPAKMIEPSNLYNNDWTKSQCGA

SEQ ID NO: 239189 - protein, 44 aa, Zea mays
  Clone ID: MRT4577_149729C.1.pep
CYVLWVRGSRFWGNSLDVFLDGHLGGFMCKHWGVGVRCWEDVWS

SEQ ID NO: 239190 - protein, 518 aa, Zea mays
  Clone ID: MRT4577_14972C.1.pep
MEEPAAASALEARGDLRSALPFLPVVLRGGALFWPPAAQESLRALALGPDVSRVASGDVLADALTDLRLALALPALPPRAADGLALFFDDLLSRAQARGWFSEVVPNLARLLLRLPTLLEDHYAKAGHGASGLRVMASQDAGVVLLSQELVAALLTCALFCLFPTAGRAQACLPTINFDGLFAPLIHNARQSQEQKVRCLVHYFERVTDSMPTGLVSFERKVLPRRAFSDGVPYPDIHAWVASSAPLCQFTVFSSGFIEDEEQEALQVDFANKYLGGGALSWGCVQEEIRFMINPELIVGMLFLSCMEDNEAIEIFGAERFSQYMGYGSSFRFVGDYLDTKPFDSMGRRRTRIVAIDALDCPARLHYESGCLLREVNKAFCGFFDQSKHHLYAKLFQDLHNKDDFSSINSSEYVGVSTGNWGCGAFGGNPEIKSMIQWIAASQALRPFVNYYTFEDVSLQRLEEVIQWIRLHGWTVGELWHMLMEYSSQRLGGETHKGFLVWLLPSDRPKNQVHYMSE

SEQ ID NO: 239191 - protein, 149 aa, Zea mays
  unsure (1)..(149): unsure at all Xaa locations
  Clone ID: MRT4577_149730C.1.pep
MAEDAPPAAPVMTPEEVQAETELRMRDIGQRFGAIPEDPDELLRLLEEAEIWLSRVDQSPPESMYNALRPTMAVLITNELLEHPDPNVKVALTSCLTEVTRITAPEAPYDDDVMKDVFKRVVKTFAELDDMNSPFFXRRVSILDSVARV

SEQ ID NO: 239192 - protein, 67 aa, Zea mays
  Clone ID: MRT4577_149731C.1.pep
RSGRPSQTVSLFYHYLMLTVRVVTLLTGPERSSTISEPIKSIRYSRAGSKPYLRANRSSVLYIGSIH

SEQ ID NO: 239193 - protein, 117 aa, Zea mays
  Clone ID: MRT4577_149732C.1.pep
STFSEMKLGVGGRLHVLLLCTPNSNPPATETLYGCLLDLSSGSGAPILDAQQVFECLLQPHTDKGKKIVVPLQSPEEMPKQGSLHINDSTHCTNLLNRRSSIISYRFLPSLHLISST

SEQ ID NO: 239194 - protein, 51 aa, Zea mays
  Clone ID: MRT4577_149733C.1.pep
MPRFYFFFKKKKKKKKTQKKKKKKKKKKKKKKKKKKKKKKKKKKKGRQLAI

SEQ ID NO: 239195 - protein, 162 aa, Zea mays
  Clone ID: MRT4577_149734C.1.pep
APFAACVLTTATLCVCRKTMPVEEILTIDVKPGWKKGTKITFPEKGNETPHTIPADLVFIIDEKPHPVFTRDGNDLVVTQKVPLAEALTGHTARLTTLDGRILTVPISSVIHPGYEEVVRGEGMPVPKDPSRKGNLRIKFDIKFPARLSADQKSGVKRLLGQ

SEQ ID NO: 239196 - protein, 140 aa, Zea mays
  Clone ID: MRT4577_149735C.1.pep
MVSFEMNDLKKIGLSLTGFGVFFSFLGIVFFFDKGLIAMGNILFLSGLGLTIGLKSTMQFFTKPKNYKGTISFGAGFFLVLIGWPFFGMLLEAYGFIVLFSGFWPTLAVFLQRIPILGWIFQQPFVTSFLDRYRGKRVPV

SEQ ID NO: 239197 - protein, 61 aa, Zea mays
  Clone ID: MRT4577_149736C.1.pep
SAKPSDQLGALKGPLCSNNGRPNILASYAPWTFCKGWFRKPFSGMLGSFYSLPCFPGPITH

SEQ ID NO: 239198 - protein, 62 aa, Zea mays
  Clone ID: MRT4577_149737C.1.pep
PHGEKLLLALQGSLDVAKQEKVLASVLSALKVSMHKMLVKKHYSEEGREQRKRGRNDKKMKN

SEQ ID NO: 239199 - protein, 46 aa, Zea mays
  Clone ID: MRT4577_149738C.1.pep
ILRFFVHGVIFASDIVLVGIWFIFVHAGFIVWNIFFVGFRGGFSFF

SEQ ID NO: 239200 - protein, 435 aa, Zea mays
  unsure (1)..(435): unsure at all Xaa locations
  Clone ID: MRT4577_149739C.1.pep
MEDNAVEEPELSGAAEFAPALVAAHPHGNSVAVAIGPELRVFDLRAGHPVSLSDDCGGHSHSDAIRAICFSVSGALFASAGDDKLVKVWKTDSWRCIQTITSEKRVSAVVISNDDLYVSFADKFGVVWLVTLREDSAEQVSVDNKPVSILGHYCSIITSMKFSPDGRFIATADRDFKIRVTLFPKNPLKGAHEIQSFCLGHTDFVSCITFTSISENQSFLIIXGGGDSTVRLWDYXNGCLLDTFQAKDKMGELLGPNETDDSSLAITDICPSNDGSLVAVAIQSFSGIMLLACDLVGKKLSFLKVITMEKSYIPTSLASSSASELLWTVMGASNMPSQASSHLLTRLRIITCFQKDRLSSSDAGPATLEDGDVPHGEKLLLALQGSLDVAKQEEVLASVLAALKVSMHKMLVKKHYSEERREQRKRGRNDKKMKN

SEQ ID NO: 239201 - protein, 123 aa, Zea mays
  Clone ID: MRT4577_14973C.1.pep
QSSKWLPSPPRHTLPPRRLRSSSGSPPLSVSNPPRTSPPSSRPSTTTFPAAPPSLAASPPRPMSPSTRPSLPLSPSGPPRSAPARRATPTLSAMSTLSRTLLCSASMSRMRTRSRLTKMRSST

SEQ ID NO: 239202 - protein, 280 aa, Zea mays
  Clone ID: MRT4577_149740C.1.pep
PAGTPSVNRQIDEIREKLEEERSLPETRWVEIFTGPRMMYRTLLGITLQAGQQLTGINFFFYFGTTVFASTGLKDSYVTQLILGSVNCACTFGGLYVVQKCGRRISLMIGAAWMMMCFFIYAFVGHFALDRADPLNTPAAGTVLVTFSCLAIVAFATTWGPLVWTVNAELYPIRYRSVCMGIATASNWFWNFMISFFTRFITDDIDYFYGLIFAGCCAALVLVVFFFVIESKDRTLEEIDTMYVQHVNPITSSRWTPNKQHQNEVGEISDVRSHTQNSEK

SEQ ID NO: 239203 - protein, 72 aa, Zea mays
  Clone ID: MRT4577_149741C.1.pep
SHLAHTPGSQCLLPAALVCDESFHEVAPCHIFLMSCINIAKRKRQCLSALKAHQTWGKLRDQQSLLSQARGM

SEQ ID NO: 239204 - protein, 194 aa, Zea mays
  Clone ID: MRT4577_149742C.1.pep
MASKELALALSLFVLLSIGSASAIRVARYSSSQGQGAGDGNGSGYLNGGGSGSGVGSGSGESDGAGVHASGGGGGGASSWSQPAGSGAAAGFGTGYGSSYSSQSRYGYGGSTSAGGSGRGRGAGQGSADGGGGYGAGGGDGYGSSVANSGNVVSATPARAEASADGNGSGRGGGYNGGSGGGDGSGSGFGAGQP

SEQ ID NO: 239205 - protein, 66 aa, Zea mays
  Clone ID: MRT4577_149743C.1.pep
LPHGEDHLLFKDLFHSHLHTAHSLFDLKTLLRLLTCIILDTKYLSSTYDTLTHSLAYTYTCITITL

SEQ ID NO: 239206 - protein, 50 aa, Zea mays
  unsure (1)..(50): unsure at all Xaa locations
  Clone ID: MRT4577_149744C.1.pep
ITLXDDILGIRRIVRIFICSFCFMLILPKHLVSNILYYGKVCLISIHIEI

SEQ ID NO: 239207 - protein, 1291 aa, Zea mays
  unsure (1)..(1291): unsure at all Xaa locations
  Clone ID: MRT4577_149745C.1.pep
MDPSTSLSIYDISIHILTSTICPKSNVGHATISIWNATVPRLGGAPQTSVFDRLAPPVQDRLSAAESGHQAQAQQDCRTTRPPRPTNSAGGHMPVATQRTTKKDIIKIGTTDVVIRGDNKGPMIFGESANTTEKDTTTIKTADPKYSMPRWCPAGLTRSQKRKLQRLRAKESQEKEAEKIFNDTHPLYPPSQKKWRSKAVEKKQTATEIESQPAPGADRPAPAHGPSVVHQEASGQPAPGADRPAPACGPSAVHQEASNDTTTSMEEDDLLGEDLVDYEASPERPGMDVNIITFSANCTIIGDDEPIVAQFDFGPKEAAFTKPKESVNHLKPLFVRGHIDGIPIAKMLVDGGAAVNLMPYSLYIKLGKQDDELVKTNMTLSGVGTDSSIKARGVTSVELTIGTKTLAAAFFVADVEGNYSLILGRDWIHANQCIPSTLHQILIQWVGDDIEQVHADVSACIAVADAPVLWTYETATCLTGVDFSDYQFISIDKKVHESLITXVRLPRPDGLVFHKRVRTLRSNXSQQKDNITDNPVPETGKSAVTQRPSNSSVGNMIEEFRDLDKLGQGFTSADPLEEIDIGDGKTPRPTFVNKTLETDPRDEMIGLLKEYSDCFAWNYTEMPGLSREIVEHRLPIKSGFRPFKQRARTFRPDLLPRIKDEIHRLLEADFITPCRYAEWVSNIVPVEKKESGNTVEVYIDDIVVKSAEFSSHIADLRKAFDKMRQYGLKMNPRKCAFGVSAAEDKVIGAVLTQETEGKEHVVTYLSRRLVDAETRCYLLSSHCTVSGQADVIKYMLHNPIMSGRIGKWAYALIEYDLAYEPLKSMKGQVVADFIVEHRVNDIYELDMSYLTITPWTLYFDGSVCNEGQGIGIVLVSPSNVSFDFSSRLKTYCTNNQAEYEALLFDLELLNGMGVKHVKVFGDSQLVVQQVLEEYQCFDGTLNSYLEKCWSIIHSFDEFSIQHISRVENHRANDLAQDASGYQIKRGKFHKTENLITSAKPNSQVADCPRDDAGPSGVTRNVLFINSADNEANASDWRTPILNYFRNPNIRTDKNIQRTTFKYILMSDELYRRTVNDILLKCLGPDDAILAMAEVHEGICGTHQSAPKMKWLLRRGWGLDFIGEIHPSSSKGHQFVLVATDYFTKWTEAVALKNMTHKEVIEFITEHIIHRFGIPQTLTTDQGTSFMSKEEAVLPVEISLNAVRFARQNDLTITDYYNSMMDNIDEVTDKRVIALGAIEKDKIMVARAYNKKVKAKSFQVGDLVWKTILPLRNKDQKFRKWSPSWEGPYKVK

SEQ ID NO: 239208 - protein, 2056 aa, Zea mays
  Clone ID: MRT4577_149746C.1.pep
MARRRSQKNKKTPLSNATQKEVTLEVLFDDCSNYDSWSSSVINAFRTIDPRLEQIIDKSIFSSNFNGKINSEEDQRCYQLNYLAFDILTNSLSKEDYRAFISNYDESIHDAYDIWTRIRSKFDESYYDSSFCASTSFGTCDTNPCKEEDENERWRPNDESTSPKGCHNQSQPLYGMPMDTYSEQPQIGSKTADLHMSGPSARDRGPSGPATAGPIFNEVPRHAPKPPHMTQNPNYPVGRSAYNDGRSAYNHGRSGPNLRLVPPYSRFKRNGKRRLSSRLMLIQSAINEGRLKFQEMQVDTEPFPMNMIDFEGKKVLVRPNTADKGKGKETIIGNAKKADGDGKVSCRKVVAEKTPDGGETLRETITKNRTGGHAQTGRQRREPVHRIADTPPPKRGRSDAYPDGMEESSVRSGHAQDSQRPCTFKPRRPEIGTWKTNTFKAAGRLIKPGPTFDQLLSKYVKKKVGPSNRPTKRPRSPIHEQRQVRPIGSPHQSEEMKGHTVQLRPNIPTWTPPPPYPSMPYPYTYLPPPYVPNQMWGMPPYPFGMPQYHAWGAPQTSVFDRLAPPVQDRLSAAESCHQAQAQQDCQTTRPPRPTNPAGGYMPVATQRTTKKDIIKIGTADVVTQGDNKGPMIFGKSANTTKKDTVTIKTADPKYSMPRWCPAGLTRSQKRKLQRLRVKESQEKEAEKIFNDTHPLYPPPQKKWRPKVVEEKQTATEIENQTTPAQHLAGMADSTANKAGQSAPGADRPASARGPSVLHQEASGQPAPGADRPASARGPSGLHQEASGQPAPGADRPAPARGPSAVHQEAYNDTTTSMEEDDLLGEDLVDYEASPERSVVESLVTDSSASKAGWSDLSQKGSDFKTEHISQQKDNITDDPVPETGKSAVTQRSSNSSVGNMIEEFRDLDKLGQGFTSADPLEEIDIGDGKTPRPTFVNKTLETDPRDEMIGLLKEYSDCFAWNYTEMLGLSREIVEHRLPIKSGFRPFKQRARTFRPDLLPRIKDEIHRLLEADFIRPCRYAEWVSNIVPVEKESVSTGKFLGSVIHEHGIEIDPDRIKSIRNVGPPTSEDKVIGAVLTQETEGKEHVVTYLSRRLVDTETSHCTISSQADVIKYMLHNPIMSGRIGKWAYALIEYDLAYEPLKSMKDQVVADFIVEHRVNDIHKLDMSYLTITPWTLYFDGSVCNEGQGIDIVLVSPSNVSFDFSSRLKTYCTNNQAEYEALLFGLELLNGMGVKHVKVFGDSQLVVQQVLEEYQCFDGTLNSYLERCWNIIHSFDEFNIRHISRVENHRANNLAQDASGYRIKRGKFHKTENLITSAEPNSQVADRPRDDAGPSGVTRNVLLIDSADNEADASDWRTPILNYLRNPNIRTDKNIRRTTFKYVLMSDELYRQTVNDVLLKCLGPDDAILAMAEVHEGICGTHQSALKMKWLLRRSGFYWPSMIADCFKYYKGCQVCQKFGDLQLVPAAELHPIIKPWPFREWGLDFIGEIHPSSSKGHQFVLVATDYFTKWTEAVALKNMTHKEVIEFITEHIIHRFGIPQTLTTDQGTSFMSKEANGQAESSNKTLINLIKKKISENPKHWHKILSEALWAHRISKHSATKVSPFELVYGQEAVLPVEISLNAVRFAKQNDLTITDYYNSMMDNIDEVTDKRVIALEAIEKDKIMVARAYNKKVKAKSFQVGDLVWKTILPLRNKDRKFGKWSPSWEGPYKVKQVISGNAYLLQTLQDKDLPKALNGRFLKQYHPTAPRRSRQASAGAVLIAKGPDMLLSAFLGDCLFSYPPPPLLPATTAAPRPSTRLPVPFPARLRPASLVARRLTAEAGEALSALSAAEGDDEYEAELQEEGFPSWAGGGEEEDYDHDPEIGDIMGDYFDDPKKGQTRMEDRIRKKRHKIVQTKTGSPNPMKVVFNKFDFSNSYIWFEFYNVLLPKDVTLISDSLRSWHIVGRLGGCNSMNMQLSQLPLDCKRLTYDALEGANVTPTSFYNIGDLEIQDNLARVWVDIGIHEPLLLDILLNALTTISSDHVGIKQVQFGGSEFLNWSEDLKTEEVGYSVCKI

SEQ ID NO: 239209 - protein, 2207 aa, Zea mays
  unsure (1)..(2207): unsure at all Xaa locations
  Clone ID: MRT4577_149747C.1.pep
MAGSRESSDISPSNIIEPTWETLPADEQLQFEEHKERMIQEAKAKFLANFKVDRNNKVVRHRATDPASLQPTPDIPNAVTISHIPCTGCRWTHTLINRKSAANQPICTCPDRPHRVGGLAPAAIDIVREEIAGAFRDKLGVSMVPGGQSYRKPYDSRFDHHPYPQGTRIPEFAKFSGDQGKNTREHIGQFLAQLGELADTEAFRVRLFSLSLTGTAFAWYATLPPNSISSWGDLEQKFHDHFFSGDYELDLVDLVSLRQTKDESVNDYIRRFRDTRNRCFQIHLAEKQLVGLAFNGLRYYLKERLEGIQFFTLAQLHQRALACESRSKETTKTIRHNVHVVECDQSSSEDESAEVYAAEMVWPKQAKSSACASLQPVQKKRQEEVKFTFNVGKCDRIFDELLKNGNIKINHTVPSADELKRRAYCKWHNSFSHATNDCNVFRRQIQSAINEGRLKFQEMQVDTEPFPMNMIDFEGKKVLVRPNTADKGKETIIGNXLKRPMGIXKVSCRKVVAEKTPDGGETLXDHHSLQYRGASANRETDAGARVAYPGRSGELWRTXGRTQDSQRPRTFKPRRPEIGTWKTNTFKAAGRLVKAGPTFDQLLSKYVKKKAGPSDRPAKRPRSPIHEXSARVGRLDHPTNRKXMKGHTIQVRPNIXLMDTSTSISTYAISVHIFTSAICPKSNVGHATISIWDATVPRLGGXQTSVFNRLTPPVQYRLSTAQSGHQAQTQQNCRTTRPSRPTNPAGGHMPAATQKTTKGDIIKIGTADVVIQGDNKGPMIFGESANATEKDTATIKTADPKYSMPRWCPAGLTRSQKRKLQRLRAKESQEKEAEKTFNDTHPLYPPPQKKWRPKAVEKKQTATEIESQSAPSADRPATPRGPSAVHQEASNDTTTSMEEDDLLGEDLVDYEASPEHPGMDVNIITFSADCTIIGDDEPVVAQFDFGPKEAAFTKPKESVNHLKPLFVRGHIDGIPIAKMLVDGGAAVNLMPYSLYRKLGKQDDELVKTNMTLSGVGTDSSIKARGVTSVELTIGTKTLAAAFFVADVEGNYSLILGRDWIHANQCIPSTLHQMLIQWVGDDIEQVHADVSACIAVADAPVLWTYETATCLTGVDFSDYQFISIDKKVHESLVTXVRPPRPDGMVFHKRXDFKAEHLPQRKDSITDDPVPETGKSAITQRSSDSSVGDMIEEFRDLDKLGQGFTSADPLEEIDIGDGKTPRPTFVNKTLETDSRNEMIGLLKEYSDCFAWNYTEMPGLSREIVEHRLPIKPGFRPFKQKARTFRPDLLPRIKDEIHRLLEANFIRPCRYAEWVSNIVPVEKESATPKDEYPMPIADTLINNASGNRIISFLDGNDGYNQIFMAEEDASKTAFICPGFIGLFEWVVMTFGLKNAGATYQRAMNLIFHELLGNTVEVYIDDIVVKSAEFSSHIADLRKAFDKMRWYGLKMNPRKCAFGVSAGKFLGFVIHEHGIEIDPDRIKSIRNVGPPTCKVEVQRFLGKVNYLRRFISNLAGKIDAFTPILRLKNDAEFTWGAEQQKAFDLIKKYLSSAPVLKAPQVGAPFRLYIAAEDRVIGAVLTQETEGKEHVVTYLSRRLVDAETRCYLLSSRCTVSGQADVIKYMLHNPIMSGRIGKWAYALIEYDLAYEPLKSMKGQVIADFIVEHRVDDIHELDISYLTITPWTLYFDGSVCNEGQGIGIVLVSPSNVSFDFSSRLETYCTNNQAEYEALLFGLELLNGMGVKHVKVFGDSQLVVQQVLEEYQCLDGTLNSYLEKCWSIIHSFDEFSIQHISRVENHRANNLAQDASGYRIKRGKFHKTENLITSAEPNSQVADRPRVDAGPSEVTRKVLLVDSADNEADTSDWRTPILNYLQNPNIRTDKNIRRTAFKYVLMSDELYRRTVNDVLLKCLGSDDAILAMAELVPAAELHPIIKPWPFRGWGLDFIGEIHPSSSKGHRFVLVATDYFTKWTEAVALKNMTHKEVIEFITEHIIHRFGIPQTLTTDQGTSFMSKEANGQAESSNRTLINLIKKKVSDNPRHWHKILSEALWAHRISKHSATKVSPFELVYGQEAVLPVEISLNAVRFARQNDLTTTDYYNSMMDNIDEVTDKRMIALGAIEKDKIMVARAYNKKVKAKSFQVGDLVWKTILPLRNKDRKFGKWSPSWEGPYKVKQVMFGNAYLLQTLQGKDLSKALNGRFLKQYHPSMWQDA

SEQ ID NO: 239210 - protein, 61 aa, Zea mays
  Clone ID: MRT4577_149748C.1.pep
GLNTKKGPKNFQRPVLIPKTKSGFPPWGGEKKANPPKKGKNPFHGLNVAKLSRERAIALLP

SEQ ID NO: 239211 - protein, 530 aa, Zea mays
  unsure (1)..(530): unsure at all Xaa locations
  Clone ID: MRT4577_149749C.1.pep
MPRWCPAGLTRSQKRKLQRLRAKESQEKEAEKTFNDTHPLYPPPQKKWRPKAIEKKQTATEIESQSAPGADRPPFTRKSLDNLHQARTVRPPHADRPPFTRKPPTTRQHQWKRTTCWEKTWSTTRLLQNAQFDFGPKEATFTKPKESVNHLKPLFVRGHIDGIPIAKMLVDGGAAVNLMPYSLYRKLGKQDDELVKTNMTLSGVGTDSSIKARGVTSVELTIGTKTLAAAFFVADVEGNYSLILGXIGFTPINVYLXLHQILIQWNYTEMPGLSREIVEHRLPIKSGFRPFKQKARTFRPDLLPRIKDEIHRLLEADFIRPCRYAEWVSNIVPVEKKETGFIGLFEWVVMTFGLKNAGATYQRAMNLIFHELLGNTVEVYIDDIVVKSAEFSSHIADLRKAFDKMRQYGLKMNPRKCAFRVSAAEDKVIGAVLTQETEGKEHVVAYLSRRLVDAETRCYLLSSHCIVSGQADVIKYMLHNPIMSGRIGKWAYALIEYDLAYEPLKSMKGQVVANFIVEHRVNDIPELDMS

SEQ ID NO: 239212 - protein, 224 aa, Zea mays
  Clone ID: MRT4577_14974C.1.pep
ARFSVAARADETTRPAALLAVCSGSTMRAPAGRRRDEATHFVMSDFALSNDHAMLLHGHGRDKSNVTYPAHPSVFPANPRPMQGGGFNESPRQTRSFCAHTARKNDAAVLPISTEAKLFSADGYAGIRNVSDVFCPPEWGHTGRALDDQHKNKESDLLLFDWPELDDLEDLQTNLRKLDSAFELGSDYFDVPMWPSIGSPDVQLVLSSYFGHPHPSTNPDTNDQ

SEQ ID NO: 239213 - protein, 222 aa, Zea mays
  unsure (1)..(222): unsure at all Xaa locations
  Clone ID: MRT4577_149750C.1.pep
AARGTPGRQPWKFWTRRXQITECPAQLEKAICGEGARRPEKKQGQREHDGVVARERNQASRLLGAPARPWEKRALAAAGPVAGVLSATEVEGRKGKNCRGRRHGEFTARARTRGGPRHGWSRGVCSAYSHHGWALVKPRHAPARAGHFQSPRGVKKAADKCTGTMACGLASRAGAWREGARRGKSREGGAHVWVPREKSAMEADVEVEAGTSGSGMGERAPS

SEQ ID NO: 239214 - protein, 137 aa, Zea mays
  Clone ID: MRT4577_149751C.1.pep
GMGVSLVESLKNPQEFVERTTPNGRCTVRVQVLRLPIALTKVLEESEQLLGQIIDGKTAKRDGVLDPRLSQEDGDSAATLRQRMIDAIDSELEAISKQVDKEKLDRYRKTWLGHLERIWSLCPWQVGPNILLLAESK

SEQ ID NO: 239215 - protein, 1688 aa, Zea mays
  Clone ID: MRT4577_149752C.1.pep
MAQGHISLSIVREEIVGAFRDKLGNATKVAQKTNQQRCMLLKWFGQSRPNLRLVPPYSRFKRNGKRRLSLHLMLIQSAINEGRLKFQEMQVDTEPFPMNMIDFEGKKVLTRPNTADEGKGKEIVIGDAREVGGNHKTSCRKVVAEKTPDGGETLKVTITASGTGGQTQTGRQAQEPILRIADGPPSRRGRSDASPDGPANSSGRSGRAQDPQQPRTFKPRRPEIGTWKTNTFKAAGRLIKPGPTFDQLLSKYVKKKAGPSNRPPKRPRSPIHEQRQAQAQQDCRITRLPRPTNPAGGHMPVATQRTTKKDIIKIGTADVVIQGDNKGPMIFGESANTTKKDNTTKKDTAIVKTADPKYSMPRWCLAGLTRSQKRKLQRLRVKESQEKEAEKIFNDTHPLYPPPQKKWRPKAVEKKQTATEIESQPTPGADCLASARGPFVPHQEASGQSAPGADRPAPAHGPSGFHQEASGQPAPGADRPASARGPSAVHQEASNDTTTSMEEDDLLGEDLVDYEASPERPGMDVNIITFSADCTVIGDDEPVVAQFDFGPKEAAFTKPKESVNHLKPLFVRGHIDGIPIAKMLVDGGAAVNLMPYSLYRKLGKQDDELVKTNMTLNGVGTDSSIKARGVTSVELTIGTKTLAAAFFVADVEGNHSLILGRDWIHANQCIPSTLHQMLIQWVGDDIEQVHADVSACIAVADAPVLWTYETATCLTGVDFSDYQFISIDKKGFIPVMLEPMENREFRDLDKLGQGFTSADPLEEIDIGDDLLPRIKDEIHRLLEADFIRPCRYAEWVSNIVSVEKKESGFIGLFEWVVMTFGLKNAGATYQRAMNLIFHELLGNTVEVYIDDIVVKSAEFSSHIADLRKAFDKMRQYGLKMNPRKCDFGVSAEVDPDRIKSIRNVGPPTCKVEVQRFLGKVNYLRRFISNLAGRIDAFTPILRLKNDAEFAWGAEQQEAFDLIKKYLSSAPVLKAPRAGVPFRLYIAAEDKVIGAVLTQETEGKEHVVTYLSRRLVDAETRCYLLSSHCTVSGQANVIKYMLHNPIMSGRIGKWAYALIEYDLAYEPLKSMKGQVVADFIVEHRVNDIHELDMLYLTITPWALYFDGSVCNEGQGIGIVLVSPSNVSFDFSSRLKTYCTNNQAEYEALLFGLELLNGMGVKHVKVFGDSQLVVQQVLEEYQCFDGTLNSYLEKCWSIIHSFDEFSIRHISRVENHRANDLTQDASGYRIKRGKFHKTEILITSAEPNSQVTDRPRDDAGPSGVTRNVLLIDSADNEADASDWRTPILNYLRNPNIRTDKNIRRTAFKYVLMSDELYRRTVNDVLLKCLGPDDAILAMAEVHEGICGTHQSAPKMKWLLRRSGFYWPSMIADCFKYYKGCQVCQKFGDLQLVPAAELHPIIKPWPFRGWGLDFIGEIHPSSSKGHQFVLVATDYFTKWTEVVALKNMTHKEVIEFITEHIIHRFGIPQTLTTDQGTSFMSKEANGQAESSNRTLINLIKKKISDNPKHWHKILSEALWAHRISKHSATKVSPFELVYGFARQNDLTVTDYYNSMMNNIDEVTDKRVIALGAIEKDKIMVARAYNKKVKAKSFQVGDLVWKTILPLRNKDRKFGKWSPSWEGPYKYCQYVTHQYITLITEYYLLYEGGTGAYGPYLHRPIKLAARPRSAAEAQWPLLTASFGAAAPAVTTQ

SEQ ID NO: 239216 - protein, 1848 aa, Zea mays
  unsure (1)..(1848): unsure at all Xaa locations
  Clone ID: MRT4577_149753C.1.pep
MVGSRDSSDISPSNIIEPSWETLPADEQLQFEEHKERMIQEAKAKFLANFKVDRNNKVVRHRATDPASLQPTPDIPNVVTTSHNPFMGCRWTHTLSNRKSAANQPICTCPDRPHRAGGLAPAAIDIVREEIAGAFRDKLGVSMVPGGQSYRKPYDSRFDHHPYPQGTRIPEFAKFSGDQGKNTREHIGQFLAQLGELADTEAFRAKSSACASLQPVQKKRQEEIQSAINEGRLKFQEMQVDTEPFPMNMIDFEGKKVLVRPNTADKGKGKETIIGNAKKADGDCKVSCRKVVAEKTPDGGETLKVTITASSTGGQAQTGRQLREPVLRITDSPPSRHGRSDASSDGPEDSSGRSGHAQDSQRPRTFKPRRLEIGTWKTNTFKAAGRLVKAGPTFDQLLSKYVKKKAGPSNRPAKRPRSPIHEQRQVRPIGPPHQSEEVKGHTVQVRPNIPAWTPPPPYPPMSYPYTYLPPPYVPNQMWGMPPYPFGMPQYPAWGAPQTSVFDRLTPPVQDQLSTAQSGHQAQTQQDCRTTRPSRPTNPAGGHMPAATQKTTKKDIIKIGTADVVIQEDNKGPMIFSESANTTEKDTATIKTTDPKYSMPRWCPAGLTRSQKRKLQRLRAKESQEKEAEKTFNDTHPLYPPPQKKWRPKAVEKKQTATEIESQPAPGADRPAPAHGPSAVHQEVSGQTAPGADRPAPACGPSAVHQEASNYTTTSMEEDDLLGEDLVDYEASPERPGMDVNIITFSVDCTIIGDDEPVVAQFDFGPKEAAFTKPKESVNHLKPLFVRGHIDGIPIAKMLVDGGAAVNLMPYSLYRKLGKQDDELVKTNMTLSGVGTDSSIKARGVTSIELTIGTKTLAAAFFVADVEGNYSLILGRDWIHANQSHESLVTDSSAAKAGWSGLSQKSSDFKTEHLPQRKDSITDXIRSPRPESPPSHXRSSDFSLGDMIEEFRDLDKLGQGFTSADPLEEIDIGDDCFAWNYTEMPGLSREIVEHRLPITSGFRPFKQRARTFRPNLLPRIKDEIHRLLEADFIRPCRYAEWVSNIVPVEKKETGFIGLFEWVVMTFGLKNAGATYQRAMNLIFHELLGNTVEVYIDDIVVKSAEFSSHIADLRKAFDKMRQYGLKMNPRKCAFGVSAEQQEAFDLIKKYLSSAPVLKAPQAGVPFRLYIAAEDKVIGAVLTQETEGKEHVVLYLSRRLVDVETRCYLLSSHCTVSGQDDVIKYMLHNPIMSGRIDKWAYALIEYDLAYEPLKSMKGQVVADFIVEHRVNDIHELDMSYLTITPWTLYFDGSVCNEGQGIGIVLVSPSNVSFDFSSRLKTYCTNNQTEYEALLFGLELLNGMGVKHVMVFGDSQLVVQQVLEEYQCFDDTLNSYLEKCWSIIHSFDEFSIRHISRVENHRANDLAQDASGYRIKRGKFHKXKSDNQCKAKFPGXRTVRVMTSDRPGXRNVLFINSADNEADASDWRTPILNYLRNPNIRTDKNIRRTTFKYVLMSDELYRRTVNDILLKCLGPDDAILAMAEVHEGICGTHQSAPKMKCMIADCFKYYKGCQVCQKFDDLQLVPAAELHPIIKPWPFRGWGLDFIGEIHPSSSKGHQFVLVATDYFTKWTEAVALKNMTHKEVIEFITEHIIHRFGIPQTLTTDQGTSFMSNEANGQAESSNRTLINLIKKKISDNPKHWHKILSEALWAHRISKHRATKVSPFELVYGQEALLPVEISLNAIRFARQNDLTATDYYDSMMDNIDEVTDKRMIALGAIEKDKIMVARAYNKKVKAKSFQVGDLVWKTILPLRNKDRKFGKWSPSWEGPYKIKQVMSGNAYLLQILQGKDLPKALNGRFLKQYHPSMWQDA

SEQ ID NO: 239217 - protein, 68 aa, Zea mays
  Clone ID: MRT4577_149754C.1.pep
NPRAPRSDRGGSSPLSPVLKFFSKGARSFLGFSPVLSKMFRGGSLKKVCPFPGKGRPPPPGKHPPRFF

SEQ ID NO: 239218 - protein, 1820 aa, Zea mays
  unsure (1)..(1820): unsure at all Xaa locations
  Clone ID: MRT4577_149755C.1.pep
MAGSKDSSDISPSNIIEPTWETLPTDEQLQFEEHKERMIQEAKAKFLANFKVDRNNKVVRHRATDPASLQPTPDIPNVELGGNTRNTSATGCHDQSQPLYGMPMDTYPEQPQIGSKSADLHMPGPSARTAFAWPNLQLVPPYSRFKRNSKRRLSLRLMLIQSAINEGRLKFQEMQVDTEPFPMNMIDFEGKKVMVRPNTADKGKGKETIIDHSKKADEDRKVSCRKVVAEKTPDGGETLKVTITASSTGGQAQTGRQMQELVLRIPDGPAHRRGRSGTPPDGPENSNGRSGCAQDSQRPRTFKPRRPEIGTWKTNTFKAAGRLVKAGPTFDQLLSKYVKKKAGPSDRPAKRPRSPIHEQRQVRPIGPPHQSEEMKGHTVQLRPNIPAWTPPPYPPMSYPYPYPYLPPPYVPNQMWGMPPYPFGMPQYPAWGAPQTSVFDRLAPPMQDRLSTAESGHQAQAQQDCRTTRPPRPTNPAGGHMPVATQRTTKKDIIKIGTADVVIQGDNKGSMIFGESANTTEKDTATIKTTDPKYSMPRWCPAGLTRSQKRKLQRLIAKESQEKEAEKTFNDTHPLYPPPQKKWRPKAVEKKQTATEIESQPALGADRPAPAHGPSVVHQEASGQPAPDADRPAPACGLSAVHQEASNDTTTSMEEDDLLREDLVDYEASPERPGMDINIITFSADCTIIGDDEPVVAQFDFGPKEVAFTKPKESVNHLKPLFVRGHIDGIPIAKMLVDGGAAVNLMPYSLYRKLGKQDDELVKTNMTLNGVGDSSIKARGVMSVELTIGTKTLAAAFFVADVEGNYSLILGRDWIHANQFHESLITDXVRFSKPDGMVCHKTVRTLRPNIYRSKRTVLRMIRSPRPESPPSHXRSSNSSMGSMIEEFRDLDKLGQGFTSADPLEEIDIGDEWVSNIVPVEKKESGKLRVCIDFRNLNRATPKDEYPMPIADTLINNASGNRIISFLDGNAGYNQIFMAEEDASKTAFICPGFIDLFEWVVMTFGLKNAGATYQRAMNLIFHELLGNNVEVYIDDIVVKSAEFSSHIADLRKAFDKMRRYGLKMNPRKCAFGVSAGKFLGFVIHEHGIEIDPDRIKSIRNVGPPTCKVEVQRFLGKVNYLRRFISNLAGKIDAFTPILRLKNDAEFAWGAEQQEAFDLIKKYLSSAPVLKAPRAEVPFRLYIAAEDKVIGAVLTQETEGKEHVVTYLSRRLVDAETRCYLLSSHCTVSGQADVIKYMLHNPIMSGRIGKWAYALIEYDLAYEPLKSMKGQVVADFIVEHRINDIHKLDMSYLTITPWTLYFDGSVCNEGQGIDIVLVSPSNVSFDFSSRLKTYYTNNQAEYEALLFGLELLNGMGVKHVKVFGDSQLVVQQVLEEYQCFDGTLNSYLEKCWGIIHSFDEFSIRHISRVENHRANNLAQDASGYRIKRGRFHNAENLITSAGPIPQVADRPRRDAGPSGVTRNVLLIDSADNEADASDWRTPILNYLRNPNIRTNKNIRRTAFKYVLMSDELYRRTVNDVLLKCLGPDDAILAMTEYYKGCQVCQKFGDLQLVPAAELHPIIKPWPFRGWGLDFIGEIHPSSSKGHRFVLVATDYFTKWTEAIALKNMTHKEVIEFITEHIIHRFGIPQTLTTDQGTSFMSKEKKISDNPKHWHKILSEALWAHRISKHRATKVSPFELVYGQEAVLPVEISLNAVRFARQNDLTVTNYYNSMMDNIDEVTDKRMIALEAIEKDKIMVARAYNKKVKTKSFQVGDLVWKTILHLRNKDRKFGKWSPSWEGPYKVKQVMSGNAYLLQTLQGKDLPKALNGRFLKQYHPSMWQDA

SEQ ID NO: 239219 - protein, 1639 aa, Zea mays
  Clone ID: MRT4577_149756C.1.pep
MVGSRDSSDISPSNIIEPTWKTLPADEQLQFEEHKERMIQEAKAKFLANFKVDRNNKVVRHRATDPASLQPTPDIPNPTPPMFDQRAGGLAPAAIDIVREEIAGAFRDKLRIQSAINEGRLKFQEMQVDTEPFPMNMIDFEGKKVLVRPNTVDKDKGKETIIGNAKEADGDRKVSYRKVVAEKTPDGGETLKVDATSTRPIEHCSIRSRGTNPTGLPDYSAFKADQSDRGAYACSNSKNNKKGHHQNRHCRCCHTATIKTAMIFGESANTTEKDTATIKTADPKYSMPRWCPAGLTRSQKRKLQCLRAKESQEKEAEKTFNDTHPLYPPPQKKWRPKAVEKKQTATEIESQSAPGTDRPAPACGPSAVHQEVSGQPAPGADRPTPARGPSAVHQEASNDTTTSMEEDDLRGEDLVDYEASPERPGMDVNIITFSVDCTIISDDEPVVAQFDFGPKEAAFTKPKEAVNHLKPLFVRDHIDGIPIAKMLVDGGAAVNLMPYSLYRKLVHESLITDNSALKAGWSGLSQNSSDFKTEHLSQRKDSITDDPVPETGKSAITQRSSDSFVGDMIEEFRDLDKLGQGFTSADPLEEIDIGDGKTPRPTFVNKTLETDSRNEMIGLLKEYSDCFAWNYTEMPGLSREIVEHRLPIKSGFRPFKQKARTFRPDLLPRIKDEIHRLLEANFIRPCRYAEWVSNIVPVEKKESGNRIISFLDGNVGYNQIFMAEEDASKTAFICPGFIGLFEWVVMTFGLKNAGATYQRAMNLIFHELLGNTVEVYIDDIVVKSAEFSPHIADLRKAFDKMRRYGLKMNPHKCAFGVSAGKFLGFVIHEYGIEIDPDRIKSIRNVGPPTCKVEVQKFLGKVNYLRRFISNLAGKIDAFTPILRLKNDAEFTWGAEQQEAFDLIKKYLSSAPVLKAPQVGAPFRLYIAAEDKVIGAVLTQETEGREHVVTYLSRRLVDAETRCYLLSSHCTVSGQADVIKYMLHNPIMSGRIGKWAYALIEYDLAYEPLKSMKGQVVADFIVEHQVNDIHELDMSYLTITPWTLYFDGSVCNEGQGIGIVLVSPSNVSFDFSSRLKTYCTNNQAEYEALLFGLELLNGMGVKHVKVFGDSQLVVQQVLEEYQCFDGTLNSYLEKCWSIIHSFDEFSIRHIARVENHRANDLAQDASGYRIKRGKFHKTKNLITGAEPNSQVADRPRDDAGPSGVTRNVLLIDSADNEADASDWRTPILNYLRNPNIRIDKNIRRTAFKYVLMSDELYCRMVNDVLLKCLDPDDAILAMAEVHEGICGTHQSALKMKWLLRRSGFYCPSMIADCFKYYKGCQVCQKFGDLQLVPAAELHPIIKPWPFRGWGLDFIGEIHPSSSKGHQFVLVATDYFTKWTEAVALKNMTHKEVIEFITEHIIHRFGIPQTLTTDQGTSFMAKEVREFAELYRIKLLNSSPYYAQANGQAESSNRTLINLIKKKVSDNPKHWHKILSEALWAHRISKHSATKVSPFELVYGQEAVLPVEISLNAVRFARQNDLTATDYYNSMMDNIDEVTDKRMIALGAIEKDKIIVARAYNKKVKAKSFQVGDLVWKTILPLRNKDRKFGKWSPSWEGPYKVKQVMSGNAYLLQTLQGEDLPKALNERFLKQYHPSMWQNA

SEQ ID NO: 239220 - protein, 1324 aa, Zea mays
  Clone ID: MRT4577_149757C.1.pep
MAGSRDNSDISPSNIIEPTWETLSADEQLQFEEHKEQMIREAKAKFLANFKVNRNNKSQPLYGMPMDTYPEQPQIGSKSVDLHMPGPSAREREPSGPATVGPIFNELPRHAPEPQHTTHNLNYPVGRFAYNNGRSAYNHGRSGPMPGQSAHELFEEDCYMNPHLSQQHFSPHYAMHQPINSKSKAQESFLAPPRRPERNDQTYEPYRANGNAPRTAFAWYATLPPNSISSWGDLEQKFHDHFFSGDYELDLVDLVALRQGKDESVNEYIRRFRDTRNRCFQIYLAEKQLAGLAFNGLRYYLKERLEGIQFFTLAQLHQRALACESRSKETAKTIRHNVHIVECDQSSSDDESTEIYAAEMVWPKQAKSSACSSLQLVQRNGKSRKVVAEKTPDGGETLKVTITASGTGGQTQTGRQAQEPIMRIADGPPSRRGRSKASPDGPKTTGGRSDYTQDPQQPRIADVVIQEDSKGPMIFGESANTTKKEDMATIKAADPKYSMPRWCPAGLTRPQKRKLQRLRAKESQEKEAEKIFNDTHPQYPPPQKKWRPKVVEEKQTATKIENKTTLVQHPVGTTHSLANKTGQSALGADRPPSESGPFAPHQEASNDIPTSMEEDDLLGEDLVDYEASPERPGFTSADPLEEIDIGDGKTPRPTFVNKTLETDPRNEMIGLLKEYSDCFAWNYTEMPGLSREIIEHRLPIKSGFRPFKQKARTFRPDLLPRIKDEIHRLLEADFIRPCRYAEWVSNIVPVEKESGFIGLFEWVVMTFCLKNAGATYQRAMNLIFHELLGNTVEVYIDDIVVKSSEFSSHIADLRKAFDKMRRYGLKMNPCKCAFGVSAAEDKVIGVVLTQETEGKEHVVTYLSRRLVDAETSIRHISRVENHRANNLAQDVSGYRVADRPREDAGPSGVTRKVLLIDSADNEVDARDWRTPITNYLRNPNVRTDKNIRHTSFKYVLMSDELYRRTVDDVLLKCLGPDDAILAMAEVHEGICGTHQSAPKMKWLLRRSGFYWPNMIADCFKYYKGCQVCQKFGDLQLVPVAELHPIIKPWPFRGWGLDFIGEIHPSSSKGHQFMLVATDYFTKWTEAVTLKNMTHKEVIEFITEHIIHRFGIPQTLTTDQGTSFMSKEANGQSESSNRTLINLIKKKISDNPKHWHKILSEALWAHRISKHSATKVSPFELVYGQEAVLPVEISLNAVRFARQNDLTLTDYYNAMMDNIDEVTDKRVIALGAIEKDKIIVARAYNKKVKAKSFQVGDLVWKTILPLRNKDRKFGKWSPSWEGPYKVKQVISGNAYLLQTLQGKDLPKALNGRFLKQYHPSMWQDA

SEQ ID NO: 239221 - protein, 77 aa, Zea mays
  Clone ID: MRT4577_149758C.1.pep
CHAHRKKYFSSSSCSACQTRTWLKHTTSLPRRRRWKCWQCSAMIDVEFYQSSVPRLPMPISFRDRVGWDVLQSSANC

SEQ ID NO: 239222 - protein, 49 aa, Zea mays
  Clone ID: MRT4577_149759C.1.pep
EACKAWFHPSCMAMAIAQAKKLDPFVCSACLKENGSKSLSNVYAPSSNF

SEQ ID NO: 239223 - protein, 131 aa, Zea mays
  Clone ID: MRT4577_14975C.1.pep
MPHDYAGNELNTGFLFVVSNDRTVALFDEWHTARQVSAGMKDQDVLNRMKRRGAFRRLRVGARILDKARFSGFCQDNRDAAQVATVHANCFRTKRAKVADLKAVLRAAKGLNRTRMEIKWPAHSECVKSWL

SEQ ID NO: 239224 - protein, 126 aa, Zea mays
  Clone ID: MRT4577_149760C.1.pep
HAYDHASVHAYGHTNDAINARLDAICPDELFCADTLALAGRDYDRLTKGPGIPLPTGRTDCNRTEAVDIALNSATADANINEMIEPFAKKCKLTAKDDCRTLRAHTQNKALDSMKPTWIDNCWGTN

SEQ ID NO: 239225 - protein, 69 aa, Zea mays
  Clone ID: MRT4577_149761C.1.pep
FLNEHTITEIHSHVHTQVQKNRSILILLTTYPNASRAKTTLYYCYKNKAAVTIIFCKKHAQLSSPSTLF

SEQ ID NO: 239226 - protein, 72 aa, Zea mays
  Clone ID: MRT4577_149762C.1.pep
FFFFFFFFLFFFFFFFFFFFFFFFFLNKGPPFKKKHFGLCRNNFQGGRTFFYPVLKIPPFPQVPKHIPPPFK

SEQ ID NO: 239227 - protein, 94 aa, Zea mays
  Clone ID: MRT4577_149763C.1.pep
SKTQYRSEIKTSLIKKKGSMRKVQIEIGSKTRKSTFVGYQKHPKSVFPNFARRFSIILLIKWGTKMLMPFVILLAVVKTSTEGHQSLGKGIREK

SEQ ID NO: 239228 - protein, 63 aa, Zea mays
  unsure (1)..(63): unsure at all Xaa locations
  Clone ID: MRT4577_149764C.1.pep
MQVPFSYACACIWTYGASIIYIRRYSGATIIIYDVFFGXITVDITGSAIQVHTVQQLNQKFNG

SEQ ID NO: 239229 - protein, 92 aa, Zea mays
  Clone ID: MRT4577_149765C.1.pep
LKQSVKFRGLLDPFSFLSPPYNTLLILFFLHVLLSHLLFFFSFFLFFLYFFFLDLKYRSHNTLLLRGRTYQHDSSIIAVYIIKLLEDGAAFP

SEQ ID NO: 239230 - protein, 107 aa, Zea mays
  Clone ID: MRT4577_149766C.1.pep
ARRHRHRRGRLRDGDENNDEDEDEDEDNDEDEDEDDDDEDDDDDDDDDDDDEDDHRAYRDCCRWLKEVEPDCVCEALLRLPPFLRQAAAQVHRQVGNSCKFYKFGGV

SEQ ID NO: 239231 - protein, 69 aa, Zea mays
  Clone ID: MRT4577_149767C.1.pep
CYPSALLQHLAPILCMPRVMPCTKTRSLSAAETKTDVHECSDHTCRCPFSRITCVWSWKSTLHTSFVWS

SEQ ID NO: 239232 - protein, 62 aa, Zea mays
  unsure (1)..(62): unsure at all Xaa locations
  Clone ID: MRT4577_149768C.1.pep
MSTEEAVVAEVPVTEVPAEVPAAQVAEAPKANKAPHQITAXSRSTLSASWKTSSHPPNSNTS

SEQ ID NO: 239233 - protein, 141 aa, Zea mays
  Clone ID: MRT4577_149769C.1.pep
RLGSDWWSSHGFLLDQGELGWRPGQHRRGSSASSTTRGCDDQEDEQHRPAMAGPGEDEGGRGELEQGESARAPWARISSQGHEEAALEGGDRRGGDQREGHQRDSRARELRGAGAGAGTRRGRAAAGRAQSKRHQWMDVEG

SEQ ID NO: 239234 - protein, 48 aa, Zea mays
  Clone ID: MRT4577_14976C.1.pep
CLFFLIKKKKKKKKKKKKKKKKKKKIKKKKKKKKEKKINKKFIKKKKI

SEQ ID NO: 239235 - protein, 79 aa, Zea mays
  Clone ID: MRT4577_149770C.1.pep
RKHASGKMVVIGSEPPSKVKGLWLFRGQEVPKFGKDGAYARRPQGENPPPPAPKIFFRFPDLALSPPKGINWGGKKFVF

SEQ ID NO: 239236 - protein, 39 aa, Zea mays
  Clone ID: MRT4577_149771C.1.pep
SRLRGRSASASLRFRLVHIYISSFQTEGYVLASCALPSD

SEQ ID NO: 239237 - protein, 83 aa, Zea mays
  Clone ID: MRT4577_149772C.1.pep
SRPAGISYHLRLYISSLSAPPPPADAYETRIDVASLDTMTTYESEGDAGASKTLPSMQRIGSLCTVEHSASLHFSSVHSRPRS

SEQ ID NO: 239238 - protein, 81 aa, Zea mays
  Clone ID: MRT4577_149773C.1.pep
SPSHALLSVPRAHGYHNGPPLPVVHANWHLLTSHLLINLGGFGTHGPQYPYMAVHISPQDHYQDTCRVAHAIPCTNDLGPL

SEQ ID NO: 239239 - protein, 98 aa, Zea mays
  Clone ID: MRT4577_149774C.1.pep
ILRSTSKKKRKRKKKKKKKKKKKKKKKKKKKKKKKKKKKKKKKKKKKKKRAADNKREPKPGKKLGTAPCRGQNFPKEDRIKTRSKKGKKLYPGKNSKP

SEQ ID NO: 239240 - protein, 253 aa, Zea mays
  Clone ID: MRT4577_149775C.1.pep
MAAVVSDLVDFLNASPTAFHAVDEAKRLLKAAGFEQLSEREEWSGLQPGRKYFFTRNHSAIVAFAIGAKYVAGNGFHIIGAHTDSPCLKLKPVTKITKGGYLEVGVQTYGGGLWYTWFDRDLTIAGRVLVREKKDGVVSYGHKLVRVQEPIMRIPTLAIHLDRTISSEGLKINNQNHLVPVLGTLIKHEMQKLVEGNVPGESSGAENTKHHPLLLQLIAKEANCEVDEICDFELQLCDTQPSVVAGAMKESSF

SEQ ID NO: 239241 - protein, 83 aa, Zea mays
  unsure (1)..(83): unsure at all Xaa locations
  Clone ID: MRT4577_149776C.1.pep
AAAIAGIGGEKAGGFAPYYVDEPMDFKINTDEIMTSLKSVNGQIESLISPDGSRKNPARNCRDLKFCHPELKSGEYXVDPNQG

SEQ ID NO: 239242 - protein, 178 aa, Zea mays
  unsure (1)..(178): unsure at all Xaa locations
  Clone ID: MRT4577_149777C.1.pep
ECVVNNIVDQAILDNNFSYNGVRLCLHLVKNLTATSSXVHSKLCWLNVVNVNMLVELLWQPQPIEALLRGLTLFIADLCTKLNEPEILAAVPDLLQSLLGQSSVENIKTSCQVLKLCGFYVDSYLNQTSSKAMDELFEKLNQIKSSIENSGVQALIKSVEDARERKWYSNSTPVACNG

SEQ ID NO: 239243 - protein, 59 aa, Zea mays
  Clone ID: MRT4577_149778C.1.pep
YKCTFLFLVRHKKRRHGSYFALYPLSGLDQVPPLTLCGGHPSGPVRTGELGPVCRPRAL

SEQ ID NO: 239244 - protein, 51 aa, Zea mays
  Clone ID: MRT4577_149779C.1.pep
MAAAEVACTDGDLILSDDAIAITAEKSATIGKADTINAESYWPALFAKLLE

SEQ ID NO: 239245 - protein, 87 aa, Zea mays
  Clone ID: MRT4577_14977C.1.pep
TKTKYHMSTASNLKHTGFLGPPYKDFQNNFTTPGPSDWPILRKASEQIKKSQGRLISPGWGSNKGPLGAQKFETLPRKRPGPFLGIP

SEQ ID NO: 239246 - protein, 210 aa, Zea mays
  unsure (1)..(210): unsure at all Xaa locations
  Clone ID: MRT4577_149780C.1.pep
MATTLSLSSPLFLGAPARARDVVPYGVTSASVSLMTLNMPGKGYTSRVRCREQQRRTTIVSMLGRKSTARATVVPDPDYRLPIAILGIASAFAYADNLLAAAPVGLLGLLLLFQTTRVRFVFDNEALEVKVGEQXRSQVKXFVGGKNRWKYSTFVNWELWWPQFPVLVYFKETQTKPEGQIHFFPVIFDGRQLYDVMVERAGPSKTSGPK

SEQ ID NO: 239247 - protein, 157 aa, Zea mays
  Clone ID: MRT4577_149781C.1.pep
YLCLEGNQRLEQLLSQTPTIGYQSLYLVSTKVRIASAFAYADNLLAAAPVGLLGLLLLFQTTRVRFVFDNEALEVKVGEQLQESGENVFVGGKNRWKYSTFVNWELWWPQFPVLVYFKETQTKPEGQIHFFPVIFDGRQLYDVMVERAGPSKTSGPK

SEQ ID NO: 239248 - protein, 171 aa, Zea mays
  Clone ID: MRT4577_149782C.1.pep
MDAMAPEEYASQSKLLQEFTNVPSIDSASILKTNDEDRSRAMFSISQPDLLANTNRKYVLYSHITTRAGTGTTSPDFQWSPFPTETTGVSATVPSPSGSKLLVVRNGERGCPTKLEIVCQSHVEKEIHVAGSVHGPLYTDEWFHGVSWNQEETLVAYVAEAPAPTRTTFQS

SEQ ID NO: 239249 - protein, 252 aa, Zea mays
  Clone ID: MRT4577_149783C.1.pep
MRLGEPVRWLASRTRPRRAMGSSAPVRAAGGTRDPGENPAVGRLRELFTGDAADGWEKSWEFGVTPWDLGKPTPVIEHLARSGTLPKGRALVPGCGMGYDVVALASPERFVVGLDISDMAVKKAKQWSSSLPNADYFTFLAEDFFKWIPSEQFDLIFDYTFFCALDPSLRVAWAETVNRLLKPDGELLTLIYLISDQEGGPPYNNTVADYQKVLEPLGLKSVLMEDNELAIKPRKGCEKIGRWKRCAHQSSL

SEQ ID NO: 239250 - protein, 86 aa, Zea mays
  unsure (1)..(86): unsure at all Xaa locations
  Clone ID: MRT4577_149784C.1.pep
SYGDRDYQTAKVHLRCARRQFTSVIGFASFRTPTGTCGDFQEGDCHSTNSHTVLEVTCIGAPRCVVXAISPESFGLQHCRRDDTVA

SEQ ID NO: 239251 - protein, 184 aa, Zea mays
  Clone ID: MRT4577_149785C.1.pep
MDAMAPEEYASQSKLLQEFTNVPSIDSAFILKTNDEDRSRAMFSISQPDLLANTNRKYVLCSHITTRAGTGTGTTSPDFQWSPFPTETTGVSATVPSPSGSKLLVVRNGERGCPTKLEIVCQSHVEKEIHVAGSVHGPLYTDEWFHGVSWNQEETLVAYVAEAPATPRPAFNRSGTRERSCSEG

SEQ ID NO: 239252 - protein, 695 aa, Zea mays
  unsure (1)..(695): unsure at all Xaa locations
  Clone ID: MRT4577_149786C.1.pep
MDATMAPEEYASQSKLLQEFTNVPSIDSAFILKTNDEDRSRAMFSISQPDLLANTNRKYVLYSHITTRAGTGTGTGTTSPDFQWSPFPTETTGVSATVPSPSGSKLLVVRNGERGCPTKLEIVCQSHVEKEIHVAGSVHGPLYTDEWFHGVSWNQEETMVAYVAEAPAPPRPAFNRSGYTGEGCSEEDCSAWKGQSVWEEDWGETYSKKGRPSLFVLDISRGEVVAVKGVPTSLSVGQVVWAPESPGAXAKYLVFVGWSERNGFFQNTARKLGIKYCSNRPCALYAAPCPIQGPEPPGYDXAVMVNQAPAVRWRNLTPGFSSALFPRSAGXKASGLPVFKTSPVHTTXVLILYSWRALALDGTNVLAVSSSPIDPPSISXGRRLAVTPAEGEARRWTWDEVTSPFMASNSKVKSLLLHHSVSILKIPVPSPSADLSDGGKLPLEAIFVSCSCKGSSRSPTVVVLHGGPHSVSVSSYSKSSAFLASLGFNLLVVNYRGTPGYGEEALQSLPGKVGSQDVQDCLAALDFAVEEELVDASRVAVVGISHGGFLTTHLIGQAPDRFAVAAARNPVCNLSLMAGTTDIPDWCYVVACGTQAKRYASEAPSPHHLRLFYQRSPIAHVSKVKAPLLMLLGGADLRVPASNGLQYARSLIERGGDVKIMMFPEDIHEINLPRSDFESFLNIGVWFKKHLNAVA

SEQ ID NO: 239253 - protein, 121 aa, Zea mays
  unsure (1)..(121): unsure at all Xaa locations
  Clone ID: MRT4577_149787C.1.pep
MAPLLAAAMNRAXAXHPGLTSHLPGPNNESFSRHPLPPSSPRXSKRRRNLNFTTRNXRARTQNGAQMLSPSQTPQRNWPPPDFTPGAATSANQILCARNEDGKGESNWEXFCXHKHPAKGY

SEQ ID NO: 239254 - protein, 105 aa, Zea mays
  Clone ID: MRT4577_149788C.1.pep
VAVSCCALGPRSGGGGGLKKNIALLLLLVRCAPRSLFCCSRCLRGVAFPPSSRRGPVALLLLSPLLVGGGAAFLACSVVAPSAAGVGVLLGALLLLRPRSCVSLS

SEQ ID NO: 239255 - protein, 178 aa, Zea mays
  Clone ID: MRT4577_149789C.1.pep
PSPPSSTPPFFVPVPVHWLVMGATSPSGLELTMAVPGLSSSSGSEGFVCNNNISNNGGGNMRDLDMNQPASGGEEEDFLMGGVEEDEEERGAGGPHRPKKLRLSKEQSRLLEESFRLNHTLSPKQKEALAIKLKLRPRQVEVWFQNRRARTKLKHTEMECEYLKRCFGSLTEENRRLQ

SEQ ID NO: 239256 - protein, 371 aa, Zea mays
  Clone ID: MRT4577_14978C.1.pep
MRRALCHRITCYGRTGPRILSTPLIPAIWPGSVANVPSQKTPSYHRKSTSFATKVTPSTTAMESGADEVAFESPAHFRIYKSGRIERLNRPPVLPAGLDEATGVTSKDVVLDAGTGLSVRIYLPKLQEPSKKLPVLVYFHGGAFLLESAGSATYHTYVNPLAAAAGVLVVSVDYRLAPEHPVPAAYEDSWAALQWATSAQDEWIVEHGDTARLFLAGDSAGANIVHDMLMRASGAGGPRVEGAILLHPWFGGNAPIEGEPEGAAAATAGLWTYACPGAVGGADDPRMNPLAPGAPPLERLGCARMLVCAGKKDALYVRDRAYYEAVAASAWPGDVAWLESEGEEHVFFLPKPECENAKLLMDRVVAFIAGA

SEQ ID NO: 239257 - protein, 126 aa, Zea mays
  unsure (1)..(126): unsure at all Xaa locations
  Clone ID: MRT4577_149790C.1.pep
PASSRTLQGDWNXGTGSHTNYSTKAMRYAGGYEVIKEXIKKLRRRLREHIDGYGEGIKRRLTARHKTAXINTFKXRVANLRACIHIGHDTXKDCKEYLQDRKMDSNMDPYMITGMIILTNILWKGN

SEQ ID NO: 239258 - protein, 62 aa, Zea mays
  unsure (1)..(62): unsure at all Xaa locations
  Clone ID: MRT4577_149791C.1.pep
XILSHFILRNGTHSRKYSIIHIRLLVVFIFISQKKEKNKERSMFDVIPFTNQNALQTDPSYP

SEQ ID NO: 239259 - protein, 76 aa, Zea mays
  Clone ID: MRT4577_149792C.1.pep
VLDQTGYSYNPSGVYNTFIICPDHVCPSTHYCVSILRSLVFEGGGLSVSRMISTIVCPALCVNCLGHHIHGFLKFR

SEQ ID NO: 239260 - protein, 74 aa, Zea mays
  Clone ID: MRT4577_149793C.1.pep
GGRQPARRRRNRRRLPHEAEEQPPSLSRHLPRRRRRRRGNRGQAGGGTSSAIERVDSAGAPMGDTSGVDLASEM

SEQ ID NO: 239261 - protein, 47 aa, Zea mays
  Clone ID: MRT4577_149794C.1.pep
MKLCVSMVSEKHLVRTFFGGGSHGSGLWSKPCKEWRHQVSGAYICGI

SEQ ID NO: 239262 - protein, 52 aa, Zea mays
  unsure (1)..(52): unsure at all Xaa locations
  Clone ID: MRT4577_149795C.1.pep
GAYALYLEPPLSLLIDMLYINLSSTRDDATPHRRNNDXSLRAVLKLGQDDHM

SEQ ID NO: 239263 - protein, 178 aa, Zea mays
  Clone ID: MRT4577_149796C.1.pep
AFPGRPPSRRVGRLRRSRSRGDRGRPAGCGAHGGIYSRRRCSSRRARFDPSWAAAALVLVADDMRAGGGAGTHAEAGRRSNTSAHAVTYSSLRLIGDRLLHALIGDWACQATRSSVLRGRSGPTLMAAGRQSGKSEKDWNRLPFLSPFVLSAFQISSFFLGNLGTSVNLNGHCFILQF

SEQ ID NO: 239264 - protein, 100 aa, Zea mays
  Clone ID: MRT4577_149797C.1.pep
FGLIYVLVDVRARTRRPCERILRTSRGVEHLSQKTVCTDVIDSLDSPVPDLDSHAETRRAHSYTSSKNPARKAEIIPWARSRRLSRLLDIRVSPACRRSR

SEQ ID NO: 239265 - protein, 81 aa, Zea mays
  Clone ID: MRT4577_149798C.1.pep
ATVTLEANDYLMWRHRTSGPEGDRTDGVHRTQKNCQYLQWLPLSGGRDVQKGQRPKSTNRRTLHRDGSTLLKHVFIPSRPR

SEQ ID NO: 239266 - protein, 47 aa, Zea mays
  Clone ID: MRT4577_149799C.1.pep
RKKGPGGLSIKKTGMSLIIGIYDEAMTPGQFNIVVERVGDFLIEQGF

SEQ ID NO: 239267 - protein, 209 aa, Zea mays
  Clone ID: MRT4577_14979C.1.pep
AVQSKSGTKIAFSAASSPSSSPCARLGSLTPSRTPSTHPSSFPSFFSLSLGCSPTTTTVSSSSARPPTTTASSYPPPRPPPTTTTSSTLPTPATPPPTRETGAAPQSSPASSTQPPPRGAETQSSSSESSEKGSRARREETAAAARENASAIDSGGSAQSSSPASSSRGGRMGTPPPTVSSSSPAIGFTARLRRIFEVRDGPTVTARWA

SEQ ID NO: 239268 - protein, 122 aa, Zea mays
  unsure (1)..(122): unsure at all Xaa locations
  Clone ID: MRT4577_1497C.1.pep
FPCPSGGCPQMGHYADRYPGKTNDVGQKFYLDTGDASTFARWRYKVSVTLSGKKVTGHILVSMFGNKGNSKQYEIFKGTLKPDSTHSNEFDSDVDVGDLQMVKFIWYTNVINPXLPRVGASK

SEQ ID NO: 239269 - protein, 206 aa, Zea mays
  unsure (1)..(206): unsure at all Xaa locations
  Clone ID: MRT4577_149800C.1.pep
KKKKKFKKKKKKKKKKKKKKKKKTPGAKGHHLSFPNLEGCSSPSLQAGGAPIQIQGGNRESKRILKELRDLKKDPPTSXREGPVGENMFHWKETIRGPPESPYAGGVFXGKILFPPNYLLKPQKEFLKTKVFHPNFKRKESICLNFLKEQGSPVLTISKVLFSIGSRLTDPNPNNPLAPEMAHMNKTDRPKYKETARSXTQKYAWG

SEQ ID NO: 239270 - protein, 74 aa, Zea mays
  Clone ID: MRT4577_149801C.1.pep
MKAPPAPGFLAFFRIPPRGGPGRGGGGSHFGPVCLGGKNLFLYSVPRWVTTGAWITSGGLLFFQTPEGSSCLFC

SEQ ID NO: 239271 - protein, 64 aa, Zea mays
  Clone ID: MRT4577_149802C.1.pep
PNHGRSKTTRSFQTLTARQESACKKSIQRPVRQDTCYHHRDLNIPSTISLCKHMAPAMATSTIC

SEQ ID NO: 239272 - protein, 44 aa, Zea mays
  Clone ID: MRT4577_149803C.1.pep
PGVRPRGGNEHRPSVVILGSCLTFAMGHILCNGMGRLNPFVMGG

SEQ ID NO: 239273 - protein, 46 aa, Zea mays
  Clone ID: MRT4577_149804C.1.pep
VHHVARRPARPLMRVLNVQGQYLSTLLTRAINMSHFAENPLVLFPS

SEQ ID NO: 239274 - protein, 64 aa, Zea mays
  Clone ID: MRT4577_149805C.1.pep
CLLTLAYIHGVPLRVPPYRTELAGGIHCGGLTKSAAEKTHYIGLDATPTLWPSPEMSLLGSRLL

SEQ ID NO: 239275 - protein, 30 aa, Zea mays
  Clone ID: MRT4577_149806C.1.pep
SVVSRSVSRRIEVGTHLGHPLGKAVTARVS

SEQ ID NO: 239276 - protein, 83 aa, Zea mays
  Clone ID: MRT4577_149807C.1.pep
IVAYVLSLLICSLHTKNSERRFQPKLSFGPPSLAVDTVDSTTQLGPLPGPTLFRSLIPRPAISFAMVDFNNLKHVDNECHIYS

SEQ ID NO: 239277 - protein, 92 aa, Zea mays
  unsure (1)..(92): unsure at all Xaa locations
  Clone ID: MRT4577_149808C.1.pep
EHVMMFLLAEMGTSCSLDGHQRWGIKGRGGAKNFXAILMRYINDXVICNGCKSPHTILCKENRMFFLRCEQRGSSQVXPPIKAGFTAHVSSS

SEQ ID NO: 239278 - protein, 232 aa, Zea mays
  unsure (1)..(232): unsure at all Xaa locations
  Clone ID: MRT4577_149809C.1.pep
MGYEDSVYLAKLAEQAERYEEMVENMKAVASADQELSVEERNLLSVAYKNVIGARRASWRIVTSIEQKEESKGNEAQVGLIKEYRQKIEAELAKICEDILECLDGHLIPSAESGESKVFYHKMKGDYHRYLAEFAVGDKRKTSADKSLEAYKAATEVAASSLAPTHPIRLGLALNFSVFYYEILNSPDQACQXGQQAFDDAIAELDTLSEESYKDSTLIMQLLRDNLTLWTS

SEQ ID NO: 239279 - protein, 445 aa, Zea mays
  unsure (1)..(445): unsure at all Xaa locations
  Clone ID: MRT4577_14980C.1.pep
MVAVGGGGGGGGARRRRAWRWAMRAAASAVLWTAVVQVASIAGLFRPRVLADCGGKGGAAAASGLAALAGEDSLAARLSPPALVPKRIYKSNGYLLVTCNGGLNQMRAGICDMVTIARHLNLTLVVPELDKRSFWADPSDFGDIFDVDHFINSLRDELMIVKELPLKLQLRTXKRLYSMPPVSWSNETYYLKRILPLARKHKVIHFDKSDARLANNGLPIQLQMLRCRVNFEALRFTPQIEALGRKLISTLQRRSGQFVVLHLRYETDTLAFSGCTHGCSGKETEELTKMRYAYPWWKEKEIDSEVKRLQGLCPLTPEEITLVLKALGFTKDTLIYIASGEIYGGERRLAVLKAAYPKLVRKEKILSPDELRPFQNHSTQMAALDYMVSLASDIFIPSYDGNMARVVEGHRRYMDFRKTIVLDRKKLVELLDLFKGGALSGHCPG

SEQ ID NO: 239280 - protein, 78 aa, Zea mays
  Clone ID: MRT4577_149810C.1.pep
NRNFLDKFKELAKFCFLWELMFCKKNKNFFLKKAWGERKTRICLPPLVFNEKSWLKRGPSVLIRGKGGGMAPPPNYLP

SEQ ID NO: 239281 - protein, 123 aa, Zea mays
  Clone ID: MRT4577_149811C.1.pep
PNIASQHPIRSQDSVERSEYSLLLISPAAYHILPSSNHNACEPTKAAAATNLRIKPGPMLTPGTNAASAATDLLQGHIRTAGKPTTAANELLAGLILTARTLPISAATKAAATERPLGFIITP

SEQ ID NO: 239282 - protein, 67 aa, Zea mays
  unsure (1)..(67): unsure at all Xaa locations
  Clone ID: MRT4577_149812C.1.pep
MXPFGXXXWGGDGGEALLGRDPLXSGSAPPTMEAGXEAAVAAERVFXSVXGGASFFSGINHLKMRHY

SEQ ID NO: 239283 - protein, 81 aa, Zea mays
  Clone ID: MRT4577_149813C.1.pep
MLVIPFCHGIMNFQFTNILIPSSFNLTKIMESLEHAIKRDAPIIAEYLGGAVNCDAYHMTDPRSDGLGVSSCIKQSLEDAG

SEQ ID NO: 239284 - protein, 1055 aa, Zea mays
  unsure (1)..(1055): unsure at all Xaa locations
  Clone ID: MRT4577_149814C.1.pep
MRHTLQNCRDFKHSVGHGRPFQPLPPPPPRGAPGEPRQPQQQEGGGGGAFPRIDREVNVIFGGHGSQESKRQQKLNDRQILVATTGPPAPYRWSEHPITFIQVDQWLNFDHPGKYPLLVDPMIRESRVKKVLVDGGSSINVTFSRTLQGLGVNLKELHESDTPFFGIVPTEGEYPLGHIYMPVTFGTLENYRTEYLRFEVANFDCGYNAIVGRPGLAKFMAIPHYTYMILKMPGLLAKEDEEKTAFITPFGAFCYTSMSFGLKNAGATYQRAIQTCLADHWGKRVEAYVDDVVIKTENSANFIEDLQLVFNSLRLYRWKLNPEKCVFGVPAGKLLGFIVSHRGIEANPEKIEAIMRMEAPRSQKKVQRLTGCMAALSRFISKLGEKGLPFYKLLKKVDKFQWTSEAQEALDALKRFLTTTPVLKSPRRGTPSQSAKDLLLYISCTTHVVSTTLVVERVEEGHAYPVQHPIYFISEVLGPSKKKYPQVQKLLYAVLLTARKLRHYFDDHKVIVVTGFPIGDILHNKEAIGRIAKWACELGAHDMEFRPRTAIKTQALVDFVSEWTEQQMPDNPETAEVWRMYFDGSLKLQGAGAGILFIAPGGEQLKYALQLLFSASNNATEYEALIHGLNIAISLGIKRLMRDRNAATDALSKLGSSRAQVPSGIFIQEIPCPSILVDRIEECNILCQPELDPDDWREPIIRYIKNEEEPDDRNAAERIARQSAHYTLIGKTLYRRGATRVLMKCILSTTGKHLLEEIHAGQCGVHAASRTLVGKAFRSGFYWPTTKSAATELVQRCEACQYLSKQHLPAQQLQTIPVTWPFACWGLDMIXPFKKAQGGYTHFRXFFDFCEQKSIQIKYASVAHPRANGQVERANRMILEALRKKVFDKNEKFAGKWIRELPYVVWSLRTQPSRALNGNTPFFMVYGSEAVLPTDLKFGAPRLIFENIAEAEATRLEDVDILKEERLNTVIQSARYQQTLRRYHNKVIRHRSFAVGDLVLRRILTGEGRHKLSPLWEGTFIIAEVTQPGSYRLTQMNGTEIGNPWNIEHLRKFYP

SEQ ID NO: 239285 - protein, 76 aa, Zea mays
  unsure (1)..(76): unsure at all Xaa locations
  Clone ID: MRT4577_149815C.1.pep
KHRGGRRTREHAHPPQDRGGGRGGGGRRLLRFPLPRAPREEEGPQGGRRGLGEXKTPLVRVIDPPIXRPYPGATRA

SEQ ID NO: 239286 - protein, 73 aa, Zea mays
  Clone ID: MRT4577_149816C.1.pep
LLQTNGQVGNCSRVLANGNYLISNRHKISEKWLTTVVLCALAFSSETSFASVSASVYFTDDWVVSEAVHIDFH

SEQ ID NO: 239287 - protein, 72 aa, Zea mays
  unsure (1)..(72): unsure at all Xaa locations
  Clone ID: MRT4577_149817C.1.pep
SGMGGSGMGGYGRDGMDNQGGYGSVGRMGMGNNYSGGYGTPDGLGGYGRGGXGSGGYYGQGGMSGGGWRGMY

SEQ ID NO: 239288 - protein, 42 aa, Zea mays
  Clone ID: MRT4577_149818C.1.pep
DLQDVYIISAIEFDKFVNHLATGDRGGHLVLFERSDIAYNSC

SEQ ID NO: 239289 - protein, 222 aa, Zea mays
  Clone ID: MRT4577_149819C.1.pep
ARAVVLSAAGPHFCAGIELGGPGDPLSAASADPVAAAEGLRRAVLDMQAALTAIERCRKPVVAAVHGACVGGGVDLVAACDIRCCSRDASFVLKEVDMAIVADLGALQRLPRIVGYGNAADLALTGRKINAMEAKDMGLVTRVFDSKQDLDAGVAKIAKEIADKSAWAVIGTKAVLLRSRDATIEQGLEHVATWNAGMMRSNDLKEAIRAFLEKRKPVFSKL

SEQ ID NO: 239290 - protein, 70 aa, Zea mays
  Clone ID: MRT4577_14981C.1.pep
GTKTYINLFIYILSFPPHEKNKGRYPKFDLPCLQHDFLGLLHQMGLKGPQRKGAPFIYNEANQGTGGGFS

SEQ ID NO: 239291 - protein, 57 aa, Zea mays
  Clone ID: MRT4577_149820C.1.pep
FKYILCPLGQVLNHMFFFGDPQVLNRRNFALSTCTRPKLQIIHAACKVANPVRPWRL

SEQ ID NO: 239292 - protein, 165 aa, Zea mays
  Clone ID: MRT4577_149821C.1.pep
LRLSLCLLCASILLDRLTFGIRSPSILGSRMATTGAVDAQLTLALESQTRSLLSELDKRIHAIDSKWANRVGILETQVADSTKRLESFSRGIHEDLEARLVTADEAVDDRIRYLEASTISRVAVLESSSQAVELWRPQIDASIDGLYANIQTIRADIAQIVTQQP

SEQ ID NO: 239293 - protein, 288 aa, Zea mays
  unsure (1)..(288): unsure at all Xaa locations
  Clone ID: MRT4577_149822C.1.pep
MAGGGDRDASDAELRAGFETLAVTRPDPSAGVYEVRLNRPAQRNALSPAAFAEIPRAMSLLDRAPSARAVVLSAAGPHFCAGIELGGPGDPLSAASXDPVAAAEGLRRAVLDMQAALTAIERCRKPVVAAVHGACVGGGVDLVAACDIRCCSRDASFVLKEVDMAIVADLGALQRLPRIVGYGNAADLALTGRKITAMEAKEMGLVTRVFDSKQDLDAGVAKIAKEIADKSAWAVMGTKAVLLRSRDATIEQGLEHVATWNAGMMRSNDLKEAIRAFLEKRKPVFSKL

SEQ ID NO: 239294 - protein, 98 aa, Zea mays
  unsure (1)..(98): unsure at all Xaa locations
  Clone ID: MRT4577_149823C.1.pep
MWLEEVRRRERGELRARRFEAAARACRTASLALSNRKEFVTPHHGAVNSLQVDLTEGRYLLSGASDGSAAVFDVWNATEYETGFIAXHRNILLVDSNT

SEQ ID NO: 239295 - protein, 107 aa, Zea mays
  Clone ID: MRT4577_149824C.1.pep
KIGGGKTPPNPPKPQNGWGVGKKRNPPLLNPGPQKKLFFPPPGMGKKPQFFPPPHFLKKGGEKNRNKQGPPFFFFAPPNPLEKFFSKSFPGGGGGGFFFIPPLGGVP

SEQ ID NO: 239296 - protein, 161 aa, Zea mays
  Clone ID: MRT4577_149825C.1.pep
MGSNHLGVGGGVVPPPRGACVLCSRPPRTRLPPRPPHPVPGPCSLAYTSHPALVSRSPPYPHLRRRRLSLTCPPLPRLYDRTLSLYLDKAKCRGNRTAALNGLCRLGEAIKECEEALQIDPYYGHTHHRLASLHIRLQVCDRRGRERCRLRRQDVRRARHG

SEQ ID NO: 239297 - protein, 202 aa, Zea mays
  Clone ID: MRT4577_149826C.1.pep
RTADLGTKSSSACRGCCGPIDISLRNRTMNMQTDHTMNDDGMSSDPRTVTRMASYPSDNKEVRKKTTRHHSSGPCSRYQGHFMGPATVYSSFHSHSTSDISALQNHRRLLQNAVRSPVLCIASYVHQSMRCTDSLTSQRLKASIANVMNLHDYNPSREICGIGKLCMNSAILLHSRERYTSIERPIARATIPPTIGSCACGW

SEQ ID NO: 239298 - protein, 89 aa, Zea mays
  Clone ID: MRT4577_149827C.1.pep
MAAAALAMADQVVAELRVRCETPPSMLREVAVEMAREMGAALEKDGGSRVKMLLYYVDKLPTGREEGLFYGLDLGGTNFRVLKVQLGGN

SEQ ID NO: 239299 - protein, 174 aa, Zea mays
  unsure (1)..(174): unsure at all Xaa locations
  Clone ID: MRT4577_149828C.1.pep
MAAAALAMAEQVVAELRVRCETPPSMLREVAVEMAREMGAGLEKDGGSRVKMLLSYVDKLPTGREEGLFYGLDLGGTNFRVLKVQLGGNAKHVVDRDSREVGIPPHLMSGSSSELFGFIASELAKFVDDDEKCANISNGKKREIGFTFSFPVKQRSVASGTLVKWTXAFSINDA

SEQ ID NO: 239300 - protein, 503 aa, Zea mays
  Clone ID: MRT4577_149829C.1.pep
MAAAALAMAEQVVAELRVRCETPPSMLREVAVEMAREMGAGLEKDGGSRVKMLLSYVDKLPTGREEGLFYGLDLGGTNFRVLKVQLGGNAKHVVDRDSREVGIPPHLMSGSSSELFGFIASELAKFVDDDEKCANISNGKKREIGFTFSFPVKQRSVASGTLVKWTKAFSINDAVGEDVVAELQTAMEKQGLDMHVAALINDAVGTLAGARYYDKDVVAGVIFGTGTNAAYVEKANAIPKWEGELPHSGDMVINMEWGNFFSSHLPITEYDQELDKESLNPGEQIYEKLTSGMYLGEIVRRVLLKISLQSAIFGDIDHTKLQTHFLLRTPHISAMHHDETSDLKIVAENFEENLEITGTSLEARKLVVEICDIVATRAARLAAAGLAGILMKIGRDHSVEDQRSVIAIDGGLFEHYTKFRRCLETTLGELLGDEASKAVAIKHADDGSGIGAALIAASQSQYKNDLVAVKHADDGSGVKYAEDKRADDGSEIGAALIAASQSQ

SEQ ID NO: 239301 - protein, 104 aa, Zea mays
  unsure (1)..(104): unsure at all Xaa locations
  Clone ID: MRT4577_14982C.1.pep
TSDIFIPSYDXXNMARVVEGHRRSSDFRKTIVLDRKKLVELLDXFPGGALSWDEFSDAVKEAHRSRTGQPAERKVVPGQPKEEDYFYANPLECLGSNGGLRDVS

SEQ ID NO: 239302 - protein, 103 aa, Zea mays
  Clone ID: MRT4577_149830C.1.pep
AKSCSQDVVSNGSVYGCCTILRQLSKKRNIRIAKMLMNAVNIVVVSEKEICSIFRDDVVYLDAGGGDIVRVECVLMVEDVVAVPSSEGYFLRGGYGGHNCFGV

SEQ ID NO: 239303 - protein, 213 aa, Zea mays
  Clone ID: MRT4577_149831C.1.pep
MHFSAPAFIALLTATLAIAAPSAEPNNKWADKYNDKKKYIKDCKKDLDDKWKQKDDHWKKNEKLFYFDAEYIVKAVPEEVVGTNQAPAPGQPGAKGLFKYGINIADNTICYNITLSGVTGAYQSMALTSTHIHEAPKGRAGPPRIAFPNPARPDERRISTGCLTGPFKTGILANGVDTGDNFHVRQIVANPAGFFTDTHTAQFVPGAVRGQLK

SEQ ID NO: 239304 - protein, 49 aa, Zea mays
  Clone ID: MRT4577_149832C.1.pep
LTVEAGSVMIGQLYSGGHHTSSLFFPCLFILCSLTHSPVSLASFLVLHA

SEQ ID NO: 239305 - protein, 78 aa, Zea mays
  Clone ID: MRT4577_149833C.1.pep
PLASQVGGKTEWGFSKVVFPLVQLRSIFFSPSGPNAAEKSLQVVFVYNPEFWFLGFVFYASAVKNLQEALPGAQNLRA

SEQ ID NO: 239306 - protein, 92 aa, Zea mays
  unsure (1)..(92): unsure at all Xaa locations
  Clone ID: MRT4577_149834C.1.pep
LVLRSRSQFXDSASGXRHDXSXSCXRXXGENLNFPGKPGXTXDXGGNXXXFSPXXXWKXXFILRKALGXLNSQLGFNXXLVFXPXWXQKISV

SEQ ID NO: 239307 - protein, 86 aa, Zea mays
  Clone ID: MRT4577_149835C.1.pep
LQFFFFWFFLFFFFFFFFFFFKGRGLPKDGALDKQVARRTQVVKNIHLWARPGPPFSERQGIKCLSSPKGWAPSLKKHLGRFRKKI

SEQ ID NO: 239308 - protein, 66 aa, Zea mays
  unsure (1)..(66): unsure at all Xaa locations
  Clone ID: MRT4577_149836C.1.pep
MCPWCHYFSCVPTRSXSCDGSPTTCTAPTQENNTLSVVCEGGSNRTYVVAPASQDRIKDLCNQLCT

SEQ ID NO: 239309 - protein, 101 aa, Zea mays
  unsure (1)..(101): unsure at all Xaa locations
  Clone ID: MRT4577_149837C.1.pep
CRESDCVDGAGHLCHIPCKMDDKARVAGGXIVVVGLREXQEDDPHLILQYMNDSGRLLKAYAHLPETLRLDEVVQVHAPEEREENCDYDYFQFEDEDIDEI

SEQ ID NO: 239310 - protein, 43 aa, Zea mays
  Clone ID: MRT4577_149838C.1.pep
LNYLRPNIKHGGYTDEEDRIIWSLYSSIGSRWSIIASKLPGRT

SEQ ID NO: 239311 - protein, 56 aa, Zea mays
  Clone ID: MRT4577_149839C.1.pep
MSHESVWYSRPRTYGKGSRECRVCTHPAGLIRKYGLNICRQCFREKSADIGFVKHR

SEQ ID NO: 239312 - protein, 37 aa, Zea mays
  Clone ID: MRT4577_14983C.1.pep
MSNSSYCMSTSVKFFSSSEVRHIHGIRVVLFIRLASS

SEQ ID NO: 239313 - protein, 27 aa, Zea mays
  Clone ID: MRT4577_149840C.1.pep
CRERGLSENPNKRLNFTKFAIILLYRS

SEQ ID NO: 239314 - protein, 335 aa, Zea mays
  Clone ID: MRT4577_149841C.1.pep
MAAATAPKTMPSSVFAAALLLLAAAACQASPYYPLELGYYRYTCPQAEAIVKASMEKAIAQNPGNGAAVIRMLFHDCFVEGCDASVLLDPTPFSPTPEKLAAPNNPSLRGFELIDAIKDALEAACPGVVSCADIIAFAARDASCFLSQGKVSFDMPSGRLDGTFSNASESVKFLVPPTSNLSDLASSFAVKGMSLEDLVVLSGAHTVGRSHCSSFVSDRLDVPSDINPALAAFLRTRCPANTTTSDDPTVMQDVVTPNAMDNQYYKNVLSHTVLFTSDAALLTSPETAKLVLDNAKIPGWWEDKFEKAMVKMASLEVKTGHQGQVRKNCRAINHY

SEQ ID NO: 239315 - protein, 576 aa, Zea mays
  Clone ID: MRT4577_149842C.1.pep
MSHPITPRRTTRSSAADPASPTSPSGPRPQPTPRRQPVPTAAANAKREEGEEHERSPVDALLQALPGRREQATDLLRLLAPAPALPLLLHGGAATGKTRALLLALRHVRPRPLRVAYAALRSLPSPRALFSSVLAQLSPPSSSSASSRLRVPDKPSDFVAALRDALAGLSARGEAVYLVFDNLEVVRSWDKGGQLLALLLRLYDLLRLPQVVLVYVSSATPDAYYSLVFDNLEVVRSWDKGGQLLALLLRLYDLLRLPQVVLVYVSSATPDAYYSMTGSVEPNHIYFPDYTVDEVRDILMRGHLNPKLYSSFLSVALKPLFRVTRRVDELVAALEPLFRRYCEPLGDLKAVPDESIKRRLFEHIQPHLAVAMNETFIVPTRVSVDECKDHSSRGKASSKRQFGSRDGLPTELEFHMSVSAKYLLLSAFLASRNPATLDAALFDSTGGSDNNRRERKSSQASMNMKDTMAEEMLMKGPGTFPLERLLAIFQCITSVSEDDLGDVECSDSMMNGSGMTGLMSDVLLQLSTLCNSNFLSKSRSCPMEGSARYRSNIDEDLALKVARSVSFPLSKYIYRR

SEQ ID NO: 239316 - protein, 91 aa, Zea mays
  Clone ID: MRT4577_149843C.1.pep
ISSTELRSLHSTELPRISEQDHRNALQKTTSTLEGLIADDSHHQPCSAHSEDGAANNGSRDIRGDSSCVDLKSPVPLKTHADVMEDEGWIT

SEQ ID NO: 239317 - protein, 157 aa, Zea mays
  Clone ID: MRT4577_149844C.1.pep
MPECRTRSLLYMSIRRRSSRPCTHNLLPYYMRSSSSSRLLLAAAAATSGACLAVALLLAVGVCTASCGAGAAAAGLAARHGRQQPRPPSSSPSPVLGADSSLQVNTAAPSQEEKGLAAGDQLLLGAAAAAAAGQDYGFVDPPPDTRRRGGTSPIPHS

SEQ ID NO: 239318 - protein, 519 aa, Zea mays
  unsure (1)..(519): unsure at all Xaa locations
  Clone ID: MRT4577_149845C.1.pep
SIQIVFTCMVYPALILAYMGQAAYLCKHHIMESDYRIRFYVSMPAVVGSQAVITGTFSMIKQCASLGCFPRVKIIHTSAKAHGQIYIPEINWIMMILCLAVTIGFRNTKHLGNASGLAIITVMLVTTCLMSPVIVLCWHKSIFLAIGFILFFGTIEALYFLAALIKFMXLYFLAALIKFREGAWVPIVLALIFILIMCVWHYGTIKKYEFDVQSKVSINWLLGLSPNLGIVRVRGIGLIHTELETGIPAIFSHFVTNLPAFHQVVSIFHCPKLRHGFRSTFALLLSIENRWSXQVLIFMCIKNVPIPHVRPEERFLVGRIGPKQYRIYRCIVRYGYQDFHKDDVEFEKELVCSVAEFIRSGSSKLNGTAEEVDEEEEQRMAVVRSNSVRMLEEEATVQNTVGVGPSSRASREIQSPSPAPATGVGPKNKKRVRFVLPAASPKPDAGAQEELQELSDAREAGMAFILGRSHVKAKSGSGFLRRLVINFCYDFLRRNSRGPRYAVTVPHASTLEVGMVYFI

SEQ ID NO: 239319 - protein, 60 aa, Zea mays
  Clone ID: MRT4577_149846C.1.pep
LFGVLFFPRSAFLGCIQRGIPRIQSPSLNKKKGLRLWPSCISSKINKQAPNIRIRRCIII

SEQ ID NO: 239320 - protein, 129 aa, Zea mays
  Clone ID: MRT4577_149847C.1.pep
IGFRNTKHLGNASGLAIITVMLVTTCLMSLVIVLCWHKSIFLAIGFILFFGTIEALYFSAALIKFREGAWVPIVLALIFILIMCVWHYGTIKKYEFDVQSKVSINWLLGLSPNLGIVRVRGIGLIHTEL

SEQ ID NO: 239321 - protein, 812 aa, Zea mays
  unsure (1)..(812): unsure at all Xaa locations
  Clone ID: MRT4577_149848C.1.pep
MKSPPVMDPEAPPSPXCRALLPMTRRRXGGRNGVPWRMTLSLAYQSLGVVYGDLSTSPLYVYKAAFAEDIQHTESNEEILGVLSFVFWTLTLVPLLKYVCVVLRADDHGEGGTFALYSLLCRHARAALLPPGRTAAGDEDQFLDGADGGTKKATAQNGNAVTLGGGAAASVRRLLERHKVLQRVLLVLALVGTCMVIGDGVLTPAISVFSAVSGLELSMEKEHHKYVELPIACIILVCLFALQHYGTHRVGFIFAPVVVTWLLCISVIGVYNIIHWEPTVYRALSPYYMYKFLRKTQRGGWXMSLGGILLCVTGSEAMFADLGHFNQLSIQIAFTCMVYPALILAYMGQAAYLCKHHTMESDYRIGFYVSVPEKIRWPVMAIAILAAVVGSQAVITGTFSMIKQCTSLGCFPRVKIIHTSAKVHGQIYIPEINWILMILCLAVTIGFRNTKHLGNASGLAVITVMLVTTCLMSLVIVLCWHKSIFLAIGFIVFFGTIEALYFSAALIKFREGAWVPIVLAFIFILIMCIWHYGTIKRYEFDVQSKVSINWLLGLSPNLGIVRVRGIGLIHTELETGVPAIFSHFVTNLPAFHQVLIFMCIKNVPIPHVRPEERFLVGRIGPKQYRMYRCIVRYGYHDFHKDDIEFEKELVCSVAEFIRSGSSKLNGMPEEFDEEEQRMAVVRSNSIRMLEEKATVEKTVGPSQASREIRSPSPTPPPVVGPKKRVRFVLPAASPKPNAGVQEELQELSDAREAGMAFILGHSHVKAKSGSGFLRRFVINFCYDFLRRNSRGPNYAVSIPHASTLEVGMVYFI

SEQ ID NO: 239322 - protein, 217 aa, Zea mays
  unsure (1)..(217): unsure at all Xaa locations
  Clone ID: MRT4577_149849C.1.pep
MKSPSVMDPEAPPPPPAGTPPDDEEEKRGGRKGVPWRMTLSLAYQSLGVVYGDLSTSPLYVYKAAFAEDIQHTESNEEILGVLSFVFWTLTLVPLLKYVCVVLRADDHGEGGTFALYSLLCRHARAALLPPGRTAAWDEDQFSDGAGGGTNKATAQNGNAVTLGGGAAASVRRLLERHKVLQRVLLVLALVGTCMVIGDGVLTPXISVFSAVSGLEL

SEQ ID NO: 239323 - protein, 137 aa, Zea mays
  unsure (1)..(137): unsure at all Xaa locations
  Clone ID: MRT4577_14984C.1.pep
MGVYLSTPKTEKLSEDGENDQLKFGLSSMQGWRASMEDAHSALLDIDEGTSFFGVFDGHGGKVVAKFCAKYLHREVLKSEVYLAGDLGAAVHGAXFRMDEMMRXQRSWRELQALGDKXKQXTGMIEGLIWSSRGSDS

SEQ ID NO: 239324 - protein, 120 aa, Zea mays
  Clone ID: MRT4577_149850C.1.pep
QAQNLVMDPSLIRTLKGGPPPWGGGGGPRLGVKKRAGWGAATVAVGKGARAWAAWAVWNRNTWGCVNRGQGLTPAIGVNGGKWCCGHKAGKHTAPKRLKEKNGWGLAPRTRLNGVGLTAH

SEQ ID NO: 239325 - protein, 88 aa, Zea mays
  Clone ID: MRT4577_149851C.1.pep
LDITPKVNTNYSNLLPTSFECESLSLPLYFVNQTAPLDYIQLYYYKTDKVTDPSLHHKITTRERQACSFGFNPYQSEANNSALIQFFN

SEQ ID NO: 239326 - protein, 91 aa, Zea mays
  unsure (1)..(91): unsure at all Xaa locations
  Clone ID: MRT4577_149852C.1.pep
DAWADAWLYLAQGILQRDPCXVLDQRXMGQLVKLATDRGXKARPNLNVDIGGEHGGEPQSVALFAKTGLDYVARSLIRVPIAMLAAYHVPV

SEQ ID NO: 239327 - protein, 135 aa, Zea mays
  unsure (1)..(135): unsure at all Xaa locations
  Clone ID: MRT4577_149853C.1.pep
PPRPAGNRRAHTGRPPGPRRKKQPGKTRTGKTXTREGEPXDTXDNGKAKTQDKGGGPPDQQRGSRAGKQREDGRTRADHNTQKESTPHXERRHRGGRQXPRKTPTGKTTTREGQTTDTTDSGPAKXQGKEGKPPG

SEQ ID NO: 239328 - protein, 74 aa, Zea mays
  Clone ID: MRT4577_149854C.1.pep
LAFLAFKTSVFCSYKCRYAYYNIISKILMLLRFQKLQSFITYTFLAFNAFMFMPYQAELQFCWLNRDAGMPLCC

SEQ ID NO: 239329 - protein, 85 aa, Zea mays
  Clone ID: MRT4577_149855C.1.pep
GISASPSDVMFSICGHPQMFPSLPSSVINSVWRCRRRLPSYFLLVVMVSHLALLQAYLLDPGESKLSIAAIEEKGIVGLVDEFKG

SEQ ID NO: 239330 - protein, 71 aa, Zea mays
  Clone ID: MRT4577_149856C.1.pep
ERYGAPVLDHQPLDLRNCCDGRSLRHDEVALDHREARRANRRIIDRITHDRGSQHRGERRSDTSVEWRQTD

SEQ ID NO: 239331 - protein, 218 aa, Zea mays
  Clone ID: MRT4577_149857C.1.pep
KNKKKRKTKKQHGAPTTKIAGVAHWGATVRQHGNSYDEAYAFAVELAQRHGYRFLSAFDDADVIAGQGTVGIELAAHAPDVVIVPIGGGGLASGVALALKSQGVRVVGAQVEGVDSMARAIRGDVREIAPVASLADGVRVKIPGFLTRRLCTSLLDDVVIVREAELRETLVRLALEEHIIAEGAGALALAAGRRVAGRRKCAVVSGGNIDAGVRAGPR

SEQ ID NO: 239332 - protein, 78 aa, Zea mays
  Clone ID: MRT4577_149858C.1.pep
CSCPGCFIRPRTKLAEPSQISSWYTWHTRASFGSHGSLQASQHACEPLVVILMDSECMLADHWCVCVCVPVPSFLSLL

SEQ ID NO: 239333 - protein, 80 aa, Zea mays
  Clone ID: MRT4577_149859C.1.pep
SLLLCRASTAAGSPRRAVQAWHEHSSNTPETAASRQQLLDKWQGLPFQLVWSFGQFISQFQDCFDLLVVDLLVLGSRRLL

SEQ ID NO: 239334 - protein, 44 aa, Zea mays
  Clone ID: MRT4577_14985C.1.pep
PFYLMAGPNMLESEDHVLKMAKHIIAVTTKLGVPLLFKSTFDKS

SEQ ID NO: 239335 - protein, 118 aa, Zea mays
  Clone ID: MRT4577_149860C.1.pep
NNPFNLDIQDLAHKKQSLLLRGGFVFIHKLPRAKQHICHGQGPHLPYVEPIIRKWFLYSLQEFNIHYAPNAKGQALKLEGLKKVPGGVAIVAEKILALKQGPRPTFFWEEKSTGLLML

SEQ ID NO: 239336 - protein, 145 aa, Zea mays
  Clone ID: MRT4577_149861C.1.pep
VFVDVDDTSLLIRAKSDGTLRTLMNVQTLFDRIKSSETIWFIDEDQLVVNLKKVEQELKWPDVDESWESLTSGITQLLTGISVHIVGGHTRRMGPGVHAGCCAGLPRRTQAAHLSRQEASREEEPLHQAWLQRRLAQHRASRLGP

SEQ ID NO: 239337 - protein, 90 aa, Zea mays
  Clone ID: MRT4577_149862C.1.pep
TKLGLVSSSSYSSSTTGMSQLLLSVRSHGCTSPCSACSLSLPVRAISSSFVIVSSLEEPWPCRAIVKPVVRSRTHPGGTAPSPKLFQHGA

SEQ ID NO: 239338 - protein, 384 aa, Zea mays
  Clone ID: MRT4577_149863C.1.pep
MRIGAGANMAACSSVPCSFPAKPDPHRRSPSGILSSHLPRLPATQFRRLRSLSAAASPPASRLRPRASVSTSPAPSKDYEFTDGNGEVELRLDIQKLGIASSKDVFVDVDDTSLLIRAKSDGTLRTLMNVQTLFDRIKSSETIWFIDEDQLVVNLKKVEQELKWPDVDESWESLTSGITQLLTGISVHIVGDSTHINEAVAKEIAEGIGYLPVCTSELLESATEKSIDTWVASEGVDSVAEAESVVLESLSSHVRTVVATLGGKQGAASRFDKWQYLHSGFTVWLSVSDASDEASAREEARRSVSSGSVSYAKADVVVKLGGWDPEYTRAVAQGCLVALKQLTLADKKLAGKKSLYIRLGCRGDWPNIEPPGWDPESDAPPTNI

SEQ ID NO: 239339 - protein, 114 aa, Zea mays
  Clone ID: MRT4577_149864C.1.pep
LSPLNWSWSFVPTMPFHLFSRGRTVGYEYTLLQVNKRIHVKEQLAPRNKHASPYVRMHCLQNVVLVMSAKRTTDGGYAKRVPVPMLVLYPQDFAILLSPNDIYDNILLSVCHPP

SEQ ID NO: 239340 - protein, 96 aa, Zea mays
  Clone ID: MRT4577_149865C.1.pep
CKWEFAMVKCRSNSISRSLALSPTIGDQHIPCGGFCLQICVGSPIVRPIRLLLVLSRSVCMFLVGAVVYTSRIECRAPRFCCRDQSDRSTSVRGSR

SEQ ID NO: 239341 - protein, 88 aa, Zea mays
  Clone ID: MRT4577_149866C.1.pep
YPEAKGNEIGIALGISNPDFYQIPGRICPYMKRDYLSSYKVYAYHKGKGIGFLGNVNSTSSRNTDAETYIYEMELCATLLGLSCSHWK

SEQ ID NO: 239342 - protein, 69 aa, Zea mays
  Clone ID: MRT4577_149867C.1.pep
YVISTPWPGGLVLSSFKCKFSIEEETEVTTSGGLTRHYSTRTGNLRNTNKTAHLNPPFPILERAPPKLR

SEQ ID NO: 239343 - protein, 102 aa, Zea mays
  Clone ID: MRT4577_149868C.1.pep
DPYHMAGRRRNTNTPLPWIFVLEVPTQRYRQRLPTTRSPDETRQGYGRRCELPIYRGKLGMVKLLQVLLLTLPLCLLPKPVSQEMQDGCERARGTTNHLHPS

SEQ ID NO: 239344 - protein, 45 aa, Zea mays
  Clone ID: MRT4577_149869C.1.pep
RIKHLLFSLPWPIAARVAKTTRPVRCGSCYSAHVLHSSRRLVAGA

SEQ ID NO: 239345 - protein, 23 aa, Zea mays
  Clone ID: MRT4577_14986C.1.pep
MQAACNCTTGTHPFDFDASSMGA

SEQ ID NO: 239346 - protein, 76 aa, Zea mays
  Clone ID: MRT4577_149870C.1.pep
ESSLSMHTISFKTWGTEMSNHLHTHARPEHQMASTVLSEKSLPFMYSYKPTSPRALTDMHLNLSLGRFGAIKLPTK

SEQ ID NO: 239347 - protein, 142 aa, Zea mays
  unsure (1)..(142): unsure at all Xaa locations
  Clone ID: MRT4577_149871C.1.pep
SNLPFPCLHTLNFFFGSPNIIYLAAPLQLPNWKNPAVPPLIPLAXNPPFPTSLFIQKAPPDRLSKHLPPLNGNXSPPFCGALTPAXFFVSPPXTPSLSKALMPLLLDFFPFFFAPLAGFSLXSFKFGAPFGFPLNAFRDLAP

SEQ ID NO: 239348 - protein, 251 aa, Zea mays
  Clone ID: MRT4577_149872C.1.pep
MAFSARTISREMEVQMGKAPPCLNPFLMVNPLLPPQHVSPWSSKFVPVFQFGMTNGHGALDLCEESKRARKVVHLEYLFSKVLTPSDVGKLNRLLIPRQCAEGFFPMISEVKSGGDDIFLNFEDTSTGLVWRFRFCLWNNSKTYVLTKGWSVFIKEKNLKKGDILSFYRDASKSIRTNHIFIHIKPHTGTMPLPHHVPSPVFSPSGMVIDDQVHNSLDIGKSHGIAPFWKPLSFGSELSPQLIRRHNKQIS

SEQ ID NO: 239349 - protein, 61 aa, Zea mays
  Clone ID: MRT4577_149873C.1.pep
PPPPHGLNSGKKKEKNWFPVFYSSLFFQATPPIFFCVRHKKRLAGPLVSPPFWCFGIGGRF

SEQ ID NO: 239350 - protein, 265 aa, Zea mays
  unsure (1)..(265): unsure at all Xaa locations
  Clone ID: MRT4577_149874C.1.pep
MEGAAGIRTRPAVCVTGAGGFVASWLVERLLAGGRYMVHGTVRDPGDAKNAHLAAMDGAADRLRLFRAELLDYGSVAAAIAGCDGVFHVASPVPMTYPIGDPEVELLAPAVTGTKNVLKACSEAKVKRVVVVSSVAAVMVNPAWPQNEAMDEACWSEVEFCRTTQLRYCLDVRVAAEEXLLVYEAWEGSGRYMCDANARQMSEVVALLKDWYPAYSHAATKFVQVSDEPLFSSKKLQALGWKFRTLEESLRDSVESFKAAGVLVD

SEQ ID NO: 239351 - protein, 120 aa, Zea mays
  Clone ID: MRT4577_149875C.1.pep
MGFVRALFLLAMVCVAAHAKDYPKEEGAKAEGPAAASGGGGGSTHDVVKLGGKGDGETDSTKAVNEAWTAACAVAGEQTIVVPKGDFLTGALGFAGPWGGDVGVQLRGYLVGCARLALFL

SEQ ID NO: 239352 - protein, 380 aa, Zea mays
  unsure (1)..(380): unsure at all Xaa locations
  Clone ID: MRT4577_149876C.1.pep
TGAGGFVASWLVERLLAGGRYXPGTVRDPGDAKNAHLAAMDGAADRLRLFRAELLDYGSVAAAIAGCDGVFHVASPVPMTYPIGDPEAPHLSSRCCPLNFFLRLRHASVQTFSLYWPTPXLLQVELLAPAVTGTKKRPEACSEAKVKRXVVVSSVAAVMVNPAWPQNEAMDEACWSDVEFCXHSGQVTEKKSXHGTLLSLFLSSPPSPFCLLPSLLCQNWYCLSKTLAELEALDYAKRSGLDVVSVCPSLVIGPLLQSTVNASSSVIVDCLKGDREVKLKLRNFVDVRDVADALLLVYETPGASGRYICDANARQMSEVVALLKDWYPAYSHAATKFVQVSDEPLFSSKKLQALGWKFRTLEESLRDSVESFKAAGVLVD

SEQ ID NO: 239353 - protein, 99 aa, Zea mays
  Clone ID: MRT4577_149877C.1.pep
RASPYFIGKDQNTGNSTITKNDRHRESHVPFQSPQTIDPPIREGSTTQLKTTFLSREHWFHPSVQKGNTNPVSKLKPQPVGKSLQGYTHPPIHSKTIGT

SEQ ID NO: 239354 - protein, 87 aa, Zea mays
  unsure (1)..(87): unsure at all Xaa locations
  Clone ID: MRT4577_149878C.1.pep
FSPTKDDGDLPKMYSSPTCPMERIRAARAPRALLSTGHAPPSKLAPDVVFTVVAAAAGEAEGGALGYMPAASRQRWXPGYKLKRTAR

SEQ ID NO: 239355 - protein, 54 aa, Zea mays
  Clone ID: MRT4577_149879C.1.pep
KCNSKQRITKLPTTTIPKATPKRTFPLKNTHPFHTLIFILKNLKFKTLLILPQK

SEQ ID NO: 239356 - protein, 60 aa, Zea mays
  Clone ID: MRT4577_14987C.1.pep
VSTIRMPKKFLLPVVPKYLLSECQKNFYYLWSLLPLEMVSYLLPLSIRNHLACVFCRNMV

SEQ ID NO: 239357 - protein, 45 aa, Zea mays
  Clone ID: MRT4577_149880C.1.pep
LYPGRHGFQKVPRRYRTLGTQSKSAGMVLMPDHIAAVQLGVDPAK

SEQ ID NO: 239358 - protein, 198 aa, Zea mays
  unsure (1)..(198): unsure at all Xaa locations
  Clone ID: MRT4577_149881C.1.pep
MATTYAPWPMLARAATETMLPQCSQATIDSLLXPYLLPETFHECENPIXLQPYMIQHTITNRILPXNHHTLYPTLMSHHNISHIWGTXGHNIRAHKLQQLVLXNLAAYSQQQNFLPSNQLTCIRTYAXYWQQQQLPFIQIPADYHQHSFPLNQLTKINSPAYTQQPQLLPLIKLAGESTATYLIQPQXRPXYHYAAPN

SEQ ID NO: 239359 - protein, 56 aa, Zea mays
  Clone ID: MRT4577_149882C.1.pep
CPRWHGARPRACIVYLHVPSMTHLHCFADSPVSIPTTILIPNIYLYDARDDDKRCT

SEQ ID NO: 239360 - protein, 48 aa, Zea mays
  Clone ID: MRT4577_149883C.1.pep
TRKKKTHIELIPNQHINHPLCELHHLSAKFSTVQIPVNGQNVLIAPKP

SEQ ID NO: 239361 - protein, 61 aa, Zea mays
  Clone ID: MRT4577_149884C.1.pep
PISASGPSGPLKYYTAHLSPFKRTLACLPCDDGLRSLVVAPRCSSSCSTSKTPLHLPTSRG

SEQ ID NO: 239362 - protein, 86 aa, Zea mays
  Clone ID: MRT4577_149885C.1.pep
RSLQPVNFPCSHSHQLVEQVNHMLAAPHGLSQVAVVVQHIHVCVCHLLRHRVDHFNGLVGWDSHGVPLLRQLGVQRSEHITLSLQR

SEQ ID NO: 239363 - protein, 54 aa, Zea mays
  Clone ID: MRT4577_149886C.1.pep
QRCDWKNLGVPQFNGFGEHPLFPTWGNREKARTDPLSKHLKSLKGEGPPPVAAL

SEQ ID NO: 239364 - protein, 658 aa, Zea mays
  unsure (1)..(658): unsure at all Xaa locations
  Clone ID: MRT4577_149887C.1.pep
MDSGGGEGGSTGGRFPILQANRDPESNWEVDVAKSLEQYLLKICSGEVSGEDESHSVNFAEAALLLQGSVQVYSRKVEYLYSLVLHALEFLSQKKQEQLENVSAQANQNNPSIIPSEEDDIFIGLDDVPVETRISLDNNVDRDDLQRKIVRPPANLLVFEGDCLDSEASELDSYLLATCDFYGDFLLLDPCDAPAVFDFLQGKHSGKENSVAHQGSAAPSKSQANIFTSPNARSVGTGRKSAPGKVLGGLDPTQENQSSTQETSPDNKHWSDPVEPSFADDVEMHPPDDIEDPVGDYSDDEDPWKPLNPHEPGNLKIRPYRRVKXVLHGVXWHFEKEXLKSLFPIAKMVGVVIPEHAKSFEAQQSQEEHYGSQSPPRFEKFLRSFELGEENPNVFGDLKDDNASNTGINFDYDDPDMPNDIDIDLDVPTCPDEIIAITPKGTQDDIDTHENLDDLCRSHLNALLASIAEVEKQSEMDARVSTWKERIEIALEEQDRNPPFDIGSYGEQILDTLSSRTNNTGTASFSEIVSGRPKFEIARTFSALLQLVNGRSVDLDKGKATNELVCYTAENPFHVRLIGPNRRPEMEARFARKRVKSPLQNAGKDGESSLAQHECPNKPLRKNGKIPVKTATRLTPDGKRRRRSSAHLMQPINLESSG

SEQ ID NO: 239365 - protein, 86 aa, Zea mays
  Clone ID: MRT4577_149888C.1.pep
GRDPSPTDLTTIATTTSTMKRRHGPHLAHARGPHLGEHHGLQGEPSLDHMTPLDVHGELRVEPLLRTSSEVNWRHLPEDKHPHPEQ

SEQ ID NO: 239366 - protein, 168 aa, Zea mays
  Clone ID: MRT4577_149889C.1.pep
MPGRRAIEVRQLLPAGGDAATPRWRMSLLENTFSGFVQGAGAEAVFADGSLFSPFLFGKFFDPADPFPLWEFEPDVLLAALRRGNARTAVDWAETDSEYYLTAYVPGGRRCDVEVSGDAMKVVDISGLWRAPPADGRDWRAGRWWEHGFVRRVELPEDADRKKWKTTA

SEQ ID NO: 239367 - protein, 122 aa, Zea mays
  unsure (1)..(122): unsure at all Xaa locations
  Clone ID: MRT4577_14988C.1.pep
IMDQRLAGHYSVKGARAVAQLAVQCTAQQPRDRPRMVAVVDALDKLQGLKDMAVTVGLWPATAXSPGGTPSPPRSARRSRAPPAQGRAGGARPPSCLSNLDGWTTCVPRRTCLLASSCVPRV

SEQ ID NO: 239368 - protein, 110 aa, Zea mays
  Clone ID: MRT4577_149890C.1.pep
INLHNQADDIRMCLVVSTLLCIYMCSIYSITVVYIVGGKQLRTMMCKINLCSLLSIHVCSSSCALAGDGPVGVGDGDGGGRPGDVFREIAIASVVAGSCAAISDGLRDNQ

SEQ ID NO: 239369 - protein, 84 aa, Zea mays
  unsure (1)..(84): unsure at all Xaa locations
  Clone ID: MRT4577_149891C.1.pep
AVVTTQSTFFFFFFFFFFFFFFVPMFCEIVKGEFFYVEDNYYCSGKEEEEELGNPEAGGGFLPHASPSVVGXQSHRPTWWFLTP

SEQ ID NO: 239370 - protein, 71 aa, Zea mays
  Clone ID: MRT4577_149892C.1.pep
MAKSCKGLAMELVKCLSETHCVKVQKRPYKECAGEKVPNITSECVGLRETYFNCKRGQVDMRARIRGNKGY

SEQ ID NO: 239371 - protein, 101 aa, Zea mays
  unsure (1)..(101): unsure at all Xaa locations
  Clone ID: MRT4577_149893C.1.pep
LLPCPPRVLVGVVVAGVVCARRLRVVFVPFPSPVLGVVGGVPVVASALVGLGGVPGAVGPPGVSVGLVRCGRGRXLILPRPRLGLGGGPLSGVGRPGVSGP

SEQ ID NO: 239372 - protein, 179 aa, Zea mays
  Clone ID: MRT4577_149894C.1.pep
MIRENRRVQERRRETRHRHRCRRRRDGRSSPHLAVVGAARADVAIRTGARRPVPDPPQHRHGVRRVPAHAPHPERLIFFPRAPASDQRAQRRQSSLPDPPHASQRGAPPPPPQRSAGPPPGLHSAAPADGGEDLLAIATPASIPSPADATAIAVTILRWRGPAGRCFSWRLLGSCAPVL

SEQ ID NO: 239373 - protein, 57 aa, Zea mays
  unsure (1)..(57): unsure at all Xaa locations
  Clone ID: MRT4577_149895C.1.pep
SHSHIQVCATCWEGPIRCGASSAITXQLGETGGCXXQRRIKLRVTPXWFSPRSATGW

SEQ ID NO: 239374 - protein, 175 aa, Zea mays
  unsure (1)..(175): unsure at all Xaa locations
  Clone ID: MRT4577_149896C.1.pep
ALLSLSSDRCLRPLHLRAAQPVSPRTGIGIRRRGDRQEMGLTVTKLFSRLFAQKXEMRILMVGLDADGKTTILYKVKIVEIVPTIPTIGFDVKTVEYKNIRFTVWHVGGQHXIRPLRRHYFQNTQGLVSVVSSNDRHRVVEKRDELHRMLSAGELXRDAVLLVFATKEELPNDMN

SEQ ID NO: 239375 - protein, 73 aa, Zea mays
  Clone ID: MRT4577_149897C.1.pep
FIKACIGGHFSDCIDKEEKKGGKLALEGGLGLRAKEGWVDVQELGRRCSCGAQEAGLKREALRGELIMMMNIL

SEQ ID NO: 239376 - protein, 86 aa, Zea mays
  Clone ID: MRT4577_149898C.1.pep
YFRLKNMLDREFCNGIFVFIYDGVERFLCEKNKLGYDRVLIIKEVCFVEYAPRLCIRSPYVLLKFVRKKKFGCYIGKKKKKKARPA

SEQ ID NO: 239377 - protein, 175 aa, Zea mays
  Clone ID: MRT4577_149899C.1.pep
MARSHETTSRKPPGLRLFKGAKALRNYQTLVLVLTFLAYTCFHMTRKITSIVKSELDPQTKVGSAWGRLHTRNSLNIGWSPFNTADGSTLLGEIDVAFLAVYSLGMFFAGHLGDRMDLRIVLTIGMIGTAIFTALFGAGYWLNIHNFYYFLVFQMIAGLFQSSGWPSVVAVVGNW

SEQ ID NO: 239378 - protein, 425 aa, Zea mays
  Clone ID: MRT4577_14989C.1.pep
MAIGLLAFESHQGLWNSGYYSQLFGIGGVLITLTILMLSTGYFGGIGAPFAPYFWPYLGQVPKKRERKRPVRVYMDGCFDLMHYGHANALRQAKLLGDQLVVGVVSDEEIVANKGPPVLSMEERLTLVSGLKWVDEVVPNAPYEITEEFMNTLFNKYSIDYIIHGDDPCLLPDGTDAYALAKKVGRYKQIKRTEGVSSTDIVGRILLTFRQKDADTDLSVVVAEKSGEKSNDEVKSQLSHFLPTSRRIMQFSNGQAPSPGARVVYVDGTFDLFHAGHVEFLRSARQLGDFLLVGIYDDESIRDRRGCRPIMHLHERTLGVLACRYVDEVIIGAPWEVSKDMITTFNISLVVHGTVAEGNSAGEIDPYAVPKSMGIFQTIRSPKSITTLSVATRIVDNHEAYKKRNLKKKASEDRYYTQKKFVSGD

SEQ ID NO: 239379 - protein, 60 aa, Zea mays
  Clone ID: MRT4577_1498C.1.pep
TPPKGEGTGSGFEGDSTGHIGTNYHGGAKRAGDRTASYRCKVFLEGSGGESYSKEARLIG

SEQ ID NO: 239380 - protein, 252 aa, Zea mays
  Clone ID: MRT4577_149900C.1.pep
MAPRMMLVLWGVLAAASSTVVAGWSAGTATFYGGSDGSGTMGGACGYGNLYSAGYGVNNAALSQTLFNDGASCGQCYLITCDASRAGGQYCKPGGASVTVTATNLCPPNYALPSGGWCGPGRPHFDMSQPAWENIGVVRGGIVPVLYQQVRCSRSGGVRFNVAGSSYFLLVSIQNMGGSGSVAAAWVKGTSTAWIQMSRNWGANWQALSGLTNQALSFAVTSTGGQYIQFLNVAPAWWQFGQTYSTNQQFYY

SEQ ID NO: 239381 - protein, 114 aa, Zea mays
  unsure (1)..(114): unsure at all Xaa locations
  Clone ID: MRT4577_149901C.1.pep
QIHTLLRSSACLCPGAPEPTLVSQPWWPSTKPLIPTPSAGSSPRAKLALDSDQGVTVAGSMRPXSPFIMPLIPHGRSLPLCSTPPTQVLEISPYTKHLTTGIAFFGECXKLPST

SEQ ID NO: 239382 - protein, 61 aa, Zea mays
  Clone ID: MRT4577_149902C.1.pep
RANGAPAGQVEMPQRLRKERERSRVVGGARSGKKETKKRGAACDLGGGVGRTGKFGAGTGG

SEQ ID NO: 239383 - protein, 133 aa, Zea mays
  unsure (1)..(133): unsure at all Xaa locations
  Clone ID: MRT4577_149903C.1.pep
MARSHETTSRKPPGLRLFKGAKALRNYQTFVLVLTFLAYTCFHMTRKITSIVKSELDPQTKVGSAWGRLHTRNSLNIGWSPFNTADGSTLLGEIDVAFLAVYSLGMFFXXHLGDRMDLRXLSTICMISTAIFT

SEQ ID NO: 239384 - protein, 165 aa, Zea mays
  unsure (1)..(165): unsure at all Xaa locations
  Clone ID: MRT4577_149904C.1.pep
PSSSSSSPRSPSSSSFSSPXSSSSSAGFTSRSSPAWDADGGGNGTARSALASXSSLCSAPSSPRGRRAGCWCSACPRSSSPSPSSTSELAREPPPPSSQTAPTTRTPRAARSSPTAGLGPPPRRPFTRPGTATRRRRRGRCCGARGGARRAGGPRGRCASPGARW

SEQ ID NO: 239385 - protein, 58 aa, Zea mays
  unsure (1)..(58): unsure at all Xaa locations
  Clone ID: MRT4577_149905C.1.pep
QTXXRSISKPVLVQXLHHPSQLXXRXXCCCMMLPXVFXGXXCXXCKNXLQFTTFSXAX

SEQ ID NO: 239386 - protein, 144 aa, Zea mays
  Clone ID: MRT4577_149906C.1.pep
YDVAARALRGADAVLNFPGAIASRAAPASASPEDIRAAAAAAQLEYSHQGRTANPPPPPASPPSPAAAAAQDWHQQHDAASYTPHQEAGTDEFMDEEAIFEMPQLLRNMAAGMMMSPPRLSPDTSDESPDPSEAGESLWSYRDP

SEQ ID NO: 239387 - protein, 82 aa, Zea mays
  Clone ID: MRT4577_149907C.1.pep
STDIKPNEKHAHKTWLKKKMRKGTNLPVSISIYHVHTRPSPISYLLTERKNNTPTYDIPPTITTGRVQTKRQGPCFPTAFPR

SEQ ID NO: 239388 - protein, 142 aa, Zea mays
  unsure (1)..(142): unsure at all Xaa locations
  Clone ID: MRT4577_149908C.1.pep
MVSSEIPSVTTTHTQRPKLFTGMILLPKGPPDVVLPENVEFDFNDVFGATAVQTPTEVSILTPGSPAPLAESNEEVYNDPVVITKRSPSLVGPTSLVSQSLPLSKLTLHESESSLDLLECLSKEKKSGQGSLSDEEXHDXNK

SEQ ID NO: 239389 - protein, 50 aa, Zea mays
  Clone ID: MRT4577_149909C.1.pep
HSRMPSHYSCIGNRFIRMGQAHASSSPSTVLTRSHSSIHSLYISIGSVSA

SEQ ID NO: 239390 - protein, 30 aa, Zea mays
  Clone ID: MRT4577_14990C.1.pep
SQAFKTDSITWSIFSLRHQNNMHRLVLKYT

SEQ ID NO: 239391 - protein, 84 aa, Zea mays
  Clone ID: MRT4577_149910C.1.pep
LINASCHIHCITHLHLKFCRDLWSDRTCPGGRPSRSAVQAYRLQLALAASALQQPIAQLQQQSLAHLTLQTIATQQQQQQFLPS

SEQ ID NO: 239392 - protein, 62 aa, Zea mays
  Clone ID: MRT4577_149911C.1.pep
GGLIISSQDTVLLLVTSGQRAAWPPCFLSAFGCYYSAVKIQLICLLQQDNERLRPPSFGREM

SEQ ID NO: 239393 - protein, 127 aa, Zea mays
  Clone ID: MRT4577_149912C.1.pep
SECPCQHPALGSCKEKSRPSYSRRGWSVQCRSSAARDGRTMVVLVVGRGSRCWSAVSECRYRGRYRVQHVCDGSCAMNFITRLADHAAYVSRSGVYCLNDVMALPTALVVIHLVAHPLSNACRQPCT

SEQ ID NO: 239394 - protein, 109 aa, Zea mays
  unsure (1)..(109): unsure at all Xaa locations
  Clone ID: MRT4577_149913C.1.pep
QYQNLSLVRSPYAFLLQQRLFLFHLQAEAYIVAYLRQQHLLPFYPQVVGNIKAFLXQQQLLPFYPQKVGNIVAFLQQQHLLPFSQHAMTNPSTLLHPSTIGNAFILDFL

SEQ ID NO: 239395 - protein, 233 aa, Zea mays
  Clone ID: MRT4577_149914C.1.pep
MSVAATPTTGQRRHLHLPPRLPPVSASLDPAASHPSKGAMSPSGELLASISSVFTVAFVLLACVELGDAAAAAVGVYRLIQYDLAGAPLGSRAAVLNHHAAALPLPAGADLSRSALVAPLLDLPLSFLREYLVEKKHLGGLLILLPTNNDSVDDKGQFKGVLTELEKLLLHEQVPYPVYFALHDDNLDNLLADIHKIASSGQPASATTGGYKLVVSSAEPRKVSSPTISNIQG

SEQ ID NO: 239396 - protein, 552 aa, Zea mays
  Clone ID: MRT4577_149915C.1.pep
MSPSGELLASISSALAVAFVFLACVELGDAAAAVSVYRLIQYDLAGAPLGSRAAVLNHHAAVLPLPAGADLSRSALVAPLLDLPLSFLREYLVEKKQLGGLLILLPTNQGDKDSADDKGQVKGVLTELEKLLVHEQVPYPVYFALHDDNFGNLLADIHKIASSGQPASATTGGYKLVVSSAEPRKVSSPTISNIQGWLPGFKGEGDSEQLPTIAIVANYDTFGAVPALSVGSDSNGSGVVALLEIARLFSRLYSNPKTRGKYNILFGLTSGGPYNYNGTSKWLRSFDQRVRESIDYAICLNSVGSWGNDLWMHVSKPPENPYIKQIFKEFSDVSKEMGVSVGIKHKKINVSNPRVAWEHEQFSRFRVTALTLSEMSTPPEFLESTGGLHDTRESTDVESVIRTVRLVSESLARHIYGLRGRNIDVFAENSSLAINPHYVRSWLDLLSRTPRVAPFLQKNDPFIAALEKELSAHTTDVHVQSDALDGMFTFYDATKATLNVYQVAGVTFDLLFLLVLGSYLIVLFCFLVITTRGVDDLINIFRRPPSRKLKGA

SEQ ID NO: 239397 - protein, 318 aa, Zea mays
  Clone ID: MRT4577_149916C.1.pep
LKKSYRRLAMRWHPDKNPGDVKKEAEAKFKKISEAYEVLSDPQKRAAYDQYGEEGLKASADGGGGGGSTSTNGAANQRFNPRNAEDVFAEFFGSNKPFENMGRAKSMRFQTEGAGTFGGFGGNESKFRPYNNDSAGTGSSQARKPPPVETKLPCTLEELYAGSARKMKISRNVVKPNGQLGTESEILTIDIKPGWKKGTKITFPDKGNEQPNQLPADLVFVIDEKPHDLYTREGNDLLVHRKIDLVDALAGTTVSLKTLDGRDLVIRLTDVVTPGYELVVAKEGMPIVKENGRRGNLRIKFDVGFPKRLSSEQRHTIR

SEQ ID NO: 239398 - protein, 66 aa, Zea mays
  Clone ID: MRT4577_149917C.1.pep
TKTTPPIFTQTIKNRSINHSWPTKVIPTSQKAPLSHHVPKKKKKKPPPQQLMKKKKQKFISDPPPP

SEQ ID NO: 239399 - protein, 214 aa, Zea mays
  unsure (1)..(214): unsure at all Xaa locations
  Clone ID: MRT4577_149918C.1.pep
MDCCFMFGRRSQHAVEGDDGEHSVKVFSYNELRKATQDFSGANKIGEGGFGSVFRGMLKDGTLIAVKVLSATSRQGVREFLTELTAISDIKHENLVTLVGCCAEGSHRILVYNYLEKNSLSQTLLGSGYSSIQFNWRARVKIAVGVARGLAFLHEEIRPHIIHRDIKASNILLDKDLTPKISDXGLARLLPANATHVSTRXVAGTLGYLXAPEY

SEQ ID NO: 239400 - protein, 169 aa, Zea mays
  unsure (1)..(169): unsure at all Xaa locations
  Clone ID: MRT4577_149919C.1.pep
MRGIALASECLLVLAGRRLPSVRASSPGPELPSAAAALSPSTVRSLHRVPSISGTGPAIVTDTATDVVDAIARLSYFYKRRGCCGQCTPCRXEGTPWLWMIMERLKVGDAKLEEIDMLQEVTKQIEGHTICALGDAAAWPVQGLIRHFRPELERRIRERAERELLAASA

SEQ ID NO: 239401 - protein, 55 aa, Zea mays
  unsure (1)..(55): unsure at all Xaa locations
  Clone ID: MRT4577_14991C.1.pep
PXRTGRTDARARLGTMVTTETEKSGRTEKGAHVAEQSKRPLEHGPQSGSYKEAAN

SEQ ID NO: 239402 - protein, 61 aa, Zea mays
  Clone ID: MRT4577_149920C.1.pep
VFPYYKDGAPNPPFLFFFRVLRRSSVGGGGKLVTPVGAYFWPFFFSQPIVVLGELNSKGFV

SEQ ID NO: 239403 - protein, 504 aa, Zea mays
  Clone ID: MRT4577_149921C.1.pep
MALRRALLRSAEISFERKAAIEYIHSLSRAQPARSLNGAGLCPASRSLSTQAATTSSTPQPPPPPPPPEKTHFGGLKDEDRIFTNLYGLHDPFLKGAMKRGDWYRTKDLVIKGADWIVNEMKKSGLRGRGGAGFPSGLKWSFMPKVSDGRPSYLVVNADESEPGTCKDREIMRHDPHKLLEGCLIAGVGMRASAAYIYIRGEYVNERLNLEKARQEAYAAGLLGKNACGSGYDFDVHIHFGAGAYICGEETALLESLEGKQGKPRLKPPFPANAGLYGCPTTVTNVETVAVSPTILRRGPEWFASFGRKNNSGTKLYCISGHVNKPCTVEEEMSIPLKELLERHCGGVRGGWDNLLAVIPGGSSVPLLPKHICDDVLMDYDALKAVQSGLGTAAVIVMDKSTDVVDAIARLSYFYKHESCGQCTPCREGTPWLWMIMERLKVGDAKLEEIDMLHEVTKQIEGHTICALGDAAAWPVQGLIRHFRPELERRIRERAERELLAASA

SEQ ID NO: 239404 - protein, 137 aa, Zea mays
  unsure (1)..(137): unsure at all Xaa locations
  Clone ID: MRT4577_149922C.1.pep
IKKQKKKKKKKNFLXXXXTWGGVVCGSPALNPEASAVSLRGFXAAAGHCLRAQHQEEVLPHGPSSPWLAPVEENPPQAQXXPGWVGGXXXXFEKWWXWLPFVWEESVGPNHCFKRYXXFGNGVSANWKHKGLADACI

SEQ ID NO: 239405 - protein, 82 aa, Zea mays
  Clone ID: MRT4577_149923C.1.pep
VSLREVVVVLYNGRNQGNGQRAEHSTAGRSASPSVDMRVLLTHSHRRRQPQQWDVTCTYEFRGPLACGVVLEAISAAQLALE

SEQ ID NO: 239406 - protein, 90 aa, Zea mays
  Clone ID: MRT4577_149924C.1.pep
MKQWQPKICRQHNMAVVTDCTVGIHTSNHAGHSDMLLPITQTTSVQEPALSLSKDLNSSCIRGTEVNKVDLTATYNSERHGILCLKSFDQ

SEQ ID NO: 239407 - protein, 81 aa, Zea mays
  Clone ID: MRT4577_149925C.1.pep
RPGPACQQTLPIGRTEMIRVSPLLLVRPLRVHCPTPSRLSRPPLHHPHPRSGEGGLGCVQAKRHAPTLPREALPSPLPRIW

SEQ ID NO: 239408 - protein, 153 aa, Zea mays
  Clone ID: MRT4577_149926C.1.pep
MAAEPAATAAASAAAAISAVMDWRSSPDARAAAFAYLESVKSGDVRALASTSFFLVRKDQTSEIRLHGFKMLQHLVRLRWEELSAAERNEFANMTINLISDVVGPHEVWALKSQTAALVAEVVRREGVDLGITLLPSIVSLSNNGPTEAELVA

SEQ ID NO: 239409 - protein, 94 aa, Zea mays
  Clone ID: MRT4577_149927C.1.pep
LAAHHHFNIKGFFVLKNKWDTVANFHDSRFNNSIRLNKRTMPNAKTLRGNYKTRTHYYPAVPLIDGQKKKAAHALPGNKMDLTILHNLKEQVKY

SEQ ID NO: 239410 - protein, 199 aa, Zea mays
  Clone ID: MRT4577_149928C.1.pep
MSGFLAVVGKVGTFLLWVLFLVLQTATRIVGSLLASSAEQQDDHHQESAAARRRSPPASPHPELYEPASASLAQLWDPPPLPHLAFAPAADESSSSSSLRRRASAPLPRADEDFVVPSSAYSRPTVGVAHTHSVSAPPLRAIETRAVPSRLVTAGGKRPRLERKYSKIVDQYRSLDEVCMHCVMYPWRCSEDQMLKVRG

SEQ ID NO: 239411 - protein, 49 aa, Zea mays
  Clone ID: MRT4577_149929C.1.pep
SIERMARHLVVMLQILCAKKKASIVFNLCIYADDGECIYSTCLVMLSET

SEQ ID NO: 239412 - protein, 43 aa, Zea mays
  unsure (1)..(43): unsure at all Xaa locations
  Clone ID: MRT4577_14992C.1.pep
XLLCSHXFXFPSSERXISRPXTLIXXLTNXAYHQXXXVNXHXR

SEQ ID NO: 239413 - protein, 42 aa, Zea mays
  Clone ID: MRT4577_149930C.1.pep
AKGGAFIPCGHTFCRACARELRTGRGRCPLCNATIREVLNLF

SEQ ID NO: 239414 - protein, 65 aa, Zea mays
  Clone ID: MRT4577_149931C.1.pep
LRGEKWVTDIEGCHFKAASPLGVSTAVEDTNRFSTRCLHFLPRKKLSFYENLTFSDAMVAASLFQ

SEQ ID NO: 239415 - protein, 339 aa, Zea mays
  Clone ID: MRT4577_149932C.1.pep
MATTPPPTAILGTLGDFTSRENWDKFFALRGTGDSFEWYAEWPNLRAPLLALLGDRGAAAGAAQEILVPACGSSVLSEKLYDAGFCRVTNVDFSRVVVADMLRRHARARPEMRWRVMDMTDMQFADGSFDVILDKGGLDALMEPEAGTKLGIKYLNEVKRVMKSGGKFVCLTLAESHVLALLLSEFRFGWDMSIQAIASESSEKSAFQTFMVVMVKGKMGVAQTIKSSLDQSAEYCNMRQANAVIRALGNENIIRESYSSSVDVLLSLRDLQLGAIGDLKVIVPGRRRQFILGEQETSLYCYKAILLDAKKQTETFVYHCGVFIVPKARAQEWLFCSSE

SEQ ID NO: 239416 - protein, 54 aa, Zea mays
  Clone ID: MRT4577_149933C.1.pep
AQLLECYVNILRVYIIQAFAMVFSIERPCSFIVATATTHCSPIYYYKFLIGIFP

SEQ ID NO: 239417 - protein, 433 aa, Zea mays
  unsure (1)..(433): unsure at all Xaa locations
  Clone ID: MRT4577_149934C.1.pep
LSFKKGXTRPPRLVHLEKSITRHKAHIKKLESILRLLDNDELSPEQVNDVKDFLEDYVERNQEDFDEFSDVEDLYSTLPMEKVEALEDMVSLAPSILIKGVAAVSTTAVLSTKSPTATSPTQATVSTISQGTSQDQAEETTTLESNPESVPQTPPPKGGNLGPSVPVVPTAISTSAAAVSVSADTITSPGPVRPVIPATAPTIFAPAAVRNAPESMPAVASTPANLSTAVKDDESMSVPPRRPSPATEIGIGRGITRGTTSQALGTAPITIGPVSGNGSLVMPLGSKVQPQRGPRTNDAIGSDSANTNENPILGGRVFSPPVVSGVQWRPQAAAAFQNQIETNQYRGRPEISADHREKYIQRLQQVQQQGGSLLNVSHITGINQKQFPTPQPNPLLQQFNSQSSSISSQVNLGLGVQGSDAGHIKSEDQQILA

SEQ ID NO: 239418 - protein, 89 aa, Zea mays
  unsure (1)..(89): unsure at all Xaa locations
  Clone ID: MRT4577_149935C.1.pep
IFCFLILLTLSPHVSTATILPQCSQAPITSLLPPYLSPSLSSISKIPILQPYMIQQSIPTFIXLPLSPLILQQPSSLLLQLLFFHFFSH

SEQ ID NO: 239419 - protein, 48 aa, Zea mays
  Clone ID: MRT4577_149936C.1.pep
GSKCKRDGKEGDNMVESFKVGVIGHVMEMMLQLKEHLKWQKWRFCQDG

SEQ ID NO: 239420 - protein, 854 aa, Zea mays
  Clone ID: MRT4577_149937C.1.pep
MGASRKLQGEIDRVLKKVQEGVDVFDSIWNKVYDTENANQKEKFEADLKKEIKKLQRYRDQIKTWIQSSEIKDKKALMDARKQIEREMERFKVCEKETKTKAFSKEGLGQQPKTDPKEKAKAETRDWLNNVVSDLESQIDNFEAEIEGLSIKKGKQRPPRLVHLEKSITRHKAHIKKLESILRLLDNDELSPEQVNDVKDFLDDYVERNQEDFDEFSDVEDLYSTLPMEKVEALEDMVSLAPSSLVKGVASVPTTAVSSTKSSVATSLTQPTVSTAPSQSTSQDQTEDTASQESNSESVPQTPPPKGGNSGPSIPAVPIAVSTGSAAISVLAETISSPVRPIVPTTVATILSSAIPRSAPENTSTVTSIPANLSITLKDDESMSFPPRRPSPAITEIGIGRGIARGTTSQALGTAPITIGPVPGNGSVSALPGINDLSKRNILNTDEKINSGGLSQQLVMPLGSKVQPQQVPRTNDAISSESANTNESPILGGRVFSPPVVSGVQWRPLGAAAFQNQSEISHFRGRPEISADHREKYIQRLQQVQQQGGSLLNVSHITGINQKQFPTQQPNPLLQQFNSQSSSISSQVNLGVQGTDAGHIKSEEEEQLLAEDGVESSATTGANKQTSEDDTKIPYSNPSAPAAESNQLPRDTDPSPGQPLQPGMSSSGVGVIGRRSVSDLGAIGDNLTGTSASSGHDQLYNLQMLEAAFHKLPQPKDSERAKTYIPRHPAVTPASYPQVQPSIVSHPSFWERIGSDTLATDMLFFAFYYQQNTYQQYMAARELKKQSWRFHRRYNTWFQRHVEPQVTTDEYERGSYVYFDFHVTEDGSGWCQRIKNDFTFEYNFLEDELSVQTN

SEQ ID NO: 239421 - protein, 45 aa, Zea mays
  unsure (1)..(45): unsure at all Xaa locations
  Clone ID: MRT4577_149938C.1.pep
MGAVVLCRTSPLNFLIQTGTGAGLSCGSHMWRCEAXPCGVCGESL

SEQ ID NO: 239422 - protein, 556 aa, Zea mays
  Clone ID: MRT4577_149939C.1.pep
MGASRKLQGEIDRVLKKVQEGVDVFDSIWNKVYDTENANQKEKFEADLKKEIKKLQRYRDQIKTWIQSSEIKDKKALMDARKQIEREMERFKVCEKETKTKAFSKEGLGQQPKTDPKEKAKAETRDWLNNVVSDLENQIDNFEAEIEGLSIKKGKQRPPRLVHLETSITRHKAHIKKLESILRLLDNDELSPEQVNDVKDFLDDYVERNQEDFDEFSDVEDLYSTLPMEKVEALEDMVSLAPSSLVKGVAPVSTTAVLSTKSSVATSPTQPTVSTASSQSTSQDQTEETASQESNPESTPQTPPPKGGNPGPSVPAVPIVVSTGSAAVSVPAETISSPVRLTVPATAAAVLSSAIPRSAPENTLAVTSIPANLSTTLKDDESMSVPPRRPSPAITEIGIGRGITRGTTSQALGTAPITIGPVSGNVSVSALPAINDLSKINILNTDEKINSGGLSQQLVMPLGSKVQPQQVPRTNDAIGSDSANTNENPILGGRVFSPPVVSGVQWRPQAAAAFQNQSETVCISSVNLFYYIVQLPGVLVRCLPGEPKVLCLTQPL

SEQ ID NO: 239423 - protein, 201 aa, Zea mays
  Clone ID: MRT4577_14993C.1.pep
MSAGKCAACGKTAYPLESVTALEQTFHKICFKCDVCKGTLNLKNYKGVNGKVYCFTHTPVDRSSTGSDSVTTKTAMQAPKKQAEGLGTAQKGTGEKPNVGLDTVTVQTAIKAPKAVAEGLGTAQKGTGEKPTVGTESVHLKSALSAPKVRAENIGTVHKGDSITAPQQASFDVEHPAPASEEAHHHEEAEPVSYDEQPADE

SEQ ID NO: 239424 - protein, 233 aa, Zea mays
  unsure (1)..(233): unsure at all Xaa locations
  Clone ID: MRT4577_149940C.1.pep
ANKQTSEDDTKIPYSNPSAPAAENTQLPRDTDLSPGQXLQPGMPSSGVGVIGRRSVSDLGTIGDNLTGTSGSSGHDQNYYLQMLEAAFHKLPQPKDSERAKTYIPGHPAVTPASXXXVQASIVSNPTFWERIGSDTLATDMLFFAFYYQQNTYQQYLAARELKKQSWRFHRRYNTWFQRHVEPQVTTDEYERGSYVYFDFHVTEDGSGWCQRIKNDFTFEYNYLEDELSVQTN

SEQ ID NO: 239425 - protein, 518 aa, Zea mays
  unsure (1)..(518): unsure at all Xaa locations
  Clone ID: MRT4577_149941C.1.pep
MATKGGNARGVPVGALLVAALLLSSLVPTSASSYPARVVSGFLSNAASAVVKRLWSLKSTTKTAASGGKSMVKYEGGYTVETVFDGSKLGIEPYSVEVTQSGELLVMDSMNSNIYRMALPLSRYSRPKLVAGSPEGFPGHVDGKLREARMNHPKGFTVDDKGNIYVADAMNMAIRKISDTGVTTIAGGKSGRGGHVDGPSDEAKFSTDFEVRYIGSSCSLLVIDRGNQAIREIQLHFDDCVYQYEAGFPLGVALLLAAAFFGYMLALLQRRVLGMYSNGDEQEDESPVKAKLSSIPPPYQKPLKSSLRPPLIPNDDEPVKQEEEGLFTSIGKLVGVARSSVAEIVGATFSRKKRXTFTTTSWGRPTSWPVQESYAIXRGDETPPPLDTRAPTPRKSYAFMSKEPEKIHHIRHGRPQSHGWTGEAAAAAPQQQAASLPPQQQQQQQQVHHQQYHNRQYSAGPQTFYEPSCDAAKEIVFGAVQEGDTGRRRPVEIKPVNHGDVAPFELNGLRFRSSYGMG

SEQ ID NO: 239426 - protein, 132 aa, Zea mays
  Clone ID: MRT4577_149942C.1.pep
PAGSGNFYIGCAAKFEADLKKEIKKLQRYRDQIKTWIQSSEIKDKKVSASYEQALMDARKQIEREMERFKVCEKETKTKAFSKEGLGQQPKTDPKEKAKAETRDWLNNVVCWNPELLLLCSYVFISVFWYTN

SEQ ID NO: 239427 - protein, 50 aa, Zea mays
  unsure (1)..(50): unsure at all Xaa locations
  Clone ID: MRT4577_149943C.1.pep
XFTXXXNEXXXDRQXXLAXXCXVYCCHWXPXXXXXXXRAEXPSXRTRAGX

SEQ ID NO: 239428 - protein, 76 aa, Zea mays
  Clone ID: MRT4577_149944C.1.pep
SGSKSYQLGHRLSLKWSTGAGPRIGCVKDYPMELRMQALEMVDLSPRASTPSASRRLPPCLSPTEIALPTSLLALI

SEQ ID NO: 239429 - protein, 79 aa, Zea mays
  Clone ID: MRT4577_149945C.1.pep
IPATPTAHHSRNHHGYVTRTLEIVHGKPPKVEQRCTHESTKMAPSSLRHQRRLLCSLCLAPIPVYGWRVKGHSEVVGTA

SEQ ID NO: 239430 - protein, 68 aa, Zea mays
  unsure (1)..(68): unsure at all Xaa locations
  Clone ID: MRT4577_149946C.1.pep
QKVLSSNCVXCTRLXTTLHQRSRPSPDPGKNCVYISIKRNLSSTTTGEKNGTWVKVIPWLHRLSCFVE

SEQ ID NO: 239431 - protein, 293 aa, Zea mays
  Clone ID: MRT4577_149947C.1.pep
MQCISSSASISEDENSRASSNSQKNSGSRDLPPDAEVVIRVPSLPLRDHFGYSPSEMVVDGSGKGSRSTRSEHEKGVLTESFKPNKVKDVPVASVLDPSDDEFDDPEYSQDPGDGAQCVDHPRATKSGDSFFSSLIKKSFKINGGMGNGRAKVFINGYPISDRAVRKAEKIAGPIYPGEYWYDYRAGFWGVIGQPCLGMIPPYIAEFNYPMPKNCAGGNTGVFINSRELHQKDLDLLVGRGLPDSPDRSYRVEISGKVSDEVSGEELYCLGKLAPTVEKMKRGFGMRVPRTIQ

SEQ ID NO: 239432 - protein, 56 aa, Zea mays
  Clone ID: MRT4577_149948C.1.pep
KKRCPLHGSVTVHKRRWVSGRTASRGEGGVPGRGWSHAITVVRIAARGYGVPGLIG

SEQ ID NO: 239433 - protein, 71 aa, Zea mays
  Clone ID: MRT4577_149949C.1.pep
LYSNTLSCEHNAFNIIETLFFVSKMIYCFEFFIFQLFSNCMVEKRCLTTLTYVWTDLLRNLAKFSIVFILF

SEQ ID NO: 239434 - protein, 37 aa, Zea mays
  Clone ID: MRT4577_14994C.1.pep
SHFTYAARPPCRGLKIKLSYYVLFIREYNNFAGTTVV

SEQ ID NO: 239435 - protein, 87 aa, Zea mays
  unsure (1)..(87): unsure at all Xaa locations
  Clone ID: MRT4577_149950C.1.pep
ERGFSCQAFLFGPAWVFPVPAFLYRGPLILFWWPFYRGFSLPARVRSFWFFLRGARFSPPPFFFPRFPFFFFFFKKLNFFFFFFXFF

SEQ ID NO: 239436 - protein, 67 aa, Zea mays
  Clone ID: MRT4577_149951C.1.pep
YPLIRIQCPHYHRSTIFSFKVGLFVLILYIPTFQQLYDGKRCLTTLTYVWTDLLCNLAKCPMVFILF

SEQ ID NO: 239437 - protein, 115 aa, Zea mays
  unsure (1)..(115): unsure at all Xaa locations
  Clone ID: MRT4577_149952C.1.pep
MAARTQNPQGKKLKTWYEQHGSYLNLRRLFEGDRDRFNRFILNLNTNHGHILVDYSKNLLTETVMHILVDVANSMGVEAARERMXTVEKINFTEDRAVLHVAXLLNRSNTPILVD

SEQ ID NO: 239438 - protein, 55 aa, Zea mays
  Clone ID: MRT4577_149953C.1.pep
KRHLRFKRGSIVWNSLYSNFLATVWGKKRCLTTLTYVWTVLSSNLAKFFFFFILF

SEQ ID NO: 239439 - protein, 115 aa, Zea mays
  unsure (1)..(115): unsure at all Xaa locations
  Clone ID: MRT4577_149954C.1.pep
PQPDLRVPAAGVCNWFRSCPMLEKKSSVRLLLISQKQMTLRSLXGQSWGAVMLVIVPFLWRLLLVRGFLAHARVPRVKLVESAGHLVNMELVSPXXVEADAAMLSVGGSVVRQNS

SEQ ID NO: 239440 - protein, 93 aa, Zea mays
  Clone ID: MRT4577_149955C.1.pep
DCKIAVSQTAVPSFPVPASGTPFMMAYTTPSFSPAQLASPSKKEKTSLTPGRRSQHSRGAGTKKGLMDRVGTEIKGMMISNGMMIDVSTTTEL

SEQ ID NO: 239441 - protein, 349 aa, Zea mays
  Clone ID: MRT4577_149956C.1.pep
MPILHMDMPPCHYIDYPEGPVHPVSPGYHSVSTENLQHERWIGTSYLRGRHPMGNLRHADTFEYRWEAPTPFRRYRSVTPPNHAISAYGPEASSPTEAYLSAPMKSRSHHSLINGWHASPVSSTDSDERICSLISVYGQQAQLQKQTCQSAKLGKNPQFGISLHGSESEAHPTRVSPSDSTEQPPSPCFRIHPPTTVENLLHCRVSACGPEASLPLHLAVTSSTSRSTVVASQVKKKMQVPIFYAEAVIGPTGERIEYIRRTSRSSILISNSEGTMYIEITGSAATDVLTAEQLIKNFMAEAAAASPGHSYDFIPSYLPAPRSAQADIFASPETSEVSSLPERRLQMIY

SEQ ID NO: 239442 - protein, 111 aa, Zea mays
  unsure (1)..(111): unsure at all Xaa locations
  Clone ID: MRT4577_149957C.1.pep
VYGPSNQIIIITNIIIVTNSSPAQQILPGRPNPRSKRMPXPPPLVLMGQPLFPNFAEALEGRYRFVLAGDADADTGVRGPGPARAGARGTSPSSLPTGFRRWTLWPTPTLG

SEQ ID NO: 239443 - protein, 60 aa, Zea mays
  unsure (1)..(60): unsure at all Xaa locations
  Clone ID: MRT4577_149958C.1.pep
VXXPXXVPYNFLISLVINIRRDWDIHYHLQVKLTIHLPIVCNFTIPLSTSNEFKLPTLKD

SEQ ID NO: 239444 - protein, 94 aa, Zea mays
  Clone ID: MRT4577_149959C.1.pep
IPDGEGRRQKQGRTPLSHHGSCSVGEQGHDAQHQQGLDQSVSVKDWRPEKLLLLCDCEACQIACHLFSGFAVRFLLMYIFVLLGLSELRECTYM

SEQ ID NO: 239445 - protein, 119 aa, Zea mays
  Clone ID: MRT4577_14995C.1.pep
FLNKEDGSQLAMFVQEKFLFDLKVHPSSFSIDGMLGNMRFCDMSLGPEHRWGWLCDIRKPGVESLIKFTFQSYSIDDEDFEGHNYSLTGQLSAVRIVFLYRFIQEFTCYFMELGTPHTE

SEQ ID NO: 239446 - protein, 126 aa, Zea mays
  Clone ID: MRT4577_149960C.1.pep
MAPKVALFLALSLLFAAAAHGCGPYCSGPVVPTPPVVPSHSHGRCPIDALKLKVCANVLGLVKVGLPQHEQCCPLLEGLVDLDAALCLCTAIKANILGIHLNVPLSLNLILNNCGKICPKDFTCPN

SEQ ID NO: 239447 - protein, 72 aa, Zea mays
  Clone ID: MRT4577_149961C.1.pep
IPFSSHASHHSSSHPHRLVHIQQLITIASSPKLVHSLKTFTSDLNKSFLSTIYHSLTTLHSYYPTLNSNILL

SEQ ID NO: 239448 - protein, 126 aa, Zea mays
  Clone ID: MRT4577_149962C.1.pep
MAPKVALFLALSLLFAAAAHGCGPYCSGPVVPTPPVVPSHSHGRCPIDALKLKVCANVLGLVKVGLPQHEQCCPLLEGLVDLDAALCLCTAIKANVLGIHLNVPLSLNLILNNCGKICPKDFTCPN

SEQ ID NO: 239449 - protein, 352 aa, Zea mays
  unsure (1)..(352): unsure at all Xaa locations
  Clone ID: MRT4577_149963C.1.pep
STVRSFSPKTDRFEVIKEDLERXYKNTNMKPMSHSTYLRLQVLREIFWDVDKKLELLMKLTFTDLVAFVPKILSQLHIEGLCHGNLSEDETINISKIFLNTLSAQTLPEEARHEERVICIPNGANLVRSVRVKNDLEENSVVEVYFPIEQDVGKEATRLRAITDLFSNIIEEPCFDQLRTKEQLGYTVDSSPRMTYRMLAYCFRVMSSKYSPIYLQSRIDNFIDGLSALLDELSEETFEHHRSGLIADKLEKEPSLSYQTSDYWSQIADKRYMFDMSKLEAEELKTVQKADVIAWYNTYIRSSSPKRRRLAIHVYGCNSDIAEAAKLQEQSWTIIDDVESLKASSQFYSSLC

SEQ ID NO: 239450 - protein, 62 aa, Zea mays
  Clone ID: MRT4577_149964C.1.pep
LLHRRSSASPDIALSGKKLTASAGADLTGRAPQHSRFKAMAANDVDETKQTDEDRWKALALP

SEQ ID NO: 239451 - protein, 129 aa, Zea mays
  Clone ID: MRT4577_149965C.1.pep
MAPKVALFLALGLLFAAAANGCEPYCPGPVVPTPPVVPTPSSHSHGRCPIDALKLKVCANVLGLVKVGLPQHEQCCPLLEGLVDLDVALCLCTAIKANVLGIHLNMPLSLNLILNNCGKICPEDFTCPN

SEQ ID NO: 239452 - protein, 126 aa, Zea mays
  Clone ID: MRT4577_149966C.1.pep
MAPKVALFLALSLLFAAAAHGCEPYCPGPVVPTPPVVPSHSHGRCPIDALKLKVCANVLGLVKVGLPQHEQCCPLLEGLVDLDAALCLCTAIKANVLGIHLNVPLSLNLILNNCGKICPKDFTCPN

SEQ ID NO: 239453 - protein, 121 aa, Zea mays
  Clone ID: MRT4577_149967C.1.pep
MAPKVALFLALSLLFAAAAHGCEPYCPDTVVPTSHSHGRCPIDTLKLKVCANVLGLVKVGLPQHEQCCPLLEGLVDLDAALCLCTAIKANVLGIDLNVPLSLNLILNNCGKICPKDFTCPN

SEQ ID NO: 239454 - protein, 73 aa, Zea mays
  Clone ID: MRT4577_149968C.1.pep
LPPAGLVAGLFAWIFSTCQSRCVRIFPCRSFFFFLRGGVGPLQPVGWFVFKKPFLFPTLRGESCFRWVLNLAL

SEQ ID NO: 239455 - protein, 43 aa, Zea mays
  Clone ID: MRT4577_149969C.1.pep
FQNLSRIADLGISRPKLISCCYLFRREYAPQFCCYCKNICRPV

SEQ ID NO: 239456 - protein, 168 aa, Zea mays
  unsure (1)..(168): unsure at all Xaa locations
  Clone ID: MRT4577_14996C.1.pep
MAIMILSLTASASSCERNWSCFEGIHTKKRNRLTCERVENLVFVRFNSXIQRKKLRXNNNKVDPLLATDAASAQGWIVEGGDEESSDVNNVTGLTWQQIVDACGPEEVTKLWKSARLAQPRDIEEEQLPSENEEEEPINEEEIEFESDQDEVITTGYELQEQEIVNDD

SEQ ID NO: 239457 - protein, 126 aa, Zea mays
  Clone ID: MRT4577_149970C.1.pep
MAPKVALFLALSLLFAAAAHGCGPYCSGPVVPTPPVVPSHSNGRCPIDALKLKVCANVLGLVKVGLPQHEQCCPLLEGLVDLDAALCLCTAIKANVLGIHLNVPLSLNLILNNCGKICPKDFTCPN

SEQ ID NO: 239458 - protein, 126 aa, Zea mays; identical to SEQ ID NO: 239448
  Clone ID: MRT4577_149971C.1.pep

SEQ ID NO: 239459 - protein, 170 aa, Zea mays
  Clone ID: MRT4577_149972C.1.pep
LDSFKATQPFRKIGRCIECEGKDFLSPSCHLPVAADRWIAKLSGPCLAQALQMYPDFKIKVVGHSLGGGTTALLTYVLREHKEFASTTCLAFAPAACMTWKLAESRVHFITTVINGADLVPTFSAASVDDLRSKVTASAWLNDLRHQIEQTRILSTFYRSASGLGSRLSS

SEQ ID NO: 239460 - protein, 103 aa, Zea mays
  Clone ID: MRT4577_149973C.1.pep
AAFFFFFFFFFFFFFFFFFFFFFFFFFFWKTKPTFQFHGPLSLQKDPHTPRNKIKIYITHPPLQFFLREGGNKYKKTKIALFILFTNREGPRLGQKKKKWGAQ

SEQ ID NO: 239461 - protein, 82 aa, Zea mays
  unsure (1)..(82): unsure at all Xaa locations
  Clone ID: MRT4577_149974C.1.pep
GALAVYDKDTPXRWHNVARAVGCGKTAEDVKRHYKYLKTDVKHIETEEGGRGSQSSSPAGAGAGGSGSSSSSSWGRDNGDKR

SEQ ID NO: 239462 - protein, 66 aa, Zea mays
  Clone ID: MRT4577_149975C.1.pep
PRNLSPRFQRLFGNALFYKQRIFCLREKPVTFIWGLTYGPFGAKGLITDPGSWKTFYPDANFNLDS

SEQ ID NO: 239463 - protein, 94 aa, Zea mays
  Clone ID: MRT4577_149976C.1.pep
KTTPKTVTMSLKFSIYTCLPIPTKAPSPDASSKDSGLWQPQSVTLLYTPTTALVVDCPATVYPTRELAEWIKSQLPLGSTLKYFGCTHAHGDHF

SEQ ID NO: 239464 - protein, 59 aa, Zea mays
  Clone ID: MRT4577_149977C.1.pep
CGSYLYVLVFYVFCRSGGSASPLLNHLTGNPTSPPSPSTRSTCPDVISGAALVITHGMA

SEQ ID NO: 239465 - protein, 304 aa, Zea mays
  Clone ID: MRT4577_149978C.1.pep
MSSVHFFPASSQTPVPACLLKTSPKSPLPCPRTLATTALQSVGGNCNAWHRPHLRLQRRVRTPAAPSDAPPVGPDGGSGGGGAGGGSGGEDEEEEGEKKKGLLPEWMNLTTEDAKTVLAAVAISLAFRTFVAEPRFIPSLSMFPTFDVGDRIVAEKVTYYFRKPCVNDIIIFKSPPVLQEVGYTDNDVFIKRVVAREGDVVEVHEGKLVVNGEARNEEFILEPPSYDMNPVQVPENSVFVMGDNRNNSYDSHVWGPLPAKNILGRSIFRYWPPGRIGGTTKGCFSPELSPGAKPESLTDVKSTK

SEQ ID NO: 239466 - protein, 139 aa, Zea mays
  Clone ID: MRT4577_149979C.1.pep
GLGGPDSIIQRRAGPSVGRGPGPCRAASAAGHARAGGARSDSDSTPALGRPDRAKGKHAGGATHHAAAAIAPSLADWHLPRARTADRFREQGRPSCGVWRCRGRRGRPAERQPATGRQARPGGTTKSWWSTQRRARGWV

SEQ ID NO: 239467 - protein, 120 aa, Zea mays
  unsure (1)..(120): unsure at all Xaa locations
  Clone ID: MRT4577_14997C.1.pep
RLCRHLKTSRSXPCELAYCGAGGTCRKNGSGMSYHCECKEGYSNLLNMTAMPCFQNCSIGADCASIGIHPSSTSNSPPAPPGSESISNQGSTAAPGSISQRILLPLLLMVVVSLAVGYVM

SEQ ID NO: 239468 - protein, 56 aa, Zea mays
  Clone ID: MRT4577_149980C.1.pep
LLGGLRYWQVVFQLHGGSLRSQQPLESISWLCLLLLECEVPTRANWAYPTISTTLK

SEQ ID NO: 239469 - protein, 78 aa, Zea mays
  Clone ID: MRT4577_149981C.1.pep
MIIYRDLISHDEMFSDIYKIREIADGLCLEVEGKMVSRTEGNIDDSLIGGNASAEGPEGEGTESTVITGVDIVMNHHL

SEQ ID NO: 239470 - protein, 123 aa, Zea mays
  Clone ID: MRT4577_149982C.1.pep
MAWDRKAPLAAALATALVLGLCRGDVVQFIFGDSLSDVGNNNYLTKSLARAALPWYGIDLGRGMPNGRFCNGRTVADIVGDKMGLPRPPAFLDPALDADTIFKDGVNYASGGGGILNETSSLF

SEQ ID NO: 239471 - protein, 110 aa, Zea mays
  Clone ID: MRT4577_149983C.1.pep
QALDTFYTTTHRSAPVRPQEIPHLPLWSGHRSVRDLVQWRGEIYDAYYSMYGHVGKLADEIKKGALSGAGAEGQIWQGPEILCVHVLGKMGAPPKPCVPDITHHELAEAD

SEQ ID NO: 239472 - protein, 304 aa, Zea mays
  Clone ID: MRT4577_149984C.1.pep
MAETNPELSDLMAQTNKKIVPKFTEIFPVEDVNYPYSAFIASVRKDVIKHCTDHKGIFQPVLPPEKKVPELWFYTELKTRTSSITLAIRMDNLYLVGFRTPGGVWWEFGKAGDTHLLGDNPRWLGFGGRYQDLIGNKGLETVTMGRAEMTRAVNDLAKKKKMATLEEEEVQMQMQMPEAAELAAAAAAADPQADTKSKLVKLVVMVCEGLRFNTVSRTVDAGFNSQHGVTLTVTQGKQVQKWDRISKAAFEWADHPTAVIPDMQKLGIKDKNEAARLVALVKNQTTAAAAAATAASADNDDDEA

SEQ ID NO: 239473 - protein, 88 aa, Zea mays
  unsure (1)..(88): unsure at all Xaa locations
  Clone ID: MRT4577_149985C.1.pep
PPVNPGFTTQHGVPLPVTQGNQVQKWDRISKAXSSFEWADHPTAVIPDMQKLGIKDKNEAARIVALVKNQTTAAVATAASADNDDDEA

SEQ ID NO: 239474 - protein, 304 aa, Zea mays
  unsure (1)..(304): unsure at all Xaa locations
  Clone ID: MRT4577_149986C.1.pep
MAETNPELSDLXXAQTNKRIVQFTEIFPVEDVNYPYSAFIASVRKDVIKHCTDHKGIFQPVLPPEKKVPELWFYTELKTRTSSITLAIRMDNLYLVGFRTPGGLWWKFGKAGDTHLLGDNPRWLGFGGRYQDLIGNKGLETVTMGRAEMTRAVNDLAKKKKMATLEEEEVQMQMQMPEAADLAAAAAAXXPQADTKSKLVKLVVMVCEGLRFNTVSRTVDAGFNSQHGVTLTVTQGKQVQKWDRISKAAFEWADHPTAVIPDMQKLGIKDKNEAARIVALVKNQTTAAAAAAASAXXXNDDDEA

SEQ ID NO: 239475 - protein, 304 aa, Zea mays
  Clone ID: MRT4577_149987C.1.pep
MAETNPELSDLMAQTNKKIVPKFTEIFPVEDVNYPYSAFIASVRKDVIKHCTDHKGIFQPVLPPEKKVPELWFYTELKTRTSSITLAIRMDNLYLVGFRTPGGVWWEFGKAGDTHLLGDNPRWLGFGGRYQDLIGNKGLETVTMGRAEMTRAVNDLAKKKKMATLEEEEVQMQMQMPEAAELAAAAAAADPQADTKSKLVKLVVMVCEGLRFNTVSRTVDAGFNSQHGVTLTVTQGKQVQKWDRISKAAFEWADHPTAVIPDMQKLGIKDKNEAARIVALVKNQTTAAAAAATAASADNDDDEA

SEQ ID NO: 239476 - protein, 60 aa, Zea mays
  unsure (1)..(60): unsure at all Xaa locations
  Clone ID: MRT4577_149988C.1.pep
TKLMNAYCDRQPVEMIAIPLLXFDGHRLRAEHTPDDMYMDDAHKIEAMIHQTDNTCPTTT

SEQ ID NO: 239477 - protein, 190 aa, Zea mays
  unsure (1)..(190): unsure at all Xaa locations
  Clone ID: MRT4577_149989C.1.pep
MHSAKGELPPRWPIQPETLLVDNPIYDYALVPFSSIALVTDVVLKPDMAEITRHRITHMQNVAQELQVLAHSWVSAGSIPEVDWSKVKTLEFQDTLKSRQSFSTRLEGKICPTCPDFDEHYNIIHAKHELFQRIAYLKMAISDQNLELLPDYEQRIAVLKDLRHIDENQAVLLKGRVACEIXSSDQLIMT

SEQ ID NO: 239478 - protein, 103 aa, Zea mays
  Clone ID: MRT4577_14998C.1.pep
RIDTIFTTEGLAVKLLPIPLGRRNRERTNSTRKAILILAEMFQRLLRTYAEVGKLSMCVRTVRSGSALVLVLVLPSEKRKSWSSPTVGAYRGLSTPQEEEDEE

SEQ ID NO: 239479 - protein, 107 aa, Zea mays
  Clone ID: MRT4577_149990C.1.pep
GFPPLVFAFLAPFALLAPLPAVLGLAAFGLFAVSLRVPGVCVRGCSHLCRLLRALCGGVAVGVRFVAIFSRPPVLWLPFSVARSPQLPVLRRVPLFFGRTPGSAWVS

SEQ ID NO: 239480 - protein, 92 aa, Zea mays
  Clone ID: MRT4577_149991C.1.pep
MEKCRSVPHEHSSAYYGCGGGYDYEDVGGGPGQAGKSYSFNGPSGRDDPEAKRRRRVAAYNVFATQGRIKTTVRSSVKWLKSKFSDVRYGGL

SEQ ID NO: 239481 - protein, 66 aa, Zea mays
  unsure (1)..(66): unsure at all Xaa locations
  Clone ID: MRT4577_149993C.1.pep
MPFCFKKKKKKKKKKKKKKKKKKKKKKKKKKKKKKKKKKKKKKKKKTKKKKKKKKXGGGGLKENML

SEQ ID NO: 239482 - protein, 76 aa, Zea mays
  unsure (1)..(76): unsure at all Xaa locations
  Clone ID: MRT4577_149994C.1.pep
QPTXHHDQAXRRQERXGNSSTGRRPKTQSSTQTAEQPRAHRKHQKSGQTETAAQQAQSQGQREANSKRPPPNKGPP

SEQ ID NO: 239483 - protein, 121 aa, Zea mays
  Clone ID: MRT4577_149995C.1.pep
AASTWGCVWDLTSTGKPTPAPTNQGTQAPTPAPTGKPTPAPTNQGTQAPTSAPTGKPTQPTSAPTVPTQTTAPPTGKPDQTTGKPDQGTPKPDQTTGKPDQGTPKPDQTTAKPDQGNPGQG

SEQ ID NO: 239484 - protein, 83 aa, Zea mays
  Clone ID: MRT4577_149996C.1.pep
FFFIIFFLWVIFGSLFLILYFFNFFTIPDLWGHPEISYRSLRGSNIFLIGVIIKMGILMAKIVSWEKRFSSIKFQKKIQPDIK

SEQ ID NO: 239485 - protein, 162 aa, Zea mays
  unsure (1)..(162): unsure at all Xaa locations
  Clone ID: MRT4577_149997C.1.pep
KEGYCAPVIYRVISRGHRHDHPIAIPARRTVPIQHVLARCHPGPFSPFARSTQPTALQHLRRTLCRMLPAFRGQSQARSVFLQCGAPDPAAGHPAPPDHQRSGVPDLDGPGVSTCQRGTDRTGGQHRFLAGYAPGVAGSAATHHPDGGRSQVLEPPAXPAXQ

SEQ ID NO: 239486 - protein, 57 aa, Zea mays
  Clone ID: MRT4577_149998C.1.pep
VNFITDLFIPSSLAWSFSDGFYNLDLFVVTNKLHLIFPQIKEELPSNSTTPKPIISP

SEQ ID NO: 239487 - protein, 116 aa, Zea mays
  unsure (1)..(116): unsure at all Xaa locations
  Clone ID: MRT4577_149999C.1.pep
MGLMHRGWGDMHKYALPYKRTAPIXLKTATTELDXMIIKAEHIDHILQDIGVLLRDQNVIHLAKSMTGSTILRILNDHGLAPXIPIDLYLLINNEVMTTNHLQTNSLDMDSIFTLI

SEQ ID NO: 239488 - protein, 69 aa, Zea mays
  Clone ID: MRT4577_14999C.1.pep
RSTDSIIWGRHEVTVFFFKSTLTHTSGPVHVITLMKTTGEGGNRVPDCFSAMCLLMNGSVKVVLPWGGC

SEQ ID NO: 239489 - protein, 34 aa, Zea mays
  Clone ID: MRT4577_1499C.1.pep
VYPIHGFVSPHELHALQDSSGRVIRLLSTGLSYT

SEQ ID NO: 239490 - protein, 114 aa, Zea mays
  Clone ID: MRT4577_149C.1.pep
QNNGGKASGSIFRFNLRYGVYVCLCVYVQAPASNRRKAFGGTLCMYCAQDIVRYPPSGWTVPDQHGGKTRRIKGLHSYTYASDALMKLICVVNGRGEKRTKSGVCESGRAAAPG

SEQ ID NO: 239491 - protein, 77 aa, Zea mays
  Clone ID: MRT4577_14C.1.pep
GPSAFYVKVAMSYNRRIFSTPPPGKLCTGRDLVLLWWVISNKTKALLRTGVLLQHATTLFERTYDESNCKPGPNSPT

SEQ ID NO: 239492 - protein, 76 aa, Zea mays
  Clone ID: MRT4577_150000C.1.pep
LKKPPHPREIPIITLMGYTYMPTESKTHMRSKCYITTITNQYQSKPAKTSIDRNVNARYSSNAYAATASHTLDAHS

SEQ ID NO: 239493 - protein, 94 aa, Zea mays
  Clone ID: MRT4577_150001C.1.pep
QISASFQCDAHLILCSIPKHNDKNLLVAACRSKTVRPCLQSYGVFGSKVFPKFWKNNAVFPKAVVLYSQRCLSTKLKSLFSKLKYFKSGGSFSG

SEQ ID NO: 239494 - protein, 41 aa, Zea mays
  Clone ID: MRT4577_150002C.1.pep
SCLVVPQVTTIVNEALCSSTGLPQLVSQSCTFVAATVVLGT

SEQ ID NO: 239495 - protein, 107 aa, Zea mays
  unsure (1)..(107): unsure at all Xaa locations
  Clone ID: MRT4577_150004C.1.pep
GMFLFNLGSGRGRCLVGPGWRAXQFLPGTACFIVVPVFPPNFLGCERFPPGLVVQPCPFCFWFLRWPMVSWGPFLFYLLPVRCFCCWFGITLACRFPKLDFPCPASP

SEQ ID NO: 239496 - protein, 102 aa, Zea mays
  Clone ID: MRT4577_150005C.1.pep
SYKKLLPSCHCNIVVQSIFTQVIFPLITLVSLRLVSVHLTLIDRHISYRSRSRPSSGLIYRSAPLYRQLATTSILYQLFFYILVVEMKHNVLSKQKLIRVHN

SEQ ID NO: 239497 - protein, 225 aa, Zea mays
  Clone ID: MRT4577_150006C.1.pep
TRPAVREEEGQRSKEHAVPARPWPSSNARHPLDARQGTAASRAKARSGSISPSRFRRQSTSKAAETRAGNAKPTEATRGGSEAVNHTSNVATTKRPAGSSKVRVVPSRYSIPPGSSLAAVTQGNRCKQSLPGSATETRVNLTEPPNDELSPEELAKVAELLPRIRTMPPSDESPRDSGCAKRVADLVGKRSFFTAAGDDGNLVTPYQARVVELESPEAAAEEAEA

SEQ ID NO: 239498 - protein, 71 aa, Zea mays
  Clone ID: MRT4577_150007C.1.pep
NSAPFDTFLKNSFNLQFFLQATTFFLRFFFPWGKEKPCPGQFLFFEILDCQVPFLVGTQGQFSVATPFPPG

SEQ ID NO: 239499 - protein, 103 aa, Zea mays
  Clone ID: MRT4577_150008C.1.pep
KNNAYVVFSLFLFQRIPRWWIWYYWICPLAWTVYGLIVTQYGDLQDPITVPGESNQTISYYITHHFGYHRDFMPVVAPVLVLFAVFFAFMYAVCIKKLNFQQR

SEQ ID NO: 239500 - protein, 46 aa, Zea mays
  unsure (1)..(46): unsure at all Xaa locations
  Clone ID: MRT4577_150009C.1.pep
LSYFSNPTPHGGDHFPVGLFYXILFGVNKWCFIIYSNFFLFFNEIS

SEQ ID NO: 239501 - protein, 130 aa, Zea mays
  unsure (1)..(130): unsure at all Xaa locations
  Clone ID: MRT4577_15000C.1.pep
DTLACTHNAMXALFLLVLFWGVHGEKEESKGIDAKASGPGGYFDITKLGAYGNGKTDSTKAVQEAWAXACGCTLKQTILIPKGHFLVLQLIFTGPLKGDLTIQVDCNLLATTDLSQYTDHCNHIQILLVY

SEQ ID NO: 239502 - protein, 55 aa, Zea mays
  Clone ID: MRT4577_150010C.1.pep
LSFSLSEAALHAFMHYESEHIHYLIVTALTYLLANLLSFCLLTNYSPFNIHNMIA

SEQ ID NO: 239503 - protein, 92 aa, Zea mays
  Clone ID: MRT4577_150011C.1.pep
RVLSCANLPVSHNREIGFPNQAAGKPAASGQIPYTCQVLKLDNIRVIHSIAIAISSSTSPIYKNFPGYITKSVYSKRQCSLLDGCGMTHLRH

SEQ ID NO: 239504 - protein, 72 aa, Zea mays
  Clone ID: MRT4577_150012C.1.pep
HSSGYASDSLPYVMRNALLTRSESVSLRTGESCNPHTMNRRIILTCDELTKWVSDFIQLTEHAVSAFNDVLS

SEQ ID NO: 239505 - protein, 66 aa, Zea mays
  Clone ID: MRT4577_150013C.1.pep
PRVRGRVGAKQAFDEAISELDTLGEESYKDSTLIMQLLRDNLTLWTSDMQEDGSDEMRDASKPDDE

SEQ ID NO: 239506 - protein, 120 aa, Zea mays
  Clone ID: MRT4577_150014C.1.pep
VPRATSRASRGLSPAGRECQCMRAHAACVLLTRISEGAQSYCEDRRERWSTDANNVRHRTFKKRSSLCHEQQLHPKTASVRFFLFFASLISLAFVLITGCNSVKTRFERIVQKKKKKKKK

SEQ ID NO: 239507 - protein, 61 aa, Zea mays
  unsure (1)..(61): unsure at all Xaa locations
  Clone ID: MRT4577_150015C.1.pep
QKGFFPRKFQFKPLSFHFXLRNLLSCFVPIIRPTPIIVPGPLGTFQKKCKHLWLMGGFHEG

SEQ ID NO: 239508 - protein, 49 aa, Zea mays
  Clone ID: MRT4577_150016C.1.pep
SLCLGNACRIQKNIHAPQLVVASGPSAKLANFLFLTYLFCSLFTCLFGC

SEQ ID NO: 239509 - protein, 58 aa, Zea mays
  unsure (1)..(58): unsure at all Xaa locations
  Clone ID: MRT4577_150017C.1.pep
GXPGRTTRVRDPWAGPGEHFQVWLSILRPRIPEFLKPKEGQRGACWFCQANFKGLLEG

SEQ ID NO: 239510 - protein, 68 aa, Zea mays
  Clone ID: MRT4577_150018C.1.pep
CVQNTRPPTPALVLPSVLARQLGYYISYLHWPCEAFQLLPPRLWSRPAPPGSSRCPPSAPSLFPRSDF

SEQ ID NO: 239511 - protein, 105 aa, Zea mays
  unsure (1)..(105): unsure at all Xaa locations
  Clone ID: MRT4577_150019C.1.pep
RPHSALAEDGTAAQRCDVRRRRRRRHTWHPSSAAAVGGFHGLGGDAGPMSRVAALASVRVGKERSSSQGIRCDXIGSAXKVIMVTTTMLMLFAGRFGLAPSANRK

SEQ ID NO: 239512 - protein, 138 aa, Zea mays
  Clone ID: MRT4577_15001C.1.pep
SKCTFTGHKTLENKHKPLVLKELRKLWNVEEQDLPWEVGDYSPSNTLLVDDSPYKALRNPPHTAIFPHSYSYLNWNDDSLGPNGDLRVYLQNLAAADNVQHFVRDNPFGQPFITESDPHWNFYAQIADRGRAPLTCCA

SEQ ID NO: 239513 - protein, 240 aa, Zea mays
  Clone ID: MRT4577_150020C.1.pep
MENGDETLASPTAAAETDALNGGVAEEEQVPITHPAKSYVTLADDNPAPNGGVVKEEEGGAHTTAKSYAAVAAQAEIEDLRAAKLDLEEKLAEARRENKSLAEETHRSEGIFTQAREEVTIAEFAATSAEKEVASLRAEVERLDAVLRIEKGEHELDKQRHEKVAKEVDAVRQEKLKLEEEIRALKASATAAATTKEREAAPASEAPKEGEVAWLGMAVAAAAGAAGTAAIMLVYLRLKR

SEQ ID NO: 239514 - protein, 48 aa, Zea mays
  Clone ID: MRT4577_150021C.1.pep
IQGTRLYDFYHLHHFFVIFVSWQPQYSILFVSRSILLDNCFPSPAKII

SEQ ID NO: 239515 - protein, 89 aa, Zea mays
  Clone ID: MRT4577_150022C.1.pep
YLQTISEFRGTNNIANSFKSAYHGEQMERLSGVQSGCCCDTCPFLPPRCCAGRERRGSSVKIWGRTRRRRRRRRLLPFRTAWWTKEDAR

SEQ ID NO: 239516 - protein, 219 aa, Zea mays
  unsure (1)..(219): unsure at all Xaa locations
  Clone ID: MRT4577_150023C.1.pep
MDYLKTVVPSQLLAERGSNLVVINPGSMNVRMGFASQDVPFNIPHCIARHKNDAPKLSVRDQRLNCRAGSTHNAERERAYDIIASMLKIXFLGEVSPSENQPLPPKMGRLDGLSSQQNKDDSILTWTDVMDKSIKASTSIERSVNSDADEDPSQSTSDHGNKPNSEESKYKEMIFGEDALKILPSAPYCLGRPIRRGHFIFLKIFVTQVLEICDYLDWS

SEQ ID NO: 239517 - protein, 142 aa, Zea mays
  unsure (1)..(142): unsure at all Xaa locations
  Clone ID: MRT4577_150024C.1.pep
MFRLARGTARKLILALLTCLSSALLYRQIQPLPPKIPGTPGGPPVTATRTRLSDGRYLAYLETGVPREKAKHRLVFVHGSLXQELGVYMLSFDRPGYAESDPHPARTEESIALDIAELADNLQLGRKFYLAGXSMGGEIMWS

SEQ ID NO: 239518 - protein, 214 aa, Zea mays
  unsure (1)..(214): unsure at all Xaa locations
  Clone ID: MRT4577_150026C.1.pep
MFRLARGTARKLILALLTCLSSALLYRQIQPLPPKIPGSPGGPPVTATRTRLSDGRYLAYLETGVPRDKAKHRLVFVHGFDSCRHDALPISTXALFLPLATVLCFLCDRYXCFAELVKLVWVQELAQELGVYMLSFDRPGYAESDPHPARTEESIALDIAELADNLQLGRKFYLAGFSRXGEIMWSCLKYIPHRLSGVAILGPVGNYWWPGLPS

SEQ ID NO: 239519 - protein, 275 aa, Zea mays
  unsure (1)..(275): unsure at all Xaa locations
  Clone ID: MRT4577_150027C.1.pep
MFRLARGTARKLILALLTCLSSALLYRQIQPLPPKIPGTPGGPPVTATRTRLSDGRYLAYLETGVPREKAKHRLVFVHGFDSCRHDALPISTELAQELGVYMLSFDRPGYAESDPHPARTEESIALDIAELADNLQLGRKFYLAGFSMGGEIMWSCLKYIPHRLSGVAILGPVGNYWWPGLPSNVSRDAWYQQLPRDQWAVWVAHHLPWLTYWWNTQKLFPASSVIAYNPALLSQEDEMLMAKFGYRAYMPQIRAQGEHECLHRDMMXRFGQWSW

SEQ ID NO: 239520 - protein, 74 aa, Zea mays
  Clone ID: MRT4577_150028C.1.pep
MAEPAKPEVTEEAKMDLLEDDDEFEEFEIDQEWDDKEEGNEALQQWEDDWDDDDVNDDFSLQLRKELESNAPKN

SEQ ID NO: 239521 - protein, 52 aa, Zea mays
  Clone ID: MRT4577_150029C.1.pep
SVTYVEYSRITYYSEQAALQSCITILTCSQLTSIFQIWIQPLITLTFFIVNY

SEQ ID NO: 239522 - protein, 197 aa, Zea mays
  unsure (1)..(197): unsure at all Xaa locations
  Clone ID: MRT4577_15002C.1.pep
FLFLNYSYLKRLLRELFIREGYQLDYVFDWTIMTNRQFRDKCPFHPSDKTVCHAGPCAXNDAKLSLXSFVRRTRSGSGHNREHTKHRSLLESLMPSKTVDSDKIRPSSSSRNGSTSRRAVLSSSKPSSSGDPSDPNRVGGLAPSSSIRPLSAQRAHHSGGTEIKSLSWSKMGRSSHDDAIRNFELLSLCADKRKIRN

SEQ ID NO: 239523 - protein, 46 aa, Zea mays
  Clone ID: MRT4577_150030C.1.pep
LTGRHTPLKTVWGSIDLSREGTPNVERNCILVLHFLQCRRVPFPFY

SEQ ID NO: 239524 - protein, 67 aa, Zea mays
  Clone ID: MRT4577_150031C.1.pep
TSGCWSRLSEALSGIRPGMGNCHSTQDRYYSNNPGMSEIIAAFTSRSRACSNNSASMLGLLFTYGSV

SEQ ID NO: 239525 - protein, 61 aa, Zea mays
  Clone ID: MRT4577_150032C.1.pep
CLHVQCEFTVWLEVHVVYEGYRVYQLMRGLQLATIISALDCMVHKSLWHGIVCGYSSLEFN

SEQ ID NO: 239526 - protein, 51 aa, Zea mays
  Clone ID: MRT4577_150033C.1.pep
KENNYICYSHHIIFTDSLVFQLQDPQKKARPGGGTNPLIASWHNESGMFFL

SEQ ID NO: 239527 - protein, 83 aa, Zea mays
  Clone ID: MRT4577_150034C.1.pep
TPALIRLLWGKLARSAGSGSELRHCGRRADVFSSPPTIQESANLGASIIFMLQSRSTLIQQAVCISEIGWTPYIAAHYCRNGG

SEQ ID NO: 239528 - protein, 70 aa, Zea mays
  Clone ID: MRT4577_150035C.1.pep
RCRSKVPSICPPSFGFQASSMHPQPYRHVLVSIRLILFAYPQFKVIKALLPGCKYYLVDQHDRSHATVST

SEQ ID NO: 239529 - protein, 54 aa, Zea mays
  Clone ID: MRT4577_150036C.1.pep
GSCPGSSSPTPVSPFTMHSPIPTASYSNKLYLNNNGNIHPCFHPGGRAVLTSYD

SEQ ID NO: 239530 - protein, 85 aa, Zea mays
  Clone ID: MRT4577_150037C.1.pep
VRMPFASQEAANAPLSDRPIWSTRHGGASRSAPMSVGTWRQGGARRCSLAARERNRRSARHQHSWRGRMELNILSGDGQSREDED

SEQ ID NO: 239531 - protein, 98 aa, Zea mays
  Clone ID: MRT4577_150038C.1.pep
FFFCKEGKNVCNNGVKSITLLQKFVSYCKPCFILVHQKRCEDRHNAAVKSLSTEPKVVGSTQPLYKNAGIRLASVIQLFLPTDLTHVGTASNRSDPFP

SEQ ID NO: 239532 - protein, 40 aa, Zea mays
  Clone ID: MRT4577_150039C.1.pep
MWQGMGRGGGMGNPVNVGIAQQADCENLKFILNISLNFRL

SEQ ID NO: 239533 - protein, 151 aa, Zea mays
  Clone ID: MRT4577_15003C.1.pep
GRVKPHLLFCWDMSKCTFTGHKTLENKHKPLVLKELRKLWNVEEQDLPWEVGDYSPSNTLLVDDSPYKALRNPPHTAIFPHSYSYLNWNDDSLGPNGDLRVYLQNLAAADNVQHFVRDNPFGQPFITESDPHWNFYAQIADRGRAPLTCCA

SEQ ID NO: 239534 - protein, 188 aa, Zea mays
  Clone ID: MRT4577_150040C.1.pep
MAEREKLGGQGSWALAALLLLLSRSWLATCCQGRRLGGRGRGPPARAPAPRRSRTNGWRGALKPGGRLLEALAARKHDRRTEATVMVRPRSATTALDRRSAPTAGASAPLAAAAGARAWWSEGQRPGAATETRRGGGRIPRLRPWRRRPCPGLRGGAGVCALARSLGGGSVQVYVAAARGSGGSALGR

SEQ ID NO: 239535 - protein, 119 aa, Zea mays
  unsure (1)..(119): unsure at all Xaa locations
  Clone ID: MRT4577_150041C.1.pep
NALYICIRAGKKQRSPPHEKGRKPKTPPGGKPPPRGPEKKPGPKXQPGGRGQKGPXNEKGPKTPTPTGGTPPPGGKERPPXPEGPCLQGPXSPKGGXPSPGPPKGNRKGGGPKVREPNQ

SEQ ID NO: 239536 - protein, 47 aa, Zea mays
  Clone ID: MRT4577_150042C.1.pep
CSHKRTIYDIIKSGVLLVTFLFLARSVYVRVRAAGHGHARRYRVLVG

SEQ ID NO: 239537 - protein, 93 aa, Zea mays
  Clone ID: MRT4577_150043C.1.pep
RRRLLSVSSLSPPAQGAGGRREGNEYTAGEEDQEGEGVEPSQFEDSVAQAFFGLENGNQELKSDLKDLDINNAIHMDVTGSRKAGVIHGPYRL

SEQ ID NO: 239538 - protein, 59 aa, Zea mays
  unsure (1)..(59): unsure at all Xaa locations
  Clone ID: MRT4577_150044C.1.pep
KTTTSEQXXXSVLVXDCSGACIALQCXXXXRSAXTXXWRRXLLEHSSTACCSTWTTLCT

SEQ ID NO: 239539 - protein, 68 aa, Zea mays
  Clone ID: MRT4577_150045C.1.pep
VLYQAIIDKQDRDVNNEPEGLDLLKFKGNGLQSLHWPDCFFYLGVMYYIKKSPYSIFSKKKKKKKKIK

SEQ ID NO: 239540 - protein, 45 aa, Zea mays
  Clone ID: MRT4577_150046C.1.pep
NGTRISEGNMSRGSQIYKKSTKFIMLFIKSRISWVKGLKQDQGIK

SEQ ID NO: 239541 - protein, 86 aa, Zea mays
  Clone ID: MRT4577_150047C.1.pep
FATQVSIVFSFCKGSHDRNAHSVGNVPVSYIHRQVQSLTSTKVVKSKAFKCKNKLQHCRIICVDILYHCRMDPRITTRSDGQQDCT

SEQ ID NO: 239542 - protein, 300 aa, Zea mays
  unsure (1)..(300): unsure at all Xaa locations
  Clone ID: MRT4577_150048C.1.pep
PGTQRPDLGKXEELHALALKCGLFSCPFFRNALVRLYSKCGCLRTAKRLLLFEMGSERDRYAWNSIISGYERHSMSEDALHALREMQSEAKPSQSTFSSALAACANIFLLKHGKQIHAYMIRNRYDIDDILRSALVDMYSKCRLFDYSTRIFELGSSDDVILWNSMIFACAYHSKGDYGLGLLDEMRKQGVRPDSVTFLGALVSCICEGHVGLERLYFTXGYMVELEDFVDHMPYEPTTAMWLRIFDCCREYGSRKLGERAAQRINDSKPSYLFSPLLSTNAVAVTMQSPCHFLLRLTKL

SEQ ID NO: 239543 - protein, 46 aa, Zea mays
  Clone ID: MRT4577_150049C.1.pep
QCTSKRPSLEQLAVYLFCHVILTKVHYLQIRVKSLVKKQVSSSTGA

SEQ ID NO: 239544 - protein, 89 aa, Zea mays
  Clone ID: MRT4577_15004C.1.pep
VPKPQGRGVPHRVALPITQLGSNFKTGFMRASPGSKLPPPQLAHMIGPNPQVFQKYGSPWPIPSLAGPWQPVIGPWERKVCGYKYPAAS

SEQ ID NO: 239545 - protein, 97 aa, Zea mays
  Clone ID: MRT4577_150050C.1.pep
TGASPRVLTVPESLPVTDPVLGSYANDPSGPFCSDPSHLERCPVHVASATAGPVCSGAEWAAGSWDPRPPPAAANWMTSSTSIEQSVVAGAVVPATR

SEQ ID NO: 239546 - protein, 643 aa, Zea mays
  unsure (1)..(643): unsure at all Xaa locations
  Clone ID: MRT4577_150051C.1.pep
MDDGDGGLSFDFEGGLDSAPAAGGPVPSSTDPGAGVGGGGDGPGMHGRGRGRGSYRQTVCRHWLRGLCMKGEACGFLHQFDKARMPVCRFFRDFGECREPDCAYKHSYDDVKECNMYKMGFCPNGPNCRYKHIKLPGPPPSVEEVLQKILQMRSFNRYSQNRNSNYNQQGERPQHPQGSALPNQNSAENATAAAPPAGGQQAQTLNQQPPQQQQKPNTNDQAQGVSNGHQATRIATPLPQGPSRYFIVKSCNRENLEISVQQGIWATQRSNEAKLNEAFESTENVILIFSINRTRNFQGCAKMTSRIGGYIGGGNWKSAHGTAHFGRNFSMQWLKLCELSFQKTHHLRNPYNDNLPVKISRDCQELEPFVGEQLASLLYLEPDSELTAMLIAAEAKREEEKAKGVSADEAADNQDIVLFDDNEEDEEEESEEEEGNAQESQGRGRGRGMMWPPQMPMMRGAMLAGRGFPPNMMGDGFGFGGGFGMPDPFGMPRGFPPFVGPRFPGDFARGPMPGMXFPGRPPQPFPLGLDMMMGPGRGPLMGGMGMGGPGRPNRPMGMAPFMPPPPPNNRAAKREQRRPGGDRGDRFETASALDQGSRGHDNTGNPGADGARAQSGDRYGRSALRDDDSESEEEAAPRRSRKR

SEQ ID NO: 239547 - protein, 122 aa, Zea mays
  Clone ID: MRT4577_150052C.1.pep
GQRGHNSWGGKIQKNEPPAPFLKQGGSGWGPLGKTPKFKRGNLGRPQGPCWNGRQLDKNFGPKPTSLFLSKLKPVLNLGKPKKKNFLFPQKKKKKKKKKKKKNKKKKKKHTKKKKKKKKKKK

SEQ ID NO: 239548 - protein, 331 aa, Zea mays
  Clone ID: MRT4577_150053C.1.pep
MAALLAGGGEGEHKEVRGRLSAAYERHIAPAVKLDVCAREATPGGQQAASRRASKAASEWTTGWWTQFAVLVQRGLKERRHESFNKLRVFQVLSVAALAGLLWWRTPASHLQDRTALVFFFSVFWGFFPLYNAVFTFPLERPMLLKERASGMYRLSSYVASRAATDLPMELGLPTAFVLILYWMGGLDPRPGPFLLSLAVVLYSVLVAQSLGLAIGAVLMDVKQGTTLASVITMVFLIAGGYYVQHIPPFVAWLRWLNYSFYCYRLLLGIQFPDGGGYYDCGHGALCPVAEFPAIKAVGLNNHWVDACVMALMLVGYRVVAYIALDRLKPR

SEQ ID NO: 239549 - protein, 126 aa, Zea mays
  Clone ID: MRT4577_150054C.1.pep
PANTGQEIIRERGEKRPRPRSERGFKVGFPLPIGERGPAKTPQPASGRAEGSPLDIRRKANSLVAHPRAKPWLPDQKGFAPVKDAAPAEVFPGEPTISRTPRPVVAREGAPNRVKQTQPKKEKKEK

SEQ ID NO: 239550 - protein, 101 aa, Zea mays
  unsure (1)..(101): unsure at all Xaa locations
  Clone ID: MRT4577_150055C.1.pep
ACRSAXXRXXLGPFAFVAFLVLSAXPLRVPSCXRLLLALFCXXSPXRPPLVXLPALGCGSVARVPVGGLAXSWARWXRPLGRARXLLPPSGPGGGLVGLLL

SEQ ID NO: 239551 - protein, 53 aa, Zea mays
  Clone ID: MRT4577_150056C.1.pep
SPFTHSILSFGHTMELGLKNYEPRNHPDMNLVPYVDSLDVVGSLCRRLKLVPN

SEQ ID NO: 239552 - protein, 85 aa, Zea mays
  Clone ID: MRT4577_150057C.1.pep
GKLAMGPVLPSCYYATKHFIPSTILMMPSLPNRMIGGTKFPSLTHFSTQTHPPLFFGLSFFLDSVCFILQLFAGCLQRGIFFLVR

SEQ ID NO: 239553 - protein, 96 aa, Zea mays
  unsure (1)..(96): unsure at all Xaa locations
  Clone ID: MRT4577_150058C.1.pep
IIFFSFFFFFFCLFFCPLFCPVSARPDLSLGFRLEKDAXAADMPTRDQTLKAGAGGPPAKLGRTPGGPPIALRASPFHAGAMAPTTGAPPPEGMAR

SEQ ID NO: 239554 - protein, 272 aa, Zea mays
  Clone ID: MRT4577_150059C.1.pep
CEQQAASKTEERERQLGLHGEGVLNGFLEGLTGLLQSPIRGAEKHGLPGVISGLAMGTAGLVARPMASILEATGRTAQSIRNRSNPHESNYLRVRFPRPVARDRPLFPYSWEEAIGESLLAQADSGRLKEETFVMCKTLKGAGKFLVLTEKLLLLVSSPYLVDLGSPRFIGVPPDPQWSIDTEMHLKSVVHLDRSQEVVNIVGSNGQTSPRDKRGGTRNRVMSSAFVPLFHLSIELPNEEDAEGTVQVLQALIEKGKARRWDKNILHRSNIS

SEQ ID NO: 239555 - protein, 227 aa, Zea mays
  unsure (1)..(227): unsure at all Xaa locations
  Clone ID: MRT4577_15005C.1.pep
MAGTARILPAAAAALLLLLCIAGGARAANVTYDHRALVIDGVRRVLVSGSIHYPRSTPDYDFEGRKDLAAFVKTVADAGLYVHLRIGPYVCAEWNYGGFPLWLHFIPGIKFRTDNEPFKAEMQRFTAKVVDTMKGAGLYASQGGPIILSQIENEYGNIDSAYGAPGKAYMRWAAGMAVSLDTGVPWVMCQQADAPDPLINTCNGVYCDQFTPNSAXQPKMWDENWSG

SEQ ID NO: 239556 - protein, 61 aa, Zea mays
  Clone ID: MRT4577_150060C.1.pep
HCLNLPLSHLPWNTSFDGSNITGADFTDVPLREDQREYLCKVADGVNPTTGNATRDTLFCN

SEQ ID NO: 239557 - protein, 97 aa, Zea mays
  unsure (1)..(97): unsure at all Xaa locations
  Clone ID: MRT4577_150061C.1.pep
RPRCLVFGGRPLCFGPSPGPFFLSGCVRLPPPVSPRLPPRAAVRLGRAPGLGVGVAPSAWAGPVVSCLVLAPPVCLPAGWLSCGAGSSXWSVAWVRP

SEQ ID NO: 239558 - protein, 155 aa, Zea mays
  unsure (1)..(155): unsure at all Xaa locations
  Clone ID: MRT4577_150062C.1.pep
MSTVTTAERAGKCPERCQRHHQRHWWESQRXLMDCMXXRKEERDNDGRRGEQDEDSDDRCPYQKHCEGHHDRQSMQQCVQACEHPRQHXDRAVTPTSXDDSDRHCQMKCQLHSHRHTRQWCMQRCERKQQQEDPDDDYYNSGRFQKRCQHHSHRH

SEQ ID NO: 239559 - protein, 110 aa, Zea mays
  unsure (1)..(110): unsure at all Xaa locations
  Clone ID: MRT4577_150063C.1.pep
CRVGAILHEEIDSESXPWPXITESAKDSVXKMLTPDPTKTLTSAQVLQHSXFTESESASYXPIDRPGISTVRQFRAMNKLKRMAIRVIASDLFEQDTKGLKQMFMNMDTY

SEQ ID NO: 239560 - protein, 133 aa, Zea mays
  Clone ID: MRT4577_150064C.1.pep
MIYVFTLLPLGYAIFQRRCCRNFIFKKKKKKKKKKKKKKKKKKKKKKKKKKKKKKKKKKKKKKKKKKKPLGPLFFFAPPLFWPPLLKRGGGGGRGKKIPGGGGPPPPKHRKFGEKKGGKKPFNFSPEGVKGGA

SEQ ID NO: 239561 - protein, 82 aa, Zea mays
  Clone ID: MRT4577_150065C.1.pep
FWKFSKFALRVVAPRDIFLKKLYFSGPQRGRGRFYKPPLWGDGFFPAIASFLFKAQNIFSLIWVRGGRGPSQGPNLASPGSF

SEQ ID NO: 239562 - protein, 178 aa, Zea mays
  unsure (1)..(178): unsure at all Xaa locations
  Clone ID: MRT4577_150066C.1.pep
MEKDGDGGDGLRHHAIRLPLTAMEGSDSEITSNGDSEITSNGGPSVSLRQKASSLMASSAAAYRSKPASFWALLALSGGAMLKAFPAASLLSRLYYNGGGQSKWILSWSAVAGWPIPALLLLPCYLFGDASPTWPPSPWLCFWYALLGLLSAADNLMYAWXYEYLPASTASLVDASSI

SEQ ID NO: 239563 - protein, 92 aa, Zea mays
  unsure (1)..(92): unsure at all Xaa locations
  Clone ID: MRT4577_150067C.1.pep
AAITCGQXMFNFKRGLSYTRFTLSVPFSSCFICLFNLIISFSILLLHSIFLIILYLYFLFFFYLFLLYYFLFILYIYILYIYFFFFYILLFI

SEQ ID NO: 239564 - protein, 45 aa, Zea mays
  unsure (1)..(45): unsure at all Xaa locations
  Clone ID: MRT4577_150068C.1.pep
KHILPPXIFFPXQTYLLTIGFSIKIACQLTTTITFIKNFLFLTFL

SEQ ID NO: 239565 - protein, 39 aa, Zea mays
  unsure (1)..(39): unsure at all Xaa locations
  Clone ID: MRT4577_150069C.1.pep
DAWEKKKIKNKKKKKKKKKKAKXKKKKKKKKNTKKKNIL

SEQ ID NO: 239566 - protein, 230 aa, Zea mays
  unsure (1)..(230): unsure at all Xaa locations
  Clone ID: MRT4577_15006C.1.pep
MAGTARILPAAAAALLLLLCIAGGARAANVTYDHRALVIDGVRRVLVSGSIHYPRSTPDMWPGLIQKAKDGGLDVIETYVFWDIHEPVRGQYDFEGRKDLAAFVKTVADAGLYVHLRIGPYVCAEWNYGGFPLWLHFIPGIKFRTDNEPFKAEMQRFTAKVVDTMKGAGLYASQGGPIILSQIENEYGNIDSAYGAPXKAYMRWAAGMAVSLDXGVPWVMCQAADAPDPL

SEQ ID NO: 239567 - protein, 81 aa, Zea mays
  unsure (1)..(81): unsure at all Xaa locations
  Clone ID: MRT4577_150070C.1.pep
HAFSLANPFHHTATAMRGCKSKSLLYHNTCXSATEHRDLNDCEPYVPRPETLPRQSLLPRGNPHLSQSCSHKLLSPSLTPP

SEQ ID NO: 239568 - protein, 60 aa, Zea mays
  Clone ID: MRT4577_150071C.1.pep
LTSFILKVTHFSAHFFDVMLDVRPDTRILNARIQYLAHRSSNPSLAYFHLAVFFFLKKWM

SEQ ID NO: 239569 - protein, 147 aa, Zea mays
  unsure (1)..(147): unsure at all Xaa locations
  Clone ID: MRT4577_150072C.1.pep
MKLNIANPATGCQKTIDFDDERKTRIFYDKRISAEVAVDSLGDEFKGYVFRITGGNDKQGFPMKQGVLLPSRVRLLLSKGHSCYRPRRTGERKRKSVRGCIVGSDMSVLSVTIVKQGEQDLXGLTDTTVPKRLGPKRANHIRKFFNL

SEQ ID NO: 239570 - protein, 69 aa, Zea mays
  Clone ID: MRT4577_150073C.1.pep
PAGNYTLLIAAAERAEARDFIILYCSISLSERTHSATQMTRRHRPAEHVAASGPRATLLMSRPGGLPAD

SEQ ID NO: 239571 - protein, 61 aa, Zea mays
  unsure (1)..(61): unsure at all Xaa locations
  Clone ID: MRT4577_150074C.1.pep
GITLXYIYIYIIRQCNVNQTTGVHYYNVAGRKKRHNYQYYSLSTVNQPMSKKKERIKSISC

SEQ ID NO: 239572 - protein, 125 aa, Zea mays
  unsure (1)..(125): unsure at all Xaa locations
  Clone ID: MRT4577_150075C.1.pep
SEFGSRINITGSLFDHLNTQHGGGLLGHQEFYMPWDSPPTHSYAVADNCEQNTGDVLVHMSHMLTTICPHPYQYLGPRCALGDCGRPAGGTDDCGDYCNAYHAGLALNDDGXKGSDRVTRPTGID

SEQ ID NO: 239573 - protein, 86 aa, Zea mays
  unsure (1)..(86): unsure at all Xaa locations
  Clone ID: MRT4577_150076C.1.pep
PLCEVVHPLYHGASXDLLGMGEDPMALTELXVKELKIVRLSMFSMLGFFVQAIVTGKGPLETLAAHIVDPVNNSAWAYATNLVSGN

SEQ ID NO: 239574 - protein, 82 aa, Zea mays
  Clone ID: MRT4577_150077C.1.pep
KNTKTTKKCSTPKKKSCPPYYGHHIRGGATSSVDTTNNKLLKKKEASKKLLLSLIRATNGGGICPTIFFYFSGGKTPPAAPG

SEQ ID NO: 239575 - protein, 102 aa, Zea mays
  Clone ID: MRT4577_150078C.1.pep
NKAFLPQGDWFCPECMVNKLGPTSSRIERGARGAQMFGIDMCGRLFLGTCNYLLVIETASDAESYARYYNQYDVAKALKACCLRCICGHMQANIGLLETFTW

SEQ ID NO: 239576 - protein, 55 aa, Zea mays
  Clone ID: MRT4577_150079C.1.pep
MCVSLCFVLILLGYLIVNINICLKSSSKCCCIKPLKVSTSSVFVSELACLYLSVS

SEQ ID NO: 239577 - protein, 60 aa, Zea mays
  unsure (1)..(60): unsure at all Xaa locations
  Clone ID: MRT4577_15007C.1.pep
LFSTKDDAETIRNACXKLERLEEENESILAHMAELKKILYGKFKDAINLKEDSGSGVQAI

SEQ ID NO: 239578 - protein, 117 aa, Zea mays
  Clone ID: MRT4577_150080C.1.pep
IFQYHAICESQPSLDRWPIRNNYCAENRTLQDAYINCAPRLPSHLAKSYMFSKTDASEITSVTAQRAQGPKLTTGKILLSRGPPHAEASENVEIDSSEVCEARAVQSHTEVSILTPD

SEQ ID NO: 239579 - protein, 41 aa, Zea mays
  Clone ID: MRT4577_150081C.1.pep
LPLHGSPLFPSHQRHTISILMSNSSLRMWPTLNTTAFFIYE

SEQ ID NO: 239580 - protein, 375 aa, Zea mays
  Clone ID: MRT4577_150082C.1.pep
MEGNKDDAAKCLRIGKGALEAGDRARAIKFMSKAKRLDPSLPIDDLLTSLLNAQDDSPASSSSSPPPPPQTAAAGASEAAEADGLRERKHKGKKREEEEEATPAAREYTAEQLEVVRQVKKHTRDYYQILGLEKDCSVEDVRKAYRKLSLKVHPDKNKAPGAEDAFKAVSKAFQCLSDAESRKRYDLVGSDEPVAHHRRASTARAYNGFYEDDFDPDEIFRNFFFGGMAPATTRQFGQFGTFHFRTGGMHAHAHAQQNSGGSTVRMLIQLLPVLLLLLLNFLPSSEPVYSLSRSYPYEHKFQTPRGVAYYVKMSNFEEQYPHQSTERATLERHVERDYYSIITQNCRAELQRRQWGLSYQTPHCDMLKNFEAAAK

SEQ ID NO: 239581 - protein, 39 aa, Zea mays
  Clone ID: MRT4577_150083C.1.pep
GHHHRRNLASSQASPSLSLARSHVSPDPIHSVLLRNKLI

SEQ ID NO: 239582 - protein, 149 aa, Zea mays
  unsure (1)..(149): unsure at all Xaa locations
  Clone ID: MRT4577_150084C.1.pep
MEGNKDDAAKCLRIGKGALEAGDRARAIKFLSKAKRLDPSLPIDDLLTSLLNAQDDSPASSSSSPPPPPQTAAAGASEAAEADGLRERKHKGKKREEEEXTPAAREYTAEQLEVVRQVKKHTRDYYQILXLGKDCSVEDVRKAYRKLSL

SEQ ID NO: 239583 - protein, 98 aa, Zea mays
  unsure (1)..(98): unsure at all Xaa locations
  Clone ID: MRT4577_150085C.1.pep
LDFSSISSEKRFCSFRSIPSIMACHLRSASVPSSPCSNKTSVEEQLQSLKATISSPSATVQPITNGLSRLGSIYSCIDELACLPSTSSQRHRXXTVEE

SEQ ID NO: 239584 - protein, 154 aa, Zea mays
  Clone ID: MRT4577_150086C.1.pep
MEGNKDDAAKCLRIGKGALEAGDRARAIKFLSKAKRLDPSLPIDDLLTSLLNAQDDSPASSSSSPPPPPQTAAAGASEAAEADGLRERKHKGKKREEEEATPAAREYTAEQLEVVRQVKKHTRDYYQILGLEKDCSVEDVRKAYRKLSLRVHPD

SEQ ID NO: 239585 - protein, 374 aa, Zea mays
  unsure (1)..(374): unsure at all Xaa locations
  Clone ID: MRT4577_150087C.1.pep
MEGNKDDAAKCLRIGKGALDAGDRARAIKFLSKAKRLDPSLPIDDLLTSLLNPEGDSQASSPPPSSPPQTAAAGASEAVEADGLRERKHKGKNREEEEATPAAREYTAEQLEVVRQVKKHTRDYYQILGLEKDCSVEDVRKAYRKLSLKVHPDKNKAPGAEDAFKAVSKAFQCLTDAESRKRYDLVGSDEPVAHHRRASTARAYNGFXYEDDFDPDEIFRNFFFGGMAPATTRQFGQFGTFHFRTGGMHAHAHAXQNSGGSTVRMLIQLLPVLLLLLLNFLPSSEPVYSLSRSYPYEHKFQTPRGVAYYVKMSNFEEQYPHQSTERATLERHVERDYYSIITQNCRAELQRRQWGLSYQTPHCDMLKNFEAAAK

SEQ ID NO: 239586 - protein, 48 aa, Zea mays
  Clone ID: MRT4577_150088C.1.pep
IRAGPPLLFWAIKKISPLIKRGLIFEKPGNKSKLPWQFNDLSGVPQKN

SEQ ID NO: 239587 - protein, 42 aa, Zea mays
  unsure (1)..(42): unsure at all Xaa locations
  Clone ID: MRT4577_150089C.1.pep
IFRPTAXILPVCKIYWDTLIYKQPYLHFINYVYNIYNFYIFH

SEQ ID NO: 239588 - protein, 52 aa, Zea mays
  Clone ID: MRT4577_15008C.1.pep
QMISKKTLDFQKENNEERNQKRVHQSIVNKEGPRIFQKRSPEVLDSHEAGGL

SEQ ID NO: 239589 - protein, 72 aa, Zea mays
  Clone ID: MRT4577_150090C.1.pep
AIEVAEAIARNNRNLVVLYKSVINDGFKLDLEHAQALEKERGHNYYNGMTKEQFTNMQKFIQGRSSKTPSKL

SEQ ID NO: 239590 - protein, 147 aa, Zea mays
  unsure (1)..(147): unsure at all Xaa locations
  Clone ID: MRT4577_150091C.1.pep
FHPPSPTLPPPPPPLFPPXPYYSPPSSLYNPPPPPPXTPPPHSYSPFYPHSPPPLPPHPPPPPPPLSPXPPPLLPPPPPPPPPPLHXPLPPPPLFLPPPXPLPPPPHPSSPXPPSPPFSSPPPSHPXPLPPPPPPPLSPPPAPPPPP

SEQ ID NO: 239591 - protein, 269 aa, Zea mays
  Clone ID: MRT4577_150092C.1.pep
MGTASPDSGDLIEVGPARPGSPVAVVTINRPSALNALTKPMMISMAAAFRRLGADDAVAAVVLAGRGRAFCSGVDLTAAAEVFKGDVKDVATDPVVQMELCRKPIVGAIAGFAVTAGFEIALACDILVAGRSTKFLDTHAKFGIFPSWGLSQKLSRIIGPNRAREVSLTCMPVTAEMAERWGLVNHVVDDNEVLSKAIEVAEAIVRNNRNLVVLYKSVINDGFKLDLEHAQALEKERGHNYYNGMTKEQFTNMQKFIQGRSSKKTPSKL

SEQ ID NO: 239592 - protein, 137 aa, Zea mays
  Clone ID: MRT4577_150093C.1.pep
SARGKRNLTVLCQCLSLETERGTPKQYPGPPADTYYIHSARDRTTPLTESADLTQRGSCQPLPHDRALHGLSEPDIARPIHATVLAAMLKSPGKTPQERTEIMHQTTHTSKFMRTMPLAGHTPIAYKTGDQNTLHHR

SEQ ID NO: 239593 - protein, 51 aa, Zea mays
  unsure (1)..(51): unsure at all Xaa locations
  Clone ID: MRT4577_150094C.1.pep
HQLPQQHVDLLGYTQPPHVALLMPPPKKSMCXVPRFGSPSCAGYLLRLATS

SEQ ID NO: 239594 - protein, 39 aa, Zea mays
  Clone ID: MRT4577_150095C.1.pep
MDMKRRIHLELRNRTPAAVRELVLDNCKSNDGKIEGLTA

SEQ ID NO: 239595 - protein, 204 aa, Zea mays
  Clone ID: MRT4577_150096C.1.pep
LYSLLTIKESAATVPKNLEARRRLQFFTNSLFMEMPVARPVSEMVSFSVFTPYYSEIVLYSMAELQKKNEDGITTLFYLQKIYPDEWKNFLTRINRDENAADSELFGNPNDILELRLWASYRGQTLARTVRGMMYYRKALMLQSYLERIQSEDLESTLGLAGSADRHFELSPEARAQADLKFTYVVTCQIYGKQKVEGKAEAAD

SEQ ID NO: 239596 - protein, 42 aa, Zea mays
  Clone ID: MRT4577_150097C.1.pep
GACVKAWSIMRPLMVNQASLLVCVSPRDKLCPFTRTSIVPCR

SEQ ID NO: 239597 - protein, 66 aa, Zea mays
  Clone ID: MRT4577_150098C.1.pep
AHASGILICSMKGEYTPSVRHPECQYYLKTGPCQFGPTCKFNHPSENDGLEGTVNLTTLGYTILQV

SEQ ID NO: 239598 - protein, 92 aa, Zea mays
  Clone ID: MRT4577_150099C.1.pep
PPDLSSLVSFRVPLCLVEGPILFLFFKVVGPPLSICALLCFRPIQNGCLFFSGILPPPVVFLRCPPLFLSCICGKISSGGVFLPNMSISFNK

SEQ ID NO: 239599 - protein, 66 aa, Zea mays
  unsure (1)..(66): unsure at all Xaa locations
  Clone ID: MRT4577_15009C.1.pep
TTNNNQKKKNSPPPPNKGSPXPTNAQTQPTKPSHSDLSSITRQKLILPLCLGDVKQPXVLKGSVPR

SEQ ID NO: 239600 - protein, 147 aa, Zea mays
  unsure (1)..(147): unsure at all Xaa locations
  Clone ID: MRT4577_1500C.1.pep
AKKTPTKKWIILRKPPPLGGPPGGGPPKCFLKEGPPNEGGPPPQGGVPPPQRGGGQKLVPXGRPPPKEKPPLGEKKTGGGGGGPPAAPPLGANPNTRAAVPRGPEPGPKLGETRAKGGPGGXMGIPPQSPPKNDPEAKXKTRGPPRG

SEQ ID NO: 239601 - protein, 107 aa, Zea mays
  Clone ID: MRT4577_150100C.1.pep
DQTEGALLTILFNLLFHKPHLHTNLYHVHDGAHAEHRGIWACRPLKNTHQTDTHPFIHLLYLGARATDYNHSVLLHSPRTTYVGTPALVHIVYYRIEKAFHLLHLVI

SEQ ID NO: 239602 - protein, 53 aa, Zea mays
  Clone ID: MRT4577_150101C.1.pep
TSLLIVLQFWLYYLLVFLQNCSFSRCAHLTLVNRKIVIYFAHWLMVTNCLVKQ

SEQ ID NO: 239603 - protein, 43 aa, Zea mays
  Clone ID: MRT4577_150102C.1.pep
PPPIRLVDFGSIWLGYSFVLLLTAFSAGGIGLPTCLSNFSKAF

SEQ ID NO: 239604 - protein, 124 aa, Zea mays
  unsure (1)..(124): unsure at all Xaa locations
  Clone ID: MRT4577_150103C.1.pep
PRVRVADDLMLLMPSGPXESRLXCLLGACRILGNTDVGVWVAGVLXESVPTVSGAYVLLSYFYADMGVWGAEAWERRXAGDGRLVXEVGFCWEDAGGANDSLHLHKFSSDVTSLPQWVVIFRVA

SEQ ID NO: 239605 - protein, 40 aa, Zea mays
  Clone ID: MRT4577_150104C.1.pep
VCCHQVSIRVSLLRVGYGLGLVCRTGTQLSLSSIRCFPSL

SEQ ID NO: 239606 - protein, 153 aa, Zea mays
  unsure (1)..(153): unsure at all Xaa locations
  Clone ID: MRT4577_150105C.1.pep
MVVFGSLADPPFPSLGLKRQIFGKTLTGKIITLGGEFFDTIDNVRVKIQDRGGFLLDQKGFIFAGKQFGDGRTFVDYNIQRESPLHWGLPLRGGMQIFVKTLIGKTITLEGESXNTIDIVRAKIQDREGFQLDQKRLIFAGKQLEDGRTFVDY

SEQ ID NO: 239607 - protein, 113 aa, Zea mays
  Clone ID: MRT4577_150106C.1.pep
KSSSGYLGQIVSFFLEGERQRFGKIQGLNKRPPSEGLKEAFFKFGQVIEAKVIPDRIFGYPQGFGFVKYATVQKAGEAIKGMDGKFLSGWVIFPEYAKQKEAPHPSQTRSPRL

SEQ ID NO: 239608 - protein, 88 aa, Zea mays
  unsure (1)..(88): unsure at all Xaa locations
  Clone ID: MRT4577_150107C.1.pep
ADGHAHHQQQCTGDLGLRYHSTNQQIXIHIFNPDVHVMRRHTSADLLFEVHQTSIHTHLHTTSASKLLVCTYLYALXKIARRYSLYDS

SEQ ID NO: 239609 - protein, 48 aa, Zea mays
  Clone ID: MRT4577_150108C.1.pep
PFLGPPSVSACPMNVNHPCRKVANIELLPNRPLWRSFVKPNVLFRIVP

SEQ ID NO: 239610 - protein, 56 aa, Zea mays
  unsure (1)..(56): unsure at all Xaa locations
  Clone ID: MRT4577_150109C.1.pep
TXFFFFFFFLFVFLKVLSVFSFFGGKNQTVWFQSRVPKSKHAQKGQTGNTFLGPKH

SEQ ID NO: 239611 - protein, 68 aa, Zea mays
  Clone ID: MRT4577_15010C.1.pep
SVCVFHLGHQERCAGGLLHGLVQDPCDAQAEQEGALPPHPKRPQAPGQPTLTLRTSHGDSVYGKLVQA

SEQ ID NO: 239612 - protein, 62 aa, Zea mays
  Clone ID: MRT4577_150110C.1.pep
HWPLSLQNDHHTPMNKIKTYITHTHLQFFLMECGNKFKKTKLALFILFTNKEGTRLGQKKKR

SEQ ID NO: 239613 - protein, 122 aa, Zea mays
  Clone ID: MRT4577_150111C.1.pep
NPSFRLCPPPATFLSCSPTLPYRILVYVLSVSVLFLQLRTPGGLHVPCSCGPYVMVMSQIFYLCPCFLGLLPCPCCYVVDGVCLNQSLLCGLQAPYSVFSYPLYARLSVASVYVKMRSHSVS

SEQ ID NO: 239614 - protein, 70 aa, Zea mays
  Clone ID: MRT4577_150112C.1.pep
RCRLFKQQHPCVYKPGSYSSFDLIWLKSWDLQSIRHIIYKLYGTNRSAPSIYEFQCLCIPASPTSGTVFA

SEQ ID NO: 239615 - protein, 72 aa, Zea mays
  Clone ID: MRT4577_150113C.1.pep
GRLPLDLRLRMLVLPLEKPFASGSPNAVQVPSLTSLETSCTAHLQVPTNSRSELQFPVKPNWTRHCRRNINF

SEQ ID NO: 239616 - protein, 96 aa, Zea mays
  Clone ID: MRT4577_150114C.1.pep
RSNCGCCSCCFCSWSYPRTAGNDHLLPAHTSPLGGLEIKGQRPSSSRARHTLWRTPTLATVLYGAHATPVTGDHLHEVTCVLLLSYHILWWRTHST

SEQ ID NO: 239617 - protein, 57 aa, Zea mays
  Clone ID: MRT4577_150115C.1.pep
MESANAAEGKPWFTTWSSHQFLEAEAMREPNPGSDMSITGASGTAAQRYVVETGWSC

SEQ ID NO: 239618 - protein, 30 aa, Zea mays
  Clone ID: MRT4577_150116C.1.pep
MASAPLWCGLAAVCAGMERNGSAKATIFDE

SEQ ID NO: 239619 - protein, 187 aa, Zea mays
  Clone ID: MRT4577_150117C.1.pep
MGVNKSAVLLGVVLVSVLLGFLDVVYARELTEANGSGLKNNVKPAGEPGLKDEKWFGGGYKHGGGYGNNQPGYGGGGNSQPGYGGGGNSQPGYGGGYKRHHPGGGYGSGQGGPGCGCGGGYGGGNGSPGYGDDNGGGSGTGGGNGNAGGYGGGGGGGYGGGYGSGSGTAPGGGYHGGGGAQRYAGQN

SEQ ID NO: 239620 - protein, 65 aa, Zea mays
  Clone ID: MRT4577_150118C.1.pep
HLRARRLATWYPSISAANRITSRHCGGIACKVGRPSRHLRVSFIRPLRNAGGREAGEREREKGPR

SEQ ID NO: 239621 - protein, 52 aa, Zea mays
  Clone ID: MRT4577_150119C.1.pep
CMTVALLLPLAVPSAHATCGGGGRLVAGREIAARARLHHSCGVVLVLVKACQ

SEQ ID NO: 239622 - protein, 300 aa, Zea mays
  Clone ID: MRT4577_15011C.1.pep
MADQLGSYTIRSHGMILARLHMYDWIILLLLAVIDGLLNIIEPFHRFVGKDMMTDLRYPMKGNTVPFWAVPLIGIILPWAIFVGIYFKKKNFYDLHHGILVITDAIKDGVGRPRPDFFWRCFPNGNDVYDNITTGVICNGVKSVIKEGHKSFPSGHSSWSFAGLGFLAWYLAGKLTAFDRKGHIAKLCIVFLPLLTAALVAVSRVDDYWHHWQDVFAGGLIGLTVASFCYLQFFPYPFDGDALWPHAYAVRLAEEGNSRNANSYSVRPTEIETVDIPGHGAIITLRETLNDVESGSARRL

SEQ ID NO: 239623 - protein, 205 aa, Zea mays
  Clone ID: MRT4577_150120C.1.pep
WGNAMDARHSGHDGSLLSARGEEPKPRHQECSSPSMLPSFTNSLPPPRPSPPRPLAARRSGARSPRAHPATRGATLLPSSGARPSIPHALASLPPPDFRSAPHALAFLSGARSLPLPRAPSFSGRLFLRHFRLDPPMCSARQTAPAPLGTVTASVAGARRCKCAGVFMLSLEELRKKVCLVANAIDALELPKGSAIAIDMPMDVT

SEQ ID NO: 239624 - protein, 63 aa, Zea mays
  Clone ID: MRT4577_150121C.1.pep
RSSKVAAQPLDMDDSIFVQGRTFWKSCLFRFTAAPSRQPGSAAAAPNLGRRDGERNLGWHATT

SEQ ID NO: 239625 - protein, 80 aa, Zea mays
  Clone ID: MRT4577_150122C.1.pep
AGGIRRERAGDLAAGSPRRGWGSSQRACTPPGTRAPPLRDCTPPASSPPWVPSGPTLSLQKAVGFAGLESESRMQMEIAP

SEQ ID NO: 239626 - protein, 49 aa, Zea mays
  Clone ID: MRT4577_150123C.1.pep
SRTSRKHKAGALIQRIAEPKKLLTTTPNPLTLTKTSKLTSPATPPSLSN

SEQ ID NO: 239627 - protein, 71 aa, Zea mays
  Clone ID: MRT4577_150124C.1.pep
VTRQDLSCPLTFGYYNWAFSTFKLVSLVQRRSFTLVEYGDLACGLGGSDVALSLSHPLLGQHLSDPFVGSH

SEQ ID NO: 239628 - protein, 123 aa, Zea mays
  Clone ID: MRT4577_150125C.1.pep
MKITFLAICLFLLISIDVLAVHRQYYDLLGVEPSASQNDIKKAYRKLSMQYHPDVNPSAEAHEKFTKINNAYEVLSDPETRRKYDQLGPDFEKQQQQQGGHPFGDFFGDFFGGGGHHQERKDL

SEQ ID NO: 239629 - protein, 44 aa, Zea mays
  Clone ID: MRT4577_150126C.1.pep
AYSSAHASEQRHCYLLVPKARTSHISLFQPSLFRTIEETAYMAN

SEQ ID NO: 239630 - protein, 31 aa, Zea mays
  Clone ID: MRT4577_150127C.1.pep
RFGCVVMENAFSLVFVDGGYFSPLINERHTN

SEQ ID NO: 239631 - protein, 46 aa, Zea mays
  Clone ID: MRT4577_150128C.1.pep
GVCGSYHEELTSGFKGYFAVCCVIRKFVTVLLVAGRVVRRGFWMSG

SEQ ID NO: 239632 - protein, 63 aa, Zea mays
  Clone ID: MRT4577_150129C.1.pep
KETRVILCSYSTSELYVDSVPAQDIGGDCKNLLIKKKKRTGGQQKVSSSTQLIQSGAVPRGSS

SEQ ID NO: 239633 - protein, 86 aa, Zea mays
  Clone ID: MRT4577_15012C.1.pep
PPPRSIPQLPRSDVTGSPPRPQIGRFPASPCPIILRQLSSLRRLQLSPPSACPGWVSSAYPVPPLKSPARAGRRRSQKSPPHFYVT

SEQ ID NO: 239634 - protein, 102 aa, Zea mays
  unsure (1)..(102): unsure at all Xaa locations
  Clone ID: MRT4577_150130C.1.pep
MRESIGAHIRKAGMQVRNACWELYCVEHDIQADGLMRGDKTIGXVDDACNTSFSETGAGKHVPRAVYVDLDPTVIDDVRTDTYRQLLHPEQLISGKEDACNN

SEQ ID NO: 239635 - protein, 91 aa, Zea mays
  unsure (1)..(91): unsure at all Xaa locations
  Clone ID: MRT4577_150131C.1.pep
MEAVPCRPCCRPSAWRRGLPDVRPYYANPCKPEPHLEYAAGAGVSLATYDTEDEVAKVARCHPGCQLLLRLKAPDXGVSGGDLMNKYGAHA

SEQ ID NO: 239636 - protein, 71 aa, Zea mays
  Clone ID: MRT4577_150132C.1.pep
YQCRLIQRFLSCVHPRSALYSKSCTIKSSGPPTCACTGLLTMVSFHVDRDLAGLEFSKQSLYYLSTLSTFR

SEQ ID NO: 239637 - protein, 107 aa, Zea mays
  unsure (1)..(107): unsure at all Xaa locations
  Clone ID: MRT4577_150133C.1.pep
ARISHNPPGLGYHTSSFTFVPATIVHTTCGPATFDRATHGPVASDRATCSPVASDCATLSPVTYAHATRPHFSGRLRLTXPPACVYQQRVRPIALVPSRDPPXVYYP

SEQ ID NO: 239638 - protein, 141 aa, Zea mays
  Clone ID: MRT4577_150134C.1.pep
LTEQGEHGLGKSGGQRALARVGRSSRNGASSGQVGTLAALAAAERRAGKGQVQGIFRRAPRRGREPPGRCVARPLARTHASTGGSRPLCRDSQGARSPRGLKTTKSYLATTHGRKSLPRRCSTANSAGLPARSELKSRRDV

SEQ ID NO: 239639 - protein, 62 aa, Zea mays
  Clone ID: MRT4577_150135C.1.pep
SETKYINYGLIYNDLISMTNYRQYPDFVWVVYLLFCVYTLSTMTCLTCCLQPMMNLLSPIIY

SEQ ID NO: 239640 - protein, 273 aa, Zea mays
  Clone ID: MRT4577_150136C.1.pep
MEVDDGSRATPPLDAVAAAFKSQVMELQDLVLARSMFPATALPDLANVDALVTAMESQVETISRRLQEELDAIPKAKKLVQRSLKEEEKLQHMLANLPSGMRKNDFANQHEQSSSRMLPHFNSSFTEANECELKIKDEPVAAPRKGRAPAPRWYISTEELDSLSSYMRGRLTLEKVNIAINEVASYADANAHLVTCPKKKLSEDTWEKALELRDIAASGAVKGNHFFLEADIKGPGLKLDNTGKAILTVLRHLGRFHEVRIGHHRVFILSKQA

SEQ ID NO: 239641 - protein, 95 aa, Zea mays
  Clone ID: MRT4577_150137C.1.pep
SLRRLTHPAFTPPSSNSVPPFSDIRRGDRNSSATDTSPATTFAVILSVLFCAAAVTAVYIDVTDYFIQRLVYCYTCRSGFVTNVTEYIAAANVML

SEQ ID NO: 239642 - protein, 64 aa, Zea mays
  Clone ID: MRT4577_150138C.1.pep
SLVHDQISKKATHHDAPGGIGALSRYVPQKFSLARLCHCLMTERDGYNLDMIDLLQEKVAVIDA

SEQ ID NO: 239643 - protein, 53 aa, Zea mays
  Clone ID: MRT4577_150139C.1.pep
FLRVFLSSTCVRCQDYWMLSQEEPPTPKSTQCYQWRGHLHQCDICLAVPQTKI

SEQ ID NO: 239644 - protein, 114 aa, Zea mays
  unsure (1)..(114): unsure at all Xaa locations
  Clone ID: MRT4577_15013C.1.pep
VVLDEKLAVFSGQVXEELFFFFFSGSRTPFFAPEEKKIVGRFLFGGEGGVSXQKGDHXHXXYSHTNQALLLPXXXAAKDEXFCLXEGGLDNLXRLSXQHGLASKGANEELFFFF

SEQ ID NO: 239645 - protein, 103 aa, Zea mays
  Clone ID: MRT4577_150140C.1.pep
TQTALRENRSTERTGTNPHKTQQAAPVAGMGPPVPLTPGPTTLTTPTHTLFTPRYSQTAPDKPTATATASYLPGLPPIHPQRETPVTRTVLNSTILCYTALYP

SEQ ID NO: 239646 - protein, 57 aa, Zea mays
  Clone ID: MRT4577_150141C.1.pep
TLHQNKTKMLEFLVDPNESKNRRWDYSTMVTEEMLYTAVNIHRLQNLFEPLCITISD

SEQ ID NO: 239647 - protein, 105 aa, Zea mays
  Clone ID: MRT4577_150142C.1.pep
EEVNFEGPFPFAEGRLYGLTLSATLKAYHVSVDGRHVTLLAYRTAYGSEDATGLSPNGDLDVHPEIAGSLATTHPSSAPHNDPQYYNEWHAALLADEPAEMLIDI

SEQ ID NO: 239648 - protein, 120 aa, Zea mays
  Clone ID: MRT4577_150143C.1.pep
NTHTHPSPHFYHHTHTQSKEDFKKFSTPQQTPQSHLYTTPTHPPQPHFKQHHLLPLHLLHLHLYLSQTLPPTSIIFLSILSLITIIIFTLSTISLLTISHTTIPTYNFNYLINSHIFFTN

SEQ ID NO: 239649 - protein, 122 aa, Zea mays
  Clone ID: MRT4577_150144C.1.pep
APVPCVSFHDAEPHARGGRWRRAGAGRREGARNRLVPSSRWRRSPFSTVAGWTRSTTSLLRTHPLSCASQLAPSALLSRPPATAPAPRYDLPIARKVSLKRFLAKRKDRLVERAPYIRPFPI

SEQ ID NO: 239650 - protein, 72 aa, Zea mays
  Clone ID: MRT4577_150145C.1.pep
MATRLAAAAEAETAALFSVTGAAAGVRAAAAPAATRSIDRAGRRRFAGMAAEAEQMGGWGWRCWSLKLGVFE

SEQ ID NO: 239651 - protein, 703 aa, Zea mays
  Clone ID: MRT4577_150146C.1.pep
MVSFTCSQVGATAAGGASPFLGYRWRSGPGGATPSSSLFVGRRLAAVQMRAPSRGARGGSALRVTCEKVVGIDLGTTNSAVAAMEGGKPTVVTNAEGARTTPSVVAYTKTGERLVGQIAKRQAVVNPENTFFSVKRFIGRKMSEVDDEAKQVSYGVVKDENGNVKLDCPAIGKQFAAEEISAQVLRKLVDDASKFLNEKITKAVVTVPAYFNDSQRTATKDAGRIAGLEVLRIINEPTAASLAYGFEKKNNETILVFDLGGGTFDVSVLEVGDGVFEVLSTSGDTHLGGDDFDKRIVDWLASNFKKDEGIDLLKDKQALQRLTEASEKAKMELSTLTQANISLPFITATADGPKHIEATLSRAKFEELCSDLIDRLKTPVNNALRDAKLSVSDLDEVILVGGSTRIPAVQELVRKLTDKDPNVTVNPDEVVSLGAAVQGGVLAGDVKDVVLLDVTPLSLGLETLGGVMTKIIPRNTTLPTSKSEVFSTAADGQTSVEINVLQGEREFVRDNKSVGSFRLDGIPPAPRGVPQIEVKFDIDANGILSVAAIDKGTGKKQDITITGASTLPKDEVERMVEEADKFAKEDKEKRDAIDTKNQADSVVYQTEKQLKELGDKVPAPVKEKVDVKLQELKEAISGGSTQSMKDAMSALNQEVMQIGQAMYNQSGASAAGPTPGAEAGPTPGTGPAQNDGDVIDADFTDSN

SEQ ID NO: 239652 - protein, 80 aa, Zea mays
  Clone ID: MRT4577_150147C.1.pep
TQKKGSFSFVLLENMHLMLVYLLLSSVLVDEALWVTGLAILYRTCSPASTLSSAVMLILCSWSILLISMGFEPLVVLLGP

SEQ ID NO: 239653 - protein, 528 aa, Zea mays
  Clone ID: MRT4577_150148C.1.pep
MLYKVQRRAQGFYSNDASKFLNEKITKAVVTVPAYFNDSQRTATKDAGRIAGLEVLRIINEPTAASLAYGFEKKNNETILVFDLGGGTFDVSVLEVGDGVFEVLSTSGDTHLGGDDFDKRIVDWLASNFKKDEGIDLLKDKQALQRLTEASEKAKMELSTLTQANISLPFITATADGPKHIEATLSRAKFEELCSDLIDRLKTPVNNALRDAKLSVSDLDEVILVGGSTRIPAVQELVRKLTDKDPNVTVNPDEVVSLGAAVQGGVLAGDVKDVVLLDVTPLSLGLETLGGVMTKIIPRNTTLPTSKSEVFSTAADGQTSVEINVLQGEREFVRDNKSVGSFRLDGIPPAPRGVPQIEVKFDIDANGILSVAAIDKGTGKKQDITITGASTLPKDEVERMVEEADKFAKEDKEKRDAIDTKNQADSVVYQTEKQLKELGDKVPAPVKEKVDVKLQELKEAISGGSTQSMKDAMSALNQEVMQIGQAMYNQSGASAAGPTPGAEAGPTPGTGPAQNDGDVIDADFTDSN

SEQ ID NO: 239654 - protein, 152 aa, Zea mays
  unsure (1)..(152): unsure at all Xaa locations
  Clone ID: MRT4577_150149C.1.pep
TPAAASPPXPSAQPQLXSREAPPPGSIDGPXPPSPSRSSPSSSPPGPRRRPRPRRPXTPAPAPPRTAFLPPPPAARAPMASPPSPPAXRRCPRPPPACRPRAPSAPELVTTRWPPPXAAAALTPAXPRPSRRRAPPSQPPPPPPASWPSLPP

SEQ ID NO: 239655 - protein, 174 aa, Zea mays
  unsure (1)..(174): unsure at all Xaa locations
  Clone ID: MRT4577_15014C.1.pep
MADQLGSYTIRSHGMILARLHMYDWIILLLLAVIDGLLNIIEPFHRFVGKDMMTDLRYPMKGNTVPFWAVPLIGIILPWAIFVGIYFKKKNFYDLHHGILGILYSVLITAVITDAIKDGVGRPRPDFFWRCFPNGNDXYDNITTXLYXNGXXSVIKEGHKKLPSXXHSSWSLLV

SEQ ID NO: 239656 - protein, 270 aa, Zea mays
  Clone ID: MRT4577_150150C.1.pep
RGRPGINSSYTANLTSLLTVQELTSGIQGLDSLISSSSAIGYQVGSFSRNYLVDELSIAESRLVALNSPSDYARALELGSGNGGVAAIIDELPYVEIFLSKYCKFKTVGQVFTKSGWGFAFPRDSPLAEDLSTAILALSENGKLQKMHDEWLSGTECSADNGAGPSNSLSLSSFWGLFLICGLACFLALLIFFLRIFCQYSRYSNQVEAQFAEPRVLNRPARLTTIKSLISFVDKKEEEVKNALKKRPNGSTGQQHPSTHNAEEQPTLPP

SEQ ID NO: 239657 - protein, 134 aa, Zea mays
  Clone ID: MRT4577_150151C.1.pep
MAFTGCAHLLLTMSILLLLCHWRTRAFPLPSPSASSSAASPSPPPVPALPRGLPRLIPVWTSLPVNPFTAKAAFIRYWNRKVSSNRPHPGFLFAKVAPVSGPEAATVSNLASARKVASRIHEFCEAAALVWSSN

SEQ ID NO: 239658 - protein, 181 aa, Zea mays
  unsure (1)..(181): unsure at all Xaa locations
  Clone ID: MRT4577_150152C.1.pep
MALSSSGHPATTRLLFSLLLVGSAAAAAAAGLPERAAIDRVNRRGPSLGLVMSYVDEATALQASGYFQPWRALPFVDLYGRRYHIGSIRGVNVIYALTGQRRLNAAVTVQTLIDVFSVSGIVHYGTAGSCNDSXXSFGDVSVPRLVAYTGAGTWKVELERCNDTFCLPTAPRIVYAEGVVG

SEQ ID NO: 239659 - protein, 333 aa, Zea mays
  Clone ID: MRT4577_150153C.1.pep
MALSSSGHPATTRLLFSLLLVGSAAGLPERAAIDRVNRRGPSLGLVMSYVDEATALQASGYFQPWRALPFVDLYGRRYHIGSIRGVNVIYALTGQRRLNAAVTVQTLIDVFSVSGIVHYGTAGSCNDSISFGDVSVPRLVAYTGAWTWKKFRSPRESSAELSFGEYNVPDGGGGENLLGSLKYRNEELYSAGKPMEEVFWLPVHSAWFRTAEQLTVELERCNDTFCLPTAPRIVYGLKGSSADMFLDNAEYRKFLFQEFGVSTMDEESAAVVMTATSPGIPVIVFRGVSDLAGGEPTWSSTSLMNLASINALKVAVEFIAAVGKHSSTASVKR

SEQ ID NO: 239660 - protein, 317 aa, Zea mays
  unsure (1)..(317): unsure at all Xaa locations
  Clone ID: MRT4577_150154C.1.pep
SNLPLVFQLNAAVTVQTLIDVFSVSGIVHYGTAGSCNDSISFGDVSVPRLVAYTGAWTWKKFRSPRESSAELSFGEYNVPDGGGGENLLGSLKYRNEELYSAGKPMEEVFWLPVHSAWFRTAEQLTVXLDRLPASSXIILSNCVTEILHVCLCSNSDIIFCRXLERCNDTFCLPTAPRIVYGLKGSSADMFLDNAEYRKFLFQEFGVSTMDEESAAVVMVSSAPLLIQSYLHYVHPDHVCYLLLTSKINLALNSDDQTATSPGIPVIVFRGVSDLAGGEPTWSSTSLMNLASINALKVAVEFIAAVGKHSSTASVKR

SEQ ID NO: 239661 - protein, 207 aa, Zea mays
  Clone ID: MRT4577_150155C.1.pep
MAMPDLTATVIQISGPRGELPVLGAGRRRCVWQFNFREFDDARDIFASDSIELLRRSGIDLRLNAERGVDARRFAELLMSSGVVLNDSVYWVTFHAGYDFGYLLKILTCNCLPDTQAGFFKLMKIYFPTVYDIKHLMKFCNSLHGGLNKLAELLDVERVGESHQAGSDSLVTSCAFWKLKDSFFTGSTEKYAGVLYGLNAEIDVSAH

SEQ ID NO: 239662 - protein, 72 aa, Zea mays
  Clone ID: MRT4577_150156C.1.pep
MAGIAYYTIAGKQVAGHYLAMAWLGTLFAGVQYATSGSSAKPTATATPPINASSSDEASFIQDFLNQQDKKN

SEQ ID NO: 239663 - protein, 163 aa, Zea mays
  Clone ID: MRT4577_150157C.1.pep
DVAAVSSTSTAASYFSPQPQLPISTADPAASKSRLMRQPRRSSSFVMVEASSASGSDGGVARTKSLTEDDLEELKGCLDLGFGFAYSEIPELCGTLPALELCYSMTRRFLDEQKAPGQEEELEPASPPLPNWRISGPGDDPEEVKARLKYWAQAVACTVKLCS

SEQ ID NO: 239664 - protein, 113 aa, Zea mays
  Clone ID: MRT4577_150158C.1.pep
HSPTATPKTSPIPLPASDHTAGSHAWMDSVGTNRPPLRPVAAAATRRSALLRPPSHLGLGNRFAETKLGIASGCGGGGGYFGKVQGFDALRSTTTKVQSGKAGRSVTKEMGHT

SEQ ID NO: 239665 - protein, 76 aa, Zea mays
  Clone ID: MRT4577_150159C.1.pep
IHLDIIALPSFDIHAMENWGLMIFDESGLLLEPKDQLTEKKTLISYVVSHEIGHQSCGKMFFLFHLKVFSRCATKI

SEQ ID NO: 239666 - protein, 221 aa, Zea mays
  unsure (1)..(221): unsure at all Xaa locations
  Clone ID: MRT4577_15015C.1.pep
MAAPITSRTETLQKYLKLDQKGMIMAEYVWVDAEGGTRSKSRTLPEKDYKPEDLPVWNFDGSSTKQAPGENSDVYLRPCAVYPDPFRGSPNIIVLAECYDSDGTPNKYNFRHDCVKVMKTYADEEPWFGLEQEYTLLGSDDRPYGWPAGGFPAPQGEYYCGVGTGKVVQRDIVEAHYXACLYAGIQISGXNAEVXPAQWKYQXGXCTGIEXGDQLWXSRFF

SEQ ID NO: 239667 - protein, 142 aa, Zea mays
  Clone ID: MRT4577_150160C.1.pep
KKKKKKKKKKKKKKKKKKKKKEREIKKGGKFYKKKKKKKKGGGLLKGSRLGNPCLQPFCFFLGHLKLNSWAVFLKRRAWKTPAFPKLICFAKNPLFARWHKTKKARPFRPSKQLPILNGKWAPPYTGQLTWGGGGFTPSGTL

SEQ ID NO: 239668 - protein, 182 aa, Zea mays
  Clone ID: MRT4577_150161C.1.pep
MEVPHFALRCEKIQQHVDVAALRGEEHLVSLETMKSKVEAGNTMAAMAAAASPLPSLLAVGNLTPSSVAQPHPQAGAVGSSESELAAPSSVHDDSVALIAVSGRCDYARANEMTSAQIDAMAQDETDEIANTVEQLTGLGVEKVVATALPPIGCTPWLSRSNNYGSCSTLDTRGSGGCRVQI

SEQ ID NO: 239669 - protein, 458 aa, Zea mays
  unsure (1)..(458): unsure at all Xaa locations
  Clone ID: MRT4577_150163C.1.pep
MGSTAAAPCHIVAVPYPGRGHVNAMLNLCRLLAARDGVTITIIVTEEWLSLLGAPAALPDLGLRVRFEAIPNVIPSEHGRANDMVGFMEAVYTKMASPFEQLLDRLAPPAPAAIVADMFVPWTVGVGERRGVPVCIMCPISATMFAVQYNFHLLPPAAXPAAARLRNITGSCFVENYIPGTKSIRFADLAPTHTDALLLDKILEAHSSVKKAQCIVFTTFQELESDAIGAMRQNCPVYAVGPCVPFMALQEHKASPDGDDYMAWLDAQPAGSVIYVSLGSFLSVSAAQFDEIAAGLAESKARFLWVLRDADACSRVRGLIRDPDAGLIVPWTNQLRVLCHPSVGGFFTHCGMNSTLEAVYAGVPMLTLPIAFDQPTNSRLVTEVWKNGIGLRDMARADGVIGRGEIASAVDRLMRPDAAEFQDMRKRVTLWKDAARTASEEGGSSWKDVTSFINFVSR

SEQ ID NO: 239670 - protein, 71 aa, Zea mays
  Clone ID: MRT4577_150164C.1.pep
LQSLSTERSGSCLVAVHLAYPAAAERRDASFDEAILPARGRLTPASMLHAAALQCVLRCLCTIVLMPRDGQ

SEQ ID NO: 239671 - protein, 342 aa, Zea mays
  Clone ID: MRT4577_150165C.1.pep
ASGKHERWRVGGQVVEKERRRVVAESEAGSVSAVDVADAAGTAYRLHFITMDPGALFLPVQLHADMVFYVHSGRGKVTSIEEESSEQSSLEVERGDVYNFEQGSILYIQSYPNASRQRLRIYAIFTSEGINADDPSKPKVEAYSSVSNLVKGFETDVLRLGFGVQPEVVEAIKSAKTPPPIIAYNPEEEKGDKKPGWTEDIVDALLGLRDPEEFLNKKKKKDKHKDKKSKSKAFNFYSGKPDVQNCYGWSRMMTSKDLDALHGSSIGMFMVNLTTGSMMGPHWNPKATEIAIVTEGSGIVQTVCPSSSSSSSSPSGGSSGDHHHGHKRRGGPGGRGDEGEGE

SEQ ID NO: 239672 - protein, 183 aa, Zea mays
  unsure (1)..(183): unsure at all Xaa locations
  Clone ID: MRT4577_150166C.1.pep
EAARPHTERGKTAPPRPPXPPPRPPQRPPQPGTPPTXPPARSEGXPAPEQQPGAPPDAAPPAEPPPPXPPPXPTTPTPRSPPRRPXPPPPPSARPRPPPXPPPPPXPEPPAPPTPPPPQTQPPPPPPPXPPAPPPPXPPPPPRAPPPPXPQAPARAPPPAQPPPPTDPPAPPHPRRPPPTPPP

SEQ ID NO: 239673 - protein, 77 aa, Zea mays
  Clone ID: MRT4577_150167C.1.pep
LFFFFINIFMGKFKNKWGNNPQLKPSNTRTPFTKPNGNKLFSTKHPINNTRWINQSTPTHGPNTPFTNNDRLIETTF

SEQ ID NO: 239674 - protein, 41 aa, Zea mays
  unsure (1)..(41): unsure at all Xaa locations
  Clone ID: MRT4577_150168C.1.pep
FLLHKTCLVYCTNLSIGGRIFSXLTLISKYPYNFPYHVPSF

SEQ ID NO: 239675 - protein, 54 aa, Zea mays
  Clone ID: MRT4577_150169C.1.pep
LKALPKILLTLFCVSLQCPDKGKTYLNERIRMTILTVGLLRYVEKKNPYSLGIT

SEQ ID NO: 239676 - protein, 310 aa, Zea mays
  Clone ID: MRT4577_15016C.1.pep
MADQLGSYTIRSHGMILARLHMYDWIILLLLAVIDGLLNIIEPFHRFVGKDMMTDLRYPMKGNTVPFWAVPLIGIILPWAIFVGIYFKKKNFYDLHHGILGILYSVLITAVITDAIKDGVGRPRPDFFWRCFPNGNDVYDNITTGVICNGVKSVIKEGHKSFPSGHSSWSFAGLGFLAWYLAGKLTAFDRKGHIAKLCIVFLPLLTAALVAVSRVDDYWHHWQDVFAGGLIGLTVASFCYLQFFPYPFDGDALWPHAYAVRLAEEGNSRNANSYSVRPTEIETVDIPGHGGIITLRDTLNDVESGSARRL

SEQ ID NO: 239677 - protein, 116 aa, Zea mays
  Clone ID: MRT4577_150170C.1.pep
KPNVQKVTQYSNLTVKKDPCVERKKKTLSRKKKETWSYGPSLAHCGNPTLCKSRPAFGLFAQRRWSHSNQNPMIISNNAHPMGTVFYCSLDSIGLRSTPLGVFLLLLLLVSWMHAC

SEQ ID NO: 239678 - protein, 51 aa, Zea mays
  Clone ID: MRT4577_150171C.1.pep
KRTARSLPKHPICGFRDLKGDRCSTLNTKWVKSTLQVSGPWPEQLGSPKFS

SEQ ID NO: 239679 - protein, 77 aa, Zea mays
  unsure (1)..(77): unsure at all Xaa locations
  Clone ID: MRT4577_150172C.1.pep
YTLNIAYYTCARSILLQAVLDLWEELLXSLPQTVHSPSPAHSPPFRVSCAGNSVTRLPQPTRPVPNSLLQLLIWRNG

SEQ ID NO: 239680 - protein, 119 aa, Zea mays
  Clone ID: MRT4577_150173C.1.pep
KGKTRGKGKPQKRSFYLGGKKMEKTRWDGPRKLFHLGGEGTPNKTCKKKTRASLWGGACLKKGGRTEEHGRTHRLGRWGKIKGILHPQFSGKKAGNLYLGAPLAGEKGTQFLEGGGHLG

SEQ ID NO: 239681 - protein, 51 aa, Zea mays
  Clone ID: MRT4577_150174C.1.pep
PTGAFRSKLQPCPSFAGSRQIISLWTDTLCDKNVSSWFPYNMNCYMLCGCL

SEQ ID NO: 239682 - protein, 133 aa, Zea mays
  Clone ID: MRT4577_150175C.1.pep
HAPTRRTRYPTHSNGPRASRETRSLRLALPGSKLTITRSKTSSTYRVIGGPSRSHQIARSNINKQASKQSSVQVQKKALELLVPLSSKLEQHRARAEGELPALTSASRSSAGRRRRLGRIRGPSPLLPLLPHE

SEQ ID NO: 239683 - protein, 177 aa, Zea mays
  unsure (1)..(177): unsure at all Xaa locations
  Clone ID: MRT4577_150176C.1.pep
KKKKKKKKKKXKKKKKXXKKXXXXKKKKKKKKXKKKKKKKKKKKKKKKKXXKKKKXKKKKXKNKKKKKKKKKKIIIKNKKKKKKKKKKQKPKIKKKKKKKKKNKKKKKKKKKKKXXKKKKHKKKKKQKKKKNKIKKKKNKKTKKKKKRKKKKNKKKKNKKKKKIYKKKKKKKNKXQH

SEQ ID NO: 239684 - protein, 235 aa, Zea mays
  unsure (1)..(235): unsure at all Xaa locations
  Clone ID: MRT4577_150177C.1.pep
MANPLAGLQDHLKHARDYALEGLYDTSIIFFDGAIAQINKHLANLDDTFIRTKWMNCKKAISEEVEIVRQLDAQLKSFKEAPGTMRSSSPPIRSNNKSFLFQPLDEYPTSSPSTFDDPDVWAPPRDTNTPNRRSARGQSSARKSSQDGAWARGPSKTGTPSRGAKPSGSKANSAVRSSTASSTGGRKGKSSSSKADSASSDAEEGKSKKAQYERDXDXDLAAMXLERDVLDSTPG

SEQ ID NO: 239685 - protein, 40 aa, Zea mays
  Clone ID: MRT4577_150178C.1.pep
QLNAEFMPLLLAPLSSENHGFEKQTMEMPQCRNLIQRNSR

SEQ ID NO: 239686 - protein, 668 aa, Zea mays
  unsure (1)..(668): unsure at all Xaa locations
  Clone ID: MRT4577_150179C.1.pep
MIEKEIVELVDAHSGFEKKXAVVGKGXRRRANAGDATDKHTNEPRENSNASLQKHHGNRGKFADSSLYELSVMCVKQCHADNYNNVSQHSSQTKLNQSSNLTSFVLKAFLELLKSLASKHSRDFTIKLHGDFKKLSQPIMQLVWCFLLDPIQENGGSKKNMTQGKKNTECKKDQLYLALTCLKKFLEPSVSGEHSSDIIDFLISLAPPNIEDTMGTGDLDNNDTTMVEDRSTRNVHVILNILKTLYARLLTQSVLRESEAVIELILGISRKLQLERRHLVGKWATDLCRKKTMQSPRMAREMLKLAIHLTPAPDDMILVYEVSTELMNLMTSGDDGDSSDTFHIINCKTKSSLAALSLQMVESSLTELDWGFGKLKAMLTLGYDCANIDEDQPADEIMLRLALEKALYSRSTLVVQVLSSFAHMSPMDTQAEHFLKLTVKFYKLLTRMSKSQIAPKGYRQSIPSLKFQKLAEVTCKMLTAPLYDFVFQQNQQIPIKGNLAKIRRETKCIPDLIFQIEDYEKYLIQLSKLTKVNLLRHAKRSVARDFQIKDKSGGQQEDDHIPDNAAASDNEADKDAMGPNAPVESCADDAQKSYADENASCESGHDEDAGGPNTPAEADADEIIRSSIPYGSPVQESESDREEEELLARTKRAKTKQVVQDSDEDADE

SEQ ID NO: 239687 - protein, 216 aa, Zea mays
  Clone ID: MRT4577_15017C.1.pep
MLMLHPRLVSSSAVDDEDHCESCACYCAMVSCVSLLLFIVLAAAVSIPRACAIAGVMLLLLGLVGWLVPTGNGAGPAAQQQQQQGQAAADPGARRLVVHHRCACGLTDAAIAALPAAFTYYEAPAVKNGVGSEDDKQPRGSSLLCAVCLDDVRGGEMVRQLPACRHLFHVDCVDAWLRAHRTCPLCRCQLSPRNDVSTKRAAAVVGESSIDALPPV

SEQ ID NO: 239688 - protein, 247 aa, Zea mays
  unsure (1)..(247): unsure at all Xaa locations
  Clone ID: MRT4577_150180C.1.pep
LPRPVPFSRPLPHPSVVMFVGLQGXXGKTTTCTKYAYYHQRKGFKPSLVCADTFRAGAFDQLKQNATKAKIPFYGSYMESDPVKIAVEGLERFRKENSDLIIIDTSGRHKQEAALFEEMRQVAEATKPDLVIFVMDGSIGQAAFDQAQAFKQSASVGAVIVTKLDGHAKGGGALSAVAATKSPVIFIGTGEHIDEFEIFDVKPFVSRLLGMGDLFDLMDKXQDAMPGGQXQPEILEKLDGGTIPLKF

SEQ ID NO: 239689 - protein, 51 aa, Zea mays
  Clone ID: MRT4577_150181C.1.pep
RVHKAKLDVELMRACSMCLAFTFHLHVFSFVTEERSHFEFLVTRYAVHLVS

SEQ ID NO: 239690 - protein, 195 aa, Zea mays
  unsure (1)..(195): unsure at all Xaa locations
  Clone ID: MRT4577_150182C.1.pep
MYSAPGNNSLALAAPRPGMELGNVQQHPNQAFGLGPGGKQRSSSLEAPIMLLTGHQSAVYCMKFNPAGTVIASGSHDKDIFLWYVHGECKNYMVLRGHKNAILDLHWTTDGSQIISASPDKTLRAWDVETGKQVKKMAEHSSFVNSCCPSRKWPPLVVSGSDDGTAKLWDLPXRGAIQTLSDKXFQITAGSFSEA

SEQ ID NO: 239691 - protein, 149 aa, Zea mays
  Clone ID: MRT4577_150183C.1.pep
LLVAVLLVGVASRCSGSRGLQGDHVAEQKFGGGGYGGGGGYGGYSGTGTCDYWKSHPDAIISCIGSLGSILGSGRVGCSAFFGSKLQTLQDALCNTRTDCYGDLLREGAAAYLNSIAAEKYAYSTQQVQDCIAVAQAAMFKKANYACSY

SEQ ID NO: 239692 - protein, 95 aa, Zea mays
  Clone ID: MRT4577_150184C.1.pep
LKHSTEEERRTRAKKMTGKVLLVAVLILVGVASRCSGSRGLQGDHVAEQKFGGGGYGGGGGYGGYGGGGGGGGGGYGAAVAQAAMFKKANYACSY

SEQ ID NO: 239693 - protein, 196 aa, Zea mays
  Clone ID: MRT4577_150185C.1.pep
MTGKVLLVAVLILVGVASRCSGSRGLQGDHVAEQKFGGGGYGGGGGYGGYGGGGGGGGGGYGGGGGGGGGGYGGGGGYTPGYSGTGTCDYWKSHPDAIISCIGSLGSILGSFGDVCSAFFGSKLQTLQDALCNTRTDCYGDLLREGAAAYLNSIAAEKYAYSTQQVQDCIAVALTSKAAAVAQAAMFKKANYACSY

SEQ ID NO: 239694 - protein, 550 aa, Zea mays
  Clone ID: MRT4577_150186C.1.pep
METAGQTTLQESAVHARRQAACWWPLDTTACSSLDLDDASTFSSSSLLLGWEWDPQLCCFGSPHARDSELFGPTSSMADCARVIGMESPVSEASAAAATGELDDELLLMSLWGECHLFSSCSALKEKTATSSQHDDHHSDLPTSPAKTTPATAQAAEPSHCDVDLRASYTGGAQQQQQQQHRTTRAANSSSKRSATEPEGTAAVRTSFCHSTKTAATVSQFSHCSPVHALVPLHAEKGAEGGKRSRKAPGSTAVAAYPFAVVKPGGADGGVTLADINRWILTPPARPVRHPVGEFACAPRVSAANRPGPSGRTVAGFTRLRTAGRGTITIVVLTQLVVQKTLLSRPAYMTDNKWRDIDERALFAIQLSLSFDVLREVMHEKFAAILWKKLEELYMTKSLANKLRLKERLYTIHMSEGDGLIVRESGDHKSNLYCRYCRKSIHRISQCPKVRNKEERKKKLDKSSAEASFAKTLDSGEALFVASVEKCSSWILDSAWTFHICSHGDWFSDYVQSHAGEVVIGDGSTCEIIGISSIYIQVHDAVLRNLLKVA

SEQ ID NO: 239695 - protein, 53 aa, Zea mays
  Clone ID: MRT4577_150187C.1.pep
PTRSPTHPPHSYTRRYFDRYEPLYAQSYTIYHTYYIYPTCLYTYISIIITPIP

SEQ ID NO: 239696 - protein, 66 aa, Zea mays
  Clone ID: MRT4577_150188C.1.pep
GTVVRHQWSESDHNHIYSFNNVSSFVLLPVVCCLPYVIVSFQKAKALPSQKKKTKILIKTKKNKKK

SEQ ID NO: 239697 - protein, 41 aa, Zea mays
  unsure (1)..(41): unsure at all Xaa locations
  Clone ID: MRT4577_150189C.1.pep
MEKKVQKLVXMGFPKGQVKSALKSVDGDKNMALQKLCSGFG

SEQ ID NO: 239698 - protein, 66 aa, Zea mays
  Clone ID: MRT4577_15018C.1.pep
KRTHKRVLVKKDHSPKKRHTRNGPKRSGERQSLYTIRCFNYPSISAATLSFGARGVFCPLVPPRWL

SEQ ID NO: 239699 - protein, 70 aa, Zea mays
  Clone ID: MRT4577_150190C.1.pep
ERRLDEATNEEAVAAGRRVLQCVQRQLHVPRLRHLVPALRPPLHQSYPRPENDFWWGNKRSGLEPNSELT

SEQ ID NO: 239700 - protein, 55 aa, Zea mays
  unsure (1)..(55): unsure at all Xaa locations
  Clone ID: MRT4577_150191C.1.pep
MKFILFVWHDELRDAVLLVFANKHDLPNAMNAAEITXDXLGLHSLRQRHWYIQST

SEQ ID NO: 239701 - protein, 74 aa, Zea mays
  Clone ID: MRT4577_150192C.1.pep
RDEITLEEEEEEVVRLRLRVEWRRAKWMAAAKVLSQSKYSAKSLVSTMSYAWTNTNSGNWLGGENSECTKVGCS

SEQ ID NO: 239702 - protein, 71 aa, Zea mays
  Clone ID: MRT4577_150193C.1.pep
KKGLEPEVRHVGRGDPTWPFVGPRSSETGFSVTAAAPGMGCDVPGSIRSVGGTKLVHIIFGGDCTCSVFLV

SEQ ID NO: 239703 - protein, 37 aa, Zea mays
  Clone ID: MRT4577_150194C.1.pep
GLYMAYVFIANFLWGIKSCILKWRVDSNLPYREAKFL

SEQ ID NO: 239704 - protein, 389 aa, Zea mays
  unsure (1)..(389): unsure at all Xaa locations
  Clone ID: MRT4577_150195C.1.pep
CAARELLDDDNEWYRTYQGATNWATSFQLRNLFVIMLTYCQIKDEKEFFNTTWHTMVDDIHKHLIQKYHPXIKYTPSELELQHCLLEELEELFSKNGQEINNYNLPRRQHTKQVDNVNRLIQEEMSYDINYLEKEANKLYIQLNKDQKNAFHTIVSSVLSNDPNFYFVSGHGGTGKTFLWNAIVSYLRAIRKIVLTVASSGVASLLLPNGRTAHSRFRIPIDLDQLSMCDIKRGTNLAKLLIDTDLIIWDEALMTNKQCFEASCRILRDIVGETYEKALDIPFGGKVVVLGGDPKQILPVIENGTKDQIINACIIASYLWNHVNIIFLSENMRLRQSNISNEEYEDLLSFNNWILAIGNGVYNNNDNFSSDSTLIEIPKEFLIETTEDK

SEQ ID NO: 239705 - protein, 52 aa, Zea mays
  Clone ID: MRT4577_150196C.1.pep
LATIHNTSNMYHHHFHGEVDILRFLSPPTTASFAAAHHQHMNMPLQPPAYYL

SEQ ID NO: 239706 - protein, 106 aa, Zea mays
  unsure (1)..(106): unsure at all Xaa locations
  Clone ID: MRT4577_150197C.1.pep
NWIRQTWNKGQVRDQTLSRIKSNIELIVATNGGNGXWVIXHLMGVLYFLHFTKWVEAPPPVGGSGGPNWCENHIKAVMNIGGSFLGVPKAVAGLFSSEAKDVAGAR

SEQ ID NO: 239707 - protein, 102 aa, Zea mays
  Clone ID: MRT4577_150198C.1.pep
PAGGLALARTRTDLQRRTELLLLTAYDREAGPCVRRTWPGRHHWAVGSSGRWPGPATHGVRSRSSAWLRFRAARHQADDRGRRQRHGRECHCMCYVVVGAAL

SEQ ID NO: 239708 - protein, 196 aa, Zea mays
  unsure (1)..(196): unsure at all Xaa locations
  Clone ID: MRT4577_150199C.1.pep
MDAAGVDRLSDLTDCLLHTILSRLEARQVVQTCVLSSRWRRLWLAVPCLDIDGGEDQEGEDEEERHKKLDDFVDNLLLRRXAPAPPRXAAHPAGERRLAAAXWRRAHHDRRSSICAAHTRWVSRGLECSPAVLEVRGIKLPSFASGTHRLTKLLLQDVILHKDFEKHLFAWLRVLPXLEIRSSDMSNLSRIESNTL

SEQ ID NO: 239709 - protein, 52 aa, Zea mays
  unsure (1)..(52): unsure at all Xaa locations
  Clone ID: MRT4577_15019C.1.pep
LYPLHPPPYILFHSYTQPTHALNRFICHFLILHTQTTAPXNHHYSTFTHTNS

SEQ ID NO: 239710 - protein, 164 aa, Zea mays
  Clone ID: MRT4577_1501C.1.pep
RCFFSITITIFRWWFVEFDRICFGHSVVQFRTQATDSCSSDQVHVRIVGLSSVRSTSESGRVQQSSFYLLVVCHRFIEQSSQFHSICSTSGVSIGSGLHTDHRTVCNSKPVACLDRCRIVSTSLGCHSNIRSFRSSSFVALHFVRCFHAADFFGCCICGSSLTS

SEQ ID NO: 239711 - protein, 387 aa, Zea mays
  unsure (1)..(387): unsure at all Xaa locations
  Clone ID: MRT4577_150200C.1.pep
MSLLRRRKQQQLPPSDGDGSDHDDNDKGKKPSSSSAPPSKEXRGGXAKWSCVDSCCWLVGCVCSAWWLLLFLYNAMPASFPQYVTEAITGPLPDPPGVKLQKEGLRAKHPVVFVPGIVTGGLELWEGHQCAEGLFRKRLWGGTFGDVYKRPLCWVEHMSLDNETGLDKPGIRVRSVTGLVAADYFVPGYFVWAVLIANLARIGYEEKTMYMAAYDWRLSFQNTEVRDQTLSRIKSNIELMVATNGGNRVVVIPHSMGVLYFLHFMKWVEAPPPMGGGGGPNWCEKHIKAVMNIGGPLLGVPKAVAGLFSSEAKDVAVARAIAPDVLDSDFLGLQTLRHLMRMTRTWDSTMSMLPKGGDTIWGNLDWSPEDGLECKAKKHKTNDTRGF

SEQ ID NO: 239712 - protein, 676 aa, Zea mays
  Clone ID: MRT4577_150201C.1.pep
MSFLRRRKPLPPSDGDESDHDDNDKGKKPSSSSGSPSKEPTKRTKAKWSCVDSCCWLVGCVCSAWWLLLFLYNAMPASFPQYVTEAITGPLPDPPGVKLQKEGLRVKHPVVFVPGIVTGGLELWEGHHCAEGLFRKRLWGGTFGDVYKRPLCWVEHMSLDNETGLDKPGIRVRPVTGLVAADYFVPGYFVWAVLIANLARIGYEEKTMYMAAYDWRLSFQNTEVRDQTLSRIKSNIELIVATNGGNRVVVIPHSMGVLYFLHFMKWVEAPPPMGGGGGPDWCEKHIKAVMNIGGPFLGVPKAVAGLFSSEAKDVAVARAIAPDVLDSDFLGLQTLRHLMRMTRTWDSTISMIPKGGDTIWGNLDWSPEDGIECKAKKHKANDTGVSKDSNGGNIEVQPEPINYGRLVSFGKDVAEAPSSESEQIEFRDAVKGNNIAHSNTSCREIWTEYHELGWGGIKAVADYKVYTASSVIDLLHFVAPRMMQRGNVHFSYGIADNLDDPKYQHYKYWSNPLETKLPNAPDMEIFSMYGVGIPTERAYVYKLAPQAECYIPFRIDTSAEGGEENSCLKGGVYLADGDETVPVLSAGYMCAKGWRGKTRFNPAGSKTYVREYSHSPPSTLLEGRGTQSGAHVDIMGNFALIEDVIRIAAGATGEEIGGDQVYSDIFKWSEKIKLKL

SEQ ID NO: 239713 - protein, 74 aa, Zea mays
  Clone ID: MRT4577_150202C.1.pep
KQLIRDPIKERPLYLVVCGGNGAKVGEKRKGKITERSGGYEGLANVTVTRCGKPTHEALLMRQKGGRQYHNRER

SEQ ID NO: 239714 - protein, 135 aa, Zea mays
  Clone ID: MRT4577_150203C.1.pep
GLILSKALKEQKDAEDESTRIAFGNLRLEVIDLRHQAVEKDTILIYVVNKLKESQAELAKFSEGVSRILKLEEEKKADAKLIADIEFALSTQVELHKFEVLKLEEKLDEVSENFEVEKEKREIAETERDRVQRSD

SEQ ID NO: 239715 - protein, 69 aa, Zea mays
  Clone ID: MRT4577_150204C.1.pep
MTGSRDNSDVSPSNIIEPTWKTLPAEEQLQFEEHKEQLILEAKAKFLANFKVDRNNKVVQQRATDLATL

SEQ ID NO: 239716 - protein, 94 aa, Zea mays
  Clone ID: MRT4577_150205C.1.pep
EPPSQLFFFIQKNPRGGDKKQPLLFLEARRPLTTKGGPQTWGGLLLPHRGPAGKKGVVNQPQEGRPQHRPPPKHPLGSPGGGTHKGGHKTPRQI

SEQ ID NO: 239717 - protein, 47 aa, Zea mays
  Clone ID: MRT4577_150206C.1.pep
KCFHYIFLSPTTPLVVEGSYYLSKIQMLMRNHHQTYPMETYFGLPLV

SEQ ID NO: 239718 - protein, 96 aa, Zea mays
  unsure (1)..(96): unsure at all Xaa locations
  Clone ID: MRT4577_150207C.1.pep
SATDQRGQVMEQESEHSIVHVSKVSGPAPNKVCKINGARTCIVRVLTVISYNQMSTLTQANKTKNLLSIGLSCKKTKXAITATVTKQHVLLKTERD

SEQ ID NO: 239719 - protein, 77 aa, Zea mays
  Clone ID: MRT4577_150208C.1.pep
NALSTASWTSPNNKDGDESSSATTTDDDSPFELDMFGGMSWDLYYANLAQAMLVEPPPIVPALCDDGVASELPLWSY

SEQ ID NO: 239720 - protein, 136 aa, Zea mays
  unsure (1)..(136): unsure at all Xaa locations
  Clone ID: MRT4577_150209C.1.pep
FNLYSSXITDMLLTPPPTQWRNQGGVMRVSPIDLKAAVRKTDVGEGVSSXSGAYAAVQVTLSSSSKAGCPGTPARPPLAYQLCLMRVRIPXLGEPSALVRPPGSSPSLLRVFRVXSPPSLGVGGXGSGPARWPPGC

SEQ ID NO: 239721 - protein, 147 aa, Zea mays
  unsure (1)..(147): unsure at all Xaa locations
  Clone ID: MRT4577_15020C.1.pep
VFAPRAEPATPTPARSAAGAGARAKAAGAXAXAXXXAPAGANXEGDAXXAXRRRGGDPGGXPQSXDPTXXNPXTXXHXTXDRDNRXTRXXXXXXNPXXXXXXEXGKXEXXQXXEPHKNSXQGTXXXEXXXXKXXXSXDXXKNNXTGT

SEQ ID NO: 239722 - protein, 59 aa, Zea mays
  Clone ID: MRT4577_150210C.1.pep
KQQARPMSERTELPHSLHQRLLGMHTHEEPQDDVSHQEFQVPHQMQHPRVRGRVGGRVG

SEQ ID NO: 239723 - protein, 48 aa, Zea mays
  unsure (1)..(48): unsure at all Xaa locations
  Clone ID: MRT4577_150211C.1.pep
SQRKKSIEYPSTLSHSXVLTRESYRAFSMSPVFAGXPMFMLALAGPFA

SEQ ID NO: 239724 - protein, 211 aa, Zea mays
  Clone ID: MRT4577_150212C.1.pep
MALARLCLNRAIAGRAQALARPALAAAPATDPKLHSLLSTSAADSAASGEANRRDVAVSERSAPNRRWAWRDLRDFTPFSLVDGLGSALSQVAETLGRPLERLAPSRLLSGKVREDEARYRLRFEVPGLGKGDVRVAVEDGVLVIEGEKREHGEEGDGGEWWSTSGYHASLLLPDDARAEGITAEVKDGVLYVTVPRTGERKRNVTEVKVQ

SEQ ID NO: 239725 - protein, 136 aa, Zea mays
  Clone ID: MRT4577_150213C.1.pep
PTRSAGALADEQSRLASLERYRSGAVQSAAVQPHPACRGCWRSSLLAFLFYLVCYIARVSCAYLLCVLKCFLYLFFFAGFVLSFLVLSVFHFVSKFFFCFIPPLFYMFYPLLLFLLISFLFFCVVFFYFFFYFFFF

SEQ ID NO: 239726 - protein, 49 aa, Zea mays
  Clone ID: MRT4577_150214C.1.pep
RENIAGKCYSLVLSLLLGLASIIFQTESAARLGSVKRLDVVLNLAAAIA

SEQ ID NO: 239727 - protein, 77 aa, Zea mays
  unsure (1)..(77): unsure at all Xaa locations
  Clone ID: MRT4577_150215C.1.pep
AIYNYTXFFXIFLHTKSPTPEATGKKYKSANKNPPHCTTGHSWTTASYSKNIKPTSRGELTLISNRTTHRIHPQKPP

SEQ ID NO: 239728 - protein, 68 aa, Zea mays
  unsure (1)..(68): unsure at all Xaa locations
  Clone ID: MRT4577_150216C.1.pep
SLPLTPSSRSLSRSRRLHDAASCSASVMPRSRVGSGTGTXILGATNSGDWREPRRTRGRTRGRRQCRG

SEQ ID NO: 239729 - protein, 153 aa, Zea mays
  Clone ID: MRT4577_150217C.1.pep
MAPKADKKPVAENKVEKAAEKTPAGKKPKAEKRLPAGKTASKEAGGEAKTRGRKKGSKAKKSVETYKIYIFKVLKQVHPDIGISSKAMSIMNSFINDIFEKLAGESAKLARYNKKPTITSREIQTSVRLVLPGELAKHAVSEGTKAVTKFTSS

SEQ ID NO: 239730 - protein, 52 aa, Zea mays
  Clone ID: MRT4577_150218C.1.pep
GVNTHCITRFQQLKLWFTKATNRKGLVVIGTTEGTRPNNDHLGNSLYPHRLR

SEQ ID NO: 239731 - protein, 109 aa, Zea mays
  unsure (1)..(109): unsure at all Xaa locations
  Clone ID: MRT4577_150219C.1.pep
RQETTSAPSPLNCFPPLGRKDSSFFPHFSRAPRNPFFXETAGFNKDXPTPWKGNFGVGPYRTKEGNPLCFNRVRAPNQILINNPDRXKGYLPITGLVELNKLAPKLFFG

SEQ ID NO: 239732 - protein, 67 aa, Zea mays
  Clone ID: MRT4577_15021C.1.pep
REVTFSPAYSRRAGVGSYPQAGTRNTSTPSHSCILPWLTHRGADSSLVQPCPKKNRDAPPGDFVQPS

SEQ ID NO: 239733 - protein, 58 aa, Zea mays
  Clone ID: MRT4577_150220C.1.pep
ACLQVGSFPISVPSNCVITVVSILCIEHPPALRAPFIPPPTRTLNVVHVVSSQIRPTM

SEQ ID NO: 239734 - protein, 43 aa, Zea mays
  Clone ID: MRT4577_150221C.1.pep
RLVVTSASAVGYARVHRLRTSFCRLGYWCRRAVGERTRGYVPG

SEQ ID NO: 239735 - protein, 141 aa, Zea mays
  Clone ID: MRT4577_150222C.1.pep
RADASLQPVSRPPTRPREQPTIPRWAPWLVPSPSSWRRLSSSLSSSQPLPVRGPWGTPCRTRAAITQFPKMCVDSLAAKPERHTATPRTLAALFVAIPAEKGCGMGIFVHRHVQRQGGQGHSQVPRQRRLTRGGGRRPGER

SEQ ID NO: 239736 - protein, 86 aa, Zea mays
  Clone ID: MRT4577_150223C.1.pep
SHLLRGLVGAAARLAQPGEVDDRDLRGYPAHVTSSQWKTTVSTDSTTERAVSAMRTTQRGSGRPLAMRSRGPGEVSRHGPVLKLST

SEQ ID NO: 239737 - protein, 190 aa, Zea mays
  unsure (1)..(190): unsure at all Xaa locations
  Clone ID: MRT4577_150224C.1.pep
MTAGPSTATTPWLRRXLNGSISTRRRRHGCGALNGDXKQPLLDRAEVRVGAGFVVXLAAAGVLAAFYTLLLVLSLVNRGGGEGEALEAVFLALHCAAHLAAATVVAHEKRARAXHGPLNGPCYLGRPGTVGPTPCRAREGLWARRAARHDTIKWSGLTVPGSNGPGQVGLGLGRAVPLVWTYIGPVWIDA

SEQ ID NO: 239738 - protein, 41 aa, Zea mays
  Clone ID: MRT4577_150225C.1.pep
VMFGSKSNSVFKKVAFIFYLVVVSFFFFFFEQTQESCVSLN

SEQ ID NO: 239739 - protein, 134 aa, Zea mays
  Clone ID: MRT4577_150226C.1.pep
QKQTKTARDVGDVVDDGGVAHGVVGVERLERGVGDRLGRGDVDWGLIRPCDALLENGAQCSAVVWSEGHGVPVLSVIRRVSGNVGWRRRKSTAAGDGRRGLRSRYDRSSSETSREYFELMRTEDAVTRSQCRRR

SEQ ID NO: 239740 - protein, 48 aa, Zea mays
  Clone ID: MRT4577_150227C.1.pep
CMGNIWNLGGLKTLPTLVNMTWALNMGCWGKFYSTVADRVPGLKICKI

SEQ ID NO: 239741 - protein, 199 aa, Zea mays
  unsure (1)..(199): unsure at all Xaa locations
  Clone ID: MRT4577_150228C.1.pep
MTELFDTAVTSLLHLPEVLDRLAAADGDRRSAGNHAAHGHGHGRVHGLGGGGGAPVDIVESPREYAFVLDVPGLSKSDIQVXTCGARSLNSVGSRAPATDPNRIRLCFXTLEEDRVLVMKGGSGKRKRDEEEDMNGEGCRYIRLERGAAPRSFVRKFRLPEDADTGGVAARCENGVLTVTVKKLPPPEKKAKTVQVTIA

SEQ ID NO: 239742 - protein, 66 aa, Zea mays
  Clone ID: MRT4577_150229C.1.pep
ALINYRAMPLQDQHTRSHTTTDAASASTPRTSPSLRLIPRTHTAELQATTPTRTPIPTTSHRTTSR

SEQ ID NO: 239743 - protein, 151 aa, Zea mays
  unsure (1)..(151): unsure at all Xaa locations
  Clone ID: MRT4577_15022C.1.pep
YVEDMSFSPXYIGGRTKHLLQRAIWNDTSFLTSVNVMDYSLPVGVDKEKHELVFGIIDYLRQYTXDKQLETWVKTSLVVPKNVLPTVISPKEYKKRFRKFMAKYFLSVPDTWSLDNPSKPCKSLGQSNRKLAEVQIGDNLSEHPNEVEGCA

SEQ ID NO: 239744 - protein, 58 aa, Zea mays
  Clone ID: MRT4577_150230C.1.pep
SISVPPTPGAGSTTTGLFTYISITKATPLQPSGFPLPIDRGSLVRVSQTMQPPTLRGP

SEQ ID NO: 239745 - protein, 311 aa, Zea mays
  Clone ID: MRT4577_150231C.1.pep
MPHLVLLLFLGLGGLLPAASAADEQFVFDGFKGANLSLDGMATVTPDGLLMLTNGTSQLKGHAFYPAPLRFHGAPDGTAAAMESFSTAFVIGIIGAFEDLSSHGMAFVVAKSTNFTSALPGQFMGLVSSATNGNATNHLFAVEFDTILNSEFDDMSGNHVGIDVDGLNSVDADNAGYYDDATGGAFRNMSLVSRKPMQVWVDFDGRTMQVNVTMAPLEAARRPRRPLLSTTVNLSSVIDDGTAYVGFSSATGILFCRHYVLGWSFRMNGAAPPLNVSSLPTLPVTAPRPRSRALEIVLPIASAALVFAAAL

SEQ ID NO: 239746 - protein, 57 aa, Zea mays
  Clone ID: MRT4577_150232C.1.pep
SVLQYNKLNVTIATTQYIVTTSTIIKNMQQHTSKIHGKSCSPSFNFIKLRPLNNLGT

SEQ ID NO: 239747 - protein, 40 aa, Zea mays
  Clone ID: MRT4577_150233C.1.pep
CHLPSLYSAIHCASYTVVAHVYMVGANDLGPRLHYDSHSL

SEQ ID NO: 239748 - protein, 71 aa, Zea mays
  unsure (1)..(71): unsure at all Xaa locations
  Clone ID: MRT4577_150234C.1.pep
FVRRVTAAVFSRRPGRAHXRSPCTRGSGSGSGSFVFSFAGRAXXXXKXGRSKSQSAIRXXGARCGLXXAAA

SEQ ID NO: 239749 - protein, 72 aa, Zea mays
  Clone ID: MRT4577_150235C.1.pep
LITRRLRQGDQHTQQVRYRLLADGGIRSPPSPVAVWKPIIIRNLRQEATGQDSNKQQQQKFSRRDGCGLTST

SEQ ID NO: 239750 - protein, 103 aa, Zea mays
  Clone ID: MRT4577_150236C.1.pep
VAVGSPSPLDPPLHSAVVPLPKRRPNSCSKSHPATPSGGMVLRLALACSTDRSSEPRPSTLFRSPMCDDAFVFTPHVQQPRRRFDMVSRCIILLLDWIYMWLQ

SEQ ID NO: 239751 - protein, 60 aa, Zea mays
  Clone ID: MRT4577_150237C.1.pep
FWGEPLSLSSGKRRTPALGFLEMFTVSNFRPLGPSPFEPRGVNFWSPNLIKFQSLFWVNK

SEQ ID NO: 239752 - protein, 85 aa, Zea mays
  Clone ID: MRT4577_150238C.1.pep
PLMHASLSLDPRMTGQPFFFFFFFFFFFFFFFFFCWGEFNLKKKGLSPLYFKTILYPRISGPHILQHQKTHLTSTPILTTPCCSF

SEQ ID NO: 239753 - protein, 74 aa, Zea mays
  Clone ID: MRT4577_150239C.1.pep
ADLFPPIQADSRWFYIIDIHFHLLPTKKPLHPTTVMSTITKIATPTTCTSCFSINRMYFVYATDAHQFLLFLPK

SEQ ID NO: 239754 - protein, 100 aa, Zea mays
  Clone ID: MRT4577_15023C.1.pep
FHYNNWEINNEHRYMSWGPHLPNNLPKNHKLLDRSTGGASNVHHFTKGKAKQQWDRLKKCQEVLHVIKHTPQLHLGAEAGYHHWGLPLTWDCSDQRICLD

SEQ ID NO: 239755 - protein, 69 aa, Zea mays
  Clone ID: MRT4577_150240C.1.pep
LWEPVSPQKLGFNRRRPGQGFFSGQRAPISPTTRSWFSIGLRPIRPFFRCQVLSPRPKMIDPFHLPKSP

SEQ ID NO: 239756 - protein, 146 aa, Zea mays
  unsure (1)..(146): unsure at all Xaa locations
  Clone ID: MRT4577_150241C.1.pep
SQTPLELLVFTAITLGLVYIGSCNEEXIAQAIIHALMVRSDNEMGEPLSRLLPVALGLLYLGKQESVEASAEVSKTFNEKIQKYCDITLLSLAYAGTGNVLKVQKLLGYCSQHLEKGETHQGSAVLGIGLVAMSEELGIDMAIRSL

SEQ ID NO: 239757 - protein, 112 aa, Zea mays
  Clone ID: MRT4577_150242C.1.pep
CTSAPFGMQGVPTRGAFQWCGRSPRADRPWPYAPRAVDGSCTGAEWLVPASWQGSSCALVFSVVQQLVVVRVRVVVCRCLYRYGAVRAGRFAGRARRAPPAGPSGAPVASRR

SEQ ID NO: 239758 - protein, 100 aa, Zea mays
  unsure (1)..(100): unsure at all Xaa locations
  Clone ID: MRT4577_150243C.1.pep
MTTDGEDKYNDSDGDXGDNXDEGERLSPDKCDYDSCDQDXTTDDDXDETXTPKKPHAGLKRGAENALKTPLYDKKANVDTPTTXKTLGKIGSTHVASTHS

SEQ ID NO: 239759 - protein, 94 aa, Zea mays
  unsure (1)..(94): unsure at all Xaa locations
  Clone ID: MRT4577_150244C.1.pep
VVSKGFSTPPVGKGASRRPPPASRPAGLSQWPGPLGRERPTVGRAGRRAEAPVASLDSXLEALSHPPPPVRPRPHXFSPKRDDQLCNTRFLRTR

SEQ ID NO: 239760 - protein, 54 aa, Zea mays
  Clone ID: MRT4577_150245C.1.pep
TRDDALAIEPSRTNQNVSHTPACGRVPPPALEAIPPPRAADVAEAVPRVSQQIK

SEQ ID NO: 239761 - protein, 128 aa, Zea mays
  Clone ID: MRT4577_150246C.1.pep
GGGEPGRGTPPQRGGRERGGAPQKPPPGGGFCSPPPKGGVPPGADLDPKWGGGLDLSIRRVAFSSPGGAFGGLPLFRSPNTRWGSVALGTGVGIGAASPEGPYLFNGAPKCSPKVSPFPFAPFDGGDK

SEQ ID NO: 239762 - protein, 119 aa, Zea mays
  Clone ID: MRT4577_150247C.1.pep
ALRSGEFISKFVSTKKKRQKTIIHNKQCRTSDPLYSMAKLLCLTDQRKCSNSQDPAFHLLVACACSYPIQPFQTVREALVLLMRKGQAPKHQQEVPTRSQLPCILIWMASGCRTADSNA

SEQ ID NO: 239763 - protein, 491 aa, Zea mays
  Clone ID: MRT4577_150248C.1.pep
MEVVSCSHSCSALHQTPASTWRLRGSALGLGLGHARPSRTRRYTVACVGTTSGASNPGGSGKVHAAQGFHVSDVDAALQGIPSMKAGEAERVMIQGLPEGPDSSPISTGFWEWKPKLTVYYERSGMKNSKAPAVLFLPGFGVGTFHFEKQLRDLGRDHRVWTMDFLGQGMSLPGEDPAPSSIASEEAFWGFGQDSQPWAEELVYSVDLWQNQVQHFIEEVIREPVYIVGNSLGGFVALYFAASSPHLVKGVTLLNATPFWGFFPNPATSPRLSKIFPWAGTFPLPSFVRKITEAVWQKISDPKSIQDILKQVYADHSTNVDKVFSRIVEITQHPAAAASFASIMFAPRGQISFQEAISRCQDQGIPISLMYGREDPWIRPIWGLKVKQQVPEAPYYEISPAGHCPHDEVPEVINYLLRGWLKNLESEGSVDLPFLEERSYAERGVSRELEFVREGSRKSVSVRLYGTKISLWSQLSSFLNTRVPKSRIVLR

SEQ ID NO: 239764 - protein, 153 aa, Zea mays
  Clone ID: MRT4577_150249C.1.pep
LDRTRGHPSPPLLSSPTYSLSLGARRREEALLPPRRLPLACRKCLPYTVARGSSPDARHRQAAAQPSTLILPRQTKDLPPTDQSAEQGNGSCLRCRRRGKWSHHHRRRRTAPAPAENRQRSKPHGNEQQRMVLKFQYGTEAWWTAPAQHVAVK

SEQ ID NO: 239765 - protein, 46 aa, Zea mays
  Clone ID: MRT4577_15024C.1.pep
SRGRLLACISSRPGQCGRADGVILAGKELEFYMKKLHRKNGKSAVT

SEQ ID NO: 239766 - protein, 40 aa, Zea mays
  Clone ID: MRT4577_150250C.1.pep
HTEAFYKIMWDACKSTLCTVYPLLGEPLVPLYLGSVTGHG

SEQ ID NO: 239767 - protein, 110 aa, Zea mays
  Clone ID: MRT4577_150251C.1.pep
NLKSGQPSLRTHRVSLRRLNTSDFSSRLTVPDQISYAASSSETGALISARPITVTMRTDEGANAAVAVYNLLGKLQLSFLYLIGVIVMGFEHIRNIVRIMKPARVAPIDS

SEQ ID NO: 239768 - protein, 41 aa, Zea mays
  unsure (1)..(41): unsure at all Xaa locations
  Clone ID: MRT4577_150252C.1.pep
RRSVCETPTCFLNHSSPIFRIIFFLVSXYXFNSHSLINPRG

SEQ ID NO: 239769 - protein, 103 aa, Zea mays
  Clone ID: MRT4577_150253C.1.pep
WTEQQLPICLNDTATEPTELDDPSNRSYRSMGTQDLIADAKSSKRNLPAQSSCLSNALKLSYPCRRTCLSSGIGHHYQPGMSSGLLEIIRAPLSTSCKAGLST

SEQ ID NO: 239770 - protein, 101 aa, Zea mays
  Clone ID: MRT4577_150254C.1.pep
LCEEQGLFLEITANIRGIGLAVLKGRMWLFDGQIWSRFLVQAFIEVPRMVLFLFLVQLVEQSILVRFSDHMAKVLYNGVSSFANLQRFASLVPVGIPVSLQ

SEQ ID NO: 239771 - protein, 437 aa, Zea mays
  Clone ID: MRT4577_150255C.1.pep
VATLAAVVGSQAVISATFSIVKQCHALGCFPRVKVVHTSRWIYGQIYIPEINWILMVLCVAVTIAFRDTTLIGNAYGIACMTVMLVTTFLMALIVIFVWQRNIIFSLVFLVFFGSIEAVYLSSSLMKVPQGGWVPLVLAFIFMSVMYIWHYGSRRKYQFDLQNKVSMRSILSLGPSLGIVRVPGVGLIYTELVTGVPSIFSHFVTNLPAFHEVLVFLCVKSVPVPYVSPDERYLVGRIGPKEYRMYRCIVRYGYKDVQRDDDNFENMLVMSIAKFIMMEAEDASSASYDIANEGRMAVITTTDASGSPLAMRDFDGLADSMSTRSSKSESLRSLQSSYEQESPSVSRRRRVRFEVPEEDGMGRQVKEELMALVEAKHAGVAYIMGHSYIKARRSSSFLKKFAIDVGYSFLRKNCRGPSVTLHIPHISLIEVGMIYYV

SEQ ID NO: 239772 - protein, 752 aa, Zea mays
  unsure (1)..(752): unsure at all Xaa locations
  Clone ID: MRT4577_150256C.1.pep
PGKRSFSGKLGFYQDEEIVFGVLSLIFWTFTLIPLLKYVIIVLSADDNGEGGPDELYSLLCRHPKQYLLXNQQAADEDKDSXRGNGYSARNGSMPWSRRFLEKHKKMRTLFLCIVLCGTSMVIGDGVLTPAISVLSSMSGLQVRATGLKHSSVVLLSCIVLVGLFALQHRGTQKVAFMFAPIVIIWLLSIGGIGLYNILHWNPNVYQALSPYYMVKFFRKTGKDGWIALGGILLSMTGSEAMFADLGHFTSASVRVAFITVIYPCLMLQYMGHAAFLSKNTFHMPTGFYDTIPEPVFWPVFVVATLAAVVGSQAVISATFSIVKQCHALGCFPRVKVVHTSRWIYGQIYIPEINWILMVLCVAVTIAFRDTTLIGNAYGIACMTVMLVTTFLMALIVIFVWQRNIIFSLVFLVFFGSIEAVYLSSSLMKVPQGGWVPLVLAFIFMSVMYIWHYGSRRKYQFDLQNKVSMRSILSLGPSLGIVRVFFFFFLLPDXCCITKIKLIYTELVTGVPSIFSHFVTNLPAFHEVLVFLCVKSVPVPYVSPDERYLVGRIGPKEYRMYRCIVRYGYKDVQRDDDNFENMLVMSIAKFIMMEAEDASSASYDIANEGRMAVITTTDASGSPLAMRDFDGLADSMSTRSSKSESLRSLQSSYEQESPSVNRRRRVRFEVPEEDGMGQQVKEELTALVEAKHAGIAYIMGHSYIKARRNSNFLKKFAIDVGYSFLRKNCRGPSVTLHIPHISLIEVGMIYYV

SEQ ID NO: 239773 - protein, 520 aa, Zea mays
  Clone ID: MRT4577_150257C.1.pep
RVSHRVRDLLPAAEHELADDVSDLLALASRQCRRAAAPELELKAGVLALIQEVEREIVPERERLEGILEDVGINDPASCSDEIETLEREIGDRVAERWTSSMIALVGLLRYAKCVLFSAATPRPVDSKVDLDDAEPPSPPPDFRCPISLELMGDPVVASSGQTYDRDSITRWFGSGKSTCPKTGQVLLNLELVPNKALKNLISRWCRENGIPMESSESGKAEPAAVVGANKAALKAARMTASFLVKKLSASFSPEATKRVVQEIRQLAKSGSDNRAFIGEAGAAGLLVPLLLSEDSALQLNAVTALLNLSILEANKKRIMHAEGAVDALCHVMGSGATWRAKENAAATVLSLAAVHAYRRRLGRNPRVVESVVRLARTGPSSTKKDALAALLCLSAERENVPRIVEAGGAEAALAAVGEAEAEAAAAVLASLAKRGGAEAIVALDGAVARLVNEMRRGTEWSRECAAAALVLLCRRAGAAAASQVVAVQGVEWAIWELLGTGTERARRKAASLGRACRRW

SEQ ID NO: 239774 - protein, 46 aa, Zea mays
  Clone ID: MRT4577_150258C.1.pep
LPSNSLGQVIVSINSGFLSYHRLWIPLCKSIKRFMDTMKNREYEPT

SEQ ID NO: 239775 - protein, 111 aa, Zea mays
  Clone ID: MRT4577_150259C.1.pep
PGGSVRPPGWFLLQWQGLAADPTGGVAVKLCAGGGFFCEPWVFRNGGPFFNPGPGMVLAPRPFSGVNVFVNQVFVSPPPGGPPPQWGLLLCFHLWLLSHACGGRAVLPCTS

SEQ ID NO: 239776 - protein, 111 aa, Zea mays
  Clone ID: MRT4577_15025C.1.pep
TKGIFFWCVGGVTTLPKLLFNNPGALGGCYNQKVIQAGGTGNTMGSGVSNEPDKDRMRKLLIVMSMIIFLTLIEHGTPLFVYFFEGCQILTGLRKIGLSIASPNIKGQRSS

SEQ ID NO: 239777 - protein, 274 aa, Zea mays
  Clone ID: MRT4577_150260C.1.pep
WDLEAAFVFANVLCIHQALRNENWQINCVLEDLALAMDSKFDKYWEKGKYNMALVIATILDPSKKMDFLDFFYEKTCQQFIDIQINMSLAKQWFTKFFGEYAKIVQKDTTVSPIVATNTSTLGSPILGKRRLDKEFSQWSQTRGRRLAKSELDAYLEEEFVRTDERFEILSWWRTNTNKYPVLSAMARDLLAIPLSTVPSESAFSAGGRILADNRSSMTPETLEYLVCCKDWLYEYPNIQVYPSWCLDPASSNTHPTRGKWGDLCVVRWASVAI

SEQ ID NO: 239778 - protein, 69 aa, Zea mays
  Clone ID: MRT4577_150261C.1.pep
YVRGRKRSYRSLRAFREDGSKCSTSGKTKRYNYSIYFGCLCWLESVLSICLLGLNKIGCPGGLRGCPLR

SEQ ID NO: 239779 - protein, 57 aa, Zea mays
  unsure (1)..(57): unsure at all Xaa locations
  Clone ID: MRT4577_150262C.1.pep
SFTFLIQPQYLPFCQRLFFNADTLLQLQQXLPFNQLAFTNPSXFYQQPIINSNPFYI

SEQ ID NO: 239780 - protein, 177 aa, Zea mays
  unsure (1)..(177): unsure at all Xaa locations
  Clone ID: MRT4577_150263C.1.pep
MFLTRTALDRGVNTFSPGGGGGQVASALAASAWGSTAIGVGCXGGVGLAVAXRATWPLLGPGRAARLMAFGEPMRWALSGLIAAAGALPXRARAETQTPGFSCGGPLAVDSSAQAICDLALGFGDCVVQAMARPWGGCLLFAGRGGXGPXLGCAGPWXALWGWGARGRSVSRCWGRP

SEQ ID NO: 239781 - protein, 131 aa, Zea mays
  unsure (1)..(131): unsure at all Xaa locations
  Clone ID: MRT4577_150264C.1.pep
LSCVCSXPXXVXASLVXFXRAXXGPLPLLXRXGFLVXXXCSFXXXSLXCXXGXRAAAXXXXGVXXXALWXPPVWXXRXAFLLXLGVXXXPXXLXXXGXAXCXXXXAAAXXGAGGGXFLPFFPAXFGXVVAV

SEQ ID NO: 239782 - protein, 61 aa, Zea mays
  unsure (1)..(61): unsure at all Xaa locations
  Clone ID: MRT4577_150266C.1.pep
SPTRPPPSDSKRVQNWVWKSRTTVLNGPLQQSGGRTXQVNRLDSSXQRAQYPSRSQVPRAL

SEQ ID NO: 239783 - protein, 97 aa, Zea mays
  Clone ID: MRT4577_150267C.1.pep
NESIRPCLTKNSVTKTLFNPRFHIHGLIYTLIKKTLDDAGAKPAAWAQIRVLRPAFYYLAMPASSSSKILIFLTACAKSFLGELGGTWNKKSNLIPV

SEQ ID NO: 239784 - protein, 45 aa, Zea mays
  Clone ID: MRT4577_150268C.1.pep
SSAGGFADQQHCQRVRVRPRGIGARPPAGPRRVPTVPSSPRPKLI

SEQ ID NO: 239785 - protein, 145 aa, Zea mays
  Clone ID: MRT4577_150269C.1.pep
YRRPSSSFFFFFFFFFFFFFFFFFFCHSEQRHGDFLAVVPNDLSKCVILLSHVLFCHGKRRSSKGYFGRRHAKTTWQRVWRELFFFLKLELLIHWGILLKIGGNIFHNMDEGNLLRPFFPTGNFSQNGYNQNHILVLDGHPFLFC

SEQ ID NO: 239786 - protein, 81 aa, Zea mays
  Clone ID: MRT4577_15026C.1.pep
SVGIVQCLCCLDFSIYHHGAVRVMGAVVALTSSFSPFDGSVSMRATTSTPSVIFPERASVAATGAHASSTPARYLWLLGGK

SEQ ID NO: 239787 - protein, 134 aa, Zea mays
  Clone ID: MRT4577_150270C.1.pep
YPGPPLEFFFFFFFFFFFFFFFFFFFFFQTPCQKFFSQSPTQARSRDQKTFFFKKRKKKGAPQPTPGPALKTYPQLNPFKNPPPFNKANNRVFLERPTNPKKFFLGFYGGKTFQLGGNWAGKGEKASPPPKKEV

SEQ ID NO: 239788 - protein, 92 aa, Zea mays
  Clone ID: MRT4577_150271C.1.pep
CDLRAFLHLVFTSNRRQERRPSGSFSTGAADSRVPPRVLVLLAAGPARGDRPDFSCAGFQGRNEVFCYIMALPTAAPILLDQNQQLNIGNRA

SEQ ID NO: 239789 - protein, 67 aa, Zea mays
  Clone ID: MRT4577_150272C.1.pep
LLQQSLCHLAIWDITSLLLCINTFVGERKKNKLKRLQIQVFEGERNKSKRTQTFQQQLTKLGTRWHD

SEQ ID NO: 239790 - protein, 130 aa, Zea mays
  unsure (1)..(130): unsure at all Xaa locations
  Clone ID: MRT4577_150273C.1.pep
TIKPSRYIHRTSGRPQRKQGPPTTEEEHPGNGGPPSKKAAGGEKAKGPPTKTGQEGGNPPRQEKKXGKQEGPKKPGGHPMGPGPPTRGGQGGPPPPHAGAKTPKTGAHGNPEALRFWLEKTGAPPPAFPP

SEQ ID NO: 239791 - protein, 109 aa, Zea mays
  Clone ID: MRT4577_150274C.1.pep
CWSDETREHRRNTAFCHSVVHTTTAQETVTGLLGPPAMHRTTTTLLCRSSYIYVSTHAHTRKNTTPPASSVDTICRPGQWWPCRCRRARRSVSPRRHPPRTRGSRQRTA

SEQ ID NO: 239792 - protein, 111 aa, Zea mays
  Clone ID: MRT4577_150275C.1.pep
RNPNKFRILRLFICLDSARSRSLHGSSVPDQGRSLDGSLGQNDRQLARNVLREQRFDVTPHFVPPARFAAQPQIRPTSPCGAGVQLSRPSPPRRVFPVSFGVTPRQTCPPP

SEQ ID NO: 239793 - protein, 108 aa, Zea mays
  unsure (1)..(108): unsure at all Xaa locations
  Clone ID: MRT4577_150276C.1.pep
APSRRRRGPPTPRRRRPAAPRPSADAAPPPPAVAAFSASSFAATAAARRCSRSAPRSRASRSPPRPPAATATQPPPRAPRSSSXSASPPPIPSKLALSAHLAGVRAGG

SEQ ID NO: 239794 - protein, 49 aa, Zea mays
  Clone ID: MRT4577_150277C.1.pep
VICRARGELSKRPTILCLPMLSSYSYMGCSLELARSLQHCFCAHPNPFN

SEQ ID NO: 239795 - protein, 257 aa, Zea mays
  Clone ID: MRT4577_150278C.1.pep
YQAISSRGHHTYMLQTAELVHESSTDAAASLLVTALNEGRDVILDGTLSWEPFVRQTIAMARSVHRQRYRMGVGYKVAPDGTTTEKYWEPVEEDGEQQAGRAGRTRKPYRVELVGIICDAYLAVVRGIRRAIISGRAVRVNSQLKSHKRFAGAFRKYCDLVDNARLYSTNTIAGAKLIGWKDKDSRLLVDVDEIGLLDRVSRINDDANCVHELYPDGHPTGGAGSVWDELMASPVRASIQRELKEAILDSEACFPSP

SEQ ID NO: 239796 - protein, 41 aa, Zea mays
  Clone ID: MRT4577_150279C.1.pep
QHMKQSPINGSSCGDDVRLSVPNLALVPCCYLYTCGLLLKS

SEQ ID NO: 239797 - protein, 41 aa, Zea mays
  Clone ID: MRT4577_15027C.1.pep
LVIGIYMVVMAHSRNRPTFQCMNELLVLCISPAFLKFHPFA

SEQ ID NO: 239798 - protein, 106 aa, Zea mays
  unsure (1)..(106): unsure at all Xaa locations
  Clone ID: MRT4577_150280C.1.pep
QCCTDIPTAKLYVPFPVLHTCLVVKPNLNLGPQQRTGSYLYLSPQHTYTAVLGLYGTNIGHTTTLASKLCLSHTQFSFNQXLMNFFYCTHTTITTSAAYPTFFLQP

SEQ ID NO: 239799 - protein, 62 aa, Zea mays
  Clone ID: MRT4577_150281C.1.pep
KITNRYTIYGLTCASVNKKKIIYIVSPYCVSMFCLGKRCDYGVFCGLLHILLWAAGPISLFV

SEQ ID NO: 239800 - protein, 45 aa, Zea mays
  Clone ID: MRT4577_150282C.1.pep
LLTSPIWVPVAVVISAMGGVALYVCALVYVSLPEATLMYRFFTVR

SEQ ID NO: 239801 - protein, 134 aa, Zea mays
  Clone ID: MRT4577_150283C.1.pep
MPPKLDPSQVVEVFVRVTGGEVGAASSLAPKIGPLGLSPKKIGEDIAKETAKDWKGLRVTVKLTVQNRQAKVSVVPSAAALVIKALKEPERDRKKVKNIEILGTCVSVGCTVDGKDPKDLQQEIDDGEVEIPSA

SEQ ID NO: 239802 - protein, 165 aa, Zea mays
  Clone ID: MRT4577_150284C.1.pep
MVPSAHKPDLSSPSKNQTMPTVNDGYGTFFGPSKPVLARRVIEEGCSSSMMKDLQNIPSSKRDVSLASKMRPGAVQNVQKQKFVSEEKRKVDTLRKNRDYSCLFSDDADTHPTTEGHPSSRASLALKSEAQDGGPVNARKGTAQPATLSLGKKAHAERKGTIAFW

SEQ ID NO: 239803 - protein, 170 aa, Zea mays
  Clone ID: MRT4577_150285C.1.pep
MPPKLDPSQVVEVFVRVTGGEVGAASSLAPKIGPLGLSPKKIGEDIAKETAKDWKGLRVTVKLTVQNRQAKVSVVPSAAALVIKALKEPERDRKKVKNIKHSGNISLDDVIEIARTMRPRSMAKEMSGCVKEILGTCVSVGCTVDGKDPKDLQQEIDDGEDWSLGGLSVY

SEQ ID NO: 239804 - protein, 166 aa, Zea mays
  Clone ID: MRT4577_150286C.1.pep
MPPKLDPSQVVEVFVRVTGGEVGAASSLAPKIGPLGLSPKKIGEDIAKETAKDWKGLRVTVKLTVQNRQAKVSVVPSAAALVIKALKEPERDRKKVKNIKHSGNISLDDVIEIARTMRPRSMAKEMSGCVKEILGTCVSVGCTVDGKDPKDLQQEIDDGEVEIPSA

SEQ ID NO: 239805 - protein, 586 aa, Zea mays
  unsure (1)..(586): unsure at all Xaa locations
  Clone ID: MRT4577_150287C.1.pep
MKYMKLGSKPDTFYTEEAVRSVVSDIPADLIIHVNNTKYQLHKVLFTCSSPXLKCGLLQRLCSDTDDGDEEPVPVALHDIPGGEQAFELCAKFCYGISISISAGNLVPAMLAARFLRMTEAVAKGNLVAKLETFFDSCVLQGWKDSVAALQAAWRISGWNESRIVQPCIDSIVEKILLPPSKVTWSYTYTRPGYNSTRKPHQSVPRDWWTEDISDLDIEVFRSVISTVRASRLLPPPLIGEALHVYACKHLVDPLHVASDAGLTANGVLHQPPQSSDDGEEKLVAMQRRVLESIVTMVPGEPGSVTGRFLLRLLRVANYVSASSSTRAQLIRQAGSQLDEARAADLLIPLPSDPHAYDVGTAEAVLEHFLAQFQRPAPTDERRRMSAAMEKVARIFDEYLRTIALDRSFPVGKFVDLVECLPDIARSDHDGLYYAIDIYLKEHPELSKADKKRLCRLIDCRKLSPDVRAQAIANDRMPLRTIVQLLFVEQERTIGAAAGSHAASGGAADRASVGVISQLAAGTKDEEPASSAGHKSDVHRPRRDHARVADGASAMARSLSASTKTPPAARKERTPEETGSRMRNKQ

SEQ ID NO: 239806 - protein, 166 aa, Zea mays
  Clone ID: MRT4577_150288C.1.pep
MPPKLDPSQVVEVFVRVTGGEVGAASSLAPKIGPLGLSPKKIGEDIAKETAKDWKGLRVTVKLTVQNRQAKVSVVPSAAALVIKALKEPERDRKKVKNIKHSGNISLDDVIEIARTMRHRSMAKELAGTVKEILGTCVSVGCTVDGKDPKDLQQEIDDGEVEIPSA

SEQ ID NO: 239807 - protein, 76 aa, Zea mays
  Clone ID: MRT4577_150289C.1.pep
STRPPTRPDAHHRPRPHRSTELVLLARGGKVLIFLPELTLAFPTVWVATANFFTSWPTSTPSFAFSSVRRTKLSRV

SEQ ID NO: 239808 - protein, 410 aa, Zea mays
  Clone ID: MRT4577_15028C.1.pep
MEDEISSIIAYALAISDERHHLIDLKFENGMDYSKGEYAKAIEKSFSFLSESSFSSSPWSSTSSEASLSSLSSFSSDDFSGYDSSSLLSPMHPEMTVNGKVTLKDKYSVTVVYDNQFFALRKKCCPSELAYITSLSRCKKWNAQGGKSKAYFAKTTDDRFIIKQINKTEFDSFIKFAPDYFRHVYHSLDTGSQTCLAKILGIYQVKQIRHGKEVKIDLMVMENLLFGHNISRIYDLKGVTFSRRVTDSNDHDTVYLDQNYVEDMGFSPIYIGGRTKHLLQRAIWNDTSFLTSVNVMDYSLLVGVDKEKHELVFGIIDYLRQYTWDKQLETWVKTSLVVPKNVSPTVISPKEYKKRFRKFMAKYFLSVPDTWSSDNSSNPCKSFGQSNHKLAEVHNGDSLLQHPNEAEGCV

SEQ ID NO: 239809 - protein, 166 aa, Zea mays
  Clone ID: MRT4577_150290C.1.pep
MPPKLDPSQVVEVFVRVTGGEVGAASSLAPKIGPLGLSPKKIGEDIAKETAKDWKGLRVTVKLTVQNRQAKVSVVPSAAALVIKALKEPERDRKKVKNIKHSGNISLDDVIEIARTMRPRSMAKEMSGSVKEILGTCVSVGCTVDGKDPKDLQQEIDDGEVEIPSA

SEQ ID NO: 239810 - protein, 167 aa, Zea mays
  unsure (1)..(167): unsure at all Xaa locations
  Clone ID: MRT4577_150291C.1.pep
MPPKLDPSQVVEVFVRVTGGEVGAASSLAPKIGPLGLSPKKIGEDIAKETAKDWKGLRVTVKLTVQNRQAKVSVVPSAAALVIKALKEPERDRKKVKNIKHSGNISXDDVIEIARTMRPRSMAKEMSGCVKEILGTCVSVGCTVDGKDPKDLQQEIDDXXEVEIPSA

SEQ ID NO: 239811 - protein, 166 aa, Zea mays; identical to SEQ ID NO: 239806
  Clone ID: MRT4577_150292C.1.pep

SEQ ID NO: 239812 - protein, 166 aa, Zea mays
  Clone ID: MRT4577_150293C.1.pep
MPPKLDPSQVVEVYVRVTGGEVGAASSLAPKIGPLGLSPKKIGEDIAKETAKDWKGLRVTVKLTVQNRQAKVSVVPSAAALVIKSLKEPERDRKKVKNIKHNGNISLDDVIEIAKIMKPRSMAKEMAGTVKEILGTCVSVGCTVDGKDPKDLQTEIDDGEVEIPSA

SEQ ID NO: 239813 - protein, 104 aa, Zea mays
  Clone ID: MRT4577_150294C.1.pep
SIRLCCGRRKMIGMEYLLSEVMESHLFLIRKQKRESLEKSSPMLAYYILDGYIYQAPQLCNVFASRIVYPLLFFLMFCSGILGCTIFLIGNAVKMVYTHFLLLD

SEQ ID NO: 239814 - protein, 166 aa, Zea mays; identical to SEQ ID NO: 239809
  Clone ID: MRT4577_150295C.1.pep

SEQ ID NO: 239815 - protein, 89 aa, Zea mays
  Clone ID: MRT4577_150296C.1.pep
EIVANVAPRLSHCLEPAVWTRAFARKHRSSTRNRRAHGQSECQEFLTGVNHRHRIRLAPRLCISTPPSLFCQELWRKSLRILSVEIAPT

SEQ ID NO: 239816 - protein, 278 aa, Zea mays
  unsure (1)..(278): unsure at all Xaa locations
  Clone ID: MRT4577_150297C.1.pep
SRPAGFTQPNGSFSARSASPKHPARMTAPASSSRLRAQPFLLLLRRPARTPLCASVAPAPFASLARITLGRIPWSSCASLVSASIRTASCSEFLHGRTPRSAFLPVSGFRLADVSLCFLHRALTQPGFQHHGTPCVVPLPAAVARLRCCVRFGGHVPSSVVFSSRALIVLCARSRAQSCLRILRPRLIHIIAVELPSHRDATLAALHDIAPLALSCGHPALYLSVTRSCRILXLRMPQLCRRHVHALPFHGFMFMAGKRIPKQCGKQVPDRCPKCSAK

SEQ ID NO: 239817 - protein, 50 aa, Zea mays
  Clone ID: MRT4577_150298C.1.pep
TLREAEWGVRRTRKNRRGERVTWLGAFRWVGMFFDLTDHLSYFYLFHLSH

SEQ ID NO: 239818 - protein, 151 aa, Zea mays
  Clone ID: MRT4577_150299C.1.pep
GYGPPASRGSPHPRGQPPPASSTGAASSSRSPAPRQKTSPPPPPPPQPRASRPPLLPPADPGSGRYYWPPFGLDQCTGTEWSRHQQSTNQNLPATRTALPPAALGRSKAPNTRDGNGERGIDDGRQSSPNLVKRMANQGARICCLRACGSR

SEQ ID NO: 239819 - protein, 310 aa, Zea mays
  Clone ID: MRT4577_15029C.1.pep
MLERHRVHRDADGDLPAAVTAPLLAHPPSPAEPWPANFGSSEITDEEIDAASAACCRICLESESEPGDVLISPCMCKGTQQFVHRSCLDHWRSVKEGTAFSHCTTCKARFHLRVEFLEDDICRRMKFRMFVARDVIIIFLLIQATIAAIGGMAYFLDKDGNFRNKFSDDWERFLSKHPVPFYYCVGVVVFFVMVGFFGLILHLSSYNNNDPCLVGSRDCCFGCGLVDLPASMEACFAFAVIFVIMLAILGVAYGFLAATVAIQRIWQRHYHILTKKELTKEYVVEDLPGGYTPPKMDPEHEQRLKVLQLM

SEQ ID NO: 239820 - protein, 111 aa, Zea mays
  Clone ID: MRT4577_1502C.1.pep
ATPSDSIKQPATHICAGLHYICTQFSVYIHTRIREVSSFPNVLFPSSEYLNHTGNGCADDGPSHPGQNDLHFKAVDDSKSDGAANMLLNAAATSGHLLPVVTHEPRRDDPQ

SEQ ID NO: 239821 - protein, 287 aa, Zea mays
  Clone ID: MRT4577_150300C.1.pep
MRAKVIEFEKFTLVVLVGCITWRRCGVSTCGEAMPRPSVAPSLQLQARPCPRWPRRKHCPPSSVASRRVACSASAADADVVDLFDAAKLTVDKFVTSGMVVGLGSGPASALAIQYLGTRLRRGSLAGITAVTSSVLSASEADKAGIRANSYQEGTQIDFAFTDAEAIEEGTLAAVIGRRKTESGEPSFMAEKAMAKSAHKLAFITGNDKYVTTGVEGSIPVLIKSVWRRPSFGTAGPLGGDHPLVTKEGHHVLDVIFTTPIQDLGQVAEKLDKVDGVVDHGIICSNQ

SEQ ID NO: 239822 - protein, 309 aa, Zea mays
  unsure (1)..(309): unsure at all Xaa locations
  Clone ID: MRT4577_150301C.1.pep
MEAMPRPSVAPSLQLQLRPCPRWPRRKHCPPSSVPSRRVACSASAADADVVDLFDAAKLTVDKFVTSGMVVGLGSGPASALAIQYLGTRLRRGSLTGITAVTSXFLGLTSXSVLSASEADKAGIRANSYQEGTQIDFAFTDAEAIEEGTLAAVIGRRKTESGEPSFMAEKAMAKSAHKLAFITGNDKYVTTGVEGSIPVLIKSXFQGNWIDTAEEIDDLFLGDAEVWRRPSFGTAGPLGGDHPLVTKEGHHVLDVIFTTPIQDLGQVAEKLDKVDGVVDHGIICSNQPYAVIASKGEVQVLDEKSSVIQ

SEQ ID NO: 239823 - protein, 84 aa, Zea mays
  unsure (1)..(84): unsure at all Xaa locations
  Clone ID: MRT4577_150302C.1.pep
TLTRKTITLEVESSDIIDNVKDKILDKVGIPPYHQRVNFYVKQLVDGRTLADYNIHXESTLHLVLRLRGVLHILLKTLSCMIIT

SEQ ID NO: 239824 - protein, 497 aa, Zea mays
  Clone ID: MRT4577_150303C.1.pep
MPIPPASLPPKPPKRSSKKKGKEKLKAAHHQHTESAPLVTLVTGGKAGKLVTAEMPRVDLLRVLAEIDERFLKASESAGEVSKALEANRMHYHSNFADNRGHIDHSARVMKIITWNRSFKGMQNGDDGKDDFENDELETLATVVDKILAWEKKLYDEVKAGEIMKLEYQRKVALLNRQKKHNAAIEVLEKTKAAVTHLHTRYIVDMQSMDSTVSEIQYLRDNQLYPRLLDLTDRMAKMWEDMKIHHANQLKIVLNLKSVDIPDSNIETSDYHHSHTRQLRDIVDKWITNFTDFMNCQKEYINALYGWLKLNLIPIESSLKEKVASPPRMQQPPIKAFLYAWHEHLAKLPDDLAKTAIVTFRAVLDTILGVQDEELKQKEICEQTRREYIRKARAFEDWCHKHPQPRAIDVDPDSGEGTGHKDVVTEKRFAVESLKSKLDDEIESHNKLSKQVREKSLSILKAHLPELFRALTDFSDASFEMYSKLRLMSLMQDQGNN

SEQ ID NO: 239825 - protein, 52 aa, Zea mays
  Clone ID: MRT4577_150304C.1.pep
LQSTHSIPLPTRRIYANAHAPTRHIQMMLRVFPSPAVVAPTQLFGAPVTPAS

SEQ ID NO: 239826 - protein, 91 aa, Zea mays
  unsure (1)..(91): unsure at all Xaa locations
  Clone ID: MRT4577_150305C.1.pep
SNPGVVGFLKKISGGCDIQKVVATQPIAPLYKATLHHGGMQLLHLFXXXXKSFGGGGGTTIXPXXLYIXXKNKNIXPNLFXSTIXPLXXSK

SEQ ID NO: 239827 - protein, 89 aa, Zea mays
  Clone ID: MRT4577_150306C.1.pep
KKPRGGTFCCQQRGRAPHSFIVKKNQGSISIISGQPHGYYFFSKTPTGPKNFLVKTRGAPNLLRGSPGSPPPKRPTDLFWEGKLVRCPV

SEQ ID NO: 239828 - protein, 68 aa, Zea mays
  Clone ID: MRT4577_150307C.1.pep
PRVRKKKKLIKKKTKNIKRVRFYKHIHTTKIKIIYSHSCSILCPSFYNVFTLKSFPLPTLIGFPSIPL

SEQ ID NO: 239829 - protein, 96 aa, Zea mays
  Clone ID: MRT4577_150308C.1.pep
MDGSAFPSLSPELRDALAKVAVFVLVQGLVYLILRSSSDVFSKDGRLRSLSFRPMRSMSVRRVLAPLSDVPVGTDDASPSLSPAATSSHRKAARED

SEQ ID NO: 239830 - protein, 61 aa, Zea mays
  Clone ID: MRT4577_150309C.1.pep
SPPPCEGHPSFFKKKTLGLFLWVTSQRPPMFPLKFSPPPPKKPKPPPPSSKFNPGQVFFSP

SEQ ID NO: 239831 - protein, 75 aa, Zea mays
  Clone ID: MRT4577_15030C.1.pep
QLTAELNEARRGITVAAPSKHAVTSSVVISEYHSYSRLLLPDALAERADDYLRISTFARAFCSVMKDLKYADSHE

SEQ ID NO: 239832 - protein, 216 aa, Zea mays
  unsure (1)..(216): unsure at all Xaa locations
  Clone ID: MRT4577_150310C.1.pep
STQRPAASTSLXYQTKQLEQTKTSLEEAKLEXTLLLQQASKSLASARRGGVLEQRSVRDLMFGGADEEIMVLHAELRAAVQGEERSRKALDDISAALSDVTTEARLVKAWLSEAQVELEATNAEAIRLRAALRAASDERDCYRLEVDECAAAWGDKERVLLDCVRVSEGDASRARQENTRLVESKRVVRDENTCLRDILKXVVARASGARDSLELA

SEQ ID NO: 239833 - protein, 55 aa, Zea mays
  unsure (1)..(55): unsure at all Xaa locations
  Clone ID: MRT4577_150311C.1.pep
XPPRGGARSDRRCRPTAGAQDFFGPFAVDEHYQELDLIEQTSICSVLQATILWVL

SEQ ID NO: 239834 - protein, 79 aa, Zea mays
  unsure (1)..(79): unsure at all Xaa locations
  Clone ID: MRT4577_150312C.1.pep
PPPPPLPPPPPPPPPPPPPPPPPPPSPXSHFPXPXPPPPXPXHXXKKKNKPPPPNXSEIKSQNSFVMLVSYSYTANVLT

SEQ ID NO: 239835 - protein, 78 aa, Zea mays
  Clone ID: MRT4577_150313C.1.pep
SLILYYYVHEIGGNYAHAFPLNPSMYLDSGILKCSQYSIDGGGEAWNFIDPASLLNLHTFCIFASCNKFSCFFLKKKK

SEQ ID NO: 239836 - protein, 115 aa, Zea mays
  Clone ID: MRT4577_150314C.1.pep
PKNPKKKHNKKINTKFLKYIKKNSTKKKTKHKKKYNTKKKQYLKNNHKKKIKYQNAITKKLKDTNHHLVTKNNDYPNTQGGKGIKKKLNLTIGQPFLSTPRGKIFSKLKFKKKWN

SEQ ID NO: 239837 - protein, 145 aa, Zea mays
  Clone ID: MRT4577_150315C.1.pep
MADHRRDKEKACNRSPQARAEAVPVLVSVVRSGPLPPPPLSVASRPSAVGYDDVNAEEPEMMNMMSIPVELDSTEVPNELVVSTKTGLLFERQLIERYIEMAIVLYWVYADGYQLILHRWLLERYRLHTLDEEEDNVVVTPGFRR

SEQ ID NO: 239838 - protein, 54 aa, Zea mays
  Clone ID: MRT4577_150316C.1.pep
MGSATVLEVILAIILPPVGVFLRYKLGVEFWICLLLTILGYIPGIIYAVYVLVV

SEQ ID NO: 239839 - protein, 64 aa, Zea mays
  Clone ID: MRT4577_150317C.1.pep
DSSDLSTSLPRSLAFKKPVAEVLHARTRSRFQRRCRLVSRSLHRMRAWAGMVDPLDHYWPYPWY

SEQ ID NO: 239840 - protein, 98 aa, Zea mays
  Clone ID: MRT4577_150318C.1.pep
SRLRDVRGGTSIDRAFAVEKCQTQRLLISTLPLSITIEQLERDHCMLTNRVRELIYLIQTDLKAPNQGKAPQFLPLKARTGSNYGRPLLAGICGRASA

SEQ ID NO: 239841 - protein, 74 aa, Zea mays
  Clone ID: MRT4577_150319C.1.pep
LERGAIPDAFRRVEDETHPASLPLQMALLYTVLATRPDCKSRGAITNTGYHIFVDDRGRLQIRPLLLIQSIPSG

SEQ ID NO: 239842 - protein, 195 aa, Zea mays
  Clone ID: MRT4577_15031C.1.pep
MTPISPRGWDWVGSVMLERHRVHRDADGDLPAAVTAPLLAHPPSPAEPWPANFGSSEITDEEIDAASAACCRICLESESEPGDVLISPCMCKGTQQFVHRSCLDHWRSVKEGTAFSHCTTCKARFHLRVEFLEDDICRRMKFRMFVARDVIIIFLLIQAVRSPSPLITLYCSLLFMVISSLVIDRGQLAYIISLG

SEQ ID NO: 239843 - protein, 134 aa, Zea mays
  unsure (1)..(134): unsure at all Xaa locations
  Clone ID: MRT4577_150320C.1.pep
PFEGFPSGPQVDGYFPNFPLNGGSPQKXXXFXFFFFFXFFFFFXFFFFFXXXXXFFFFFFFLKRKKILLYLLIDESSGYIKGKFGSIPLKDHHFGSIPLLSHLHVGPHELMTCGVHGIYLKFGSFNGIDPIVPI

SEQ ID NO: 239844 - protein, 96 aa, Zea mays
  Clone ID: MRT4577_150321C.1.pep
SLDSCFSKSKNRRTLAKERRRTLAGSWAAVVFLFAEEIYRARPSSSSLLCSPATMARCCPTTAPRGHALLAPSASFAEMWEFCSCWSRIVPSKHGT

SEQ ID NO: 239845 - protein, 116 aa, Zea mays
  Clone ID: MRT4577_150322C.1.pep
MSPAWRARPVFVQSFAPTSLVRAAGLTDSPLVFLVDDVTVRTEDTNQPYDDITSGEHLDYMNRYVVGIGPWKDTVVPPTKDNRLATPSDLVAMAHARGLQVHPYTYRNENKFLHFD

SEQ ID NO: 239846 - protein, 93 aa, Zea mays
  Clone ID: MRT4577_150323C.1.pep
MLEDVPRIFEADFQCTLEMSTKNFEDYSEHRLKFFSLLRANGTHCFRSLIQLLCLLLFYCVFLSFCAIVLFLCVYYRLFLVYFREFLITFWLL

SEQ ID NO: 239847 - protein, 88 aa, Zea mays
  Clone ID: MRT4577_150324C.1.pep
GAHFPRHMLLSSATSLRAEIWICVSLPPSLVEWRRVAALLPSHSSPSPVFSSCFKQSAVHEYLWSYHTTRHRPRYRYCPPQWSLTATE

SEQ ID NO: 239848 - protein, 127 aa, Zea mays
  unsure (1)..(127): unsure at all Xaa locations
  Clone ID: MRT4577_150325C.1.pep
MALSGMRGLSVFISDVRNCHNKEQERLRVDKELGNIRTRVKNEKGLSPYEKKKYVWKMLYIDMLGYDGDCXHMETGWGMSAPKDAEKQGGYSWTSXLXLNEDDDXLKXMGMNAXRNDMMGRNETLQG

SEQ ID NO: 239849 - protein, 58 aa, Zea mays
  Clone ID: MRT4577_150326C.1.pep
TPHIVHALKNKPNKQKYISHTHMYTRTYVHTLRCKRITAYTTTRTYIRTERFLFSSTT

SEQ ID NO: 239850 - protein, 119 aa, Zea mays
  Clone ID: MRT4577_150327C.1.pep
MARLAVAIAVVAAAAVVVLAATTSEAAISCGQVSSAIAPCLSYARGQGSAPSAGCCSGVRSLNSAARTTADRRAACNCLKNAARGISGLNAGNAASIPSKCGVSVPYTISTSTDCSRVS

SEQ ID NO: 239851 - protein, 298 aa, Zea mays
  unsure (1)..(298): unsure at all Xaa locations
  Clone ID: MRT4577_150328C.1.pep
DTPFYSDTWCFXLCLEINHHFVQVVHTRRCSFAPPQSTAAADTNPTEFILESLEQSDPQSLIQYLAYQDLCVVSECNLEPWRRAAFFEESGETYKRIVTTCLKPLEEFTSKIAESLEDFSSDKPELMLQQSKLFSAFDDSQICAWCARTLAGLTARSRQEDRYGVAQLTGCNAAVMTTLLSALVAIETCLGKKTNPQPVRSLGPENIRWTNLSTGRKGNGVAIASTQKSGLHKKAYIMADVLRTSVYHILSAFIDDLQANAKPSSLEKNWISEGRKPVYGSQAVLVQKLILFIEYRAV

SEQ ID NO: 239852 - protein, 38 aa, Zea mays
  Clone ID: MRT4577_150329C.1.pep
KVNDEWLERECKGKVGIFPKVFVEDCATTDLESTRREV

SEQ ID NO: 239853 - protein, 86 aa, Zea mays
  unsure (1)..(86): unsure at all Xaa locations
  Clone ID: MRT4577_15032C.1.pep
LLXSFAFXFLFCPCLSSVSFFXLLFLSPVLVXRLFRPLLSSSSLLWAFLAPVLPVLFXALSPVLFLAXRLPSSGAPPPRXFVFAAA

SEQ ID NO: 239854 - protein, 291 aa, Zea mays
  Clone ID: MRT4577_150330C.1.pep
MNSRRSRSVKLVSARANGDGALEVDVPEEEGDARMSSSAANTVYCCIARGRSVIYRYSSKGGDPQAEATAALCLDRSPPHHRHYVHTSGRRSYGYLTADGHTFFAIIDPSVGSAGALQFLERVRDAFRSSAGVGGRPHESLVPAVQRLVASLEKMPHAAFVLDGAGAGAGDGDGDGCTSSSSKAPLLGKSGSRKEKRRSRDKLSSAAAGAGGCEDEHHGTRAVRIDVMPAEDVGGMSLERSGSQSKLRRQQSSRSLWMRHVKVIVAVDAVVCLVLLAAWLAVCKGFQCVSG

SEQ ID NO: 239855 - protein, 51 aa, Zea mays
  Clone ID: MRT4577_150331C.1.pep
FLLQYWICEFFLAISEGAFIHNFSVVVEGDSSSNLKVDVLFGVYGPFSILS

SEQ ID NO: 239856 - protein, 88 aa, Zea mays
  Clone ID: MRT4577_150332C.1.pep
GENQRFFSLENVIKKRHSGYFITPHNKAEMGPLGRRPPQAPQCYGDLQKNALSVVFVLRNKKNIFFFFFFFKIFLFIFFFFFFFFFFL

SEQ ID NO: 239857 - protein, 83 aa, Zea mays
  unsure (1)..(83): unsure at all Xaa locations
  Clone ID: MRT4577_150333C.1.pep
MAFQLSDVGPRFHGLWCYAAPRSAVAELAPVRLGMKRSSSQGIRWDYIGCGTNMIMVTTTTLMLFAXTVXLAPSRKRTAKAGL

SEQ ID NO: 239858 - protein, 91 aa, Zea mays
  Clone ID: MRT4577_150334C.1.pep
HTTGDAWTKPLMDRDGCRLHNLKGTGPYCQADTGLHADATGQGRIAKPDLYCYGPAICCKVQYMAPTLRTQTAWAMPGNYEPGDADDAGQG

SEQ ID NO: 239859 - protein, 95 aa, Zea mays
  unsure (1)..(95): unsure at all Xaa locations
  Clone ID: MRT4577_150335C.1.pep
VLVLAVLKATPVICPPRSIFRRMQRIFLRNPHISIITIFIWVLSEGHFRTPNLHPICSTWYVLVAVEDTGEGLSTWRLAAPAPAAHQPXRARREP

SEQ ID NO: 239860 - protein, 91 aa, Zea mays
  unsure (1)..(91): unsure at all Xaa locations
  Clone ID: MRT4577_150336C.1.pep
VRLAVDNASWTDDKQLQDMYLICKSVAXDIDAPGSGHXEKLKAFELALATADATFXNLDSSEISLTDVSHYFDSDPIKLVHWLLKDGRAAS

SEQ ID NO: 239861 - protein, 350 aa, Zea mays
  Clone ID: MRT4577_150337C.1.pep
MSERGRLAGRLIDNRSRGYHVVPLVEDPRGHPEVLVDGDRRGYSDIRGVQQRRGYPDTHLLEEPRGYPGVRVVDHRGYPGSRGVDERRAYPELHQGSRMRAAPPPYPAAFEDELELQEVELRRLSAHNRALVEERELLSREIQAGKDEVRHLNVIIADINTEKEAYISKLMDKRRKLEAELGASEHLCDEVRHLRGEIDKLVTARKELSAEAASLVEELNREQSVKQQLPVLKTEIDGLQQELVHVRTACGLEQKGNLELLEQRKAMEKNMLSMAQEIEQMRGELANFEVRPRGPGGAYGMQIGSSEVTFTKNPYEDGYNAYVGVPEKDPLHPPEYASWGTYDRSRLQYR

SEQ ID NO: 239862 - protein, 72 aa, Zea mays
  Clone ID: MRT4577_150338C.1.pep
LHRNASRHVGPVYQLSMTTPATCKGSSYVRVQLLLEHPLLQGVGASVVLVNDRQLAMVVVLIAWVRAGPSVP

SEQ ID NO: 239863 - protein, 82 aa, Zea mays
  Clone ID: MRT4577_150339C.1.pep
TGLLLDDGFRVLHMTISSKFDYHPNSSDNSGEEFLTIRSSSRATQNIVVTGSARASSQRFRLADRISDASSICEKTRYLAVA

SEQ ID NO: 239864 - protein, 64 aa, Zea mays
  Clone ID: MRT4577_15033C.1.pep
ALIGTLERATRLAHAVNDLIPFGHSACQSFRAIFTRLAAGGKYSRRLEAIITKTFLCTDPPQPI

SEQ ID NO: 239865 - protein, 72 aa, Zea mays
  unsure (1)..(72): unsure at all Xaa locations
  Clone ID: MRT4577_150340C.1.pep
MDTNQSPPCKEPNRDQDRXKAPFSNIIQDMXQEICRDLPEDVIETVIARVTVAALTGFRTVCRMWCSHMGSD

SEQ ID NO: 239866 - protein, 61 aa, Zea mays
  Clone ID: MRT4577_150341C.1.pep
ESPQRARWTRHAQSSVNKSPTLTYTLALMTPGYQGIYLYGTNRILGEDHCQHGLFSTWAIK

SEQ ID NO: 239867 - protein, 90 aa, Zea mays
  Clone ID: MRT4577_150342C.1.pep
RHVHVGVSVRSAWRRAIGGQRARTVPILGLRRVLHLRRLVTGASVEGKRSGGAVRETDVQNLEGLQLPDGPPELPHRPVPHLHLVGELPL

SEQ ID NO: 239868 - protein, 155 aa, Zea mays
  unsure (1)..(155): unsure at all Xaa locations
  Clone ID: MRT4577_150343C.1.pep
LSLTPGERGILRISTGRRGSDADPHEFVLANSVYLSSSGYMDVTECVDIVNTATPKDVPPDEPDWDYIXIASATEKIYMKSGIRRMPAALTLYXGRCRNRXMPPQFCKISEGIMRNVLQQXLQKMSIVXDVNPEDERGITSHLRRGLPHFGWKQC

SEQ ID NO: 239869 - protein, 258 aa, Zea mays
  unsure (1)..(258): unsure at all Xaa locations
  Clone ID: MRT4577_150344C.1.pep
GYLEAGRAGAPSAATMCTLEQRGRVFVLTLTGDGEHRLGHALISSLRSAVASAAAGAAKAGPGAALVTVGEGRFFSNGLDIGWAGTXPAARLGELVDALRPLVADLLALPMPTVAAVTGHASAGGCLLALCHDYRIMRGDRGVLYMSEVDIGLPLPPYFMAVLRAKITAANALRDVVLRGKKVRAAEGKDMGIVDAVYPSALETADQAFKFAEQLAARKWDGGVYASIRMSMYPEACRSVGIVEESDEEKRKHFASKL

SEQ ID NO: 239870 - protein, 68 aa, Zea mays
  Clone ID: MRT4577_150345C.1.pep
VGWFSGMLCWWRGSVLMQGVSIFGVGGKRGEIFGGVARPPGLVLQAPVGVCVGVGERTVVGKVGLEPN

SEQ ID NO: 239871 - protein, 121 aa, Zea mays
  Clone ID: MRT4577_150346C.1.pep
AGGKSGGARPAVRALRKEAATGRVQIRARGPGGSRVVHAEAGAARGRDARRPESAARKVREEDREYYRTHKEAAATAVSTLNPGTLERRWRVPMAEHADEQGKMRFLGRREREIGVAGRRR

SEQ ID NO: 239872 - protein, 68 aa, Zea mays
  Clone ID: MRT4577_150348C.1.pep
LGIWDQAVGLNPSFRTYGIAVKKKEGGGPQQNKNFLVLRLGPRNNVLHENACNHHLRGGIGNPTISWP

SEQ ID NO: 239873 - protein, 71 aa, Zea mays
  Clone ID: MRT4577_150349C.1.pep
MEATGAVGRFGKQPGGKAAERVLPFAPSGKKPPLVGSKYELADPAGAASFTQKREPRESVTPGGPSPRRAR

SEQ ID NO: 239874 - protein, 48 aa, Zea mays
  Clone ID: MRT4577_15034C.1.pep
APCAVALPSRETTATRAAYVPVARASGPRRGYSSPIVFLLYKLHCPGR

SEQ ID NO: 239875 - protein, 73 aa, Zea mays
  unsure (1)..(73): unsure at all Xaa locations
  Clone ID: MRT4577_150350C.1.pep
TLFQNTYSHXFYSPPPHHTEAVSFIHTSPPPTHTLNHPPTTIPPHQLSPHHSHPTLNPHPHQSPSHHRKQTHL

SEQ ID NO: 239876 - protein, 70 aa, Zea mays
  Clone ID: MRT4577_150351C.1.pep
ANRKKRKNSRHGSPPLSHFVAETLALRRGAEHQAPASPKKKPGRDKLLVLTQLLCHGSGDRWAVCLTVRR

SEQ ID NO: 239877 - protein, 57 aa, Zea mays
  Clone ID: MRT4577_150352C.1.pep
SSGRAGRSSFFFFFFFESRNVLSYFWDAANIFQKTSLLNYPSCALSTRAPPMMGGGG

SEQ ID NO: 239878 - protein, 29 aa, Zea mays
  Clone ID: MRT4577_150353C.1.pep
DLASNCVNDSTCWYSVYVKIESCLLAYAW

SEQ ID NO: 239879 - protein, 59 aa, Zea mays
  Clone ID: MRT4577_150354C.1.pep
PTGPPGTCFTTLCLGVFEASCPGPCIVKTKWDICMVSSAPPPPRCVVSRLKKKCGIGHL

SEQ ID NO: 239880 - protein, 80 aa, Zea mays
  Clone ID: MRT4577_150355C.1.pep
QGDGFRAPRTDGSDHHRLCHARTITRTAVTTSATTATASSTARTSSARTREVRTSRGTYDIISSPPPLEWPIHVLQVHKE

SEQ ID NO: 239881 - protein, 106 aa, Zea mays
  Clone ID: MRT4577_150356C.1.pep
KKITGAAGSRVYHIMTSKITGHTTTTNIMDTSTTISIICRIIMHTRHHHMSKIKCGACHHIHMGCRSTPLGGHPKLLYLIDWHPQCMTDWVHLNPVTSRVDAWVGP

SEQ ID NO: 239882 - protein, 95 aa, Zea mays
  unsure (1)..(95): unsure at all Xaa locations
  Clone ID: MRT4577_150357C.1.pep
GRTRSFKRPCLLHTLRADRXRGITMDIALSKFETTRYYCTVIDAPGHRYFMKNMITGTWNANCAGLIIDSTTGGSKGDIYNDGQTREHALVAVTL

SEQ ID NO: 239883 - protein, 166 aa, Zea mays
  unsure (1)..(166): unsure at all Xaa locations
  Clone ID: MRT4577_150358C.1.pep
MTESSAWPLPLGSISNDQEDTMFYXLQMKGDYYXYLSLYKTGXQRKDAANYTISTXKDTNYINYCDLHATYCIRLQLKLYLPQVYYEKXTAXDYAWSFKQHALYYCMWVLHTLAEECYMDTTLMMNILIHHWMLWTIDISEAPAEDIRWAPNHHCCEGKEDLSYMP

SEQ ID NO: 239884 - protein, 106 aa, Zea mays
  unsure (1)..(106): unsure at all Xaa locations
  Clone ID: MRT4577_150359C.1.pep
IRLETGTSGVCLGTRAKVLLTEPLXTPKTLQGQSVRPMCDTINVAGYCASEQAVLPLYAGGRISRCTADIVHGIIYIAPFCEGAGQHISPKRLEIGGVDLTNLFCT

SEQ ID NO: 239885 - protein, 63 aa, Zea mays
  Clone ID: MRT4577_15035C.1.pep
SVPGQFRSRVKAFRQVCLKLKPKTRPTIFLPNKVCATPEVAHTKFFLLIGDPAHARFFKEGGT

SEQ ID NO: 239886 - protein, 308 aa, Zea mays
  Clone ID: MRT4577_150360C.1.pep
MAIISDFKDDEAPEQQLAAGHGVEVALVAALERSGGALPFLQAAMDVAHRRSGLFRDPSAVSKVTAMAAAVRAQIEAEERVTREAEAKRKAEEDERKAEAEAQRAAKEAVMATAEEKPESTVEKDSMEVDKKEEANVRQPNAGNGLDLEKYSWTQQLPEVNITIPVPQGTKSRFVVFDLKKNHLKVGLKGQPPIIDGELYKPVKVDDCFWSIEDGRTLSILLTKHDQMEWWKSVIKGDPEVDTQKVEPENSKLSDLDPETRQTVEKMMFDQRQKQMGLPTSDEMQKQEILKKFMSEHPEMDFSRAKLD

SEQ ID NO: 239887 - protein, 74 aa, Zea mays
  Clone ID: MRT4577_150361C.1.pep
PQVSVVSSRGICPPPMGKSNPPFLFYLKSGKTAPFIGLGIGKNPSVWGRQIFFKLPFGIGQTPFFFEWSPPLGS

SEQ ID NO: 239888 - protein, 138 aa, Zea mays
  unsure (1)..(138): unsure at all Xaa locations
  Clone ID: MRT4577_150362C.1.pep
CATGAYPPCPRPGWGSPXAPXRWRPXRPXPXTTXPRTXLAXTAARDRRGTXPFLGSGCSSSRPCTQPECALAVAGLALLAYPHSHSQSQQRYAETMLLVAXLLGVLGYVLNSCLVYKRADCRTHLVKSVMQEPYLLGS

SEQ ID NO: 239889 - protein, 120 aa, Zea mays
  Clone ID: MRT4577_150363C.1.pep
FFPFNKARPFGPPKALPLNLLRGAQKKRSSLSPANFFFLWGVSQIGVFGHQGVLEHAQTPGPVNFQENKCRSKFRFFFCKLSPHLVPPDILPPLERVGAPLYPRVIFPGPPKKRSPFFWP

SEQ ID NO: 239890 - protein, 79 aa, Zea mays
  Clone ID: MRT4577_150364C.1.pep
TDREKSWYTDLTEDKASETYHSIKAKPYEFMKNMCIHIATKSIKLLISSFGLCNCTYCSKGHGNCAYFLRSSITQAENY

SEQ ID NO: 239891 - protein, 162 aa, Zea mays
  Clone ID: MRT4577_150365C.1.pep
KKKQLTAEAVSVAKSYALVSALLPRYSLASMLSPIACSRKLAQAETRLSAIPQTARVARRHCLATAHHHTRSRHVTCYCRPTGLTFDLSCHARSLHSTTPAPNGHSGDAAACRHHTAGDLCPFSPMIADDSPSSCSRHERTDVPVTRLNATETRNAPLMQTS

SEQ ID NO: 239892 - protein, 77 aa, Zea mays
  Clone ID: MRT4577_150366C.1.pep
LIASLQGVWRWRLWRLLVFGSCGLLVQPWRLFTGTKKATTPFEGQKPGTSGLRKKVTVFQQPHYLQNFVQSISNDLP

SEQ ID NO: 239893 - protein, 347 aa, Zea mays
  unsure (1)..(347): unsure at all Xaa locations
  Clone ID: MRT4577_150367C.1.pep
NGFLAAGQHIQHHAHPSRTHSGRIRLCSLIDCTKLSQDASSHAAHFGPACRSRWWCACSTTSSPGSDRPSRAAGAGXRLYVPGRPKNKCILPLETLFDEFVVAHILGWWGKAVMIRNQLLLWVLSIGFELMELTFRHMLPNFNECWWDSIILDILICNWFGIWAGMHTVRHFDGKTYEWVGLSRQRSIMGKVKRSLSQFTPAQWDKDQWHPFMGPLRFIQVLFLCVVFMTVELNTFFLKFCLWIPPRNPLVVYRLILWWLIAIPTIREYNSYLQDRKPVKKVGAFCWLSLAICIVELLICMKFGHGLFHDPMPTWLIIFWSSVGTALVIFLLSWSWRSHQRFRRKQL

SEQ ID NO: 239894 - protein, 195 aa, Zea mays
  unsure (1)..(195): unsure at all Xaa locations
  Clone ID: MRT4577_150368C.1.pep
MNNKDILTHKFDEQSTKFLSQFTPTQWDKDQWHPFMGPLRSIQVLFICVVFMIVEINTFFLKXRPVAEFLKRTKSLRWFSLYLNDISDKHARXPRNPLVVYRLILWWLIAIPTIREYNSYLQDSKPAKKVGAFCWLSLAICIVELLICMKFGHGLFHDPMPTWLIIFWSLVGIALVVFLLSWSWRSHRRFRRKRL

SEQ ID NO: 239895 - protein, 78 aa, Zea mays
  Clone ID: MRT4577_150369C.1.pep
APGASTAKHLASPSPPANSSNAPTNNSPAPKPERGGAMSSPTAAPAPTAPPAPPANATIPPPATPSASPPTPTPPKPT

SEQ ID NO: 239896 - protein, 71 aa, Zea mays
  Clone ID: MRT4577_15036C.1.pep
MRFVVTKVCSGGGKARAGALHIAGAGIGIETPALLLSTRKGLSAFLSCDLLGWLPLPDSLFFHVCATHFIE

SEQ ID NO: 239897 - protein, 540 aa, Zea mays
  Clone ID: MRT4577_150370C.1.pep
QKRTSSQSQEDDKPVAAADDEAKRKNAAAGAEDSARSLVAGLDDVIVNPVGLGRRSRQVFDEVWRKFSRLGQISSASSTALAEEEQAVLIRGGPMCEFTVPGAQDTTVLVVGATSRIGRIVVRKLMLRGYNVKALVRRNDPEVIDMLPRSVDIVVGDVGDPATVKAAVSGCSKIIYCATARSTITGDLNRVDNQGVRNASKAFQDYYNELAQLRAGKSSKSKLLIAKFKSAKSLKGWEVRQGSYFPNTFVSRFDEGIDASLDFSEDQQAVFSGFVFTRGGYVEISKRLSLPLGSTLDRYDGLLFSVGGNGRSYVVILETGPLADTTQSKKYFARMTTKVGFCRVRVPFSSFRPVNPQDPPLDPFLVHTLTIRFEPKRQRPGEASQNSSDPRNFELKLEYIKALPTGQETDFILVSCSGSGIESNRREQVLKAKKAGEDALRRSGLGYTIVRPGPLQEEPGGQRALIFDQGNRISQGISCADVADICVKALHDSTARNKSFDVCYEYVSDQGNELYELVAHLPDKANNYLAPALSVLEKNT

SEQ ID NO: 239898 - protein, 79 aa, Zea mays
  Clone ID: MRT4577_150371C.1.pep
SNLLDMDLEYPAKETNIVRFKRLSAQVVPRYLRVFIKTAGSLNCVIDLMGAKLCRDRNKRFIFLFKNSLTETCPFPKEF

SEQ ID NO: 239899 - protein, 85 aa, Zea mays
  unsure (1)..(85): unsure at all Xaa locations
  Clone ID: MRT4577_150372C.1.pep
LGQQFSQQLSQVXPQHRYQPIFGLVLQSILHXQQVIVQVYGLLAVQIVHHLRAMPGLQHPVPCPFIAMDGVHPVKHLCVVVEPLS

SEQ ID NO: 239900 - protein, 117 aa, Zea mays
  Clone ID: MRT4577_150373C.1.pep
SSQRIQSRRWTSTSTERLDLLDDAARVFGFSITGGEHRLRNYRSVTTVSELADPAICTVVLESYVVDVPDGNTEDDTRLFADTVIRLNLQKLKSVAEANAAEAAATTNSVPLPRPAE

SEQ ID NO: 239901 - protein, 81 aa, Zea mays
  Clone ID: MRT4577_150374C.1.pep
SALISLHRLPLSATSILTMGRLLLHRATILINLNLSIRPLLTIYITTTLSPRSLPTSPSTSCPSSSRPSILIMSSCSLMHF

SEQ ID NO: 239902 - protein, 154 aa, Zea mays
  Clone ID: MRT4577_150375C.1.pep
MPIFLQAMRLELHNMEIALQKFQDLFSSIGHEGMNSFSAISENQDVQDVNNEQHERVPGTQCGLANEHTLVTAVVKEATTQNVDHQLETDPGSMQVQSPVHFKSGAMPSPELVAANTEKADSLLEPNVDIGMGSLSPARPTDCLNMDLDTESQS

SEQ ID NO: 239903 - protein, 389 aa, Zea mays
  Clone ID: MRT4577_150376C.1.pep
LLFRHEGRPRGPREIDLGWTQPRPVCLLLLSPLPLPAPPGSTSPLGSRHWKDSMSASASSPAAAAGDEKQEAAPVRRCKGVNDLDKVVLREVRGSSAEVYLYGGHVTSWKDEHGDELLFVSNKAIFKPPKAIRGGIPICFPQFSNFGNLEPHGFARNRTWSVDDDPPPFPVPTSNSAYIDLILKPTEDDLKIWPHSFEYRLRVALSPGGDLMLTSRIRNTNADGKPFSFTFAYHTYFKISDISEVRVEGLETLDYLDNLQDRARSTEQGDAIVFESELDRIYLGTPSKIAIIDHEKKRTFVVRKGGLPDAVVWNPWDKKAKAMSDFGDDEYKRMVCVEAAAIEKTVTLKPGEEWTGKLELSAVPSSYYSGQLDPDRVIQDSTVPEDSIS

SEQ ID NO: 239904 - protein, 91 aa, Zea mays
  Clone ID: MRT4577_150377C.1.pep
FMFLSLIQADYRFKFQRVLNIILGAKPISVKYNLPLRNLPYFTCRIDLPVLVMLKQMLVRMELLVSDIWDLYVHVFHDTPKRRHPTSLGRT

SEQ ID NO: 239905 - protein, 126 aa, Zea mays
  Clone ID: MRT4577_150378C.1.pep
MNSSQDKATVATSDLQLHPAGKMTKDDRSHGANGCTPKRPKHQAPVTTESSYTDAAVQEPINRSCENTLLYEDSLVRAYKDVAPNEEALAAKKTNSATLPLYQENNHLTDASNVPRVRHANIEPLA

SEQ ID NO: 239906 - protein, 163 aa, Zea mays
  unsure (1)..(163): unsure at all Xaa locations
  Clone ID: MRT4577_150379C.1.pep
MSVSASSPAAAAGDEKQEAAPVRRCKGVNDLDKVVLREVRGSSAEVYLYGGHVTSWKDEHGDELLFVSNKAIFKPPKAIRGGIPICFPQCQPPXSAYIDLILKPTEDDLKIWPHSFEYRLRVALSPGGDLMLTSRIRNTNADGKPFSFTFAYHTYFKISDIRY

SEQ ID NO: 239907 - protein, 119 aa, Zea mays
  unsure (1)..(119): unsure at all Xaa locations
  Clone ID: MRT4577_15037C.1.pep
PPPFFFFFPPLFPGGGGLPLKKKFFLASSPLFSFFSGPFKTLAGKPPFTWSSXPPPDYVLQLFEKPPFFLTFPPPGRPVFFVCSLSPPPPFPLFLPPPPPLKLFLFFSRFRPPRFPLPF

SEQ ID NO: 239908 - protein, 116 aa, Zea mays
  unsure (1)..(116): unsure at all Xaa locations
  Clone ID: MRT4577_150380C.1.pep
APRLPPASLRFRFLRLQAPGSTSPLGSLHWKDSMSASASSPAAAAGDEKQEAAPVRRCKGVNDLDKVVLREVRGSSAEVYLYGGHVTSWKDEHGEXAIFKPPKAIRGGIPICSPQL

SEQ ID NO: 239909 - protein, 255 aa, Zea mays
  Clone ID: MRT4577_150381C.1.pep
LLFRHKGRCPEIPQIDLGWTQPRPVCLLLLSPLPLPAPPGSTSPLGSRHWKDSMSASASSPAAAAGDEKQEAAPVRRCKGVNDLDKVVLREVRGSSAEVYLYGGHVTSWKDEHGDELLFVSNKAIFKPPKAIRGGIPICFPQFSNFGNLEPHGFARNRTWSVDDDPPPFPVPTSNSAYVDLILKPTEDDLKIWPHSFEYRLRVALSPGGDLMLTSRIRNTNADGKPFSFTFAYHTYFKISDISEVRVEGLETLDY

SEQ ID NO: 239910 - protein, 59 aa, Zea mays
  unsure (1)..(59): unsure at all Xaa locations
  Clone ID: MRT4577_150382C.1.pep
VARLSAKISXHSLNNENFKFARSTLYSGRCPGVKDGIGFRRGEKTQPNAQITPSSFVKG

SEQ ID NO: 239911 - protein, 141 aa, Zea mays
  unsure (1)..(141): unsure at all Xaa locations
  Clone ID: MRT4577_150383C.1.pep
MSVSASSPAAAAGDEKQEAAPVRRCKGVNDLDKVVLREVRGSSAEVYLYGGHVTSWKDEHGDELLFVSNKAIFKPPKAIRGGIPICFPQFSNFGNLEPHGFARXRTWSVDDDPPPFPVPTSXSAYVDLILNXTXDDLKIWP

SEQ ID NO: 239912 - protein, 101 aa, Zea mays
  Clone ID: MRT4577_150384C.1.pep
VGSPRTDHRHRRCHRGPDRTDDLHKRRIRRARGDMHHDTVRQPVKHNGGEAHQHVQGGGRGDGAKDAGGRLHEALLGRAGDRHGRGQCGLHARRAVGAEAL

SEQ ID NO: 239913 - protein, 67 aa, Zea mays
  Clone ID: MRT4577_150385C.1.pep
FLHLIHRFMFPTMQVEHCIIMHKRCWQQGLSTCFFHSVQIFGVFLFRMHIRTKECEIGFRFLRIYVA

SEQ ID NO: 239914 - protein, 61 aa, Zea mays
  Clone ID: MRT4577_150386C.1.pep
RTLVSIYEVQYEYKYQCTSQLPSRLAVTEVSSGFDDSGCGLGSSLNLAPSSNSRPLVVVGV

SEQ ID NO: 239915 - protein, 459 aa, Zea mays
  unsure (1)..(459): unsure at all Xaa locations
  Clone ID: MRT4577_150387C.1.pep
MSVSASSPAAAAGDEKQEAAPVRRCEGVNDLDKVVLREVRGSSAEVYLYGGHVTSWKDEHGDELLFVSNKAIFKPPKAIRGGIPICFPQVCHCRSNSLGFSVSSFAGILIPXXFSNFGNLEPHGFARNRTWSVDDDPPPFPVPTSNSAYVDLILKPTEDDLKIWPHSFEYRLRVALSPGGDLMLTSRIRNTNADGKPFSFTFAYHTYFKISDIXCCFKLWSSSLKYSICQHSFXVILWQHVYPQSQFVXQTLVLNHNYLXFVISVLKYRIVYVIPXXSEVRVEGLETLDYLDNLQDRARSTEQGDAIVFESELDRIYLGTPSKIAIIDHEKKRTFVVRKGGLPDAGLVNAHLSFCLLLKXLLSLKXSRMKFTRFHIFFVTVVWNPWDKKAKAMSDFGDDEYKRMVCVEAAAIEKTVTLKPGEEWTGKLELSAVPSSYYSGQLDPDRVIQDSTVPEDSIS

SEQ ID NO: 239916 - protein, 88 aa, Zea mays
  unsure (1)..(88): unsure at all Xaa locations
  Clone ID: MRT4577_150388C.1.pep
RLEKSFTYHXIKITVKTXAEGSLKPSMGYAKEDIVSTYLQGVSRSTILNVKGAIALNGIFLEIVSWYANECXSSTRVAALILPMNSCD

SEQ ID NO: 239917 - protein, 70 aa, Zea mays
  Clone ID: MRT4577_150389C.1.pep
AISSLACVRKLGFRLAHIPCSLAVCFVPSINHPICCLSEVWPGSAVLIHMLIACQHSSFVTRPVDKECPR

SEQ ID NO: 239918 - protein, 90 aa, Zea mays
  Clone ID: MRT4577_15038C.1.pep
ATPFLFSLVKNQQPGCKLCRGSQNRWCHPCVTRWGALIIFFEGVEKTSMRSLRSGSTIHFIREFSQFKCVNRCVAGPRCLSILVKKVPVA

SEQ ID NO: 239919 - protein, 74 aa, Zea mays
  unsure (1)..(74): unsure at all Xaa locations
  Clone ID: MRT4577_150390C.1.pep
MAMETCLRAWALHAPAGSKDRLLVGNLQVLPSKRALAPXSVGRVATRRPRNVCHSKNALYEVGVSVKKNWNGLW

SEQ ID NO: 239920 - protein, 65 aa, Zea mays
  Clone ID: MRT4577_150391C.1.pep
VGGARRPVEAPHVLLRPRTTPVSTAKGEKITYAGIVTCTLLAACNLAMGHPHLVEPSADPYLHIR

SEQ ID NO: 239921 - protein, 74 aa, Zea mays
  Clone ID: MRT4577_150392C.1.pep
LLPGITPHPKYTHECIKRMTQRHVRLQGLRFFEAAHNIPPPINDYGVSGASRNNHALTGLTTAGGWTYKIKTRH

SEQ ID NO: 239922 - protein, 96 aa, Zea mays
  Clone ID: MRT4577_150393C.1.pep
LLSSCRLPESGGGGRRPGQWVGRGARRRRRPWRLPPCSSPARGSRWSRRRTSSGSKSANLQWMGHDPALYLIVLQNDRLDSLKKKKKKKKKKKTQH

SEQ ID NO: 239923 - protein, 117 aa, Zea mays
  Clone ID: MRT4577_150394C.1.pep
IRLEEVLYAISWTFSKEHVVAMLTGGSAIMRKGPNLWKLESMEQRLARATQLHSKCKNTYQVYRTLQNGEVHYLHPRDGMYPEKVNPGREGLIQNFPRRCMNVNPIDVIVTGRVTFD

SEQ ID NO: 239924 - protein, 115 aa, Zea mays
  unsure (1)..(115): unsure at all Xaa locations
  Clone ID: MRT4577_150395C.1.pep
RAHPKIAFKFFGPFKVLQHVGSVAYKLDLPSTTLVHLVFHVSQLKPFTPKYTPVFXDISQLVDLSGRDVHPVRLLDRRLVRRGHKPVVQVQVAWSELPDDATTWEDIDVLKTRFP

SEQ ID NO: 239925 - protein, 61 aa, Zea mays
  Clone ID: MRT4577_150396C.1.pep
PPPSPSSGGSDTRQVYLWRSGSYVSGSLSVALAFDFYHKILGVIKGFMLSYNFFCFDYSWH

SEQ ID NO: 239926 - protein, 147 aa, Zea mays
  Clone ID: MRT4577_150397C.1.pep
ADARGRPGRGLESCVCAAVPWRTKGQTLPPRRRRHRRHRSGERSSRPGGPGLLKLPSITSRLPTHRLRVRCQRELISTKLERQRDLPSLKRSMRDALEAIKASIPSLGITLFLSYQRTISFIRPGPNDEQEWLFVTNRMTTKFCNFL

SEQ ID NO: 239927 - protein, 50 aa, Zea mays
  Clone ID: MRT4577_150398C.1.pep
YSLKYISHLKLIILSCCCYNLLSYFIAMPFFRLLPNWTDDCCLGWVCLMI

SEQ ID NO: 239928 - protein, 104 aa, Zea mays
  unsure (1)..(104): unsure at all Xaa locations
  Clone ID: MRT4577_150399C.1.pep
DHHATLKGESRHNNPDSLATQIYSLLMLLALSTCXLTPTIIPHSSQAHIASLRPAYLTSTICLLCCDHPALQPYRLQHAVSAGYIPLSPXWLRHMPALSLAQVL

SEQ ID NO: 239929 - protein, 70 aa, Zea mays
  Clone ID: MRT4577_15039C.1.pep
MASATTSISSHPAALLDVIAARIDRLRHHQASVTPSAAPARGQRAPSVRSLRPAEPARQPVPAAAAADKL

SEQ ID NO: 239930 - protein, 277 aa, Zea mays
  unsure (1)..(277): unsure at all Xaa locations
  Clone ID: MRT4577_1503C.1.pep
AGWRRASTCWSAADGQAFGCAGAGEWRLKVADAEGRIETHKADFVVLCIGRFSGVPNMPTFPPGKGPEAFEGQVMHSMDYAKMATEKTREMIKGKRVTVVGYLKSAIDIAAECAEVNGTDHPCTMVVRTKHWIIXYFAWGVHISLLYLNRFAELLIHKPGEGFLLCLLATLLAPLVTNPFCYPSNQEPCTHRQICXLRGGRFAMHSXRWLFSKFAESYYAIPMKKFGMVPDHSLFQALATCLVAILPKGFYERLDERSIVLKRAKTFSFSREGVVVD

SEQ ID NO: 239931 - protein, 94 aa, Zea mays
  Clone ID: MRT4577_150400C.1.pep
AFNPLSMRVTVHCAQVLIAVEAQRNRCTAPMRRVDTLHACQCTNAQQAIGAAARPPTRRTLGHSRPKGPFLHSHRPSYAPRRTATKHLSPRAAS

SEQ ID NO: 239932 - protein, 59 aa, Zea mays
  Clone ID: MRT4577_150401C.1.pep
SAYSPPSPGWLAGAHACMQTAGGGRFVVLGSSSIDVSCFDWVHLLSLMVSSVFRLGLCC

SEQ ID NO: 239933 - protein, 88 aa, Zea mays
  Clone ID: MRT4577_150402C.1.pep
QPMSIQFQYGAALRVLSIDTPDTRFIHKSCVRRRQLLAYYSVNPDLLCNRMYQRKSTKQLEHTPNPVQHTRTGDQQIRLIRNNRRPRM

SEQ ID NO: 239934 - protein, 75 aa, Zea mays
  Clone ID: MRT4577_150403C.1.pep
SNGWGWLALVMCMQPSNRCPRIVFFGLFFNSCTWGTRTITSGRLCPIWGAIYPDLGEILTCFSPFEQKNMPQLPF

SEQ ID NO: 239935 - protein, 66 aa, Zea mays
  Clone ID: MRT4577_150404C.1.pep
TLNTNGLPCLGKSAGGREMHLGHVQHRHHVAVLQTLDTPKKNPFIQPNVSKPLSYSQEPFKTRLIY

SEQ ID NO: 239936 - protein, 92 aa, Zea mays
  unsure (1)..(92): unsure at all Xaa locations
  Clone ID: MRT4577_150405C.1.pep
LSPVPLRGPGXPLRXXLLPPPRRXLPCXRAVPXXAVLFFVXXPRXXSVLXRCXLPLFLXWXCLPWXXVSGXLPLXLVWLXACGRFPXPLGPF

SEQ ID NO: 239937 - protein, 46 aa, Zea mays
  Clone ID: MRT4577_150406C.1.pep
KQTHTSTHPTQTAPHLFFLFSLLFSIFLFFFFFSVEFYFENITLQD

SEQ ID NO: 239938 - protein, 131 aa, Zea mays
  Clone ID: MRT4577_150407C.1.pep
NLGLCLRSDLEEKIAQAGKSKRFNQKTTSSFQKEVGRLLYSTGHEWVREYAIDGYTVDAVLVDEKLAFEIDGPTHFSRNLGTPLGHTAFKRRYITASGWKLVSLSLQEWENLQGEFEQLEYLRRILDIEAE

SEQ ID NO: 239939 - protein, 83 aa, Zea mays
  Clone ID: MRT4577_150408C.1.pep
VIKVHEKDNGDIKFLTKGDNNEVDDRGLYKEGQNWLEKKDVVGRARGFIPYVGMVTIIMNDYPKFKYALLAVMGAYVLLKRES

SEQ ID NO: 239940 - protein, 57 aa, Zea mays
  Clone ID: MRT4577_150409C.1.pep
LKLLANKSVTVFHSAGTNEGECIYIHKAKFRGGLTKTNERKKTRLTLASDGNIIYYY

SEQ ID NO: 239941 - protein, 73 aa, Zea mays
  Clone ID: MRT4577_15040C.1.pep
KYSSVLRHASGDFKRLGNRIFVFMIGGATRSELRTVHKLTMKMKREIVLGSSSIDDPPQFISKLKSIGSATKT

SEQ ID NO: 239942 - protein, 79 aa, Zea mays
  Clone ID: MRT4577_150410C.1.pep
IHNGPSLEISSLHHEFGTCRSTSLIQAHTLRMWGGGLISQAAVNLPASPEDRTTCSAAIVLCTCGICAEDNISATTSLL

SEQ ID NO: 239943 - protein, 152 aa, Zea mays
  Clone ID: MRT4577_150411C.1.pep
TVCCDRTALRTDVCVMRGHVRTQAASNSLFLLLPPNSSRPATDEHIRPYTRKWESSIMSTIDELRLRSARMPANQTIQDFRLMLDDAHRGRIQTIIEEKKEAAAARRQEHRGSKRSRQRSKTALAEKPRLTIISRNGSRAIENEAELVRAAA

SEQ ID NO: 239944 - protein, 335 aa, Zea mays
  unsure (1)..(335): unsure at all Xaa locations
  Clone ID: MRT4577_150412C.1.pep
MIHHHRASLLVHQHRKGEAAAEDALPAEESGGGRMKELRGRLADYACQHRKHGHDALLRMLAGFALVSCLLLLLPGSPVSATMDELLQLGRRARHDDGAPAPPCADVANDTVCCDRTALRTDVCVMRGDVRTQAASNSLFLLLPPNSSRPATDERIRPYTRKWESSIMSTIDELRLRSAPEGAPSRCDVRHDVPAVVFSTGGYTGNVYHEFNDGIIPLYITARHYNKKVVFVMLEYHDWWMTKYGHIVEQLSDYPPIDFTNDRRTHCFPEAVVGLRIHDELAIDAARMPANQTIQDFRLMLDDAHRGRIQTIIXEEEKKEAAAARRQEHRGSKRS

SEQ ID NO: 239945 - protein, 66 aa, Zea mays
  Clone ID: MRT4577_150413C.1.pep
SPTLMRPHDIRLQSQFASALAFISPRLRLAHLPCTAKELDKELGLLSTPQNEAVLGQYFEGAYCFW

SEQ ID NO: 239946 - protein, 81 aa, Zea mays
  unsure (1)..(81): unsure at all Xaa locations
  Clone ID: MRT4577_150414C.1.pep
NAVTPMVVARKLELSQHAIRRLLTYQKSDFRGIYRAMHXLRLTIRLLEPHLHELLPEGQIEHILTELCTDTGAKQEGALAR

SEQ ID NO: 239947 - protein, 231 aa, Zea mays
  unsure (1)..(231): unsure at all Xaa locations
  Clone ID: MRT4577_150415C.1.pep
MAASLLLRAVRRRELASPLGSLGASIQSTCVANICSKWGRFARPFSAKAAGNEVIGIDLGTTNSCVSVMEGKNPKVIENAEGARTTPSVVAFTQKGERLVGTPAKRQAVTNPQNTFFGTKRLIGRRFDDPQTQKEMKMVPYTIVKAPNGDAWVQTTDGKQYSPSQVGAFVLTKMKETAESYLGKSISXAVITVPAYFNDAQRQATKDAXRIAGLDXEKIINEPTAAALSYG

SEQ ID NO: 239948 - protein, 477 aa, Zea mays
  Clone ID: MRT4577_150416C.1.pep
QHQSDSDDNNSHYLPSSLHRSVSWRRLVLLKTMATFFSTSTNQRDLAGGGGDMSSFHHYAYSDPPAGGLMPFPATIVSSEGHVAHGGDDGGRGAFVDVNARDGPTGGAEMGLQTQLLMANAASAVQHQGLSLSLGTQGVPVSLYQYRQAQAGMAAAAFLSPDQASAAASRSAQSIYVQNSRYLKAARELLDEVVNVQDAIKRKGDKSQQGKDSGGGGGGGEGKDAETSDEKAGEHEGNSSAPELSPSERQDLQNKVSALMALLDQVDRKYRHYHHQMQMVMSSFDAVAGAGAARPYTALALQTISRHFRSLRDAVGAQVQSLRRSLGEKDGSAQGGGLPRLRYIDQQLRQQRAMQQFGMMQQPQHAWRPQRGLPESAVSVLRAWLFEHFLHPYPKDSEKLMLARQTGLSRGQVSNWFINARVRLWKPMIEEMYREEFGAEMDSHSSSENAAGNKGKDEAISSEDHEEFQSPSSAAAA

SEQ ID NO: 239949 - protein, 40 aa, Zea mays
  Clone ID: MRT4577_150417C.1.pep
FIQKLKPLLELLDRDLEQQPKSDAETHLPLNICRLVFCSL

SEQ ID NO: 239950 - protein, 56 aa, Zea mays
  Clone ID: MRT4577_150418C.1.pep
KLSSLVVNLARYKRNPTITFGLIIIFVHVFFSDNLIMHNVSGVTIPDPSSLANYCS

SEQ ID NO: 239951 - protein, 122 aa, Zea mays
  Clone ID: MRT4577_150419C.1.pep
LNSDAIVAFVKALCKVSMTELQSPTDPRIFCLTKIVEIAHYNMNRIRLVWSRIWKVLSDFFVSVGLSENLSVAIFVMDSLRQLAMKFLEREELANYNFQNEFLQPFAVVMQKSNASKVRELI

SEQ ID NO: 239952 - protein, 127 aa, Zea mays
  Clone ID: MRT4577_15041C.1.pep
RVHTRQTIFWALRVSLYLMVFIVTRIGSLINRFYQLTHQGYSPFGLMVLHAVTQSLQGFLFGLIYIYHERALGEVVLFIRRKWSRRGDLREDSFIALEKRGLAHFSQFDEDEDHEDNMDSQSSSLAF

SEQ ID NO: 239953 - protein, 246 aa, Zea mays
  unsure (1)..(246): unsure at all Xaa locations
  Clone ID: MRT4577_150420C.1.pep
RLQVRSGIPGSTHASDRIFGLDQVAGMSETALPGAFKTRKGMFRTVGQLYKEQLAKLMATLRNTNPNFVRCIIPNHEKKAGKLDPHLVLDQLRCNGVLEGIRICRQGFPNRVVFQEFRQRYEILTPNSIPKGFMDGKQACVLMIKALELDSNLYRIGQSKVFFRAGVLAHLEEERDLKITDVIIGFQACCRGYLARKAFAKRQQQLTAMKVLQRNCAAYLXLRNWQWWRLFTKVKPLLKLIRHEDE

SEQ ID NO: 239954 - protein, 198 aa, Zea mays
  unsure (1)..(198): unsure at all Xaa locations
  Clone ID: MRT4577_150421C.1.pep
CIXTGGSGLTCSPDPATVDLLLAFHCRRRSRGQYSYRRGPEEYDSRLRLSTRQATAEACSSHVHHAHLAALLNASARLPPLPLSRLHLPLSLPTASRLVASFPPLPLLVCFLRALHLLPSSPSRPFDSLIKSYAKAVRSAIPTEVRPAPRRGLHPLPREFLEKLIRLPDLTAFAYDLTSDAMGREPGWEAAERAQEAY

SEQ ID NO: 239955 - protein, 63 aa, Zea mays
  Clone ID: MRT4577_150422C.1.pep
APNAPQQPRLPLDHQLEISLGTGTDCHGWLQSHSSYMAFDLYRVESGSVIRFAVNSLGSHVQM

SEQ ID NO: 239956 - protein, 68 aa, Zea mays
  Clone ID: MRT4577_150423C.1.pep
PLSPLPPLNLHNIYTIYLYHSLPQLQLQLHFHALKFNPIIFFILNLLNTILFPNYPIHYFKFNSPNYS

SEQ ID NO: 239957 - protein, 227 aa, Zea mays
  unsure (1)..(227): unsure at all Xaa locations
  Clone ID: MRT4577_150424C.1.pep
PAGNFISLLASVALIGAGAYVLAQPASECQRLVRAPAMALGAAFLLLSLLALAGACCRATPLLWAYVVAIFVILIGMFVATAFAFAVTNRGAASAVSGAGYGEYRIADYSDWLQDMVGDYETWRRIQSCIEDAGVCGGGWAGGTNGGELYQRYLPLADAWCCKPPAYCGLQHVNATFWAPPASGAATAADAIDCRVWXHDRRVLCFQCDACKAGVLGHARLHWRTVA

SEQ ID NO: 239958 - protein, 256 aa, Zea mays
  Clone ID: MRT4577_150425C.1.pep
EDSARVALQTLEEPIKDLIPVQRQGINEDDFLNQFSNSLKVKGLDFHERIVKAFHTSLKVQDISALVILAGISGTGKSELPQKYADFIGAPLVMLPVQPRWDSPQDLQGFYNYIEKKYKPTQLMHYLYQYQQDRKMHGRIIMVLLDEMNLARVEYYFSDFLSKLETRRSKPTYLSLDVGSLKLPEKQRDILIPEEFLFIGTMNEDETTQSLSDKVLDRANVLTFGRPNELKLRGRKIKYEKAENYLPWNEFVKWTK

SEQ ID NO: 239959 - protein, 103 aa, Zea mays
  Clone ID: MRT4577_150426C.1.pep
MDEDKEMPPAGAEEMMDDDEKGDFGEDEGPSMRGGEEKEVGKKGLNKKVLKEGEGRETPKDQDEGEEHYTGTLLDGTKSDKKREGGEPSKKKLVQRQVKKGCA

SEQ ID NO: 239960 - protein, 106 aa, Zea mays
  Clone ID: MRT4577_150427C.1.pep
CSSSCFGITFEQKQQNLAVSSPGLALCCRRFWVYSIDVEVEVILRWWILSLRDNFFNYSLFLVFCGWLATARCLMAAQMTDLGKNPNSGATVDDLRREAVCWARNK

SEQ ID NO: 239961 - protein, 121 aa, Zea mays
  unsure (1)..(121): unsure at all Xaa locations
  Clone ID: MRT4577_150428C.1.pep
PLSXFFFFFFFFFFFFFFFFFFHSKGRPFFSNVSNIQEKDSPYSGKFTGFSIGKGNRKGKGLGILLHPENVPQPKPFFFLKGGAPGKKKGNLKKPVQKRPPENPHTLGRVLKGSSWLPPLI

SEQ ID NO: 239962 - protein, 49 aa, Zea mays
  Clone ID: MRT4577_150429C.1.pep
AIPFRIAIVHDMVNLLQTHIVKPCSADHCYGISVESSLGGHLKQCLTFR

SEQ ID NO: 239963 - protein, 198 aa, Zea mays
  unsure (1)..(198): unsure at all Xaa locations
  Clone ID: MRT4577_15042C.1.pep
VRALSRFFPLIEELIEKLSKGELPLKEYPSMSEPSSASASQDATQTASSTARPAQNPQPMSMRSRRTPTWAKSRNSDDSSSDSSVLRHASGDFKRLGNRIFVFMIGGATRSEVRHVLILLXIKKTNSQSXLAYYILYLSFHMNQLRTVHKLTMKMKREIVLGSSSIDDPPQFISVKTQFLFFRFYYYMFMQQLCKCRS

SEQ ID NO: 239964 - protein, 121 aa, Zea mays
  Clone ID: MRT4577_150430C.1.pep
PDICFGATRERAVLKNGAIPPGAPGGSPTSELGVFGARLRQRRRSWKRRPPRRHAASICGTPKGKRRLVAPLLFIKRFGWDRIGAPLPPPTACLCDNGFVPVSWQICFVKVVFSSKVQNPV

SEQ ID NO: 239965 - protein, 62 aa, Zea mays
  Clone ID: MRT4577_150431C.1.pep
LRITLSKFLISCGRGHFLSGELTTSFDRNATRPERLRKKSCFFFYPECQMARNNVSTRHTVY

SEQ ID NO: 239966 - protein, 43 aa, Zea mays
  Clone ID: MRT4577_150432C.1.pep
FRFDKNCCAPLINWIILVWLFLVQTPFYLVKHRLQKNINFSCN

SEQ ID NO: 239967 - protein, 42 aa, Zea mays
  unsure (1)..(42): unsure at all Xaa locations
  Clone ID: MRT4577_150433C.1.pep
MSPFEPTREESVYMDKLAXQAERFEEMVVFMERVARYAGGAV

SEQ ID NO: 239968 - protein, 47 aa, Zea mays
  Clone ID: MRT4577_150434C.1.pep
IDYMYMKIDGKQTLNLCNHIFMRLVGLQLTYFEYQINIFINKSYCRG

SEQ ID NO: 239969 - protein, 75 aa, Zea mays
  Clone ID: MRT4577_150435C.1.pep
GSCLALPSVVAFCQRVELLNDDLDALFNRYTSLASELLNLNKSGIIFQNLLMAICIGAGSFLSSILNDGVHAYGI

SEQ ID NO: 239970 - protein, 117 aa, Zea mays
  unsure (1)..(117): unsure at all Xaa locations
  Clone ID: MRT4577_150436C.1.pep
LISPFTAPHYYPPLPLAAALLIWWXLASLTPSADADSSSSXLLTXSLKLVLPAYLSVGRERERXEGPLGRSGALGSXRCPPVFSPESRXLCAMAXVAPPPXPAPAVXXPQPSPAAAP

SEQ ID NO: 239971 - protein, 161 aa, Zea mays
  Clone ID: MRT4577_150437C.1.pep
KISSRRPPSDISHPSYISWRARSLSCPSARQLRPAPAHGASLLLPWQLPSSISLPSHGRAQILSLPVRIPPDLRSSLVCLPPCALSQRPCALRGAQLSSSGAQLARAACAPAPRSARGVPSRRSSPCSARRAELSSTSLLLSFLARRVELADDALAGQPLL

SEQ ID NO: 239972 - protein, 125 aa, Zea mays
  Clone ID: MRT4577_150438C.1.pep
VHTFCKKKKKKKKKKKKKKKKKKKKKKKKKKKKKKKKKKKKKNLAPETGAKKGFPPLGSGGGPPKKRDRGGPRKIFFGENSRKLPLKKPSRWTVFGLRGSPRGGKGPCFLKGGRGPGFINPGGNP

SEQ ID NO: 239973 - protein, 87 aa, Zea mays
  unsure (1)..(87): unsure at all Xaa locations
  Clone ID: MRT4577_150439C.1.pep
NRKLNLSSPLNLFRSSYVSYFSAQPQKRPYCINQKPNSHPKPVSPSPLCFLLANISTFNGCFKNINSRFYCLHNKRKHDTXXKKKKX

SEQ ID NO: 239974 - protein, 74 aa, Zea mays
  unsure (1)..(74): unsure at all Xaa locations
  Clone ID: MRT4577_15043C.1.pep
FRGNPCVXFNRAKVEVFWDGPEWFFRAGPRPALFIFRPIVLFNGLAPAGILHGGAGGPPPPPGFCLYLYGGKLD

SEQ ID NO: 239975 - protein, 91 aa, Zea mays
  unsure (1)..(91): unsure at all Xaa locations
  Clone ID: MRT4577_150440C.1.pep
TRQVHALAEKIGLLSDSHVINGLIDSYWKCGQLDYAIKVFKESRSDDIISSTTMMTALSQXDIVXGCNKLFVQMLRKGXEPDSLVLSRLLN

SEQ ID NO: 239976 - protein, 155 aa, Zea mays
  Clone ID: MRT4577_150441C.1.pep
MFRQLHFFRIYLLAASPSETALVTLISGWACKGRDKSKDGEYLCLTSGAARCLSDDVDDLGKCRSFCPCASPNSSDLSLQLHTENDSRPGKRGKDAVSFSHTNGIYCSQTADIEAIPCSKKPCCIPGLRVESSNLGIGSLASAKTFHSLSYNSTA

SEQ ID NO: 239977 - protein, 47 aa, Zea mays
  Clone ID: MRT4577_150442C.1.pep
RKLGIRLEVNSSCICINQDLTGDLETVVYVLGEPANVGGAATDLVMA

SEQ ID NO: 239978 - protein, 94 aa, Zea mays
  Clone ID: MRT4577_150443C.1.pep
RSSLSLSKHLVVIRELCDDYRGFPVDTDTRARVNARLHVAQLANGHSPARVDMTHNSNVDVALLFKLDQRSRFTRAAPRAQPCASSAQQSRVVS

SEQ ID NO: 239979 - protein, 221 aa, Zea mays
  Clone ID: MRT4577_150444C.1.pep
MANAAEKVPVYNLADLKNTSNDAIPNYLNSLKFEQSHTLTDVRLALGFSAFGIAAACFAWDYKLGHDTTKHYTAAAVVLYTLINTVMTLWIMFKEKDTICEGTSPSGEKISIASSTKKNVPIYNLTITVTDKNSKSNVYKVSKPFSEWFDQTGQFVAVPFQAMLANAVPVIGKRDPRRVTVSKELLDASPDVLDAILAANATGAEAETADAAGKKGKRRNA

SEQ ID NO: 239980 - protein, 95 aa, Zea mays
  Clone ID: MRT4577_150445C.1.pep
MQVACNRTMVLHPFGFIAFGGDRERGYFERDPSPRRKQAPSPPTDQGFEGWPFGRVRQPPQSTRASGSLLIRGSKASPSEGFDSRLRALGLHAHY

SEQ ID NO: 239981 - protein, 82 aa, Zea mays
  Clone ID: MRT4577_150446C.1.pep
SPTSHAGVGPNQLISRPRDERRPCFTGLHATLKHLGKRSRISFWEFLTFLTNGPWCYHVPQLNRGFFPPERLVLVGGAALQP

SEQ ID NO: 239982 - protein, 90 aa, Zea mays
  unsure (1)..(90): unsure at all Xaa locations
  Clone ID: MRT4577_150447C.1.pep
LAPIRLPTLETGRVYTHSYTLLVLHSXGVKKMGKLHLAIRFSXTSMVNIVDLVCRPVGPKMHXARPILRLKDDMRRHQAVYNVGARLNQM

SEQ ID NO: 239983 - protein, 68 aa, Zea mays
  Clone ID: MRT4577_150448C.1.pep
SPEFLKPTNSWPLGIGIKKVKKKTSNQLLLPLGGPKINPQTRGPKTKGASLFFLYPTENPTKQIPKKL

SEQ ID NO: 239984 - protein, 156 aa, Zea mays
  Clone ID: MRT4577_150449C.1.pep
LYRFLVRRTKSNFNAVILKRLFMSKTNRPPISMRRLVKFMEGKEKNIAVIVGTVTDDKRIQEVPAMKVTALRFTETARARIVNAGGECLTFDQLALRAPLGENTVLLRGPKNAREAVRHFGKAPGVPHSHTKPYVRSKGRKFEKARGRRNSRGFKV

SEQ ID NO: 239985 - protein, 114 aa, Zea mays
  Clone ID: MRT4577_15044C.1.pep
GGFLVVHFQRKREVLACSLGFNPYRLLLLLQCFISMDCSCSSPVGFNRSEQPIMKLRVLLHYPLITELLQFFIMMKKPFEFTLWPWVPLICNLIMQVNIFLQVPGKFHRFCWVQ

SEQ ID NO: 239986 - protein, 254 aa, Zea mays
  unsure (1)..(254): unsure at all Xaa locations
  Clone ID: MRT4577_150450C.1.pep
EKDNSARGSLLWPSLQLVPTSPSAFGRGHGRRRRRRHFRLPPPSNPETFSSTTVHPPASHPTPRQNAPSLSPPPLPXPRRRRGGPIAALPNTTSSSTNASASPTYDVREAEAAVADLLREGGASADDAAAIAARAPAYAAMLADGVRELDELGLWASWSSGASARLGLSGVVEMEMGRLGFRRKVYLMGRSRPDHGRGXPLLESLGVRLSSAKLIAPYVAAAGLTVLIDRVKFLKEMLFSSSDYAILIGRMLSA

SEQ ID NO: 239987 - protein, 83 aa, Zea mays
  unsure (1)..(83): unsure at all Xaa locations
  Clone ID: MRT4577_150451C.1.pep
LNLWAAKNSLDYFQQQQVAAFSQLGGVSPVTFFMKPQXLXFSQEVAPNAGALLQMLQLLPLILLVLKSPGAVLLRPIKGGALL

SEQ ID NO: 239988 - protein, 81 aa, Zea mays
  unsure (1)..(81): unsure at all Xaa locations
  Clone ID: MRT4577_150452C.1.pep
PTNFNRGVRGCRPHRRRSLPXXTKKRKTRGSKRKGAAQAPGGGGRGNGGGGGGAGCVWARGGRGRRGRRRGARGGGVARSR

SEQ ID NO: 239989 - protein, 54 aa, Zea mays
  Clone ID: MRT4577_150453C.1.pep
YTEFERKKNIGLTIGAWLFCSMTTQKHQYMAYSYYLKHTNGTLLLTRTLTPPPT

SEQ ID NO: 239990 - protein, 126 aa, Zea mays
  unsure (1)..(126): unsure at all Xaa locations
  Clone ID: MRT4577_150454C.1.pep
EQRTHPTRGYRLHRTVVPTPHTAGPSRPRQRRQLPHPRSPTVPGSTQPARRPSPPPPFSSSPRAPPPSASRPPPPPRTFSSTPRPRALRSRSGPHWPAPDPXDAEVPPPGVPAXAPFPRPVPPTRP

SEQ ID NO: 239991 - protein, 72 aa, Zea mays
  Clone ID: MRT4577_150455C.1.pep
RLCLACVRLFFWTPSGHSRTSSFRRASYNLHFFTLRFTLLLRWPSFSRLTCSGFCFDHFYCLDPLYERSMVF

SEQ ID NO: 239992 - protein, 43 aa, Zea mays
  unsure (1)..(43): unsure at all Xaa locations
  Clone ID: MRT4577_150456C.1.pep
IKKXKIKKKKKKKKKKKKKKKKKKKKKNKKKKKKKKNLPGRSL

SEQ ID NO: 239993 - protein, 91 aa, Zea mays
  unsure (1)..(91): unsure at all Xaa locations
  Clone ID: MRT4577_150457C.1.pep
VFESLPPYQGMVAKVERIWLPEIPTGGVPLVGHTKGHIQVLVIAPDTMLGAPPNVKVTSVRXAVFGEVVEEGSVPPGEPPNRPSPPCSGGS

SEQ ID NO: 239994 - protein, 95 aa, Zea mays
  Clone ID: MRT4577_150458C.1.pep
MTAELYGMFFVAEDVFGGENSGRPLELTCYRRNLWQCSGQITLPRTLNNVMDDQGQHIAITELSASITGIESIEGKPAEIISIPWKGANPQLEET

SEQ ID NO: 239995 - protein, 89 aa, Zea mays
  Clone ID: MRT4577_150459C.1.pep
QGHDLGQAVFLIHWETLQEHLSPFHSKLQGVLGFLNTMLLLCISKYRKAWVFKKAKMFYEFEWGPFQLKSSPFGKTDFRNRQNSIFFEW

SEQ ID NO: 239996 - protein, 63 aa, Zea mays
  Clone ID: MRT4577_15045C.1.pep
GMVRFNHFVVNSFPCHGSNYSEVHWIGLLVGHSIEDHSLYMMKDIYNRFFQEKKKKKGPPLAI

SEQ ID NO: 239997 - protein, 47 aa, Zea mays
  Clone ID: MRT4577_150460C.1.pep
HFRVTPSIPPGTAAYLLTQPMNYAALGWSPVLLTRRHRFATAWSILL

SEQ ID NO: 239998 - protein, 191 aa, Zea mays
  Clone ID: MRT4577_150461C.1.pep
NSARGLAVNVLDQFSYKLWFPCLSKLLKNIRVHEKQDLHLMLHLAMRLILFKLQDTELNFELESMEAAFPIQGSLGALMEEVILCGVYARDKKRDICTDITKEVRDFANTILKTITGWMRASTYLMGITLLLDHSDNHVKRKTLRILSETARGNSLVQKNQRKARKLKHISGTTIKVDKSSGPYFSKLCLK

SEQ ID NO: 239999 - protein, 365 aa, Zea mays
  Clone ID: MRT4577_150462C.1.pep
MESSSPSVPFPLLQAPVESTYRACTIPYRFPSDNPRKATPVEIQWIDLFLNSVPSFKQRAENDPTVPDAPAKAEKFAQRYTSMLEELKKNPESHGGPPDCILLCRLRELVLRELGFRDIFKKVKDEENAKAMSLFEGVIKRNDEIEDDGKRIENLVRGILAGNIFDLGSAQLAEVFAKDGMSFLASCQNLVSRPWVIDDLDAFKSKWTKKSWEKAVIFVDNSGADIILGILPFARELLRRGTKVILAANDMPSINDVTYPELVEIINKLKDADGKLSNVDASGLLVANSGNDLPVIDLSSVSPELAFMANDADLVVLEGMGRAIETNLYAQMKCDSIKIGMVKHPEVAQFLGGRLYDCVFKFNEA

SEQ ID NO: 240000 - protein, 144 aa, Zea mays
  unsure (1)..(144): unsure at all Xaa locations
  Clone ID: MRT4577_150463C.1.pep
VVAAGPAKPILQTGGRXRSIGARSRAWRCHGHRWSLVLLGNVFFYPGYSHLSGVGVYPLFFFWRFLEGVCFARLSQPLCILNCQCMRALSALXVVVLCWLPASLAIFLFAGXFPFFPFFLXPFSXFXLVALFLLLIFGPLFXFF

SEQ ID NO: 240001 - protein, 54 aa, Zea mays
  Clone ID: MRT4577_150464C.1.pep
PPPGEKKKPPFFTKKKKKQQKTKKKKKKKKKNPHKKKKKKKKKKKKKKKKKNQG

SEQ ID NO: 240002 - protein, 68 aa, Zea mays
  Clone ID: MRT4577_150465C.1.pep
EREISTSHDAHTHHMHQLRSFRFIYMLNLKFLGYTYIVHFFMELSGCCGVWNVAKKKTSSSSSTFHVG

SEQ ID NO: 240003 - protein, 71 aa, Zea mays
  Clone ID: MRT4577_150466C.1.pep
GSDLGDEDWLFNSKRNSHAFMGQNKASYRSGPVPPKGQPKPFFQPRGTFFPGPNMVPLPYVGPFLTSGGGD

SEQ ID NO: 240004 - protein, 67 aa, Zea mays
  Clone ID: MRT4577_150467C.1.pep
LLAFSCSEPLCMSVDSTHRLGSTLFSESTRLRPWFMFYIGGISDGSPLSLSIPRSVDSRSVLVCIGS

SEQ ID NO: 240005 - protein, 61 aa, Zea mays
  Clone ID: MRT4577_150468C.1.pep
WLRPKPTQIMLACQIFYLKFFFSFPGFLFQLTMQIQAPSKLLVPWVISVAFHQDMLALLLY

SEQ ID NO: 240006 - protein, 219 aa, Zea mays
  Clone ID: MRT4577_150469C.1.pep
YLQPSLHRFSPVPFLHLSSQRSSLTLHFLWPLLRPAFSARRGASLPCWQPKLSLPRYGAFTALHFSPSARSSPSALSLPRASSHGRGTPARSSLVPRPELPAPGSQHVFFPPSALLCSPILPSLLGFLPWPARSFEFAEFSLSHGVLCSLLLPWSPCPCPASIFPQPPFPLPARPTVPNSHPWRLAGAPPLPRSHGARRPSPRSCAAPLLPSLSSPTSS

SEQ ID NO: 240007 - protein, 389 aa, Zea mays
  Clone ID: MRT4577_15046C.1.pep
MDGGAGEEGKQERHLVLAHKLFLLSHPSVDDLSKVALRAEVLDTVKSDDMATLFESLVAAGVLEGDAALLAEMRGRIDEEIRKLDEKIADAEENLGESEVREAHLAKSLYFIRVGEKEKALEQLKVTEGKTVAVGQKMDLVFHTLQIGFFYMDFDLISKSIDKAKNLFEEGGDWERKNRLKVYEGLYCMATRNFKKAASLFLDSISTFTTYEIFPYDTFIFYTVLTSVITLDRVSLKQKVVDAPEILAVIGKVPHLSEFLNSLYNCQYKSFFVAFSGLTEQIKLDRYLQPHFRYYMREVRTVVYSQFLESYKSVTMEAMATAFGVTVDFIDQELSRFIAAGKLHCKIDKVAGVLETNRPDERNAFYQATIKQGDFLLNRIQKLSRVIDL

SEQ ID NO: 240008 - protein, 82 aa, Zea mays
  Clone ID: MRT4577_150470C.1.pep
YSRHPYHTAQRTIRDGAYHAEQDADLGDAIRACEDGAGARREPVGPDGVTGQDYPSADRTAHAASHEPSIGDAERDGTDGGA

SEQ ID NO: 240009 - protein, 86 aa, Zea mays
  Clone ID: MRT4577_150471C.1.pep
CSKLSTAVQWPVQWHLMQPMSLAMPRKLCLQHISQYFMLSLVRVRAEVADAGARAVVITVVVPHVVVALRVVLRAPLLPPGLATCG

SEQ ID NO: 240010 - protein, 36 aa, Zea mays
  Clone ID: MRT4577_150472C.1.pep
MGCSGSPLPDAACLGLVFLALSVGGRHHHGCAAATL

SEQ ID NO: 240011 - protein, 127 aa, Zea mays
  Clone ID: MRT4577_150473C.1.pep
RTTAAPQAKLSATAFLPTTMARGGNGIPPASQDAHHFAAIPEWKDRGWSFAQEDPHRPSVRRHVHAAGTTCASRGLPAQARHKNEEKPAHFIPGISNSRPSHQATEEQWDSKPTSSVAIILMEAFST

SEQ ID NO: 240012 - protein, 62 aa, Zea mays
  Clone ID: MRT4577_150474C.1.pep
LTPYVSSGFCWFVGPPGFFPKLLTTSFPNICIVTSAPLMSHNCHLAPYCETTTPSAFPTFRL

SEQ ID NO: 240013 - protein, 55 aa, Zea mays
  Clone ID: MRT4577_150475C.1.pep
QPKQCHRRWYCSLKEVFIASANFRTPMCFFFAINKLQQNIHVIHANLPGDRLLPS

SEQ ID NO: 240014 - protein, 54 aa, Zea mays
  Clone ID: MRT4577_150476C.1.pep
AMAMSADSWIEGWMLISSNHDGFISFYRLGIVSQTDGLRTNYGLLGRLYDDLKN

SEQ ID NO: 240015 - protein, 32 aa, Zea mays
  Clone ID: MRT4577_150477C.1.pep
LGLSAHNFGVLCIFYKFITVQNLRILSYAQIE

SEQ ID NO: 240016 - protein, 82 aa, Zea mays
  unsure (1)..(82): unsure at all Xaa locations
  Clone ID: MRT4577_150478C.1.pep
PRSFAAKDEVSCLFQGVLDNLGRLIQQYGLSKGANEVLLIIEAYKALXHRAPYPASLMLAQIADAYAXLLFYTYTNSLLVAS

SEQ ID NO: 240017 - protein, 117 aa, Zea mays
  Clone ID: MRT4577_150479C.1.pep
SGSSTEHDAVSVHNSSEHAAVSFVIIISSDLAASPSQILNEILGDRERIQSLYSEIPGRTTSNASTSRRTCNFSVDATGDESLSVEAHNCKLDNTASILSMRSCADKLWKRRKGSKL

SEQ ID NO: 240018 - protein, 195 aa, Zea mays
  unsure (1)..(195): unsure at all Xaa locations
  Clone ID: MRT4577_15047C.1.pep
QSSSKAGGNGDAKHLVCVTGAGSFIGSWVVKELLLRGYRVRGTARDPAHRKNAHLLALDGAGERLTLCRADVMHGDSLRAAFWGCRGVFHIASPVSNDPELVPEAVEGTRNVINAAADAGVRRVVFTSSYGAVHMDPNRSPDTVVXDYDYCKQTGNLYCCAKMMAEVAATEEAARRGLELAVVVPATTIGPALQQ

SEQ ID NO: 240019 - protein, 69 aa, Zea mays
  Clone ID: MRT4577_150480C.1.pep
TLVCGLYWVSTLADPILFETKRLCLFFCYACVKPCVVAFISGSLSLWKHRNRCMFHGASPSLARVSLPF

SEQ ID NO: 240020 - protein, 95 aa, Zea mays
  Clone ID: MRT4577_150481C.1.pep
SFEPFLLFHSLSAQLLMDKIDAVLSSLQLCASTERLSSPVASTLKLEVLLEVLALLVVLPGISEYRDWIRSLSPRISFRIFFIGCRLTCKRGYFY

SEQ ID NO: 240021 - protein, 154 aa, Zea mays
  Clone ID: MRT4577_150482C.1.pep
VKMILNQSSNKSTTNTSCTCSRCFPPHSVVTKCVNRRLIKISPLACEPATNKKVSIYWTYVHVHVALHKICIGYIAPLSDLLRSGVQRLPHLGYQMDYISKTEPFYVCMNSSSLADPYRTMLPTTTTLPSKQIVLFVHLRRKAHLTILGAHTRF

SEQ ID NO: 240022 - protein, 73 aa, Zea mays
  Clone ID: MRT4577_150483C.1.pep
SFQPKQCYKSIGRPLNDRKTHPTPLFIDKNNGEAKQGTLNRNRYWVGIYKGSPRAIFRIDLEGKKSPKMFKGL

SEQ ID NO: 240023 - protein, 192 aa, Zea mays
  unsure (1)..(192): unsure at all Xaa locations
  Clone ID: MRT4577_150484C.1.pep
MAGGSGRRAGRPKTEPCGGWERERDGTPKSHILPARPPVPAHAWNLPGAPDLRPLAPPEGIGYTASCTMPLSVVDYDSLSWKPGFNFCNXILVCIKGYEGTCNLTCIDQRGTPEHPITACTLEIDNXGICMGVAYRVQGGPQKQXIAINHVEITECEYXQKISIDLLRGXYPLKPSETGXLXVSDSTPDAIV

SEQ ID NO: 240024 - protein, 93 aa, Zea mays
  Clone ID: MRT4577_150485C.1.pep
KLNCTTKNTKTPDHPGTPKANTQDPHKTNTEAKSTHPNKTQKMTQQIGQAWTDNKTSQKQARNISPTEPLHDHGNTRPAPERNGSNDHRVEDG

SEQ ID NO: 240025 - protein, 141 aa, Zea mays
  unsure (1)..(141): unsure at all Xaa locations
  Clone ID: MRT4577_150486C.1.pep
WFHSVFSGVAWGLVLPLLVFAGSRYGIASCLVGPIEGTGGAVWPGFVWAMPSFLFSPGGSASMSNGGVGGVLGADGTHFRPDGCGPSGGGFSGELFGRSGGGTAPVCAXRVWPFLSCPLFVVARCFGGGAPLLIGPPGLSR

SEQ ID NO: 240026 - protein, 129 aa, Zea mays
  Clone ID: MRT4577_150487C.1.pep
GNRRASCRSSAPVTYICGADTTPPKTLKCGNGGANHSGPRRCSTIPDLSDGRRGQMVESSWCTIAMRQCTTDKDALDVDLVRDSSPRAEYTDCRMHASFQPNRARRRSSSSSNGASRRPRHSHLQSTCP

SEQ ID NO: 240027 - protein, 69 aa, Zea mays
  unsure (1)..(69): unsure at all Xaa locations
  Clone ID: MRT4577_150488C.1.pep
RRYSSPDSNDTTDERKRKRMLSNREXARWSCARNINCVXVLESEVDRLHAENATTQARTEALERDLNQV

SEQ ID NO: 240028 - protein, 157 aa, Zea mays
  unsure (1)..(157): unsure at all Xaa locations
  Clone ID: MRT4577_150489C.1.pep
XXVCHHLLNQSTKEITWTSPKLHPITMDVDMMCTVYRDNASEYSVLFFDLVCPNVLQETMQKQDIDGSEFWLGILSPRRRHRNCAQCNRSRSAGERVIISIVKETKKIFQDPKSRTCGRNDVLKRKLSVVVSIRTSGLRSHLRGDGTRKIAQYNQSR

SEQ ID NO: 240029 - protein, 122 aa, Zea mays
  Clone ID: MRT4577_15048C.1.pep
CFKSVRINPPSKLMMSVIMCSVGVHNGESSHAGHWKSLVKAYNRKCDWCKLVSGTGVQLSFLYGMRQDGFNVHNKGIGAPFLVYQTTVGVRTLDVFSVLEHVRCTEPPKTFCKGAFHRMCHI

SEQ ID NO: 240030 - protein, 42 aa, Zea mays
  Clone ID: MRT4577_150490C.1.pep
RAKKKKKKKKKKKKKKKKKKKKKKKKDLNLKEKKNGVLFIKL

SEQ ID NO: 240031 - protein, 75 aa, Zea mays
  Clone ID: MRT4577_150491C.1.pep
AVHEAVSSGKIEVVNMLVEIGTAPSAEQVRQFAALVSDGAEKPSYLHSFECVSRTSAMVSRWKQYVTRSERLAVP

SEQ ID NO: 240032 - protein, 78 aa, Zea mays
  Clone ID: MRT4577_150492C.1.pep
PLGQGTPPDNLLFGANAPVASGVLTSHTIATGKQFIRILCGAGYVHNRNRALVNTLASMGIAPNIQEKQVHTAVFSPL

SEQ ID NO: 240033 - protein, 123 aa, Zea mays
  Clone ID: MRT4577_150493C.1.pep
NWPSFQHIPIHLSLSSWYMVQVIWSGMDASQATWEDAEAQKNRFPSGTAWGQTAFKKGGNVSISPSIKQVLPVVAQEQLNPELDDGPKKQADDGPKRGVRQRKMNPRMPKQRLEYIYIRNVLW

SEQ ID NO: 240034 - protein, 57 aa, Zea mays
  Clone ID: MRT4577_150494C.1.pep
YESYTICLTICSSLETRRQLRRRCLIAYTLRVSHISALINKCCTACVDCPKNNTPGI

SEQ ID NO: 240035 - protein, 73 aa, Zea mays
  Clone ID: MRT4577_150495C.1.pep
NVSHSKFCWGVGVEMYNCRRNSDFTVFYLIHPWWGKDMKLSQFEKLFYFNWQTHGVRYFLLSSFFSFSEQIIP

SEQ ID NO: 240036 - protein, 56 aa, Zea mays
  Clone ID: MRT4577_150496C.1.pep
AQHDPTFYDSHKLCQKKEVNPGLIHLLLIKRKREGETRGHSCIWLAFREEILYPQI

SEQ ID NO: 240037 - protein, 104 aa, Zea mays
  Clone ID: MRT4577_150497C.1.pep
IASAPLGGPATGSPNLYSFLQGVSESPRPNLYSAGTRTDVHLLTKRRGQGHFGKAPTKYTSKDLLDWTGDTPTTPMAGRLGPRPKKGMEHRGEKPKGPMSDPGS

SEQ ID NO: 240038 - protein, 58 aa, Zea mays
  unsure (1)..(58): unsure at all Xaa locations
  Clone ID: MRT4577_150498C.1.pep
CWWCCHLSSSPRLLLSAPPPAAASARCCKLKLELHRRCVAVAVTPLGSSTAXLAPCRA

SEQ ID NO: 240039 - protein, 73 aa, Zea mays
  Clone ID: MRT4577_150499C.1.pep
TTLCQPVFFFQILIGPQSVCFPYQFYGPDQITPPDCSPSISGHFVPFKKTKPISPPPMLFLARFMKTPFPVSP

SEQ ID NO: 240040 - protein, 111 aa, Zea mays
  Clone ID: MRT4577_15049C.1.pep
KIPQQGSWSYSYSSKREGGRSISVPGGRRDDALRHGDVGRCVAGALHDLGRGPVDPVLSSDAGPVSDVVLLPRSPSSGRVASAAGHVYPEGRGSQPHDDTFCRPPLSGDLD

SEQ ID NO: 240041 - protein, 104 aa, Zea mays
  Clone ID: MRT4577_1504C.1.pep
GLVVAVGLKISRKNITADRVTCTFDGTAVTQEVLEWVLCVKRPGSGWPLLQLERGVMAAVLLYLRFGHGVNLGSYHQVARLGAFSYLEGYRGCPIPFLKKLSQL

SEQ ID NO: 240042 - protein, 66 aa, Zea mays
  Clone ID: MRT4577_150500C.1.pep
KVTSIKQFVKVPFPPKRPSIMISSGNLGSTPENYRPRVPHAHSICCNTGSRVRYQNVLSGVASLRK

SEQ ID NO: 240043 - protein, 53 aa, Zea mays
  unsure (1)..(53): unsure at all Xaa locations
  Clone ID: MRT4577_150501C.1.pep
SNLCIPVLMCYTYGCCVGSGVACSSAPEGWYCSWVNYGVMFXVRPPPVYPPQF

SEQ ID NO: 240044 - protein, 117 aa, Zea mays
  Clone ID: MRT4577_150502C.1.pep
FLDPVSPPLVFPRALVFLPPPLRFAPPERLSAPAAFPPPSFPPVLAPFFPRPRAFRLVALALFSFFRPSGCLGCVAVGSLGRPPPLAVGACFVLPCPEGILLGRGFWFCHIKKQWIY

SEQ ID NO: 240045 - protein, 125 aa, Zea mays
  Clone ID: MRT4577_150503C.1.pep
EEPSVQRVLDTRATGSPHRVASNHVVLVATPRPTPDKWGRSVSFCHPVHWSLFRLHLDVDIESHRIKRSTSAHETENGRIQSQRSMSSISTVARSSDHHATGSSSNPNEFMNQGEFIHFVSSLPC

SEQ ID NO: 240046 - protein, 103 aa, Zea mays
  Clone ID: MRT4577_150504C.1.pep
MPSAPCSGPSPDTARIPRPAGAANKKMACLCSPTSHPGSFRCSRHRTAPDGAEAVPGATRARSVRALLLQRIGGIRREPGRHHRRRGVGVGDFQPRPSRLRLM

SEQ ID NO: 240047 - protein, 49 aa, Zea mays
  Clone ID: MRT4577_150505C.1.pep
GRWMGQRQKMIAVSIIVVIRARAYVDDDGDIIFSRRCLVCYYEGRRTLE

SEQ ID NO: 240048 - protein, 30 aa, Zea mays
  Clone ID: MRT4577_150506C.1.pep
IFTERASLPLRGEDEVPNLMRSASAYSHGT

SEQ ID NO: 240049 - protein, 70 aa, Zea mays
  Clone ID: MRT4577_150507C.1.pep
QHTRRGYLRSVHSTANTRKRGPSSQEQEHQREKLDTGPVRDTRYAYYRVVAGCTRCTLQCRCGLHQLSCP

SEQ ID NO: 240050 - protein, 71 aa, Zea mays
  Clone ID: MRT4577_150508C.1.pep
HIWHFKANVHSSEQIHSRTGFSMCCNGSCTCLDPRLSLDQFVRIENPLQLIAMACNQGRPHQWGHVGHGPP

SEQ ID NO: 240051 - protein, 120 aa, Zea mays
  unsure (1)..(120): unsure at all Xaa locations
  Clone ID: MRT4577_150509C.1.pep
MTTSLYNIRKKRWHVLAVHGQIGEYRKHPRGQLNSCGMHHHRILFDKYQTGYFRSVGMRYFHTLWNKLHCPXLNMERLWSMVPAAXKASYAVFTDHAPFVDLTHFGYFNVLGKGMLSSRP

SEQ ID NO: 240052 - protein, 64 aa, Zea mays
  Clone ID: MRT4577_15050C.1.pep
ETGFDKRQTIILQDSGGGVRKGQKTLEGPSVGGQSIWGCEMSANKLKPSVLSNISPYAGRFTLF

SEQ ID NO: 240053 - protein, 71 aa, Zea mays
  unsure (1)..(71): unsure at all Xaa locations
  Clone ID: MRT4577_150510C.1.pep
DVEYRXFRCGLAWTTDDHSLHNAFSTYGEVLEAKIILDRXTQRSLGFGFVTXSTDEAMRYAIVGINGKELD

SEQ ID NO: 240054 - protein, 198 aa, Zea mays
  Clone ID: MRT4577_150511C.1.pep
MTFAGSGYGERGSKRAHFVLVPMMAQGHTIPMTDMARLLAEHGAQVSFITTAVNAARLEGFAADVKAAGLAVQLVELHFPAAEFGLPDGCENLDMIQSKNLFLNFMKACAALQEPLMAYLREQQRSPPSCIISDLVHWWTGDIARELGIPRLTFSGFCGFSSLIRYITYHNNVFQNVKDENELITITGFPTPLELTKA

SEQ ID NO: 240055 - protein, 100 aa, Zea mays
  Clone ID: MRT4577_150512C.1.pep
GAVTATTEFNARSVLELHYHSVCRLVVKDDIYVPLHSVPVCKSQNVMLYYQLHASSWFGSTIPGTCVHSQVSQDSPTLHASLWLERTISFNARPPERALQ

SEQ ID NO: 240056 - protein, 156 aa, Zea mays
  Clone ID: MRT4577_150513C.1.pep
MCVEEQVAMFLNTVGQNLRNRLVGTNYGRSGETVSRYFNKVLRAIGELRAELIRPPSLETPSKIAGNPRWDPYFKDCIGAIDGTHIRASVSIDMEPSFRGRKSYAPQNVMAVVDFDLRFTYVLASWEGSAYDALVLRDALERENGLRVPQGKYRRF

SEQ ID NO: 240057 - protein, 69 aa, Zea mays
  Clone ID: MRT4577_150514C.1.pep
SQLLLHERVDGRLSCVPRKTTRARLGGALPVIHLLPQHSASIGLHFACITPFLEQSVRSILRIRSKKNQ

SEQ ID NO: 240058 - protein, 111 aa, Zea mays
  unsure (1)..(111): unsure at all Xaa locations
  Clone ID: MRT4577_150515C.1.pep
MSDTTCVNMLRLGRSSFFRFCKGFRDXGLLEDTIHMCVEEQVAMFLNTVGQNLRNRLVGTNYGRSGETVSRYFNKVLRAIGELRAELIRPPSLETPSKIAGNPRWDPYFKV

SEQ ID NO: 240059 - protein, 100 aa, Zea mays
  Clone ID: MRT4577_150516C.1.pep
LGFEKEGFFSRPQDPVFESNGKNESFGFQGQGISRVPKKGFFSDQNSKFLGKKLQFRSFSWEKQVLFVKHRCSMYLDQMFNSLVVYKLEDRFPEIIFTLI

SEQ ID NO: 240060 - protein, 116 aa, Zea mays
  Clone ID: MRT4577_150517C.1.pep
SPHLIRMSPWPTPNSSPVPRSTTRASETAPQTSPNTGSQLLITDALSYPLHVVLFVLLVTSMEEFLTCSLTDAEHEHGLDLHEAGYMYANVDKRAMPIQHTTRITVFINRLYSFLT

SEQ ID NO: 240061 - protein, 51 aa, Zea mays
  Clone ID: MRT4577_150518C.1.pep
QLLLRGHNTWGGIGTVIPCCALRASGTDAMVNCQRSPSEHYLPILESRSQG

SEQ ID NO: 240062 - protein, 49 aa, Zea mays
  Clone ID: MRT4577_150519C.1.pep
LPMLSLRLPCFNVFLSAIPSRPLVFLPVSHSPRYSMLFKKVSKISRAKR

SEQ ID NO: 240063 - protein, 124 aa, Zea mays
  Clone ID: MRT4577_15051C.1.pep
QQIPMEQRPAQNIRAQQLQQLVLANLAAYSQQQQLPLVHLLAQNIRAQQLQHVVLANLSLGRSLPPDLGCIPKQPDSLTAPRGATGSEPDGALTLPGVPFQRTWARSVAEDASRVLWVVTTLPA

SEQ ID NO: 240064 - protein, 46 aa, Zea mays
  unsure (1)..(46): unsure at all Xaa locations
  Clone ID: MRT4577_150520C.1.pep
KELCNKLSCSSKRVEFSKLLKXLXAFRTRRKCYHIWRXTLLENLMK

SEQ ID NO: 240065 - protein, 332 aa, Zea mays
  Clone ID: MRT4577_150521C.1.pep
MCVDYRSLNDVTMKNMCPLPCIKDLFNQMRGARVFSKIDLRSSYPQMRIRPSDIPKTAFSTRYGLYEFTVMSFGLINAPAYFMDPKNKNDSDHEEHLILVLQKLRDNQLYAKYRISVNPAKIKEIVVWSIPTTVTEVRSFLGLAGYYRRFIERFSKIAKPMTSLLEKGREFKWDEKCQDSFDQLKKRLMSPPVLVMPDMQKGFDIYYDACGQGIGCVLMQEGHVIAYASRQSRKHELNYPTHDLELAAVVHALKIWRHYIMGTKCQVYTDHKSLKYIFTQKDLNLRQRRWLELIKDYDLEIHYHSGKANLVTDALSRKEHVHSAVVAQLKGN

SEQ ID NO: 240066 - protein, 474 aa, Zea mays
  unsure (1)..(474): unsure at all Xaa locations
  Clone ID: MRT4577_150522C.1.pep
MDRFIVVFIDDIFIYSESDSDHEEHLILVLQKLRDNQLYAKYSKCEFWIDKVPFLGQITSNGGILVDPAKVKEIVDWSIPTTVMEIQSFLGLAGYYRRFIEGFYKIAKPMTSLLEKGREFKWDKKYQDSFNQLKLRLMSXPVLVMPDVQKGFDIYGDACGQGLGXIWRHYIMGTKCQVYTDHKSLKYIFTQKDLNLRQHRWLELIKDYDLEIHYHSGRANLVANALSRKEHVHSAIVAQLPDEIVEDFMRLNLGIVTHIEGVTIEVEPTLEQEIRKGQIGETKIQEIKDLITEGRGLEFTENEQGTVWFKDGICVPEIVNLCETILKEAHDSDYSIHPESTKMYQDLKQKYWWYGLKRDMAAHVAMCDVCQRVKAEHQRPDGLLHPLKIPEWKWEEIGMDFITGLPRTSKGYDSIWVIVDGLTKVSHFILVKTTYKGSQLAEXYMARIVSLHGVPKKIVLDTGSQFTSRSVSGT

SEQ ID NO: 240067 - protein, 562 aa, Zea mays
  Clone ID: MRT4577_150523C.1.pep
MPSSYSSYSSLRVAPLGLMLALCVAGAWDIGVLPVGCSGGGAVLGCLGRMSSRTVDSNWAAEIRYRVAVVRTVGSGSCVGMAAGRVVFGYDNTRPDIIADPYTNIHTHQVNRAQARSSGLGDGRTAQEPRSAGAAQTVGPRIGRLEYPRTTSASAVCKRDPTVLERQRQFIHCAKRTVELTSSKGERFEVEIAVTTTIRLATFLVDEKFVGGNIRAVGDFPDVFPEELPEIPLGRRVEFVIDLLPGTAPISKHPYIMFVKELKELKKQIMELQEAGYIRPSFSPWGVSGDSDHEKHLRLVLQKRRDNQLYAKYSKCKFWIDEVPFLGHITSKGKISVDPAKVKEIVTWSIPTTVTEIQSFLGLAGYCRRFIEEFSKIAKPMTSLLEKGREFKWDEKCQDSFDQLKMRLMSSPVLLRKHELNYPTHDLELAAVVHALKIWRHYIMGTKCQVYTDHKSLKYIFTQKDLNLRQHRWLELIKDYDLEIHYHPGKANLVANALSRKEHIHSAVVAQLPDEIIEDFRRLNLGIVAHTEGVIIDVEPTLEQEIRKGQIVPSLYWTIQSF

SEQ ID NO: 240068 - protein, 94 aa, Zea mays
  Clone ID: MRT4577_150524C.1.pep
GERATTLLNKPKGGRSESFANRQLFQILRNLKSTGGVHHQKIASKGCNFRRAPLKRFQVILFWIWLFWPFLGADTSLFAEYHLGQIIKGFMIPT

SEQ ID NO: 240069 - protein, 96 aa, Zea mays
  Clone ID: MRT4577_150525C.1.pep
ADDVLCMFTPSWTSTTENLYLWCGGWRPTAAIQLLYTKSGMQLQHQLPAFLDGGGLKDDLGDLGAAQLQAADQLQRRTIRREREIEDASASAQVSQ

SEQ ID NO: 240070 - protein, 116 aa, Zea mays
  unsure (1)..(116): unsure at all Xaa locations
  Clone ID: MRT4577_150526C.1.pep
KPGAPSTATTATPHHIPVSQAPAPCPGGHWPPHPLQQPPPMCHHQQMGNFTGYPGERHXEFPPPPKSRVGQKTRRGPFISPCFPRKCYKPNFTAFVFPVKKKKKKKKKKKKKNTPP

SEQ ID NO: 240071 - protein, 176 aa, Zea mays
  Clone ID: MRT4577_150527C.1.pep
WDGGGQRGGSEKKGGGKIGNTKATAGGGGEGKRPKTPTPGRGTESTGHWGKANKRGGEGKGETPGQRGKKKTKRGNDKAHNKRGRKKKRNQKKGNTKTEKRENKREEKRTGRQKKQKPKSGFAKKEKKQKERRTKRQRGKKAPNKGRGGPKRGHLARTRRSPTKKPGRRTKGPNRE

SEQ ID NO: 240072 - protein, 119 aa, Zea mays
  Clone ID: MRT4577_150528C.1.pep
MISSPSPSLSPSPSGTPSPKGVSATPRQGSSRWRSGAVRGAYGRRLLDALRATGDGQPRPRAVKAAADSALALTARGQTRWSRAIVLAGAVCGGRRRVLVKGGGNVRRRRRRRPPVAGQ

SEQ ID NO: 240073 - protein, 73 aa, Zea mays
  Clone ID: MRT4577_150529C.1.pep
VLKKADHNLNGYVHFSVRLLFYRLFVLTRIVTAHKNFDHNQIISFLNPLQSPFIQTNFYVSFTPPPLINLPRF

SEQ ID NO: 240074 - protein, 143 aa, Zea mays
  unsure (1)..(143): unsure at all Xaa locations
  Clone ID: MRT4577_15052C.1.pep
PLQNVVPPPPTSATYASQHRRWRLGPGLGTSLPIYLKHPDRGRLPGLLPSEGVYWAFHDTWVLPHEPQSMRELLLVTDKHEWAFMQSSRALPDLXSAPLANSSAAYSXEALVITXNSSLGAHLALPADGKDIAFDAERASTTT

SEQ ID NO: 240075 - protein, 77 aa, Zea mays
  Clone ID: MRT4577_150530C.1.pep
KLAEKLGRLAICSSFWWPKAGKSLNKQGVLACVLRRASSSGSSVPVVGYLYICELFARRVNLCYPVTTHKLVISLSA

SEQ ID NO: 240076 - protein, 72 aa, Zea mays
  Clone ID: MRT4577_150531C.1.pep
MSWQAFVDEHLMCEIEGQHLSAAAIVGHDGSVWALSESFPELKPEEVAGLIKDFDEPCALAPTGLFVGGSKY

SEQ ID NO: 240077 - protein, 84 aa, Zea mays
  unsure (1)..(84): unsure at all Xaa locations
  Clone ID: MRT4577_150532C.1.pep
GSSCRQGTRDKRPGNLVRPAVTRFDTSFLTLQSIYKHKQALRCLFVSDDWTRSKLSSTPAGKKVXEINLTTNFWNSVQDCRTRG

SEQ ID NO: 240078 - protein, 122 aa, Zea mays
  unsure (1)..(122): unsure at all Xaa locations
  Clone ID: MRT4577_150533C.1.pep
QQWADATLCVHALTALTGSAAHAFISPQCXYVPSAIITQLLNPITYMRCXHPAVQAYPLQQALADSVLEQPFAPLQQQCLAHLTIQTMGTQXHHALSHLADANPMAYLQQQLIAYNPLALAN

SEQ ID NO: 240079 - protein, 213 aa, Zea mays
  unsure (1)..(213): unsure at all Xaa locations
  Clone ID: MRT4577_150534C.1.pep
GKSKPLPPICLGPKKIPFTPSPGRKKNFFWSLCLFPPWQTLGGNPQGRPRGGGPPKXILNFRPPGPPPXVFFPPGFFFPKKEIPQWLGKPGXGPQENLPILGTPGEGGKTKAPPAGGWNRILSPPRGGFCQRPLTKGPPSFLFFKWGPPGLGGANPIAPPPPVPPKLDPLNPXPPKGCGPPRPWGPEPRERGKPPRAPILIPPPPGETGSPPG

SEQ ID NO: 240080 - protein, 108 aa, Zea mays
  unsure (1)..(108): unsure at all Xaa locations
  Clone ID: MRT4577_150535C.1.pep
MFFFLFLCNIILKVSRRQLRHALFLKFVVLCLPHVLVLYPRSMGLCSLNLVPPPPLADLAPLKLAFWSVCYHSLXLAFLLSPMTCLSLFPWKWIFVMSIFRILFGYTI

SEQ ID NO: 240081 - protein, 76 aa, Zea mays
  Clone ID: MRT4577_150536C.1.pep
YSTRAPGTSRGDTTKGGAGQQTNTPTKRPSTRHDRKRPPNHTKQPARTQRARRAHPTRRPHTKRARKARPPRKSTT

SEQ ID NO: 240082 - protein, 80 aa, Zea mays
  Clone ID: MRT4577_150537C.1.pep
KCGIGIPRGNPISFHWVQDRLNKIPNIPIPYMNIFASYFLENVKLEFPKEYRSHSLWLQDRHNKNTNTSNSYTTFSLLYP

SEQ ID NO: 240083 - protein, 58 aa, Zea mays
  Clone ID: MRT4577_150538C.1.pep
PNYNGGMGNQFFILFAPIIMFLVSFGSSPLVFSFFIWSVFFIPWFCCNHEKCKVRVMS

SEQ ID NO: 240084 - protein, 182 aa, Zea mays
  unsure (1)..(182): unsure at all Xaa locations
  Clone ID: MRT4577_150539C.1.pep
MNPLLPNXAASCALFYSIMSAXGIHLEKFLLTGVLDMLRTNTPSVKKFATIILNTGLMHWFLAXLASQIKLSASESREGNSLGACSTFKESILLPDEERMIHDAIEQADGKQGIELLQDILKSRQWVKSDKLSAALKPPLMRLCARYLAREKKRGKALDAVANFHLQNGAMIERINWMADQS

SEQ ID NO: 240085 - protein, 59 aa, Zea mays
  Clone ID: MRT4577_15053C.1.pep
YTIQENSAGFFKALSTLRASLGTRFSQRISIFPRENVLTSLGKMKNPWENGVSKLGLRN

SEQ ID NO: 240086 - protein, 184 aa, Zea mays
  Clone ID: MRT4577_150540C.1.pep
GAGPMGLPPPGGPLVAPGLWLAFWSPGRSCAGPCFCGHPVVRPLGWGLPVSVSGRPGSLSPCFRKRQGAPCWVAPFPARWSVQCFRWLARFPLWSAGCWGFCPSCGLAPSFGPPGLFWLWVRARIVCGVVRGSPFGPGCGGAPACPRRAFSPPARVPGLVLFGPLFFFFFFFFKFFFFFFFFCF

SEQ ID NO: 240087 - protein, 120 aa, Zea mays
  unsure (1)..(120): unsure at all Xaa locations
  Clone ID: MRT4577_150541C.1.pep
GRGPLRVSXXSXXGPAGXXXGFXGLAXPXXVARXAVVAFXXALWFWXXXVXRVXPXGFGAPXXAXXGALXCXGXXPAXXXARVGXXXPXCPXLRVXXGPPLPCAASLWLLVARPLGVAPS

SEQ ID NO: 240088 - protein, 75 aa, Zea mays
  Clone ID: MRT4577_150542C.1.pep
PVLPIKVFLSGAVLAPMVSNPRLKKTVRVKAGSLGRKTRAPKSGVPTFPFLGQSGPFKKLGQVGSGQKGFNWGMV

SEQ ID NO: 240089 - protein, 57 aa, Zea mays
  Clone ID: MRT4577_150543C.1.pep
AAALEFSYESTFTEPERGAPMNIAETRPPPSEHRHKVAPIHSSHNSIHAKSEDGGWW

SEQ ID NO: 240090 - protein, 73 aa, Zea mays
  unsure (1)..(73): unsure at all Xaa locations
  Clone ID: MRT4577_150544C.1.pep
DHSHASLMXXXSQXVVXPXIQQWXPREDXTRIGXAGVVXRQASXYVTAXEGEXXALXPXPLVQGEXFPAHXNH

SEQ ID NO: 240091 - protein, 43 aa, Zea mays
  Clone ID: MRT4577_150545C.1.pep
AIGACEHCVKMAAVSALAKSSSSISNRNILEAIDGTILCFISC

SEQ ID NO: 240092 - protein, 532 aa, Zea mays
  Clone ID: MRT4577_150546C.1.pep
TRPKRRTAFQVMGYCVCVAKGAAEILKLNMALILLPVCRNTLTTLRSTALSHVIPFDDNINFHKVIALSIAIATAIHTLAHVTCDFPRLISCPTDKFMATLGSNFHYKQPTYLGLLESTPGVTGILMIIIMSFSFTLATHSFRRSVVKLPSPLHHLAGFNAFWYAHHLLVLAYVLLVVHSYFIFLTREWYKKTTWMYLIVPVLFYACERVIRKFRENNYHAGIVRAAIYPGDVLSIHMKKPQGFKYKSGMYLFVKCPEVSPFEWHPFSITSAPGDDYLSVHIRTLGDWTSELRMLFGTACQAQVTSKKATLTRLETTVVADAQTEDTRFPKVYIDGPYGAPAQNYRKYDILLLIGLGIGATPFISILKDMLNNLKSNEEVGSIHGSEIGSFKNNGPGRAYFYWVTREQGSFEWFKGVMNEVAGSDHSNVIEMHNYLTSVYEEGDARSALIAMVQSLQRAKNGVDIVSGSKIRTHFARPNWRKVFCDLASAHKNSRIGVFYCGSPTLTKQLKDLSKEFSQTTTTRFHFHKENF

SEQ ID NO: 240093 - protein, 115 aa, Zea mays
  unsure (1)..(115): unsure at all Xaa locations
  Clone ID: MRT4577_150547C.1.pep
EMHNYLTSVYEEGDARSALIAMVQSLQRAKNGVDIVSGSKXTIISLLLNCKVFCICYLFWLTEHSVXIRTHFARPNWRKVFCDLASAHKNSRIGKPLVSEHRVTRFSDSVQSFRT

SEQ ID NO: 240094 - protein, 108 aa, Zea mays
  Clone ID: MRT4577_150548C.1.pep
MAIVRVDGLQASNQPRKRGRPRKDTSLSADKQPKKRGRPPKNRNAPGNSQGAEDAPGSVALVPVQDDTQESSRKQNSTLIRNAMTARAERLKRENLRVQSRRSRTRLS

SEQ ID NO: 240095 - protein, 506 aa, Zea mays
  Clone ID: MRT4577_150549C.1.pep
MDPTTASTLGGKVAVKIVKTPLYASCALNAHMQHIVLDQGTDCSSGTVPSQGNEGSSLLEPGNGDGICTGVTCGSPSVISCAESCPQEGGHGSTALLHHTLCGQSEDPEDHGASVDGIQSPKQCNTRNIESAPGSQETSAAGGDRSFSFEVGAPPNVAEKAHSPVWSPFPKYITSQSSKMATENTQAGGSLKDTSDDSKKISTVESGKEQLSERKVTESSGGGLSDNCNIDDIIKGRSSPPRQHPIPECSVSSADLVNFPFTDPQHLQLRAQIFVYGALIQGTPPGEAYMVAAFGEPVGGGKPTWEAAWRAAFERFQYKKSPHISLETPTSSLIGSSVPEKASKGTAITTVPASKKVGKTVAPAHPAVTLHSPTSDFPFGSSTFNLQRGTHLDFSQAVSPFAYNSHMRHPSPGVAPWYTQSPGPRPAAWLIPPQNLIFDSSMQPVIPTNETAKGASSKNISVSHTVSSGVLPSLAPSIVSSPIAVVSDGKQKAASSSKRGTTSQKS

SEQ ID NO: 240096 - protein, 136 aa, Zea mays
  unsure (1)..(136): unsure at all Xaa locations
  Clone ID: MRT4577_15054C.1.pep
GTTSSGCPTGPTTILIYPKTLLEYRTTITIQVHTMXKLPLFCLNGKYIHERVIYEXGGAYYCVTKAYTCLYIPSKXKPXRTXYDLIYDNSCMLVXILNKRRRGVTVCLVLLFHHEDMGIPYEIAKLGIRQXMWGCV

SEQ ID NO: 240097 - protein, 91 aa, Zea mays
  Clone ID: MRT4577_150550C.1.pep
DRTGTGRPRQNPPPTRPGPWDGRNGRIVVLTAGNPRELPPSLHPEAQKAGPSASPSPVIFSSSSLIYSRKPGTQPKRGKKNQSPETGALSR

SEQ ID NO: 240098 - protein, 93 aa, Zea mays
  Clone ID: MRT4577_150551C.1.pep
QRRGGPQLSKRTDRIRSQAVFQPLVNPSPSRRRIIAAHPQLFPNLSSPFCSNDTPPASIPIPIPCHPRADLRKTLLERLSPSRWSPLTPLTTS

SEQ ID NO: 240099 - protein, 154 aa, Zea mays
  unsure (1)..(154): unsure at all Xaa locations
  Clone ID: MRT4577_150552C.1.pep
GRVGGRVGDRQGICYVETAALDGETDLKTRTIPPISANLSVEQLGKVKGVIECPNPDNDIRRFDANMRLFLPIIDNEKSPLTINNTLLQSCYLRYTEWACGVAVYTGNXTKSGIIRGAAEPKFTAADVIIDKLTFAIFMFQXVVVYLVWGILGI

SEQ ID NO: 240100 - protein, 76 aa, Zea mays
  Clone ID: MRT4577_150553C.1.pep
LPPSVSLSGRMSSTAADVLRALPADHDEGTGAGAHLLNWGLVDGAAGAGASRADGGGGPDSGGSAESCLDRWIDDH

SEQ ID NO: 240101 - protein, 114 aa, Zea mays
  unsure (1)..(114): unsure at all Xaa locations
  Clone ID: MRT4577_150554C.1.pep
TRSNLLIPLILIFIPALSFEVPGLIHHGFNHTIAQIGVTQYVSDLLLDLLLYHLYNQIATNTLNRLDPMTHAVGNVLIRAFIIGXSIIAYGNKTCTHTAIDTXIDISGVAMHSY

SEQ ID NO: 240102 - protein, 85 aa, Zea mays
  Clone ID: MRT4577_150555C.1.pep
ATVPRQGLRGRDLRVISWLGMPSYDADFGWGEPALLAPALMYYPGFVYLLNCPGKGGDVAVAAALEPERMQRFKELFYEELAMLE

SEQ ID NO: 240103 - protein, 240 aa, Zea mays
  Clone ID: MRT4577_150556C.1.pep
MGRGKVELKRIENKISRQVTFAKRRNGLLKKAYELSLLCDAEVALIIFSGRGRLFEFSSSSCMYKTLERYRSSNYSTQEVKAPLESEINYQDYLKLRTRVDFLQTTQRNILGEDLGPLSMKELEQLENQIEVSLKHIRSRKNQMLLDQLFDLKSKEQELQDLNKDLRKKLQETSPQNVIHDVSWEEGGHSGSSVLGPFQGLLQHHGNDPSLQTRYHQQAYMDQLNEDMADPDEHGRSGWI

SEQ ID NO: 240104 - protein, 68 aa, Zea mays
  Clone ID: MRT4577_150557C.1.pep
PTPKKGKLPRLHRPKARLTHKSKQPILAPQPALYSRTEPKDRVYYARAGNTIHQLRKEHSLPRRQPPH

SEQ ID NO: 240105 - protein, 62 aa, Zea mays
  Clone ID: MRT4577_150558C.1.pep
YRSPQMAIYAQSQNIVDLIKKDGIHWVCLQQSRYTKRETIISSCSSHGAGEARHPRSQDAGN

SEQ ID NO: 240106 - protein, 69 aa, Zea mays
  Clone ID: MRT4577_150559C.1.pep
NSQNKIVYPDFKVTFIRNLKTLEKKLWLHGGSKTLVELAPPPIQGSFTMKFWRLMGFMMTGGPATRGQA

SEQ ID NO: 240107 - protein, 36 aa, Zea mays
  Clone ID: MRT4577_15055C.1.pep
QWGLTKVVPGKLPFKSSTSAQKSFTEVAILFDWFAT

SEQ ID NO: 240108 - protein, 197 aa, Zea mays
  Clone ID: MRT4577_150560C.1.pep
TPNSCEGGVMNLSLALDLALVTAISPAPAPSMPSTTVTAARSSLIPEKLWEEDAENGARSFDAQSISRQATSIPGNLWKQNRRYDSKSHHLSGFVGNGDCSNLNQESRACNGGSPFEIIDKRSMKIKHTPVMLRWKFRRNQSLNPWKNHGDQIPAWITPTRGDLDSSKFRDSEGPIKEKCKDVDKINDEAKGSRKKM

SEQ ID NO: 240109 - protein, 64 aa, Zea mays
  Clone ID: MRT4577_150561C.1.pep
SCELFDRYRLSTMEGNSMGFIHEAIDTFHKAAMAMGYGLCVYNQWPICRLSQTCYSDHYFQSQF

SEQ ID NO: 240110 - protein, 98 aa, Zea mays
  Clone ID: MRT4577_150562C.1.pep
SSSASALLLLSREKNSITVSITTLAYHLRSASVPCSPLCVGVDAHKQPQSVKTTVSSSSVAIGTMCVGFRKLGGVYNCICELACLPSNQVTQQRKTVE

SEQ ID NO: 240111 - protein, 62 aa, Zea mays
  Clone ID: MRT4577_150563C.1.pep
IAKNKLAHHRVRLRNHIVIRFISRWEHLARPPNRLEEVGVIGGVGGCNEVPEAAEKERRSKS

SEQ ID NO: 240112 - protein, 80 aa, Zea mays
  unsure (1)..(80): unsure at all Xaa locations
  Clone ID: MRT4577_150564C.1.pep
MAAKIFCLLMLLGLSASAATATIFPHCSXASIASLFPPYFSPASSSVCENSILQPYMFLHLIVAXNFPLLLLVLHHSSLL

SEQ ID NO: 240113 - protein, 90 aa, Zea mays
  unsure (1)..(90): unsure at all Xaa locations
  Clone ID: MRT4577_150565C.1.pep
LLPFAHFNLLSFLLCQVPQNVHLIIXNHESADINALFGFLLECIDRMIESDGILSCTTFNQLLNYLPLAAMIEKKIIFMHLGIIRSINTT

SEQ ID NO: 240114 - protein, 60 aa, Zea mays
  Clone ID: MRT4577_150566C.1.pep
MDLGCIFIFFFLGGMLLSLTNNYSVKWKPTPYRFNPEPFCQTPNQLWAPKVLYCLHEWKI

SEQ ID NO: 240115 - protein, 74 aa, Zea mays
  Clone ID: MRT4577_150567C.1.pep
MSLIAGEDFQHILRLLNTNVDGKQKIMFPMTFIKGVGRRFFNISCKKARIDMNKRAGELTPEELERLMTVGAHP

SEQ ID NO: 240116 - protein, 50 aa, Zea mays
  Clone ID: MRT4577_150568C.1.pep
GLSGDSSGLDADGGKRSHFSSIRGDDGQRSLDAVVCHKHSSELRFVVQIH

SEQ ID NO: 240117 - protein, 52 aa, Zea mays
  Clone ID: MRT4577_150569C.1.pep
LFNRALFRSHPSLQHKNLGAVDDLHSMADDSSTGGKNLNRPVSISSLVSNYD

SEQ ID NO: 240118 - protein, 54 aa, Zea mays
  Clone ID: MRT4577_15056C.1.pep
FIVWSLSESGKATLKCAVNRGQLSSHKPVQDDFVNILDRPMSKIMFPPKSAPPG

SEQ ID NO: 240119 - protein, 40 aa, Zea mays
  Clone ID: MRT4577_150570C.1.pep
VLGFFAGRPITCMFSEVNHGIDHLRASASEFRPLYSLMSF

SEQ ID NO: 240120 - protein, 95 aa, Zea mays
  Clone ID: MRT4577_150571C.1.pep
NAAPLSTKGAGASLLASYCAVTAFSAPALALVDQVCPPRVPASASGSLTTCWGGILLGVFGLICSPYTIYTSEPDHDKDSARPLALHSPPLLIMI

SEQ ID NO: 240121 - protein, 73 aa, Zea mays
  Clone ID: MRT4577_150572C.1.pep
SNQPFIFFTQPVLFFKSRWGAPPVSFSRRAQLEKLVCSKFHCSGDKSFRSPKLNLGLPPFALSNCRVKPCQWN

SEQ ID NO: 240122 - protein, 114 aa, Zea mays
  Clone ID: MRT4577_150573C.1.pep
SSRSNAFTRCGASNRKNKMSSKSKAPCMPINLTTTNSLRPGRQPIGQRSLPTRRRTRTTAHRSSPASNPERLHQRIGVTESCTFILYINNILSLHNPSVLEHVHEKFVYAVRSF

SEQ ID NO: 240123 - protein, 116 aa, Zea mays
  Clone ID: MRT4577_150574C.1.pep
LAAALPRQQIGVVQSKLGPVCFRALAYGVGLALAAHLLGRERGSLASRAQSLNLLAALGLVLANMLLVEPKASTVMFERMKVEKEEGRGRDMVDIVDPTEVTAATPTGGTTTVPTE

SEQ ID NO: 240124 - protein, 103 aa, Zea mays
  Clone ID: MRT4577_150575C.1.pep
NAPLRLGGAFPHPFDPKKKPTVRVGPLCLFCGASTFWGGLPTGFFPCRGLTSLPPFGDPNGHRRCPFQTQLKASTVENGGGGGSLWKRGSGTFWSRGAGPDPQ

SEQ ID NO: 240125 - protein, 69 aa, Zea mays
  Clone ID: MRT4577_150576C.1.pep
KTIWVSPLLTGVSHHHMGFCSPNKTPAGGRVHQALGKKKKKPPSRKKKKEKHRRPKKHGPKNTRPIRES

SEQ ID NO: 240126 - protein, 44 aa, Zea mays
  Clone ID: MRT4577_150577C.1.pep
VCLLHGSQLILTNKWHQMPPLKRGDGFRSCTGEKDDFSGDGHLP

SEQ ID NO: 240127 - protein, 105 aa, Zea mays
  unsure (1)..(105): unsure at all Xaa locations
  Clone ID: MRT4577_150578C.1.pep
PFRSGHCPGSPHACLLDRERPTLRRRVFSQFPPFSHFSPPSSLPRFNITMRERISIHIGQAGVQVGNACWELYCLEPGFXADGRMPRDKTFGGGVDAFGTLFSET

SEQ ID NO: 240128 - protein, 70 aa, Zea mays
  Clone ID: MRT4577_150579C.1.pep
YGPRCPISSPQFTPLINPINGHDVPFFPEPDRAAALMTTPLPKVTGERPIQPIEGCVEIPAHGDVPSSAV

SEQ ID NO: 240129 - protein, 46 aa, Zea mays
  Clone ID: MRT4577_15057C.1.pep
DYRQTPLFFRTSSKKVIRCIIMTVKVAPLSRPAFFFFFFTFSIHSA

SEQ ID NO: 240130 - protein, 168 aa, Zea mays
  unsure (1)..(168): unsure at all Xaa locations
  Clone ID: MRT4577_150580C.1.pep
SVRCFLVTKFPFLPKKKKKKKKKKKKKKRKKRKKEKKKKRGKRGKGKGGAVTEGPRGGVEHGRGGGRHGAGXTKGGMGAGGXEHGGAGDGXGGRLQCVREEHKTGGIVXGSADRAAASGXDDGMGGWRGKGIKAXSEDKMRGGRKDYQHVTGTIGGAYGQYGHTVSAY

SEQ ID NO: 240131 - protein, 64 aa, Zea mays
  Clone ID: MRT4577_150581C.1.pep
RVQVRYKVNVNWTGDVPLDSPLCASGAPVRWRLVLNEVNQCALRLLIWTCYHTCWISNEDRSMV

SEQ ID NO: 240132 - protein, 122 aa, Zea mays
  Clone ID: MRT4577_150582C.1.pep
TKNLGNRRSSKLPIPLIPPSNPQPLCFALVTRPHHTHTASALASSCVVVDTRRRGSVSLTIPRSDALAASSCRRRRALEHYHSPEKRRPTPKNAIHLQASRNRQSSFVDQVIKLLELYEIED

SEQ ID NO: 240133 - protein, 86 aa, Zea mays
  Clone ID: MRT4577_150583C.1.pep
FLIIFVFLFFVIVFLYFPRTGTQFLTLTKKSATELGARASSEHNTGRPNCWGFVNLIFRPLQLHQHRVPQQCQKRKPGIHKTNPNI

SEQ ID NO: 240134 - protein, 115 aa, Zea mays
  Clone ID: MRT4577_150584C.1.pep
PPSQLRRDGTLRLRSIPAPEGAHARAANNATPRELLDPVPRGSNRNDNTATVRSGRPSRGRDRRPIHLPPWTATDCDSQRTQFPFDTRAARTTGSRDLGYCSHRLSRPSSYSSRS

SEQ ID NO: 240135 - protein, 399 aa, Zea mays
  Clone ID: MRT4577_150585C.1.pep
MPMKSRDGGRGATTDAYCVAKYGQKWIRTRTIVDSLCPRWNEQYTWDVFDPCTVITVGVFDNCHVDGASGSAARDSCIGKVRIRLSTLETDRVYTHAYPLLMLHPTGVKKMGELHLAVRFACGNAGNMFHAYAHPLLPKMHYAEPLLVRQVETLRCQATNVVAARLGRAEPPLGKEVVEYMLDHRSSLWSMRRSKANFFRLINVLSGPVAIGRWFELVRSWQRPVHSCLAVFTFLVFLATPELVLPTAFLAMAFAGLWRYRGRPRHPPHMEMRLSHADGATADELDEEFDTFPSTRGDAVRFRYDRLRSVAGRVQTVVGDIATQGERMQAALSWRDPRATLLFAVACVAAAVIAYCVPTKVMVGMWGLYAMRPPRFRSRMPSPLMNFFRRLPSRADILL

SEQ ID NO: 240136 - protein, 96 aa, Zea mays
  Clone ID: MRT4577_150586C.1.pep
CHTKWGAVMRTRLREEPKKEGAHMHLLQDDHEAKKHPSRPSELRRNAAPPLPLREETISGYFTKEAMCLFHNVETMLLNPRPKTRASVSWGPTATS

SEQ ID NO: 240137 - protein, 146 aa, Zea mays
  unsure (1)..(146): unsure at all Xaa locations
  Clone ID: MRT4577_150587C.1.pep
MGTDRLRLAXLLLSACLCSAWARPRLXTTIRLPTERTAPDETDDNAAGTRRAALIAASNGYYNYRHQPDICHAYRIIPKVAHKDENILCCLVNDIAHNTENPSPAAHINRAQGVDVNAGAAKDYTGREVNIDTLRDEPRGNKTAPR

SEQ ID NO: 240138 - protein, 137 aa, Zea mays
  unsure (1)..(137): unsure at all Xaa locations
  Clone ID: MRT4577_150588C.1.pep
KHTPPPWFIINNTPKKKKTPPPQKFFVGGPPFPKKKKKGGGPPPPPRRRGDYKKSPPHCFFSPKKKAPPPGKIKKKPPFKKGSPTGGGAPWERGGPPPPXAFKKKFRGRSAPGQALAYASPTSPAPTPTPSPARRPL

SEQ ID NO: 240139 - protein, 41 aa, Zea mays
  Clone ID: MRT4577_150589C.1.pep
DCKARHIIAIITVMTATEEHTELRAKSAYRYCCTIERITNS

SEQ ID NO: 240140 - protein, 112 aa, Zea mays
  Clone ID: MRT4577_15058C.1.pep
TTKIHIFIGKPTGKKPGTLGKKGYRPAPDPKGNRGANQIKNFLITTFLFMEKKERGNYGKHPLVWFFGGKPGPELNEIKGKGGGEALGGEPRGNPLCRRGGEKQGGRETGPP

SEQ ID NO: 240141 - protein, 267 aa, Zea mays
  Clone ID: MRT4577_150590C.1.pep
MASISSSKVLALGALIFSFLVTYASCARPVNFTASDFTADPNWEAARATWYGAPTGAGPDDDGGACGFKNVNLPPFSAMTSCGNQPLFKDGKGCGSCYQIRCQNHPACSGNPETVIITDMNYYPVAKYHFDLSGTAFGAMSKPGRNDELRHAGIIDIQFKRVPCNYPGRKVTFHVEEGSNAVYLAVLVEFEDGDGDVVQVDLMEANSGYWTPMRESWGSIWRLDANHRLQAPFSLRVTNESGRKLVATRVIPANWAPNTYYRSIIQY

SEQ ID NO: 240142 - protein, 271 aa, Zea mays
  unsure (1)..(271): unsure at all Xaa locations
  Clone ID: MRT4577_150591C.1.pep
MAATSSSSSSTVVALAALLFLLLVTCGSCARPASFNASDFTADPNWEAARATWYGAPTGAGPDDDGGACGFKNVNLPPFSAMTSCGNEPLFKDGKGCGSCYQIRCQNHPACSGNPETVIITDMNYYPVAKYHFDLSGTAFGAMAKPGRTDELRHAGIIDIQFKRVPCNYPGQKVTFHIEEGSNPVYLAVLDEFEDGDGDVVQVDLMEANSXSWTPMREXSWGSIWRLDSGHRLAAPFSLRITNESGKTLVANQVIPANWVPNTYYRSIIQY

SEQ ID NO: 240143 - protein, 271 aa, Zea mays
  Clone ID: MRT4577_150592C.1.pep
MAATSSSSSTVVALAALLFLLLVTCGSCARPASFNASDFTADPNWEAARATWYGAPTGAGPDDDGGACGFKNVNLPPFSAMTSCGNEPLFKDGKGCGSCYQIRCQNHPACSGNPETVIITDMNYYPVAKYHFDLSGTAFGAMAKPGRTDELRHAGIIDIQFKRVPCNYPGQKVTFHIEEGSNPVYLAVLVEFEDGDGDVVQVDLMEANSGSWTPMRESWGSIWRMDSGHRPLQGPFSLRVTNESGKTLVADQVIPADWQPDNVYSSIVQFE

SEQ ID NO: 240144 - protein, 267 aa, Zea mays
  Clone ID: MRT4577_150593C.1.pep
MASSSFSKVLALGALIFSLLVTYGSCARPANFTASDFTADPNWEAARATWYGAPTGAGPDDDGGACGFKNVNLPPFSAMTSCGNQPLFKDGKGCGSCYQIRCQNHPACSGNPETVIITDMNYYPVAKYHFDLSGTAFGAMAKPGRNDELRHAGIIDIQFKRVPCNYPGQKVTFHVEEGSNAVYLAVLVEFEDGDGDVVRVDLMEANSGYWTPMRESWGSIWRLDANHRLQAPFSLRITNESGRTLVANRVIPANWAPNTYYRSIIQY

SEQ ID NO: 240145 - protein, 279 aa, Zea mays
  unsure (1)..(279): unsure at all Xaa locations
  Clone ID: MRT4577_150594C.1.pep
MAATSSSSSSTVVALAALLFLLLVTCGSCARPASFNASDFTADPNWEAARATWYGAPTGAGPDDDGGACGFKNVNLPPFSAMTSCGNEPLFKDGKGCGSCYQIRCQNHPACSGNPETVIITDMNYYPVAKYHFDLSGTAFGAMAKPGRTDELRHAGIIDIQFKRVPCNYPGQKVTFHIEEGSNPVYLAVLVEFEDGDGDVVQVDLMEANSXSWTPXMRESWGSIWRLDSGHRLAAPFSLRITNESGKTLVANQAGPAGWEPHPPYRPPVQALGGRRAPR

SEQ ID NO: 240146 - protein, 294 aa, Zea mays
  unsure (1)..(294): unsure at all Xaa locations
  Clone ID: MRT4577_150595C.1.pep
MATLSSTVVVALGAPLFLLLVTCGSCARPVSFNASDLTADPGWDAARATWYGAPTGAGPDDDGGACGFKNVNLPPFSAMTSCGNEPLFKDGKGCGSCYQIXVAAGDPLFACLSWKRKIWSRFTXFQIRCQNHPACSGNPETVIITDMNYYPVAKYHFDLSGTAFGAMAKPGRNDELRHAGIIDIQFKRVPCNYPGQKVTFHVEEGSNPVYFAVLVEFEDGDGDAVQVDLMEANSASWTPMRESWGSIWRLDSGHRLTAPFSLRITNESGKTLVADHVIPANWVPNTYYRSIVQY

SEQ ID NO: 240147 - protein, 91 aa, Zea mays
  Clone ID: MRT4577_150596C.1.pep
KFGNTGPFFGGGVPTLNIFYWFPTYRGGSQGKMIWGANNLFLKGPSFKGIDPIFKKKKGGVFWFEKKTQGASDKEDLINLGGKKAGEPFHK

SEQ ID NO: 240148 - protein, 145 aa, Zea mays
  unsure (1)..(145): unsure at all Xaa locations
  Clone ID: MRT4577_150597C.1.pep
RIDGRTHASADTCDDYSAVAMDSESQGVERLPMRTXMSPSEYHYASLQAYMLMLKLIHLKLRFYDQHRGLSALGPYMGTCIWQCIFGRFDPQTDLATSDSIXLRRHIGIDLSRHAADREHSRYYAELLIRSGVVSNSELHNLTSH

SEQ ID NO: 240149 - protein, 50 aa, Zea mays
  Clone ID: MRT4577_150598C.1.pep
TLDLQFCWWTCSVTFLFSLAPSPKIEISPTIYGCFRAPRFSGLGSLNCRP

SEQ ID NO: 240150 - protein, 43 aa, Zea mays
  Clone ID: MRT4577_150599C.1.pep
PGQAPVFFPGSTTPLSHPLKKTVIHCVILKHMPAVTTLTRLVL

SEQ ID NO: 240151 - protein, 127 aa, Zea mays
  unsure (1)..(127): unsure at all Xaa locations
  Clone ID: MRT4577_15059C.1.pep
MNCKSMLERLSNSYDYLVDEGAELSSTTELLLDRTHEKAIVDLMIPSLVLLINLLHILRETKEQYRNKKLLSSLLQLHREVRPQGXQACAADLSFMFPTFAIGFGVVCHLITSALACWPLYNWATAT

SEQ ID NO: 240152 - protein, 146 aa, Zea mays
  unsure (1)..(146): unsure at all Xaa locations
  Clone ID: MRT4577_1505C.1.pep
ADHPCTMVVRTKHWIIPDYFAWGVHISLLFLNRFAELLIHKPGEGFLLWLLATLLAPLXTNQIIHFSPVPFRILITRSXAGFFFFCQRWLFSKFAESYYAIPMRKHGMVPDHSLFQALATCLIAIQPKGFYERLEEGSIVLKRSKT

SEQ ID NO: 240153 - protein, 70 aa, Zea mays
  Clone ID: MRT4577_150600C.1.pep
QVYNRFLQLTQKNKTGSNVIKANPNTLGVLFYQFSQKLKIPQRLKKTLHGIWLKFMAFIKTPNPPPLFFF

SEQ ID NO: 240154 - protein, 131 aa, Zea mays
  unsure (1)..(131): unsure at all Xaa locations
  Clone ID: MRT4577_150601C.1.pep
MATVSDAVVTSIVARATIVRPNALRLPAMMARSQXGCGAATPRMPRTRPQTTPRWQAQSLLAAEGAWTSLAKASLWLVDXPMSTEVTGLSLVLNNHLLWWILLRFFRLIWSLYTIYTSDLDYDEDADGLSL

SEQ ID NO: 240155 - protein, 47 aa, Zea mays
  Clone ID: MRT4577_150602C.1.pep
PRTWPPSKELPYRQQVLWVTPEKNTIITWVKTYNTTQGDGSSPTRFK

SEQ ID NO: 240156 - protein, 435 aa, Zea mays
  unsure (1)..(435): unsure at all Xaa locations
  Clone ID: MRT4577_150603C.1.pep
MLLSRQAARMNLIAPTTQKMNWESEQRREQTSGDEQTMGRPKVHGDEQTPDSSKQKQELTFLDKQTKSSEQLVSCDVEVQEPVTWNXNRYKXQNSKKDHEVGSSTGSEMTEQPKVVKDNESLVASELSPETNDGDKKQLTESGNITADESSKPIDTKPASVKPKRGRPPAAKSQEKKPVGKKQASNLKSPKLDPVTDSVGRATRQLNNDVAKSSSTKAVDGESGKKQHKTSMKFQKEDAASDKDTDDDISLKTPVSKKNKMLDKNLIGSRIKVWWPDDKMLMINLNLSSGAREKTGAGAPWGRTSADRKQGAEGDQGEARRTELHGELEQEHRGKPGAAGEEEERAHRQPDLGRGELHREEAERHWTGKLRQGRTLNTARAQTETQAAEVDGGEGDRDRGDREGDLATENGRRRGWGRNQVNKVVNLLIELSFPF

SEQ ID NO: 240157 - protein, 118 aa, Zea mays
  unsure (1)..(118): unsure at all Xaa locations
  Clone ID: MRT4577_150604C.1.pep
MNASAMHQTTMFLSQALGTRAFTVYAGGCIAMRQSDKRDPQSIXNVPDRPKHLGPYSXQTATKLTGQFPGDYAXTTRASPAMQKSYXRNHQLQVIQSRCRKLIPLIWRLTKILHRNAV

SEQ ID NO: 240158 - protein, 96 aa, Zea mays
  Clone ID: MRT4577_150605C.1.pep
AWPRPRRKDNCPGGTHAPPAPRGTRPKPTENKAAKLNERTRRHYPTGRYTKTNTPHIGPQIAANTVEAPPPPPHAREKEDGHTTSCEVSPISNRAE

SEQ ID NO: 240159 - protein, 63 aa, Zea mays
  Clone ID: MRT4577_150606C.1.pep
KVANDTGSDKFSHSVNNVIDLKDKLSHCLSSRLLRRWCMFEWFYSAIDYPWFAKSEFVEYLKY

SEQ ID NO: 240160 - protein, 159 aa, Zea mays
  unsure (1)..(159): unsure at all Xaa locations
  Clone ID: MRT4577_150607C.1.pep
MHAPPGGAFGGACPATAGCSLWPWVGLRAAIGAAPGRLLWGRRGALRLGXKAAWRATGGGRGPRGPAKGAVLXSYMGAEEGGGPLSVRDEEELISHIRKEQDNGKLPADVAINGGERGYNYRNAGLRNGDPNAYEIMRSNMTALCDRVLLGGQNPFTFP

SEQ ID NO: 240161 - protein, 254 aa, Zea mays
  unsure (1)..(254): unsure at all Xaa locations
  Clone ID: MRT4577_150608C.1.pep
SSTASSTAAGKRCGDATTSALAHECVGRPIRASLXRIADPPAVSRLYVHWTSIPAIDCMKEPVVIAAHHNSILFRVSVPFDDPXFLEPNXYFPDDYFVYSSSSAPPSLTRLPPCFTRVPLCFGGGRTDPELDKWLQPHRRQQQRTMIEEDMGILCHGDKGEFTGADLTYRFNQEVQLCLLHHPPSASDAEMKWSVEKLQIPADMKIRLYSFKTDAVVTIGERCLCWVDYYHGMLLIDVLAGSNNNSRLRYIPLP

SEQ ID NO: 240162 - protein, 233 aa, Zea mays
  Clone ID: MRT4577_150609C.1.pep
LEDGTTVAVKVLKRYDDQGEREFLAEVEMLGRLHHRNLVKLLGICIEENARCLVYELIPNGSVESHLHGADRETAPLDWNSRMKIALGAARALAYLHEDSSPCVIHRDFKASNILLEHDYTPKVSDFGLARTARGEGNQHISTRVMGTFGYVAPEYAMTGHLLVKSDVYSYGVVLLELLTGRKPVDMSRPAGQENLVAWARPLLTNVLSLRQAVDPLLGPNVPLDNVAKAAAI

SEQ ID NO: 240163 - protein, 49 aa, Zea mays
  Clone ID: MRT4577_15060C.1.pep
SYVQVYILRSSNRLIKWNLFSHVLVANPTVQSDVTATTATPSAGRRNGR

SEQ ID NO: 240164 - protein, 95 aa, Zea mays
  Clone ID: MRT4577_150610C.1.pep
FIIESNVTFTGLPKETYFATNKARFAKFQHKIVYQFLPDHALPQSSDPWVIEAATRDAMTALLHNHIKALPANVETMVIMSDVDEIPSQHSIALL

SEQ ID NO: 240165 - protein, 115 aa, Zea mays
  unsure (1)..(115): unsure at all Xaa locations
  Clone ID: MRT4577_150611C.1.pep
LGPSRPAGFNSSPKLLCGISPEGAMYLFPPIRVPPRAMXAARRVGRSADGFYCLKLLEATGISTGPASAFXGEKEGVFHLRTTILPAEXDLPAMMARFEKLNDCLMEEDEGYSMM

SEQ ID NO: 240166 - protein, 60 aa, Zea mays
  Clone ID: MRT4577_150612C.1.pep
PAHGRKLTQALTKSSTNSVSPTAAQVPASRWRVPSKASESPAMGAALLGKEARIERANRR

SEQ ID NO: 240167 - protein, 100 aa, Zea mays
  Clone ID: MRT4577_150613C.1.pep
QVAKPIGDSIGSQAQEANSYGWVRSFTQCSEAIKTSTVRAKGAPLTITKSRKRKLAAIYNCAHLCRTTGSVLSSLQFYSVKQARSILLRHGKVLVLHAQA

SEQ ID NO: 240168 - protein, 56 aa, Zea mays
  Clone ID: MRT4577_150614C.1.pep
MARDKKHAETPSRGRSRRAARDRRRAHVPASAATAWARLIPIVSRLAARLSSVVCT

SEQ ID NO: 240169 - protein, 70 aa, Zea mays
  Clone ID: MRT4577_150615C.1.pep
HMQCNQTHYACYCLGSAPVKRVQGVGAGTYAVTYRRHECLQDPGSLVQVSPRRGWESSHPATRLEPTRQK

SEQ ID NO: 240170 - protein, 111 aa, Zea mays
  unsure (1)..(111): unsure at all Xaa locations
  Clone ID: MRT4577_150616C.1.pep
VVAADSVPFPAYGAHGQANRFDGGTCDHANQATVLHKLGGQRHLTLQLXNGDGNQNIVPLGSXYERRIDTRNYMXTTSLRSPXTAATAAMKVPAKPTPLTANAPAEKGGRS

SEQ ID NO: 240171 - protein, 114 aa, Zea mays
  unsure (1)..(114): unsure at all Xaa locations
  Clone ID: MRT4577_150617C.1.pep
PLYNYFIPTIHNNNTKKNTITQIKKPPXKTPTPPLLLHXLTNQTPTPTTTPTTXXXHPIXXXSTPTPFPPKTNNHPPSTPLLPXXTYLPTHPSPLLLFTTYYCIISVLYSLIFT

SEQ ID NO: 240172 - protein, 54 aa, Zea mays
  Clone ID: MRT4577_150618C.1.pep
PSTNDLNSVPTSATYLPGYHFSSVYLTQSLQSQSPGSSTLGHPALPLKKSLRVG

SEQ ID NO: 240173 - protein, 115 aa, Zea mays
  Clone ID: MRT4577_15061C.1.pep
MTGEEEQEHGGHRYVRMPPEPPEPEGLAAASSASFRLPESVRVFDELPRARIVQVSRPDAGDITPMLLSYTIEVHYKQVRPRAPPLPTSGFVWPSSSRWAVSVVVPGIWRYRIAA

SEQ ID NO: 240174 - protein, 69 aa, Zea mays
  Clone ID: MRT4577_150620C.1.pep
GGQGNYNFNLKKKFGEQGASVFSHPFLFVNWGGIPISQIGFKKVPHGWFNGPFFQPPIFQLWLRFLGCG

SEQ ID NO: 240175 - protein, 71 aa, Zea mays
  Clone ID: MRT4577_150621C.1.pep
LNTMDPTKFRPSSSHDTTVTTTNAGAPVWNDNEALTVGPRGPILLEDYHGGERVAHFARELIPERVANTRL

SEQ ID NO: 240176 - protein, 189 aa, Zea mays
  Clone ID: MRT4577_150622C.1.pep
QEIGTLANMQRLVLAGNLIEIIPANIGYLRNLKILTLDRNRISILPEELGSLSNLQQLSVPQNFLLCLPKSIGDLRNMSVLNVSENKLKELPESIGGCSSLEEFQANGNAIEDVPASICNLVCLKSLSLNGNKIRQSLSLHDNPITMDQFQQMDGFGEFEARRRKKFDKQIDSGVMMGSTALDEGVDFH

SEQ ID NO: 240177 - protein, 271 aa, Zea mays
  unsure (1)..(271): unsure at all Xaa locations
  Clone ID: MRT4577_150623C.1.pep
MGCCSSRSSDSPASRVTRWRSTGIVALRDARLKVRAISIPKEVPNEVLQVGNSLRTLDLTNNKLVEIPQEIGTLANMQRLVLAGNLIEIIPANIGYLRNLKILTLDRNRISILPEELGSLSNLQQLSVPQNFLLCLPKSIGDLRNMSVLNVSDNKLKELPESIGGCSSXLEEFQANGNAIEDVPASICNLVCLKSLSLNGNQIRQLPQNLLKDCTALQSLSLHDNPITMDQFQQMDGFGEFEARRRKKFDKQIDSGVMMGSTALDEGVDFH

SEQ ID NO: 240178 - protein, 70 aa, Zea mays
  Clone ID: MRT4577_150624C.1.pep
SAATPSAFTPVTPPISISTPRLHWTIFWKNRGEKTGGKANTREALSDRPTLSGGLAHYTNANHAFIARGL

SEQ ID NO: 240179 - protein, 53 aa, Zea mays
  Clone ID: MRT4577_150625C.1.pep
LNLYSVSILSMLCCCSVVVAVVLCVCVLSHQYATVMESFCLSRNLKIYFISHA

SEQ ID NO: 240180 - protein, 37 aa, Zea mays
  Clone ID: MRT4577_150626C.1.pep
SLDHQRMFIRGGTDHPRSQRSSVLRMCQNLLSGPSEW

SEQ ID NO: 240181 - protein, 91 aa, Zea mays
  Clone ID: MRT4577_150627C.1.pep
QQLVQQIVPVLIQVVVANPGAYLKQLVPFNQWGGGNFGGSVQQRQQVVNPLAVGNPLVGTFLKEKQQLWPYNQFFLMNPALKEPIVGGAIF

SEQ ID NO: 240182 - protein, 134 aa, Zea mays
  Clone ID: MRT4577_150628C.1.pep
MAAPIPREWVGLQQFPAATQTKLHELLGKLKEENVSTLTILVMGKGGVGKSSTVNSIVGERVANVSAFQSEGLRPMMCSRTRAGFTLNIIDTPGLIEGGYINEQAVEIIKRFLLEKTIDVLLYVDRLDTYRMDT

SEQ ID NO: 240183 - protein, 53 aa, Zea mays
  Clone ID: MRT4577_150629C.1.pep
GTGPIFLELELFQTRSKSMLISFLNRYFTCPPTIFIDLTALLRLSFSYLSQIL

SEQ ID NO: 240184 - protein, 97 aa, Zea mays
  Clone ID: MRT4577_15062C.1.pep
FPVHRDEAHLPVTGTAGMTPAPTHRALALMDERPPYLPEETVKYDTTDATTSSLLHRSTETMTTSTMGSSLPYDGQADSHIDDPFLLFVYFVSQLKT

SEQ ID NO: 240185 - protein, 140 aa, Zea mays
  Clone ID: MRT4577_150630C.1.pep
RRRCPHGRSSTATAIACRGESSEQIAVTQTQGAAVRVVSDEAGRVYLGRDLHREGDSDQESNCRCGERRREDDRVSHYYYHRSFTGRSRRKRRENSLRRNCSPSFVSLEPNTICTARWWRRSSGRSLWRSNGMNCRGGVA

SEQ ID NO: 240186 - protein, 78 aa, Zea mays
  Clone ID: MRT4577_150631C.1.pep
FASCRLVAIFSALYCCVALPKKGFIFFFDKTLTCSLLILKHARKMMGGSIKNKSGFLSFGALFQTPDGGNVAFDNLYI

SEQ ID NO: 240187 - protein, 85 aa, Zea mays
  unsure (1)..(85): unsure at all Xaa locations
  Clone ID: MRT4577_150632C.1.pep
GKNMGFFPXNPGQLIYGYSRRNRINQHACRHTSMSTKTGAKHAERDSKLKNSGSFFLTHTPHNTYVWEPARPRLLLVNHHHKLDR

SEQ ID NO: 240188 - protein, 57 aa, Zea mays
  Clone ID: MRT4577_150633C.1.pep
GWKILRFFLLKHNGASILHFFSFFSTKNQLFPPLNLGLGLNTTATSFLAENETNVEK

SEQ ID NO: 240189 - protein, 85 aa, Zea mays
  Clone ID: MRT4577_150634C.1.pep
VNRKKPSIFARVITINYPSLSNQWLVWSITKFGSSLGGQTIFFFLFQIMCVGQFINRAPPSPRGNLYLKKCFIRTKGRRDASVWP

SEQ ID NO: 240190 - protein, 413 aa, Zea mays
  Clone ID: MRT4577_150635C.1.pep
MAASNAGPEAAATAAGHRFNFDVIVVGAGIMGSCTAHAAASRGARVLLLERFDLLHHLGSSHGESRTIRDAYPKAQYPPMVRLARRLWAEAEAESGYSVLTPAPQLSLGPRSNASLLAAVRSAGAEEADLTRRWGGAFRVPDGWVAAVSERGGGVLNATKAVAMFQALAVRKGVVVRDKTEVLGVRKALEEGGVVVTTSTGAEFRGAKCVVTVGAWASKMVRSIAGLELPIQPLHTMVLYWRIKPGHERELAAESGFPTFSSYGDPHVYSTPSLELPGLIKINYDGGPPCDPDARDWADGGGGVAERVARWIEEFLPDHVDTAGGPVSRLSCMYSMTPDKDFVIDFLGGEFGKDVVVGAGFSGHGFKMAPAVGRILAEMAMYGKESTATEAGVELGHFRINRFEGNPLGNAAN

SEQ ID NO: 240191 - protein, 427 aa, Zea mays
  Clone ID: MRT4577_150636C.1.pep
MKGGCLHRLLVHKLCFGLSVLLTVTIIVLLLEGAPVLTIFSPTPGQLKVLSQGFLHQQEQEHLGDDGATLVGSPGPASLSRSRKNCNYAKGKWIEDDKRPLYSGNECKQWLSKMWACRMMRRTHFSYENYRWQPHDCEMPEFTGPKFLKRMRNRTLAFVGDSLGRQQFQSMMCIATGGKYSPEVEDVGWKYGLVKAPGALRPDGWAYRFPSTNTTILFYWSATLSELEPLNTEHAVTRYALHLDRPVTFLKEYLNDFDVLVLNTGHHWNRGKFNGNHWELHADGKPVGNGSRLADLNRAKNLTLHSIARWMDSELARHPKMKVFLRTISPRHFVNGDWNTGGTCGNTVPFTNGSEVLQDHSIDIPAENAVKGTRVKLLDITAISKLRDEGHISNSSFKKASTGINDCLHWCLPGIPDMWNELLFVQI

SEQ ID NO: 240192 - protein, 119 aa, Zea mays
  Clone ID: MRT4577_150637C.1.pep
SRGRPGARLHTTSPLSFTFRTPNAHHTICTPIMTIASPSGMESEQDPMVAPRITYNISSLAYLNDKANNAHAARPGYLRQAALTGAPVQVESPLRILSETLRTNSSLAPQGLVHDSDGA

SEQ ID NO: 240193 - protein, 115 aa, Zea mays
  Clone ID: MRT4577_150638C.1.pep
ASDQLRGVRQILCCLTGMKGGCLHRLLVHKLCFGLSVLLTVTIIVLLLEGAPVLTIFSPTPGQLKVLSQGFLHQQEQEHLGDDGATLVGSPGPAFRKRSQKIATTLIKCSICSYR

SEQ ID NO: 240194 - protein, 144 aa, Zea mays
  unsure (1)..(144): unsure at all Xaa locations
  Clone ID: MRT4577_150639C.1.pep
MPPPTDEKPPHAPAPEAGNYYADRVPVVMGETVPDHCFCDAPRESWDSEILCCLARHDELCSXRITAXLLGTGEPWVLYGTHGERVAAGQGTFANRXVAHAVLQWRENSRYERNCLEPXCSPPAHTASPRRYNLEGICDDVTSQ

SEQ ID NO: 240195 - protein, 89 aa, Zea mays
  unsure (1)..(89): unsure at all Xaa locations
  Clone ID: MRT4577_15063C.1.pep
IKAGASLGSQDRSPRHARVHGRPEFTEARYDXVTGHSSVNLLRHTSSVVCLLHHSCRPWPPKSGVALFISILRSSTFSSHQPGVMAVYI

SEQ ID NO: 240196 - protein, 98 aa, Zea mays
  Clone ID: MRT4577_150640C.1.pep
GLAQNPPVPKKPGVFYPQISLSGLCGGIFPRILKQPPGFKTPPFWGSRGPPGPPFWVFLGAPPFGPSPFRGFPFCPRESRLPPPSLGGGGNLFFRGFF

SEQ ID NO: 240197 - protein, 62 aa, Zea mays
  Clone ID: MRT4577_150641C.1.pep
NQSAYEGPRIPPAPLPVRRTGVFTEALQFGVGSRSPRVRLCPGQSISVPPGPRPWLVNPVLC

SEQ ID NO: 240198 - protein, 132 aa, Zea mays
  Clone ID: MRT4577_150642C.1.pep
KEPRPKQPSVEAGAFAAGAFALYEKPEAKKAPGPAPPPKIKKKFPGAAPLGSGGFPFPGPPEKKKAPKGAEGAGGKKKPPFLGCLFLRFGGPSPCVTGGCESNIEPPPFCGGVRMYALFLCPNKGGSVIFGM

SEQ ID NO: 240199 - protein, 108 aa, Zea mays
  Clone ID: MRT4577_150643C.1.pep
LIYRLQFCCKIHAEKMKTRNNKQIELSFFFICLYIRSFSLLLFISFVYCFSATYTLLSPSLLFSIALTSGRLPRACGWIADEMKYSRFRVHRTCAIFYRFVCSLLLER

SEQ ID NO: 240200 - protein, 69 aa, Zea mays
  unsure (1)..(69): unsure at all Xaa locations
  Clone ID: MRT4577_150644C.1.pep
RPPVGGESPLGGARPRDLPQRPQXLNPPAGGNPLGAALRQQHQXVPDNQFSLMGPALSGQQPIVPGAIF

SEQ ID NO: 240201 - protein, 62 aa, Zea mays
  Clone ID: MRT4577_150646C.1.pep
IRLEAGRNFNYTHMDDDLWLVFIKTSMAPEWIELAVVRLNTKNHLLLTEGPRKYFGRDRYLD

SEQ ID NO: 240202 - protein, 65 aa, Zea mays
  Clone ID: MRT4577_150647C.1.pep
PPRTLHIHTVSYPCKYGLKRGSNGIPVTAKTTYCSSSIEPRSEREHKSLLKTKSGGGDDLGSLDL

SEQ ID NO: 240203 - protein, 68 aa, Zea mays
  Clone ID: MRT4577_150648C.1.pep
DNSCETGAMSTEFHMCVPRETSLLPTNKCVCNKSKGWCTPSPQIIRSLSTSCQSCGCISRSPGSMGTS

SEQ ID NO: 240204 - protein, 66 aa, Zea mays
  Clone ID: MRT4577_150649C.1.pep
RVKALRFPFNKFGSEITGLSTRVSLYKLFQQGGPCSSKKTRYCHTFYLAHFFTRNHLTVPIHVLIP

SEQ ID NO: 240205 - protein, 97 aa, Zea mays
  Clone ID: MRT4577_15064C.1.pep
FTPSCHMPMACTQTFLLVCELPSSLHLNTSIQGYTGVENDGFPVYNLLEPLCISSYCNSRLKNNNLVEGFFFFFGMQISQFSYIHIDWNTDTKFQDT

SEQ ID NO: 240206 - protein, 76 aa, Zea mays
  unsure (1)..(76): unsure at all Xaa locations
  Clone ID: MRT4577_150650C.1.pep
LHLLCPNMSLERPALGASDGGPGPVRRLRESERRGLQWRYADPGEGKVGRRPXGCGWGRGRRRRRRKRRRRKGRER

SEQ ID NO: 240207 - protein, 232 aa, Zea mays
  unsure (1)..(232): unsure at all Xaa locations
  Clone ID: MRT4577_150651C.1.pep
MQTTAVVVAALLLLLSAFPRLGSATAAADTNTNTNQTTSGGNGTGCAPARCGGLTITYPFSLVGAHPIYCGFPAFQLTCDAAANRTYLSRTFRDRLYRVLHIFYGNSSLVMAVEATFAGDGGCRVPDFNVSASLALLPVDISAANRNLTFVYGCDVPPRLRLQPACDNTTMGAYTSDDDTTEPLGSMNCSSVSVPVRWIERGTEPXVSAEXYQSXIGEGFLLEWAXSSTANC

SEQ ID NO: 240208 - protein, 64 aa, Zea mays
  Clone ID: MRT4577_150652C.1.pep
RRCPAAVSGGRPTRACSRGRTLGDLGTPFDPINSVKLGTLYSYELHGVACELNSPYTHSCHIGA

SEQ ID NO: 240209 - protein, 274 aa, Zea mays
  Clone ID: MRT4577_150653C.1.pep
DADKRSCRKRLDGHNRRRRKPQPDTMASASFIASQQGTRFSPFAHPRLEASWPPGVMKTEESPYHITHQIPLGSSSSSRQQHFVALGAATPAYAKEGRRFPFLQEGEISFATGVVLEPPAAAPACQPLLRTGAPSESSGAGGSKMFSDQGLARVLDSDCALSLLSAPANSSGIDVSRMVRPTEHVPMAQQPVVPGLQFGSASWFPRPQASTGGSFVPSCPAAVEGEQQLNAVLGPNDSEVSMNYGGMFHVGGGSGGGEGSSDGGTSSSMPFSWQ

SEQ ID NO: 240210 - protein, 82 aa, Zea mays
  Clone ID: MRT4577_150654C.1.pep
QINSPLSHQFPLTYHTQNSLEEQWMGTPLIFSDCTKTALNFFSLLQSQVHPSLSPISFIRTELPLHIKLTHKILVFNFVVNF

SEQ ID NO: 240211 - protein, 93 aa, Zea mays
  Clone ID: MRT4577_150655C.1.pep
PATPGGAIKDNPGYPPQETPPRGAKNPPGGPQGGAKGGNPPGGEGKQRRPRGAKTSHQGGPRGDKPGGAQTNPHTRGENPRGPQQSEGGGPPP

SEQ ID NO: 240212 - protein, 60 aa, Zea mays
  unsure (1)..(60): unsure at all Xaa locations
  Clone ID: MRT4577_150656C.1.pep
ERLIRRRLLLPGGLRRLGVRRQRRAQEREERVLGLGAXRGAGRVRGQRERTRLRCGGRAR

SEQ ID NO: 240213 - protein, 247 aa, Zea mays
  Clone ID: MRT4577_150657C.1.pep
MNMLQTPPFHSNSHEKESGAVFSNSFNMAPSVTPTSPFQLMSPSSTNYTSTQIFEETNNLEDTSRVFGGGDNESNNSEEPDPKPAVEMEDLNQGNDHTSNKTANCQDYRMVLRKDLTNSDVGNIGRIVLPKKDAEPNLPILEDKDGLILEMDDFELPVVWNFKYRYWPNNKSRMYILESTGEFVKRHGLQAKDILIIYRNKKSGRYVARAVKAEDIAPPECECVEAGNPREECGFSVSPSINKKIIT

SEQ ID NO: 240214 - protein, 111 aa, Zea mays
  Clone ID: MRT4577_150658C.1.pep
AAFSPSPLLSRGDSDEPTTVRPSLPLYSPVARVFFVPLEIDGHNQGKQEVSQGCPGARLMSLTLAWAPCGCGPGDWLLPPPVSGPPCLANRIPAAWADRPVVREPPLTSSS

SEQ ID NO: 240215 - protein, 37 aa, Zea mays
  Clone ID: MRT4577_150659C.1.pep
RWFWPIFFCIMSKSVHHVTAFVISVRDKGYVSQPTLH

SEQ ID NO: 240216 - protein, 85 aa, Zea mays
  Clone ID: MRT4577_15065C.1.pep
QHAAGASLRKHACSSRNATDPTTGLMEFQLPLPVPIILSAVVVDRRAVVMVRGLGSSGPLSLSGSLPHISPVCARRGCLAWPRLI

SEQ ID NO: 240217 - protein, 250 aa, Zea mays
  unsure (1)..(250): unsure at all Xaa locations
  Clone ID: MRT4577_150660C.1.pep
MVAASVAERAYEAATRSALVALERNLIPDAVTRRLTRLLLAQRLRQGYLPSAPLQLQQLLQFVHSLEEMPIAIETDKAKAQHYELPTTFFKLVLGKNLKYRDNELSNIEIIVADISKFEMERSFDRIVSIEMFEHMKNYKSLLKKISRWMKEDGLLFVHLFRHKAFPYHFEDKNDDDWITRYFFTGGTMPSANLLLYFQEDVSVVDHWXLVSGTHYARTSEEWLKRMDKSITSVRLIFEETYGKGSTTNG

SEQ ID NO: 240218 - protein, 357 aa, Zea mays
  Clone ID: MRT4577_150661C.1.pep
MVAASVAERAYEAATRSALVALERNLIPDAVTRRLTRLLLAQRLRQGYLPSAPLQLQQLLQFVHSLEEMPIAIETDKAKAQHYELPTTFFKLVLGKNLKYSSCYFPGDSSTLEDAEVAMMDLYCERSKLQDGQSILDVGCGWGSLSLYIAKKYRNCSVTGICNSTTQKAFIEEQCRDNELSNIEIIVADISKFEMERSFDRIVSIEMFEHMKNYKSLLKKISRWMKEDGLLFVHLFCHKAFPYHFEDKNDDDWITRYFFTGGTMPSANLLLYFQEDVSVVDHWLVSGTHYARTSEEWLKRMDKSITSVRLIFEETYGKESTTKWIAYWRTFFISVAELFGYNNGDEWMVAHYLFRKK

SEQ ID NO: 240219 - protein, 107 aa, Zea mays
  Clone ID: MRT4577_150662C.1.pep
MEFAYFNDAQRQATNDAGRIEGLVVMRIINEPTAAALSYGMNSKEGLVGEVCSCRRAWSARPHDAKQVRSARACHPSRARVPSEECKASRRAARSVLLVRVTHCWNR

SEQ ID NO: 240220 - protein, 34 aa, Zea mays
  unsure (1)..(34): unsure at all Xaa locations
  Clone ID: MRT4577_150663C.1.pep
VYIHISLSMLFYIYTMXXXPPDYLFIKAKTPYNF

SEQ ID NO: 240221 - protein, 133 aa, Zea mays
  Clone ID: MRT4577_150664C.1.pep
SNSLIILERSHRFTREELDNHRYKLQESLDDVIRLRQLISAKDAVIKELRASKKSVAQELETAQLAVKVAEETSATLRAQRDRAMDKAIRAGRILMTRPGVVVPDDIRADVNAAPDSSSRPSSSVAPEKNVAK

SEQ ID NO: 240222 - protein, 458 aa, Zea mays
  Clone ID: MRT4577_150665C.1.pep
SYNFLQGEVPGTRALRRFPASAFDHNLRLCGEVVNADCRDQEGLPSSGAPAYGSSSPVVRPAGDGGRAARKHLRFRLAAWSVVAICLIAALVPFAAVFIFLHHKKKSQEVRLGGRASASAAVTAAEDIKDKVEVEQGRGSGSRSTESGKGAELQLFRADGASFDLDELFRSTAEMLGKGRLGITYRVALQAGPVVVVKRLRNMSHVPRRDFTHTMQLLGKLRHENVVDLVACFYSKEEKLVVYEHVPGCSLFQLLHGNRGEGRTPLPWPARLSIAQGMVRGLAYLHKSLPYFHRPPHGNLKSSNVLVFFSAPNGKQQKQAVPKLTDHGFHPLLPHHAHRLAAAKCPEFARRGGRRLSSRADVYCLGLVLLELVTGKVPVEEDGDLAEWARVALSHEWSTDILDVEILGDRGRHGDMLRLTEVALLCAAVEPDRRPKLQDVIRMIDDIAGGDGSELDRR

SEQ ID NO: 240223 - protein, 106 aa, Zea mays
  unsure (1)..(106): unsure at all Xaa locations
  Clone ID: MRT4577_150666C.1.pep
NVPAYFNDAQRQATNDAGRIEGLVVMKIIXEPTVAALSYGMNSKEGLVGEVCSCRRAWSARPHDAKQVRSAHACHPSRARVPESEEECKASRRAARSVLLVRVTHC

SEQ ID NO: 240224 - protein, 80 aa, Zea mays
  unsure (1)..(80): unsure at all Xaa locations
  Clone ID: MRT4577_150667C.1.pep
FPPPRRDPTGDRRQVFPPLRECAKKYLFFLTVICWVVVNLKMCNFKKXLYCPRALVVNVFCVLFWPLAEQRRLDWARSWL

SEQ ID NO: 240225 - protein, 52 aa, Zea mays
  Clone ID: MRT4577_150668C.1.pep
EPEHGVLVQGGIHLGGEGFLWTLLCECPTVAKRGYGCGAGAACSSLASMVPF

SEQ ID NO: 240226 - protein, 113 aa, Zea mays
  Clone ID: MRT4577_150669C.1.pep
RQMGSVGVLKSVQKKGPTGDQVTKASIKKILWGLPWAPAHVGFAAVKFNMLKPIGCEPCGWCLGIYTVIFRHDDLHGASNWGGNYKAFVFKQTPLKKKKKKKKRAALRCRGSR

SEQ ID NO: 240227 - protein, 126 aa, Zea mays
  Clone ID: MRT4577_15066C.1.pep
WHFQPRYACPAHIIVVLLESAVFWMTDHKDFSPLALDPVWPHAFHCIVSRESTGGFSAGGRCLLVPSLARRRCRCFCCSLWYLPSACAPSWLLNISSRNHLLASRAECISTPEPLYMHAPLFLCWI

SEQ ID NO: 240228 - protein, 75 aa, Zea mays
  Clone ID: MRT4577_150670C.1.pep
ESVVDLVFAIDFTLHLRSSCHGDLAKPARRPHFVFASVRPAVLALFSFASGADFASCGFMCVCVICEERNPMSVR

SEQ ID NO: 240229 - protein, 108 aa, Zea mays
  Clone ID: MRT4577_150671C.1.pep
MLLILVLLLLVVRALLVVLLPSRAMAQTVVLKVGMSCEGCVGAVKRVLGKMEGVESYDVDIMEQKVTVKGNVTPDAVLQTVSKTGKKTSFWEAEAVTSESATPAGATA

SEQ ID NO: 240230 - protein, 96 aa, Zea mays
  Clone ID: MRT4577_150672C.1.pep
DIPPYQQHVMVFEFKVEQDMSLACVQLLKDQAPPACMCPLSCGLVSHRLFKLRMGWVRKAPLTYYGCPRIPCQVPESWHSWLIKGVIARWLSGPMN

SEQ ID NO: 240231 - protein, 91 aa, Zea mays
  Clone ID: MRT4577_150673C.1.pep
FYSTKIQNKCDVTHHSWNSHSEEGGRVTPEQKHPVLKTPRPHTLHPQSGLRGAVGLGYTHHSRARRAAAVSTIIQRGCVQKMTKSEREVHF

SEQ ID NO: 240232 - protein, 43 aa, Zea mays
  Clone ID: MRT4577_150674C.1.pep
LGPPCIIWSRVSPLMASECLGIIPAWPRMPPRDPLKLTSLRPG

SEQ ID NO: 240233 - protein, 94 aa, Zea mays
  Clone ID: MRT4577_150675C.1.pep
RAYILSGLSSHSWQRATARGDSTELTGLVHTYQTPSMVNMLNRSQALQPEVAEALTRSPTIAPLRSPAPASGSRGTRRGPRSFRPAKSFTGRSS

SEQ ID NO: 240234 - protein, 507 aa, Zea mays
  unsure (1)..(507): unsure at all Xaa locations
  Clone ID: MRT4577_150677C.1.pep
KVCTRSRCSIMDIIAGLDAAVKDGVDVLSFSIGAYSGTQFNYDPIAIAAFKATERGIFVSCAAGNAGPEPGTVGNGAPWMLTVAAGTMDRAIRTNVKLGNGEEFHGESLFQPRNNSAADPVPLVYPGADGFDASRDCSVLRGAEVAGKVVLCESRGLSDRVEAGQTVAAYGGVGMIVMNKEAEGYTTFADAHVLPASHVSYESGSKILAYLNSTANGTASIDFKGTIIGSYPSPAVTFFSSRGPSKASPGILKPDITGPGMNILAAWAPSDSHTEFSDXGGADLSFFVESGTSMSTPHLSGVAALLKSLHPDWSPAAIKSAMMTTSDAVDRTGLPIKDEQYRHATFYALGAGYVNPALAFDPGLVYDLRADDYIPYLCGLGLGDDGVTEIAHRPVACGGLRAVTEAELNYPSLIVNLLAQPIAVNRTVTNVGKASSVYTAVVDMPKDVSVTVQPPMLRFTALDEKQSFTVTVRWAGQPNVAGAEGNLKWVSDDYIVRSPLVIPAKGE

SEQ ID NO: 240235 - protein, 41 aa, Zea mays
  Clone ID: MRT4577_150678C.1.pep
LLVRIGLALIVRSLFHESNDLGSPVSIVKCSNTICLGFLAR

SEQ ID NO: 240236 - protein, 132 aa, Zea mays
  Clone ID: MRT4577_150679C.1.pep
SAEKFWLSRGSWGLHCFFVCGVRPRGAFVENPSYSLPCAEFWGFLGGWSQAPLPGRSFPLFFRRVFFFLVGVGGGLLVFFFLLGRKGGSPPPPWGFFCLKKKKKKKKKQKRKLKNKKKKKKKKKKKKKKAET

SEQ ID NO: 240237 - protein, 128 aa, Zea mays
  Clone ID: MRT4577_15067C.1.pep
VKTSTFKRVQPILVKKIFGSNKKNPRGGGKPTNPLPRFLTPNPKIFFKRGVPFRGPPRGPKQPKSPGPETFKKNHGLLPPPGGEPQGKRALLLGGEPCKGAAFLQLVAKKKKTVGGWGGAPFCPGFLP

SEQ ID NO: 240238 - protein, 271 aa, Zea mays
  unsure (1)..(271): unsure at all Xaa locations
  Clone ID: MRT4577_150680C.1.pep
PVESPQSEEKDVDSGAAALPKLKPLHWDKFRASSGRPTVWDQLKASSFRVNEEMIETLFVSNSTRRMPKNGFKEANGAPCNQENKVLDAKKSQNIAIMLRALDTTKEEVCKALLDGQADSLGTELLEMLLKMAPTREEELKLREYREDAQSKLGSAESFLKAVLGIPFAFKRAEAMLYIANFDSEVDYLKTAFKTLEAACEELRGSRLFHKILDAVLKTGNRMNTGTNRGNAHAFKLDSLPQLVDIKGTDGKTTLLHFVIEEIPXSEGATL

SEQ ID NO: 240239 - protein, 37 aa, Zea mays
  Clone ID: MRT4577_150681C.1.pep
NLAESTCSYVTPGFRLRDARRSFRLTCGGFGFSRADH

SEQ ID NO: 240240 - protein, 48 aa, Zea mays
  Clone ID: MRT4577_150682C.1.pep
MTGVVVVSTGCKGGSVGKKRGGGEEAEERERQQLSVLALLLAAVRRSV

SEQ ID NO: 240241 - protein, 126 aa, Zea mays
  Clone ID: MRT4577_150683C.1.pep
VQKKVFSFTKIGRSPTSVCLSSPVPATDTPQGHLHTNRVCDNVWTFILTDATFKSAEIQETPSKMGLNAVVAACYVFPVLVSVLAVRFFYVLWHSGQPESRLCATRLRCLIVLGSGGHTAEMMNIV

SEQ ID NO: 240242 - protein, 38 aa, Zea mays
  Clone ID: MRT4577_150684C.1.pep
KSPGKKCNKVFLAPSKGKLIAPMLDSLKKWDGKPLPIF

SEQ ID NO: 240243 - protein, 94 aa, Zea mays
  unsure (1)..(94): unsure at all Xaa locations
  Clone ID: MRT4577_150685C.1.pep
TVVATFQGLXDTGRLPVFLRWSISLGSVSNXGRIRCMHVCTFYGNKKFXTLSYLPALSIDDLLNHADYLLFNSWIPWLEFTKVSFLYRRERYLY

SEQ ID NO: 240244 - protein, 135 aa, Zea mays
  unsure (1)..(135): unsure at all Xaa locations
  Clone ID: MRT4577_150686C.1.pep
MQSREANWSSHRACLQHGGGDKGQPPADKTTQHGENAFNTLLRGTEGGRHALPATRGDRDLTDLDKAMTASYAPLVHLYQHIQDRVRCSXQLARGAYTIDDVILELSPSPMTEPGINCPQLQGCIMLSANRGGPV

SEQ ID NO: 240245 - protein, 96 aa, Zea mays
  unsure (1)..(96): unsure at all Xaa locations
  Clone ID: MRT4577_150687C.1.pep
FEIQFPGLFPVPPGPGQGSGLPGVFCRVYWCPSFGILRLKFKGPFYCPEVFFLKKFCYLFWGGFHASLWVQTYSLTTKCPSRNXYXLTRILFGIFL

SEQ ID NO: 240246 - protein, 173 aa, Zea mays
  unsure (1)..(173): unsure at all Xaa locations
  Clone ID: MRT4577_150688C.1.pep
SVSRSTPRPPRVRPRVRGRVGGRVGGRAVKKRVSQRTDIRQCVACLLVSYARLVKLLQVSYYSKSVLSGLVISTGGLQESLKKASMSALVGYLQDSDINTNCEGKSREYLLSCDLLWGLQHYQKXDXVITPMXKTIEALFSKKVFLNKEGXXEFYXGLGDXXSSELKGSKDFT

SEQ ID NO: 240247 - protein, 66 aa, Zea mays
  Clone ID: MRT4577_150689C.1.pep
VAAFATRSTTWTDKYGETTGSINSVVGIAFSATQKWADQTANSWAGLKCVLTMTTGRAHKTPLLAI

SEQ ID NO: 240248 - protein, 100 aa, Zea mays
  unsure (1)..(100): unsure at all Xaa locations
  Clone ID: MRT4577_15068C.1.pep
AXNEACLLPALAVAVEGDASSTISLPAPDTERGAGNAKPLPASEPDGNAIHFSTISAACLDDDSAMDASPRRLRTRLSRSTAVGQVRENDHLPKQAPLQN

SEQ ID NO: 240249 - protein, 62 aa, Zea mays
  Clone ID: MRT4577_150690C.1.pep
AIALVGWFQNRNGEPSRHLSSYTERSPLPMDDYSNQMVCDAVEAEHFFSLSFRCQMRGSYCM

SEQ ID NO: 240250 - protein, 179 aa, Zea mays
  unsure (1)..(179): unsure at all Xaa locations
  Clone ID: MRT4577_150691C.1.pep
TSFFFFFFFFFFGFFLFFVFFFFYFSLFFFFFLLLIPLKRPPGPEHPKGEPHQTEGRPKGTPAGNQPRRKKAQKPAPPKKKVPNPRGPKKKTGNKKGKPRGAQGKNKQPKKGGGPKTPPKPGXGEPKEKTNRPXRKKAGRLGGPPPPPLPTKKRAXTGFQGAXPPQKGAPKQSPPNSRK

SEQ ID NO: 240251 - protein, 259 aa, Zea mays
  Clone ID: MRT4577_150692C.1.pep
MWRRAGAGPLLHHLAAAASAAAAGRCINGRPLPPMPTASWSPLFQHNLGISWGSASVGAPFRSLSNQSSGGGACWSCGATGAFLSCGSCGSVQPVDPAVDYFQIFGLKREYNITDNNLEGKYKDWQKKLHPDLVHSKSEKERGYAAEQSALVIDAYRTLSKPLSRALYLLKLEGIHVDEEKTINDPELLMEMMEIREAVSDASDSQTLEKIQSQIKAKLETWSDSFQEAFDRKDFDRAMEATQRMRYYERAVEETVKKL

SEQ ID NO: 240252 - protein, 59 aa, Zea mays
  unsure (1)..(59): unsure at all Xaa locations
  Clone ID: MRT4577_150693C.1.pep
TLSLLEASRMLIHQPINTVLIAAIKEKPGWTDXFFILTRLKKSYPSFNYRCTERHYSSQ

SEQ ID NO: 240253 - protein, 98 aa, Zea mays
  Clone ID: MRT4577_150694C.1.pep
MKAALRSRQEPRRVSNGVIIAAMLLSLCVLSIVKARYCSTPFGKPDDQLKEQMNSSIRMETDDEPTPAATTVGGSQEDAHYDAPYYRIIPSIPLPIPH

SEQ ID NO: 240254 - protein, 132 aa, Zea mays
  unsure (1)..(132): unsure at all Xaa locations
  Clone ID: MRT4577_150695C.1.pep
HASADAWAKPLMQLWKDCTEVKSTKASSGHFIIXGQRSSSQEPQPKNSPPQAGGEYEMETGGLPMDLTDGTHASAHASGAKYDRAYNILHSDHSVTPGSPGLSRRSASSSGGSGSAFIQLDPEVQLPSGSGR

SEQ ID NO: 240255 - protein, 80 aa, Zea mays
  unsure (1)..(80): unsure at all Xaa locations
  Clone ID: MRT4577_150696C.1.pep
PTRALSPAFHGLSKALPGVETYLTVTXNATDYDGDSAELYAFKRTTILIRPTTVLVINLLGIMAGVALAIITLFQCITST

SEQ ID NO: 240256 - protein, 272 aa, Zea mays
  Clone ID: MRT4577_150697C.1.pep
FERFDIADDETTVNITPDEYPQVPSTLIPSPPRQEDISQQEEPYYADPSPVHGEPQQGGPEDQAEQKMKQPPKASKRKARWEVPRVIMDNNQMMIPGNIYQTWLKDASSLVSKRRKLNSNFNFIRSTPSSDLMHIPPVALISHDNLFSELCYPKPLMQLWKDCTEVKSTKASSGGQRSSSQEPQPKNSPPQAGGEYEMETGGLPMDLTDGIEKLRANMSAKYDRAYNILHSDHSVTPGSPGLSRRSASSSGGSGSAFIQLDPEVQLPSGSGR

SEQ ID NO: 240257 - protein, 58 aa, Zea mays
  Clone ID: MRT4577_150698C.1.pep
IFSFLIFFFSFFFLVGAKYFFFIIFVFKSMTLIMIEEIRSDEWFQKNMNLSKKYKRKN

SEQ ID NO: 240258 - protein, 510 aa, Zea mays
  Clone ID: MRT4577_150699C.1.pep
MATKRGNARGVPVGVLLVAALLLCSLAPASASSYPARVVSGFLSNAASAVVKRLWSLKSTTKIAASGGKSMVKYEGGYTVETVFDGSKLGIEPYSVEVTQGGELLVMDSMNSNIYRMALPLSRYSRPKLVAGSPEGFPGHVDGKLREARMNHPKGFTVDDRGNIYVADAMNMAIRKISDTGVTTIAGGKSGRGGHVDGPSDEAKFSTDFEVRYIGSSCSLLVIDRGNQAIREIQLHFDDCVYQYEAGFPLGVALLLAAAFFGYMLALLQRRVLGMYSNGDEQDHESPVKAKLASIPPPYQKPLKPYVHPLLIPNDDEPVKQEEEEGLFTSIGKLVGGAKSSIAEIIGAAFSRKKRANVHHHQLGRPTSWPAQESYAIPRDETPPPLDTRAPTPRKNYAFMSKEPEKIHHIRHGRPQLHGWTGEAQQPPQPQQVRHQQYVQHHRQYSAGPQTFYEPNCDATKEIVFGAVQEGDTSRRPVEIKAVNHGDAAPYEQNGLRFRSSYSVRYNGNN

SEQ ID NO: 240259 - protein, 60 aa, Zea mays
  Clone ID: MRT4577_15069C.1.pep
VGAIPAGFPFFPTADFFEIALASFVSRGLFFFSLSFSGNLGSDVRLFSAVVYASLIRIRG

SEQ ID NO: 240260 - protein, 260 aa, Zea mays
  unsure (1)..(260): unsure at all Xaa locations
  Clone ID: MRT4577_1506C.1.pep
CFLQVLDNYIKWCRYLGRRVAWTSLEAVNKNRKIXLVALYFLIWGEAANIRFLPECICYIFHNMAKELDGILDSSVAETAKSCTTEGSTSFLEKIITPIYDTMAAEAENNKDGKAAHSAWRNYDDFNEYFWSRSCFELGWPPAEGSKFLRKPAKRKRTGKTNFVEHRTFLHLYRSXPLVDFSAINVPAXAIIAFHHGKMDIDTIRILLSAGPAFFVLNFIECXLDVILMFGAYKTARGFAISRIXIRFLLLTAVXTFVTY

SEQ ID NO: 240261 - protein, 61 aa, Zea mays
  Clone ID: MRT4577_150700C.1.pep
QFVPVNILHYWQGPFCWLCPRGVSQGPITVAFGTPTTCNRLLTTTKAPVSIKKAARTQKKD

SEQ ID NO: 240262 - protein, 153 aa, Zea mays
  Clone ID: MRT4577_150701C.1.pep
PDCSLRRHCSPQCCCCSLTTAPPASWPGSPQGEAVAYTAAPATNVAGGPALHFATARHDVTAPCNGAPYPMPAGRPRCFSSSTAPVRHDQCLAGGDSIRPREHRHRGLHTMLHQSAKLPHQSRGGTLANDGSANGKEWFHTGLKVDGWPPSSS

SEQ ID NO: 240263 - protein, 187 aa, Zea mays
  Clone ID: MRT4577_150702C.1.pep
TRPDEVLAQPIPKGQTVGKHWRCVADVWSCGVTLYVMLVGAYPFEDPDEPKNFRKTIQRILGVQYSIPDYVHISPECQNLVSRIFVADPATRITIPEIRNHPWFLKNLPADLMDDSTMSKQYEEPEQPMQSMDEIMQILAEATIPAAGPRGLNQFLNDGLDLDDDMDDLDSDTDLDLESSGEIVYAI

SEQ ID NO: 240264 - protein, 83 aa, Zea mays
  Clone ID: MRT4577_150703C.1.pep
PLFQVNQKFNRLWQLFKCLVTQTYKKTNVASLMLIISVFFPYCKCFPNLIFILVIKKKKKKNQKTKKKKNPKKKKKKKKKKYS

SEQ ID NO: 240265 - protein, 69 aa, Zea mays
  Clone ID: MRT4577_150704C.1.pep
VAADVSVRPVVETPARGLSRDRFMAVLGARTGSIAVAPRPIQSRVGERSMLYPVVVERRPRPTAGPRVR

SEQ ID NO: 240266 - protein, 504 aa, Zea mays
  Clone ID: MRT4577_150705C.1.pep
MRRPWRHSGPGSAVAARHGAADLCLREVGDLLPRRFARRAAGSEDLVMRLQIHRKLDRHTGCVNTVGFNEVGDTLISGSDDQKVMLWDWDTGTVKLEFHSGHGGNVFQARFMPCSDDRTIVTCAADGEVRLAKIQDAGDVSTTLLGEHEGRAHNLAIEPGSPYIFYSCGEEGFVQHFDLRTNTASKLFLCRNSTKSVYSSLVHLNALAIDPRNPNLFVVGGSDAYARVYDIRKCKWDGSSDFSHASDCYCPPHLVDNKSVGITGIAFSHLSELLVSYNEENIYLFSKDGGLGPDPKKSVRIGAIEGCKSTMLASGHDVSQPAPQTYVGHVNRETVKRVSFIGPNDEYVASGSDCGRIFIWRKGDGKFLRAMEGDECIVNCIEPHPHAMAIASCGIDNDVKVWTPSAIERAPMIHVDELQLRPRKRRAKLWRFGIRDLLIQQILVSENRQQSAEEGSSEDHEDNIELLDLVLQAAVEGVSSSSDEEEEDDDDGDNEEAAASDGSE

SEQ ID NO: 240267 - protein, 103 aa, Zea mays
  Clone ID: MRT4577_150706C.1.pep
NALPIVVFCSIVVHVQKVFIDLMYEYMPNGSLGPRGPRKGDEVATKCLGLPKSITIVVDKAYALVFLPHGCGQQMIWCGFKPSYILIECDTIALVAEFEIGRL

SEQ ID NO: 240268 - protein, 70 aa, Zea mays
  Clone ID: MRT4577_150707C.1.pep
RIHEHPLSRSCFIYATAGMHAKDGTEDKTPVILLVRMHAYVDSRLACMHVHDRWARWSCHPVVQYFSSRA

SEQ ID NO: 240269 - protein, 105 aa, Zea mays
  Clone ID: MRT4577_150708C.1.pep
ADIYRRRSEEKDISLLRDLAMASMMGGDLVEAYVLKNACKEKLRRHPKAALKKQPRLLDSAPSNKFAAHHCRTIDQPCGRRRRSTSTCVACSKPLKQRQSACFSS

SEQ ID NO: 240270 - protein, 114 aa, Zea mays
  Clone ID: MRT4577_150709C.1.pep
LACVRRHQDMIPVLVPMLKTSKSPPQRPNRLRSSIQYTKFSIGEPLFLQSVNWTRGTTLTLTGGPRTTCLACYLHTSCRDRQEPAEMALPHSVAGTLELWNAHDPLVGQPSYNT

SEQ ID NO: 240271 - protein, 139 aa, Zea mays
  Clone ID: MRT4577_15070C.1.pep
KRHVSFLFNGQSTHCTSRRPLSDRCRRKRVSEENPAGRCGWCVHFHWQKQRPQETQLESGSAILTDRSENPEMIVQQQLESSNSPPPKLPEAISQPELALNVSSHLNKVCLRHHLSLYPTWNTSKHVLYYINTHPQPRR

SEQ ID NO: 240272 - protein, 85 aa, Zea mays
  Clone ID: MRT4577_150710C.1.pep
MASMMGGDLVEAYVLKNACKEKLRRMEAAAAAADDKTSKQGRLAEKKVSGRGRRLLGLLKKKVHPKAAASSSPPESGAEEAASSS

SEQ ID NO: 240273 - protein, 113 aa, Zea mays
  Clone ID: MRT4577_150711C.1.pep
PAPRQTTCKPRMLCQGFHRRPGAPHKPPGLAVPSGPGCLYECDPHGGRGSQDRVAHLPARASRGSCISDLSQAEPCVASTPAPDIWLQPNLISIFPTFFQFSGRRARTGYSGP

SEQ ID NO: 240274 - protein, 87 aa, Zea mays
  Clone ID: MRT4577_150712C.1.pep
MASIVLLLSELLGGESASVLAAERYMGGHRSLREFRPAVTEAPPKRAQRLAEGQRAAGTERAREEGKDDDSFEDLALPRVAVDIMWP

SEQ ID NO: 240275 - protein, 44 aa, Zea mays
  Clone ID: MRT4577_150713C.1.pep
SFSFGRRVVSLSFLQCYVTASIHLLCRFEVNSLFGAVGISDILE

SEQ ID NO: 240276 - protein, 72 aa, Zea mays
  Clone ID: MRT4577_150714C.1.pep
GWPSNGSRIFKLRWLCHISEYKNTPLEVLLLSMSRVDKLSLQASTLKSCNTCKRVLTGQFVLSAPVAVLGRK

SEQ ID NO: 240277 - protein, 38 aa, Zea mays
  Clone ID: MRT4577_150715C.1.pep
LAPVFVINSLPAYSCPYPLVGDVFISLFHTSHHATTLT

SEQ ID NO: 240278 - protein, 84 aa, Zea mays
  Clone ID: MRT4577_150716C.1.pep
ISRTSTKCLFYQKTLPSYLKECFLNEGTNKNYFQMVQNFLFLEDSVVDHFFISYLQQDTFHFTTNTTEGSTKSSTNDHLACLSC

SEQ ID NO: 240279 - protein, 63 aa, Zea mays
  Clone ID: MRT4577_150717C.1.pep
CVSSSQTIGSFQKKYNIGSFELLSKTAPIQALSLIILGPFVDYYLNGRSLLNYPFSGGATFFI

SEQ ID NO: 240280 - protein, 88 aa, Zea mays
  Clone ID: MRT4577_150718C.1.pep
KGFEKAPEVPPKNKGFYPVSCSPPPAQARELKHGFNKILGRGLAPKTHQVLGGGFPGGEKKSGLSPKKKRVLNWVSAPQKKKKHIQKK

SEQ ID NO: 240281 - protein, 134 aa, Zea mays
  unsure (1)..(134): unsure at all Xaa locations
  Clone ID: MRT4577_150719C.1.pep
MLIFVMTLAGKTVTLEVVSSGAFDSVKATIRDMEGLPPVPRRLVFAGLLLAAGRTLAACLVLTESTLHLVLRLRGGAXXRAMXTFPQXPSLLPXLPKVXLSVLXFFWVGVAPGXGPRLPLERPXPXGGAGVFVG

SEQ ID NO: 240282 - protein, 51 aa, Zea mays
  Clone ID: MRT4577_15071C.1.pep
LYLVLKKKKKKKKKKKKKKKKKKKKKKKKKKKKKKKGERGLTRWKTGVSIE

SEQ ID NO: 240283 - protein, 152 aa, Zea mays
  unsure (1)..(152): unsure at all Xaa locations
  Clone ID: MRT4577_150720C.1.pep
RCCRWNGGPPNMYDISGSAHFINKCDNGIVXGAPGTHELGGRAPGRNKWDTGIAIHRSGEPSPGVREXIHRNRDRDAGPLDTVQVCVRKVRNKVVGQIGDAFLTYDRVTGEFKDAGKATTAASAKAAKQSRKEAYKIPFQHAAQDGENSFGL

SEQ ID NO: 240284 - protein, 75 aa, Zea mays
  Clone ID: MRT4577_150721C.1.pep
PRGTRPQDTAAPWKAQPLGGHGPAGRLRPARLKFSLGPGPRGPAPPRAHGAGRQRTLEVACTVWPPQLSWIAPTS

SEQ ID NO: 240285 - protein, 434 aa, Zea mays
  Clone ID: MRT4577_150722C.1.pep
MVGQEASVALHGEDADETLLHSMLDDCSRLVLELNSMARAREQEIESLHARAAEAEVSSEVAHVYLGSWREGSEQAVGRMLASIDAVVRQDDASFEGADQDGISILERKTSLLVERYRQASMGIEQLQQILAEVKPGFAATGHGDLATTLSVLSDELVGSKRNEVDLLQKMNAFAEEKKAIADELEEVKAARNAVNAEASKAKAEFEQMEQKLSTTKEKLSMAVTKGKSLVQHRDSLKQALAEKTGELQSCMTELQKKSDALQAAESRVDELQIFLDEKTSEHEKCLDELRDTYSAWEAAKTSMEQLNESKSALHASLSLKDGVFERIEDIMSEATFPEDLLSLEMTDRLGWLVEQKKIADMIFSEHQKVKEILSSVDIPHSVLTSELDSQISWLASSLNQAKDDAVRLRDESAEMLAKMAAHESKLVSMHEEI

SEQ ID NO: 240286 - protein, 39 aa, Zea mays
  Clone ID: MRT4577_150723C.1.pep
LISPPLQYMVFACSDSRVCPSVTLGLQPGEAFTVRNIAS

SEQ ID NO: 240287 - protein, 259 aa, Zea mays
  unsure (1)..(259): unsure at all Xaa locations
  Clone ID: MRT4577_150724C.1.pep
MASLVPGVLVKLLQHMNTGVKVGGEHRSSLLQVVSIVPALAGSDLFTNRGFYLKVSDSSHATYVSLPEEQHDLILSDKIQLGQFVHADRLEAATPVPILRGVRPVPGRHACVGTPEDLVLTASPSNSHGGGQEQEGATVECENEGRQRQRPVAXRNRASXKINASRKPTGAENKKPTLTXQLFAAKRSSGXGSVSVITRKRRLNXKVKPGGVTRSTPSSPTSVYSLPASFDRFSNDLKQRNRVKGAEKKASSSSSSSLS

SEQ ID NO: 240288 - protein, 48 aa, Zea mays
  unsure (1)..(48): unsure at all Xaa locations
  Clone ID: MRT4577_150725C.1.pep
EXYVVLQNWDXSXTXXEXCXMXSQGGXVTXPXSHXXDECWXLRRQLLI

SEQ ID NO: 240289 - protein, 95 aa, Zea mays
  Clone ID: MRT4577_150726C.1.pep
EVLVEGVPCVETTEPDGSEQARRVREEGVVEGGEGLVQVEREQQPEDERQQKRRRNMDRMKEEHRRIERKQVDTHRRQTGDGTNQIIEGHERGHV

SEQ ID NO: 240290 - protein, 65 aa, Zea mays
  Clone ID: MRT4577_150727C.1.pep
CIPSMREVISRPSPGESHRAQGVRRDGCSLVIPKHTALVCVIGSFYVEADTIIFYIVLLCSGSRL

SEQ ID NO: 240291 - protein, 52 aa, Zea mays
  Clone ID: MRT4577_150728C.1.pep
RQAVQLRHSSLYRRDSGSHQVPHPLTLPFFTVIPMLAVSGRVNIAWSSATAS

SEQ ID NO: 240292 - protein, 435 aa, Zea mays
  unsure (1)..(435): unsure at all Xaa locations
  Clone ID: MRT4577_150729C.1.pep
MARLFFFLLLLFPLLYSSVAGLNRSDFPPSFLFGASTSSYQVEGAYLDDSKGLSNWDVFSHVPEGRFGGVNQAGVKFYNSLINGLLEKGIQPFVTINHYDIPEELQERYNSWLNPEIQEDFTYFAELCFKMFGDRVKHWVTFNEPNLIVKLAYSSGAFPPNRCSEPYGKCDSGNSSTEPYIAAHNMILAHAKTVNIYRNNYKSKQGGFVGISLHLRWYEPLRNITEDHLAVSRALSFDAPWILDPLFFGDYPHQMRQILGPNLXKFTDGEKKLLKNQIDFIGXTKWDTHWKTDTCCKHLCRXPSSMEKLVMYLKQRYKSIPLYITENGYAQIANISTTAEEIINDIERSTYIRDYLTYLSFAIRKGADVRGYFVWSLMDNFEWISGYTVKYGLCHVNFKSLKRTPKLSAKWYSKFIKGYEQIEMASEELPKHMVS

SEQ ID NO: 240293 - protein, 64 aa, Zea mays
  Clone ID: MRT4577_15072C.1.pep
YCLHWRWDMGDGIQRFVLYRLHTITLRELYTTCILQFLRMWRLMLLPKHTASRQQTNQQAISPA

SEQ ID NO: 240294 - protein, 109 aa, Zea mays
  unsure (1)..(109): unsure at all Xaa locations
  Clone ID: MRT4577_150730C.1.pep
MVMATSTALRICSAVGVTNLMAPSSRASRLAPPLRQRAPPSGPXTMXSQDRMSVQPRPAHLDGSSPGXFGFDXPWTLETLPQKFQRFXESEVXHCRWAMVAXPGILWAK

SEQ ID NO: 240295 - protein, 462 aa, Zea mays
  unsure (1)..(462): unsure at all Xaa locations
  Clone ID: MRT4577_150731C.1.pep
MARLFFLLLLFPLLYSSVTGLNRSDFPPSFLFGASTSSYQVEGAYLDDSKGLSNWDVFSHVPGNIDDGSNGDVAADHYHRYKDDIEMMHSIGLGSYRFSLSWSRILPKGRFGGVNQAGVKFYNSLINGLLEKGIQPFVTINHYDIPEELQERYNSWLNPEIXKSNSVSHLYYSFIYEDAVSSYVGVSLFLFREDFTYFVELCFKMFGDRVKHWVTFNEPNLIVKLAYSIGAFPPNRCSEPYGKCGIKREWGLTVCLLLNTHESCIIXVFLVPHPSQSKQGGFVGISLHLRWYEPLRNITEDHLAVSRALSFXSMVSIDSVTFHHTSILRLELTXLVFTIECSXMIYAKXRILDPFFFGDYPHQMRQILGPNLPKFTEGEKKLLKNQIDFIGVNHYQTFYVKDCIYSLCDMNAYPSEALVSISTERNGIPIGKPVKIGIVYCIILFNKNPSYKLIMHKLTQLN

SEQ ID NO: 240296 - protein, 83 aa, Zea mays
  Clone ID: MRT4577_150732C.1.pep
VPRGGRAGNLSRTAAAVAVAGRTEGRSRPLTGRALEAPLTSLAYPSADRPARILPTTMHVEKKALNTIMPMNNAAHERTAYTS

SEQ ID NO: 240297 - protein, 64 aa, Zea mays
  Clone ID: MRT4577_150733C.1.pep
YVSQLEESIAAIESCGKKEKGIEEATSLPRFNGSAQDALQLLDSLQFQLNLLAQRLPTFHEVQS

SEQ ID NO: 240298 - protein, 52 aa, Zea mays
  unsure (1)..(52): unsure at all Xaa locations
  Clone ID: MRT4577_150734C.1.pep
SVLDREQPPLVFFLYKEGXXNXXKQSPSALLFNQSLNRNTKTAPHLPQKRPT

SEQ ID NO: 240299 - protein, 39 aa, Zea mays
  Clone ID: MRT4577_150735C.1.pep
ESGKGNFPKKKKKKKKKKKKKKKKKKKKKKPKKKKKGEP

SEQ ID NO: 240300 - protein, 125 aa, Zea mays
  Clone ID: MRT4577_150736C.1.pep
PAGKTLFPLLAQPPRTHARTLSCCCAKKKLCQGEAVRGPSTGAGEQEAATALQRRVDELESGREERAGVLAVEGVELRRANTVLEENNRELALRLQDAIEQAAASASANLAPKVIVILIPIFSII

SEQ ID NO: 240301 - protein, 75 aa, Zea mays
  Clone ID: MRT4577_150737C.1.pep
CKAIHHTHAATVPASHLSPAQHRTTRVLPRPRQFRHHTWPGPAAVQCSAGRRRATATATATARRHVTSHVVAPAA

SEQ ID NO: 240302 - protein, 329 aa, Zea mays
  Clone ID: MRT4577_150738C.1.pep
MLKLIMAKIMVWTKPGCPPRNPSSNAPPSPSSLARTRSPPVSTPTDRSESRGVSAVKATASAMADEEHSERREEASELAPFDPTKKKKKKKVVIQEPSDEVDKLAEKTETLAVAEPAELNFTGMKKKKKKPVDLDSTLDELGDGEDTQDDQAVEEQGEGIVLGSVPTYPWEGTDRDYKYEELLDRVFNILRENNPDLAGDRRRTVMRPPQVLREGTKKTVFVNFMDLCKTMHRQPEHVMMFLLAEMGTSGSLDGQQRLVIKGRFAPKNFEAILRRYINEYVICNGCKSPDTILSKENRLFFLRCEQCGSSRSVAPIKTGFVAQVGRRKA

SEQ ID NO: 240303 - protein, 267 aa, Zea mays
  Clone ID: MRT4577_150739C.1.pep
MADEEHPERREEASELAPFDPTKKKKKKKVVIQEPSDEVDKVAEKTESLAVAEPAELNFTGMKKKKKKQVDLDSSIDDLGDGEDTQGDQVVEEQGDGIVLGGGPTYPWEGTDRDYKYEELLDRVFNILRENNPDLAGDRRRTVMRPPQVLREGTKKTVFVNFMDLCKTMHRQPEHVMMFLLAEMGTSGSLDGQQRLVIKGRFAPKNFEAILRRYINEYVICNGCKSPDTILSKENRLFFLRCEQCGSSRSVAPIKAGFVAQVGRRKA

SEQ ID NO: 240304 - protein, 73 aa, Zea mays
  Clone ID: MRT4577_15073C.1.pep
SAGSQRIVNGTICGGNSAGFVSLRAHSSTFDRQSSHSGGKVVLPPFKTAMSNGYQHSRPFFQRAVAFRLFTSF

SEQ ID NO: 240305 - protein, 267 aa, Zea mays
  unsure (1)..(267): unsure at all Xaa locations
  Clone ID: MRT4577_150740C.1.pep
MADEEHSERREEASELAPFDPTKKKKKKKVVIQEPSDEVDKLAEKTETLAVAEPAELNFTGMKKKKKKPVDLDSTLDELGDGEDTQDDQAVEEQGEGIVLGSVPTYPWEGTDRDYKYEELLDRVFNILRENNPDLAGDRRRTVMRPPQVLREGTKKTVFVNFMDLCKTMHRQPEHVMMFLLAEMGTSGSLDGQQRLVIKGRFAPKNFEAILRRYINEYVICNGCKSPDTILSKENRLFFLRCEQCGSSRSVAPIKAGFVAQVXRRKA

SEQ ID NO: 240306 - protein, 267 aa, Zea mays
  Clone ID: MRT4577_150741C.1.pep
MADEEHSERREEASELAPFDPTKKKKKKKVVIQEPSDEVDKLAEKTETLAVAEPAELNFTGMKKKKKKPVDLDSTLDELGDGEDTQDDQAVEEQGEGIVLGSVPTYPWEGTDRDYKYEELLDRVFNILRENNPDLAGDRRRTVMRPPQVLREGTKKTVFVNFMDLCKTMHRQPEHVMMFLLAEMGTSGSLDGQQRLVIKGRFAPKNFEAILRRYINEYVICNGCKSPDTILSKENRLFFLRCEQCGSSRSVAPIKAGFVAQVGRRKA

SEQ ID NO: 240307 - protein, 97 aa, Zea mays
  Clone ID: MRT4577_150742C.1.pep
HGLSLGMARMIRTFKSFVIARTVCCNPSQYWWHPYYQTHQSQSDRHHPCTVPNLMLSSHHPHPTMPVLCNPSIGSGNGSSVKFRSFNRSSGCGPLCS

SEQ ID NO: 240308 - protein, 88 aa, Zea mays
  Clone ID: MRT4577_150743C.1.pep
PSFPQWHRARVNPWAAPAAWLRTPLPAAAALAPSLRRWPNRFVVSLECAPVPGWPRSSRKLSPVGAVCPLKLYLWLVGTFVGVFFWPP

SEQ ID NO: 240309 - protein, 230 aa, Zea mays
  unsure (1)..(230): unsure at all Xaa locations
  Clone ID: MRT4577_150744C.1.pep
MADEEHPERREEASELAPFDPTKKKKKKKVVIQEPSDEVDKVAEKTESLAVAEPAELNFTGMKKKKKKQVDLDSSIDDLGDGEDTQGDQVVEEQGDGIVLGGGPTYPWEGTDRDYKYEELLDRVFNILRENNPDLAGDRRRTVMRPPQVLREGTKKTVFVNFMDLCKTMHRQPEHVMTFLLAEMGXSGSLDGQQRLVIQGRFAPXNFEAILRRYFNEYVICHGCKSPDTI

SEQ ID NO: 240310 - protein, 92 aa, Zea mays
  Clone ID: MRT4577_150745C.1.pep
SSPCFGVSRPMSHLVVCICEATLPFEQGGSLAGIDTKCLGMRNASAAGETCLTQAVPGCVRAVQLLERPAAMSPHPRRPKPSYSWASAYVPS

SEQ ID NO: 240311 - protein, 84 aa, Zea mays
  Clone ID: MRT4577_150746C.1.pep
LNVRIQSLPCFEQEGMVWIWPRDDPPKATIPSLLPPSGFTVHAEIVMELPVEQGLLLVFSFLDLAHAPFTHTSTFAKGWSVPRS

SEQ ID NO: 240312 - protein, 53 aa, Zea mays
  Clone ID: MRT4577_150747C.1.pep
SHMGKLNPLFNSIGHFPFKMVPPPQWTKSRLSLLTHTFNFFLMECGFLILKTK

SEQ ID NO: 240313 - protein, 60 aa, Zea mays
  Clone ID: MRT4577_150749C.1.pep
LSHTERTFYFRHRQARHRGSVVHPSEQGRTVSSSFDMDSSAVIQRTRSRRIRQLYRRELI

SEQ ID NO: 240314 - protein, 69 aa, Zea mays
  Clone ID: MRT4577_15074C.1.pep
NGAISWLDANQLAEGDEFKDKIKELKTLCNPIIAKMYQGAGKNMGGAGGMDKNAPPGKGGPGPKIEKVD

SEQ ID NO: 240315 - protein, 108 aa, Zea mays
  Clone ID: MRT4577_150750C.1.pep
LVHQVHNHLVVRLLVSLWSTGCLGGGLERSGTGFGGRRGDVGGLVSGGGGGFHVRGSLPSPLPHLRHVQQAPLAHVGVHHASLSCVGRSCDSCLCINPLLVVVVIPAG

SEQ ID NO: 240316 - protein, 93 aa, Zea mays
  Clone ID: MRT4577_150751C.1.pep
NPARGRNLRKNRPLAGPFFGPRPSRGPLKQGFFPGKALNPRRTGKPPIKKSNPPSAGKRPNTTKQLTKKPKSNPSANGPPPVGGGNHKESGPA

SEQ ID NO: 240317 - protein, 55 aa, Zea mays
  Clone ID: MRT4577_150752C.1.pep
TRDELYMSFSSTLHANAGQETMHDITMNLSIYLQGGDEIHAQKLDLKAQLFTRTN

SEQ ID NO: 240318 - protein, 97 aa, Zea mays
  Clone ID: MRT4577_150753C.1.pep
YPGPFQLPQIQQLFVQITNDDSECVAGYAHSSGELERAVVGAGVNTQQVSHVFEQLPKRENSVLHAGINVDMGMVSSPCVVVQANQYVSVPATVSAY

SEQ ID NO: 240319 - protein, 38 aa, Zea mays
  Clone ID: MRT4577_150754C.1.pep
SSTAYTFLYSYSKIPPANSTIDCIVCRLYCSQGELLNT

SEQ ID NO: 240320 - protein, 64 aa, Zea mays
  Clone ID: MRT4577_150755C.1.pep
MVVIPMAVGATNYFGEKHNTDHLISKDDNIDASNIISGDTLDDLVKSFVSHYPIHAIEHPYDHR

SEQ ID NO: 240321 - protein, 122 aa, Zea mays
  unsure (1)..(122): unsure at all Xaa locations
  Clone ID: MRT4577_150756C.1.pep
MDPATKLRFDSPLLRVYEDGRVERLFGTETTPPGVDAATGVTSKDVVIDAATGVFARLYVPDLVAAGSDSQRKKLPILVYFHGGGLVLDSAASPTXHRYLNSVASKAGVLAVSVNYRLAPEH

SEQ ID NO: 240322 - protein, 137 aa, Zea mays
  Clone ID: MRT4577_150757C.1.pep
ISFWRWNHFTIHSSDVIVLNHRIIFHRNTILSLCLQPFLDLDPINLRARQISWDWLNKRILLQFIVIIKIFLHVVLDLPFDGNIIGGCVPGAVGKSRGLAPGLVAIVDQVQRNRTYVVGAGLFMARMLLEIFVNVVG

SEQ ID NO: 240323 - protein, 94 aa, Zea mays
  unsure (1)..(94): unsure at all Xaa locations
  Clone ID: MRT4577_150758C.1.pep
SRRAQPKTQRTMKTKHPQPHYESRVQTLLQSGNDIPHLKWYGVDEEYHVMVIDLLGPILEKLFASCNRKFSMKIVLTLTDLLINXVEFIHSKKK

SEQ ID NO: 240324 - protein, 244 aa, Zea mays
  Clone ID: MRT4577_150759C.1.pep
TRCRPIGSQRSKQHAVPARPWPSSNARHPLDAKQSTVASRAKARSGSMSPSRLRRQSTSKATETRAGNAKATEARGGNATLGDNNVADELTLKCAVADHNRNASTGKRPAGSSKVRIIPSRYSLTPGSSLAAPVTQGKLCKQSLSGSARAAIHREEIRAKLTEPSNDELSPESLAKVAELLPRIRTMPPSDESPRDSGCARRVADLAGKRSFFTAAADDGNPVTPYQARVVDLETPETAAAAEA

SEQ ID NO: 240325 - protein, 90 aa, Zea mays
  unsure (1)..(90): unsure at all Xaa locations
  Clone ID: MRT4577_15075C.1.pep
SYFIDQSXERMTSPAPLVITTESVGELRQRDRRRPSIVDVILHSACISSAFSLAXILXSLSHXMSALTTAQARRLDELLSPDRIRLLPDY

SEQ ID NO: 240326 - protein, 129 aa, Zea mays
  Clone ID: MRT4577_150760C.1.pep
HLSLKKKKKKKKKKKKKKKKKKKKKKKKKKKKNVKKKKKKKKKIFPFPGGPLKGLIQKNLGPFFGEPSPAPTLGEKGGMLFPGEKFYSLQNSPTNPGPEKKGENPGAPMGGPPPIKEGGALCRFPLGKP

SEQ ID NO: 240327 - protein, 293 aa, Zea mays
  unsure (1)..(293): unsure at all Xaa locations
  Clone ID: MRT4577_150761C.1.pep
PPPPPPPPRPPPPXPPPPHTXHPPPPXTPPPPPPAPXGXGARGAAGPGDAGPQXTTGTEXXTGAERGGPPGGAGGAGGGGXGGGAPRGGAGRRPRRPAPGGPGAPPPGGPGAPGGPAGPSRRAPPPAPRGPRGPPLAPRPAGAGGPGARGADAGGPXGPAPPGXGPPGDAARPAPPXARLPARGPAXSGARPPPLRGWRAPTPPPPLPPFRAWFSLFPPCGAPFVPARPGRCFLRSGGPVVPGLFSRASRPPCGFVRSGVRWGALPPFRGVRGVCASACSVVVTRSIPAVGAK

SEQ ID NO: 240328 - protein, 132 aa, Zea mays
  Clone ID: MRT4577_150762C.1.pep
DSFITHRAFCDALAEESARAVTAAAAVAGQHHPGPAGMLFSQAAGGGDGGAGLHLPPGVLDPSQTLGGGHAHGMSFQELCLKREQQQQQFAPSSWLTAQHHQQELELPGSAVFGLARPLDQQEYMGNSTTES

SEQ ID NO: 240329 - protein, 46 aa, Zea mays
  Clone ID: MRT4577_150763C.1.pep
LGPGANLLHFIFRCSNIWQVYAKLMTEYDWSKHTNIKWSKCDQGKF

SEQ ID NO: 240330 - protein, 131 aa, Zea mays
  Clone ID: MRT4577_150764C.1.pep
IHKAGLMIILPYLYSAAWNMITKSLSHIPMPWHPFVRPYISPIICLRPFELANCCADYVHAYICILHMTRNRLTYSLRPAMHLLFHYSKQIMLSWSSAALIHTVDISVQPACKAHVHAIYVPCMRAIEPPA

SEQ ID NO: 240331 - protein, 81 aa, Zea mays
  Clone ID: MRT4577_150765C.1.pep
STCRISTRTRPWLFTVAGCHSQDGLLMLCSRAIQTIQAIGHCGDCETWCTCLTRAAYNNFKLIEDCTFICTNLASIYQGYT

SEQ ID NO: 240332 - protein, 66 aa, Zea mays
  Clone ID: MRT4577_150766C.1.pep
LPFWAPPLLTFKFPPRIFCGFVNALRFSAGTIFAPGLSPLCYCPLLGKLVSPQVSARIFRVVPGAL

SEQ ID NO: 240333 - protein, 38 aa, Zea mays
  Clone ID: MRT4577_150767C.1.pep
EREKCRVGVASPLADSHPGERRSPMETYASFRSDLNPP

SEQ ID NO: 240334 - protein, 55 aa, Zea mays
  Clone ID: MRT4577_150768C.1.pep
TSKKVFAYSTSSTVTYSCIVTCSNNGECGGSLTVPLEGPELALNLPQPNKYCISA

SEQ ID NO: 240335 - protein, 52 aa, Zea mays
  Clone ID: MRT4577_150769C.1.pep
YLIFNETSLSNTRYSIFRGGRHLHVCLKTYTIFSQYYQSNINIIIFYKFYKI

SEQ ID NO: 240336 - protein, 367 aa, Zea mays
  unsure (1)..(367): unsure at all Xaa locations
  Clone ID: MRT4577_15076C.1.pep
MPARRKVRPAGAGAAARRAALRWWLLSLAAAGAIITAAAALLAVTLHVSGLAMPSVSSGAPYRLSQPWDTEELRWEQEFASPQLASSRKLDGAADDALGKRLWLPASARRFVPCVAPSAEYRSPVASRGYLLVHTNGGLNQMRAGISDMVAVARVLNATLIIPELDKKSFWHDKSNFSDVFDEEHFINSLANDLKVEKELPKEFVKAPKSVRYFKSWSGVDYYRXGVISTXDLYXVIRAAKSDSRLANNHLPPDIQKLRCRAFFQALRFAPPIEALGKLLVERMRSFGKYIALHLRYEKDMLAFSGCTYGLSRTESEELAMIRENTTYWKVKDIDPLEQISHGYCPLTPKEVGMFLSXLGYPSSTPI

SEQ ID NO: 240337 - protein, 86 aa, Zea mays
  Clone ID: MRT4577_150770C.1.pep
YLMGLKKDGTKVILYNKALRLVKDNHEQAKMVVVQGQKPHSSVVKYHNVATGPIKSYTALLRLARTTKTMEELRAGLLVPYRKEFM

SEQ ID NO: 240338 - protein, 55 aa, Zea mays
  Clone ID: MRT4577_150771C.1.pep
MPGQDVDTPSTTVIQKLFEDYWKPNKNKDERKRNFLEFMMNKVRDAIVDYSFFIA

SEQ ID NO: 240339 - protein, 51 aa, Zea mays
  Clone ID: MRT4577_150772C.1.pep
TVPIVSKKLQFNWPIILGGQLQEKSLNLDLSWGQIHRTCFKFRHLKTLPNH

SEQ ID NO: 240340 - protein, 310 aa, Zea mays
  unsure (1)..(310): unsure at all Xaa locations
  Clone ID: MRT4577_150773C.1.pep
MAMEGPVLCRPAMQAKSPAAALVNNSLTRFGQLGTISKYRNVSRFISPISQPSTKNIGPCCSFSSSSDGNGYMAGNFSDSDEDYVNSTVLEAVEVRSXSEGYVIKMRDGKNLRCVHSNFQGRNIPESAPQPAIVLRIEDGSGTLLPIIVLEMPSVLLMAAIRNVHIARPTIYQVVKEMIDKMGYEVKLVRVNKRIQEAYCAELYLTKVNDPTDNITFDLRPSDAINIAVRCKVPVQVHRSLAYSDGIRPVEPARMAVAAGLSDGLLFTELDRPDGQPCVEAQEFGLVRNMLIAAIEERYKDAGNDTSLLY

SEQ ID NO: 240341 - protein, 49 aa, Zea mays
  Clone ID: MRT4577_150774C.1.pep
NFSICRPVIVFNLVTFNSVACLDGVNKDDAQLNSSMHSRQLILFMALCN

SEQ ID NO: 240342 - protein, 379 aa, Zea mays
  Clone ID: MRT4577_150775C.1.pep
MKLKTDSCGIGSGQESFFFSFSDFSVTIGHTMIIFSATLSGYYRDRYFYWLHFCHVVRLMAMEGPVLCRPAMQAKSPAAALVNNSLTRFGQLGTISKYRNVSRFISPISQPSTKNIGPCCSFSSSSDGNGYMAGNFSDSDEDYVNSTVLEAVEVRSGSEGYVIKMRDGKNLRCVHNNSQGRNIPESAPQPAIVLRIEDGSETLLPIIVLEMPSVLLMAAIRNVHIARPTIYQVVKEMIDKMGYEVKLVRVNKRIQEAYCAELCLTKIDDSTDSITFDLRPSDAINIAVRCKVPVQVHRSLAYSDGIRPVEPARMAVAAGLSDGLLFTELDRPDGQASVEAQEFGLVKNMLIAAVEERYKDAASWKDKLMRLRSKRKNWA

SEQ ID NO: 240343 - protein, 63 aa, Zea mays
  Clone ID: MRT4577_150776C.1.pep
RSSKYVPKGMQSLNATEIEGEETQMSFLRGCRVWVWFRVCLGHTFAYLIASFFAFIQTFIRHS

SEQ ID NO: 240344 - protein, 326 aa, Zea mays
  Clone ID: MRT4577_150777C.1.pep
MAMEGPVLCRPAMQAKSPAAALVNNSLTRFGQLGTISKYRNVSRFISPISQPSTKNIGPCCSFSSSSDGNGYMAGNFSDSDEDYVNSTVLEAVEVRSGSEGYVIKMRDGKNLRCVHNNSQGRNIPESAPQPAIVLRIEDGSETLLPIIVLEMPSVLLMAAIRNVHIARPTIYQVVKEMIDKMGYEVKLVRVNKRIQEAYCAELCLTKKHPALQIDDSTDSITFDLRPSDAINIAVRCKVPVQVHRSLAYSDGIRPVEPARMAVAAGLSDGLLFTELDRPDGQASVEAQEFGLVKNMLIAAVEERYKDAASWKDKLMRLRSKRKNWA

SEQ ID NO: 240345 - protein, 124 aa, Zea mays
  Clone ID: MRT4577_150778C.1.pep
QGLVERRARRRRMGRGRGVSYGGGQSSLSYLFGGGGDEAAAAPAKPAAAAPAPAPVPAAADGEKLKGIPAGVRGNQSQTNNYFRAQGQNCGNFLTDRPSTKVHAAPGGGSSLGYLFGGGPPGSK

SEQ ID NO: 240346 - protein, 62 aa, Zea mays
  unsure (1)..(62): unsure at all Xaa locations
  Clone ID: MRT4577_150779C.1.pep
GGXAPXLPAAGAGVRAATTISVIFQAAAATPPRKKRSRDLRLGTWTVVICGGYDPITGPPIN

SEQ ID NO: 240347 - protein, 114 aa, Zea mays
  unsure (1)..(114): unsure at all Xaa locations
  Clone ID: MRT4577_15077C.1.pep
WSASLKKTARFLVLLRRAGIRCDILAVLGCSDWSXAKRARMLAWSRWLKHMGPDWSGLYQHEGNFLAQQRLAVISTLTGDQTLFSXDRTVLAVANGEMDNHLNVLKQFTFTHNF

SEQ ID NO: 240348 - protein, 150 aa, Zea mays
  unsure (1)..(150): unsure at all Xaa locations
  Clone ID: MRT4577_150780C.1.pep
DQCTLRLTSVLEPIDSSVRDLPRLPXPRSLCQDITTMVINTKAIRDSIDLFVXERKHWRITASSXEQHTGVILGHDIPLPLVSTLVPLGTPTXLPXDAISQEDSVEYRTXDILLLHARRVPPKMSVMXVHDLIATGGTVCAARELIGRDG

SEQ ID NO: 240349 - protein, 107 aa, Zea mays
  unsure (1)..(107): unsure at all Xaa locations
  Clone ID: MRT4577_150781C.1.pep
MRNFTILLAQHLRLLCILAPHIINIMLLNAVIYTPNHIKRDGTTIKLTLQLTENYLNYLTTDPFVSRMIHXNIYSDKRMCYDILHNQGIPIYDVSEQYNFYSISDVR

SEQ ID NO: 240350 - protein, 148 aa, Zea mays
  Clone ID: MRT4577_150782C.1.pep
ILNKQEHSKMSLNFQAHIHDDETDVGAMLKSSSSIGHPAGARADTEPGGGPAPWAARVRAVPGDRTAVLARARRVPGEPATRPAPGMRGCSRWRRGARLGSSRPWRSHVARDRGRTPVSSRGGLVQGAPGRRLRFHRFFRHAVRKSSG

SEQ ID NO: 240351 - protein, 105 aa, Zea mays
  Clone ID: MRT4577_150783C.1.pep
FLPLLLIRKLQMDHAEVSGLLCIGTRETDGGEESYAAEYPKMDQDTNATTKFDVVMETSAMYTDQINTNACLDEYHMSGKQPMEEMGFGSAHSFGLPSERMVADS

SEQ ID NO: 240352 - protein, 120 aa, Zea mays
  Clone ID: MRT4577_150784C.1.pep
MALIRAAVAPLRAARCLRQPLSSRGFSVSARRQGGGGSHQFDPPTGWLWGVKPGEKAEPEGWEWPTYILLGSLAATAVALAFKPDTTVSTWALEEARRRLEGGSSARPIQAGQEELSRRF

SEQ ID NO: 240353 - protein, 61 aa, Zea mays
  Clone ID: MRT4577_150785C.1.pep
QLGTCSFCSLGIFRIVTLHFFGGVIFLGSVFAINWSSGPSFPYGPLIYLGSQHLHLSSFMT

SEQ ID NO: 240354 - protein, 65 aa, Zea mays
  Clone ID: MRT4577_150786C.1.pep
GHLKRSPSLSSQALSITIAHEMCNHLVQQCPKPCPMCSSKGDHDDHPKLDHVQDRGVTTRYLCVP

SEQ ID NO: 240355 - protein, 188 aa, Zea mays
  unsure (1)..(188): unsure at all Xaa locations
  Clone ID: MRT4577_150787C.1.pep
MNKEKHHRXDWILRRCXSSLAACILTLTAVRCFIVLDIYLXLRPSKPLFYLQDVXLRSIDLRDPGFSIDLQATIASRNPNECWGAHYKTMDAITTYRDEXVDVXPVSMPAIYQGHNDXSPWSPAMSSDSGPVVQYVAHAMKQDIXAAYMLLHFRMYGRIKWKVVRCVSDRYHLFVNCHALLGTSGSAA

SEQ ID NO: 240356 - protein, 121 aa, Zea mays
  unsure (1)..(121): unsure at all Xaa locations
  Clone ID: MRT4577_150788C.1.pep
SLCRLVEVLLVLALVAGGVGAPVRAVVVAVALRRPTRRSPPFLVRRGALFCWRACWRPSLAAAGAGGARPCAVAPRTDKRKEKKKKKNGRACVPCGRRRRGAVVWVLPGRWVXPXGGTRDP

SEQ ID NO: 240357 - protein, 208 aa, Zea mays
  unsure (1)..(208): unsure at all Xaa locations
  Clone ID: MRT4577_150789C.1.pep
MAGGGGGSLSSPSASFLSSPTPTPPPRLLRRCSTKSASRDSPILRPKKPPPLFCAAAATPTPAPAAASKSAGSWRDLCSLNAWVVRDYRRLVDSVGALEPALRRLSEEQLKAKTAEFRSRLTRGETLADVQADAFAVVREAARRTLGMRHFDVQIIGGAVLHDGCIAEMKTGEGKTLVSTLAAYLNALTGKGVHVXTXNDYLXQXDAE

SEQ ID NO: 240358 - protein, 80 aa, Zea mays
  Clone ID: MRT4577_15078C.1.pep
KQILAPLPIGFAVFLVHLATIPITGTGINPARSLGAAIIYNRDHAWSDHWIFWVGPFIGAALAAIYHQVIIRAIPFKSRS

SEQ ID NO: 240359 - protein, 44 aa, Zea mays
  Clone ID: MRT4577_150790C.1.pep
QFSSFTCAPLDCGWPACSSSLTSPTALFAPAWPDQGSALLLEPN

SEQ ID NO: 240360 - protein, 97 aa, Zea mays
  Clone ID: MRT4577_150791C.1.pep
QCISINMLADKLNMTPEEAERWIVNLIRNARLDAKIDSKLGHVVMGNNAVSPYQQVIEKTKSLSFRSQMLAMNIEKKLNQNSRSEAPNWATQDSGFY

SEQ ID NO: 240361 - protein, 61 aa, Zea mays
  Clone ID: MRT4577_150792C.1.pep
LHQHKKYSHLMDAHRSFSFRSYKRNAQQMCCGYYHTQCTIIVHTDPMLDTLNDSTLLFFML

SEQ ID NO: 240362 - protein, 108 aa, Zea mays
  unsure (1)..(108): unsure at all Xaa locations
  Clone ID: MRT4577_150793C.1.pep
SLHTNSEDTEYRCGSGLNYRPEEMSNRLRDSDDKLGLPITCCQETEPLGTSCHVALSKDKLADGSDQPYCVXNSEWIPKYPSAELIRCHNCHGGEATIMDTKVDEPYK

SEQ ID NO: 240363 - protein, 60 aa, Zea mays
  Clone ID: MRT4577_150794C.1.pep
VRVLLTILQTATPPRTPVSTKDPSSAMGTTIRDSLLTIGIPFSFSIRPWRGRGGRKEVKV

SEQ ID NO: 240364 - protein, 79 aa, Zea mays
  Clone ID: MRT4577_150795C.1.pep
VIVPLGPGIAPPPFLPWFRPFRILGRAGWNLAICSCLKIGNSPGLLAPDQFMPFKLYCAAACLLGGRSPFVTWRNKNFG

SEQ ID NO: 240365 - protein, 94 aa, Zea mays
  Clone ID: MRT4577_150796C.1.pep
KQLKVNTTFNIKFTAPANAKQVKVTLYYGGFVTHSLHMGHRMAFLDNTGFKAGATAQSITVTMPPNKAVAPAGPYVIYVLVDGVPAMGQFVQVS

SEQ ID NO: 240366 - protein, 85 aa, Zea mays
  unsure (1)..(85): unsure at all Xaa locations
  Clone ID: MRT4577_150797C.1.pep
VKDPLAHSVKIYHTCIRCAQCLRSXPTDVSQMIPGEGCNPFLFANAPIPDDXVGCTTCESTCPTDCLTVPLYLXSVTSRRMVLSY

SEQ ID NO: 240367 - protein, 490 aa, Zea mays
  unsure (1)..(490): unsure at all Xaa locations
  Clone ID: MRT4577_150798C.1.pep
MENANASSCRNGDGTQTPPPHVAMLATPGMGHLIPLAELAKRLAQRHGVTSTLITFASTASATQRAFLASMPPAVASMALPPVDMSDLPRDAAIETLMSEECVRAVPALTEALLSLKQRPTXPAVXAFVTDLFGADAFDAARAAGVQRRYLFFPTNLTALTLMLHLPELDASIPGEFRDLAEPLRLPGCVPLPGTETMKPLQDKSNPSYRWMVHHGAKFREATAILVNSFDAVEPGPAEVLRQPEPGRPPVRTIGPLVRAEDGGGSKDDAPCPCVEWLDRQPAKSVIFVSFGSGGTLPAEEMRELALGLELSGQRFLWVVRSPSEGGVGNDNYYDSASKKDPFSYLPQGFLERTKDVGLVVPSWAPQPKVLAHQSTGGFLTHCGWNSTLESLVHGVPMLAWPLFADQRQNAVLLCDGVGAALRVPGAKGREDIAAVVRELMTAEGKGAAVRAKVEELQKAAAEGLRDGGATAAALAEVVKEWTSADDSVY

SEQ ID NO: 240368 - protein, 72 aa, Zea mays
  Clone ID: MRT4577_150799C.1.pep
YVQTGHLTRTQPKHGPFASGQATTRRATRPCGAGFRTCLTVQTWLAGSKKKKKKKKKKYFFKKKKKKKKKKK

SEQ ID NO: 240369 - protein, 85 aa, Zea mays
  Clone ID: MRT4577_15079C.1.pep
TCVRKIRICHGDTTCSATLLLLPTASHSDETQLHSSQLAYDMYNPSVGIYHPGSTHEHEHETVYVEPSSSSPDTGGDGCFEMEEE

SEQ ID NO: 240370 - protein, 529 aa, Zea mays
  Clone ID: MRT4577_1507C.1.pep
METKRVAIIGAGVSGLAACKHLLERGCRPVVFEAGTVVGGVWARVPDSTALQTPRPMYQYSDFPWPDTVTEVFPDHRQVMSYLDAYARHFGVLDCVRFGRRVLGMEYHGVAEDDVAAWEEWGGNGQAFGCAGAGEWRLKVADAEGRIETHKADFVVLCIGRFSGVPNTPTFPPGEGPEAFDGQVIHSMDYAKMGTKKAREMIKGKRVTVVGYLKSAVDIAAECAEVNGADHPCTMVVRTKHWIIPDYFAWGVHISLLFLNRFAELLIHKPGEGFLLWLLATLLAPLRWLFSKFAESYYAIPMRKHSMVPDHSLFQALATCLIAIQPKGFYERLEEGSIVLKRSKTFSFCREGVVVEGEVSSSSLVESDVVIYATGFRGDLKIKDMFASEYFRSVAVGSACTTVPLYRECIHPKIPQLAVLGYSESIANLYTSEIRAKWLAHFMDGGFRMPSVAAMQKNVLEWEKCMKRYAGGRYFRRSCIGLLHIWYNDQLCRDMGCDPRRKKGFLEELFGVYGPADYADLHPDRKKDD

SEQ ID NO: 240371 - protein, 47 aa, Zea mays
  Clone ID: MRT4577_150800C.1.pep
FLLLPLPQIQEGGGSYTLHAGHRDHLPTSYSRMSCSYSSSTIMRSAH

SEQ ID NO: 240372 - protein, 68 aa, Zea mays
  Clone ID: MRT4577_150801C.1.pep
DKTLNNSLKHLHGTSNPTNNLVKRKCSYVTSILQQVKFTNRLTVETLITRKTNYPEAYQIRIKGDQNF

SEQ ID NO: 240373 - protein, 80 aa, Zea mays
  Clone ID: MRT4577_150802C.1.pep
FHTSQLRLSMARTSFKMEHDLSKFGYFSRWRSLAKYSNHHVKERPICEKSRYSENIGWSLGHCVWATKFRHADVSENFVM

SEQ ID NO: 240374 - protein, 78 aa, Zea mays
  Clone ID: MRT4577_150803C.1.pep
FRREYSSHNVKYKKQIQLVAKISVCIDRRLTWRKRSRELIFSLGEETNIGLVLPPGQGPPAPGNSKMLHKHILCSVIH

SEQ ID NO: 240375 - protein, 60 aa, Zea mays
  Clone ID: MRT4577_150804C.1.pep
KAKTVKTAPPFILYVLYILISSFSIIYLFKLELISFFIIYQLLFFFFFLIFFFHFFSDAW

SEQ ID NO: 240376 - protein, 44 aa, Zea mays
  Clone ID: MRT4577_150805C.1.pep
PKPKPPPQPDPKPKPHPHPIPEPQPGPGKPKPKPPGYSPGPPGP

SEQ ID NO: 240377 - protein, 164 aa, Zea mays
  unsure (1)..(164): unsure at all Xaa locations
  Clone ID: MRT4577_150806C.1.pep
VLVKPLGMWGGVFFPSGSVVGKLKGEXNITLGFVYFLGDVFFXKSWFSGFFFPQGWVSMPGVFPVAFGGFFFWHMPALPEIFGDVSVFQFGGGTFGPPWGNAPGAPAFCVALKACVQACNEGGVFACEGIEIFKPACKWGVDPPPPFXIWKGVNFFGFKALGPL

SEQ ID NO: 240378 - protein, 306 aa, Zea mays
  unsure (1)..(306): unsure at all Xaa locations
  Clone ID: MRT4577_150807C.1.pep
MAAALVSVPRIKLGSQGLEVSAQGLGCMGMSAFYGPPKPESEMIKLIDHAVDAGVTFLDTSDVYGPHTNEVLLGKALQGGVREKVELATKFGVSFADGKREIHGDPAYVRAACEGSFKRLGVDCIDLYYQHRIDKRVPIEVTIGELKKLVEEGKIKYIGLSEASASTIRRAHAVHPITAVQLEWSLWSRDAEEDIIPTCRELGIGIVAYSPLGRGFFSSGAKLVDSLSEQDFRKHMPRFQPENLDKNAQIFERVXRDGSTERMHAITARVGLGSPPRKRRLPHTWHNKNRQLQPERGGTVCEAYTR

SEQ ID NO: 240379 - protein, 383 aa, Zea mays
  unsure (1)..(383): unsure at all Xaa locations
  Clone ID: MRT4577_150808C.1.pep
LNSLIKRWKXAMRGFIRVYLVSEKRLSNHVFSELTDSTADLCFSEISFNSVVQLLSFYVSVAIGPPKTEKLFRLLDMYEVLDDLLPEVESLFEPKYGDMILNEYHEALLQLGESARKTFAEFKCAIQSYTSSNAVARGEVHPLTKYVMNYIKALTAYSKPLDSLLKDTDRRCLTSDIQLMANTYPNFTATALHLQSVTAVLEANLEAGSRLYRDDRLQNIFMMNNTHYMVQKVKNSDLKSFLGDDWIRIHNRKFQQQAVRYERASWNNVLSYLSDDGLCASGDAASRKTIREKIKNFNLSFEEVYRVQTAWSVPDDQLRDDVRISISLKVIQAYRTFVGRYSGFLDGSRHRDRYVKYRAEDLETLLLDLFEGTQKTLQHSCRV

SEQ ID NO: 240380 - protein, 35 aa, Zea mays
  Clone ID: MRT4577_150809C.1.pep
MAAAGDLSDDEKRAMRGSKFAPLPPPPPSSRPQPR

SEQ ID NO: 240381 - protein, 72 aa, Zea mays
  Clone ID: MRT4577_15080C.1.pep
PRVRPIGFAVFLVHLATIPITGTGINPARSLGAAIIYNRDHAWSDHVSGNCSRFLSHQLSVSNSVVPLALAV

SEQ ID NO: 240382 - protein, 85 aa, Zea mays
  Clone ID: MRT4577_150810C.1.pep
LGVVISDRVLGGVESSETQAYDPDRLSAFTSPVAPLATLIALHMGIPRLLASVSTIVGCQLSPPANLTIQNGDRIVCKPAVLEPN

SEQ ID NO: 240383 - protein, 153 aa, Zea mays
  Clone ID: MRT4577_150811C.1.pep
MAAAGDLSDDEKRAMRGSKFAPLPPPPPSSRPQPRMAHPGGALTTNKAAALAKFLERKLQQPDGLDSLDPDLVKLAVKNAKETIKASNGEPSTSGRVVRHVSSFVDGTEDSEDEAEVKGIKRKRKNKKVKTHQGDKQQSKKKKKNKKKKGKGL

SEQ ID NO: 240384 - protein, 77 aa, Zea mays
  Clone ID: MRT4577_150812C.1.pep
VIACCFLLSFNFGFSHLVVSSGEWSRGCWIAIGACSLFVRLVAVSARADCPWGVRGRNIGPAPLRAPLCFLSSAVAS

SEQ ID NO: 240385 - protein, 53 aa, Zea mays
  Clone ID: MRT4577_150813C.1.pep
VQANGAYPKYLFGDHMDVYDKQRFRAKDPRLKAVKTGAPKSSPPAYIKRETNY

SEQ ID NO: 240386 - protein, 82 aa, Zea mays
  Clone ID: MRT4577_150814C.1.pep
FPLFNQKEGLAFCTTLIVGNHFFFGMKRWDFSILCQCIKQWPSEYQMLSIFSAQKLAIPLFSLLPICQVGVEILIFKVCISF

SEQ ID NO: 240387 - protein, 74 aa, Zea mays
  unsure (1)..(74): unsure at all Xaa locations
  Clone ID: MRT4577_150815C.1.pep
GLAWQATRRRLQPVGPRHLLSHDAPFDRLADDRPYNELPRILITAXRYPDIGTRFILHRLILTFPNMPIFPLVD

SEQ ID NO: 240388 - protein, 220 aa, Zea mays
  unsure (1)..(220): unsure at all Xaa locations
  Clone ID: MRT4577_150816C.1.pep
MARSNALMWLLLLALSCWSWCGAVTARPTPSTSTSTTTAGGGFIRSWCAGTDYPALCNATLAPYAAEVGASPARLSLAALTVTLDGARRATAAMKAMAAGGASSHHLVPVAAEAAADCVGMLEDAVDLLRQSVEAMERLGKEPASASASASGQAGRSVRFQVNSVQTWASAALTNDGMCXMEGFKGQPAVVREAVRRNVAGAMHLTAIALAIINAMAKQM

SEQ ID NO: 240389 - protein, 59 aa, Zea mays
  Clone ID: MRT4577_150817C.1.pep
STSPGVPRAEMTGALFRDEGSELAPALPSLLYSASGRVVFARCDCDKRALDRRMRRTGD

SEQ ID NO: 240390 - protein, 72 aa, Zea mays
  Clone ID: MRT4577_150818C.1.pep
LEGIIQRGLILYEVKWFKPFPAKDLAWARVVFAAMTHITRLLDRVDGWAKGPDLRAFPLTLEGLRALADWHQ

SEQ ID NO: 240391 - protein, 75 aa, Zea mays
  Clone ID: MRT4577_150819C.1.pep
MASGSPSLNRSRRRHHHQQPEHLVRRRRKRVRKAASKATISRCEMGMEQLKLEPEDRQQGPHVRNKPSRPSGLTP

SEQ ID NO: 240392 - protein, 278 aa, Zea mays
  Clone ID: MRT4577_15081C.1.pep
MNMCEKDQNLPWGYDLFRDPFAPPNGYYGPPPGYCDGHCCDLHHYGRASHPDETQLHSSQLAYDMYNPSVGIYHPGSTHEHEHETVYVEPSSSSPDTGGDGCFEMEEEVGKRFYPMVPVPHVPKINGEIPSIDEATMDHERLTERLRLYELVENKVKGDGNCQFRALSDQLYQSPDHHEFVRSQIINQLKTNRDAYDGYVPMAYDDYLEKVARNGEWGDHVTLQAAADKYGVKIFVMTSFKDTCYIEILPKVQKSNKVILLSFWAEVHYNSIHPQNGE

SEQ ID NO: 240393 - protein, 112 aa, Zea mays
  Clone ID: MRT4577_150820C.1.pep
SLSISLSLCCGVPSPPVCLCIYMYRYHPISPCVMRACPMLPLIHTRSVGRDRPPPLGVARSLSLSFSVCVFVRVCVSVSVCVRERECERERERERERERERERERERASCRI

SEQ ID NO: 240394 - protein, 94 aa, Zea mays
  Clone ID: MRT4577_150821C.1.pep
NGPIRPQNPLGCTSLTLRPGEGAFLRLWVTILKRSISNLNPRRGGGDNPHPFKRGLAPSRGGGKRGLKGFSIPPGRQAGGPAKPSQFHLGHQGT

SEQ ID NO: 240395 - protein, 47 aa, Zea mays
  Clone ID: MRT4577_150822C.1.pep
PVLGRYSAVMLWRSRYALAYRRVTVVFSFAGAFACMLESCPWVHFGL

SEQ ID NO: 240396 - protein, 51 aa, Zea mays
  unsure (1)..(51): unsure at all Xaa locations
  Clone ID: MRT4577_150823C.1.pep
LLLPGGRAGFXGACGFGGPLGLGALLVLAVRWGLRFSVWLLLRSGSXSASS

SEQ ID NO: 240397 - protein, 95 aa, Zea mays
  unsure (1)..(95): unsure at all Xaa locations
  Clone ID: MRT4577_150824C.1.pep
ARLNVFFNISFISVLTVIVFLSIYIYXSLILFSIFYLFSFLYFLYIFFFYVWLLFIFFYYFFLFIXLFYFFILYFFLFFISFFFFXLSFLIYLFF

SEQ ID NO: 240398 - protein, 48 aa, Zea mays
  Clone ID: MRT4577_150825C.1.pep
MVSEQSVAELKQTLLATTLELEAAREELRRKEQSIAKLSDLVREVAKE

SEQ ID NO: 240399 - protein, 56 aa, Zea mays
  Clone ID: MRT4577_150826C.1.pep
SAKQTLAASGWSGAASPPLHPASCSRADLRLSAAVKACPPSWQPDHQTQPEPVPQA

SEQ ID NO: 240400 - protein, 242 aa, Zea mays
  unsure (1)..(242): unsure at all Xaa locations
  Clone ID: MRT4577_150827C.1.pep
MGINHSLLKPSDNPLYGFGGKGTFPVGKIELPLSFGVAPNARSEQVTFDIVNMVYPYNAIMGRGSINKFKAAIHGLYLCMKIPAANKKVKAQQQSNDGTKAVPLDPATPKQTVIISEDLTSQDEEKLISCLSRNKDVFAWSAHDLVGVGRTIIEHDLGIDPSVRPRKQRLRKMSDEKTEAAKAEVHRLLEANFIEPIAYPTWLANVVMVQKKSGKWRICIDFTSLNKACPKDXFPLPQIDKI

SEQ ID NO: 240401 - protein, 53 aa, Zea mays
  Clone ID: MRT4577_150828C.1.pep
KQLISYFIFLTPTRVVTRLVSIYGGPDVRISFKLHSGCNVNYSSILTMHTLRA

SEQ ID NO: 240402 - protein, 127 aa, Zea mays
  Clone ID: MRT4577_150829C.1.pep
MAGAAGGFVTRAFEAMLKECAANRGKFAALQQSIQSYLDSIKGATAEGAVITEALASAGRVLDGPQAELVLQPLRLAVETKHVKLVEPALDCLHKLIAYDHLEGDPGLEGGKNSPIFTDINKYSICP

SEQ ID NO: 240403 - protein, 122 aa, Zea mays
  unsure (1)..(122): unsure at all Xaa locations
  Clone ID: MRT4577_15082C.1.pep
DTTTTFXIELIXIGSAEGRRWAVIIKPGSENTDPILPNIILTGADVGYPGGLWYDPLGWGFGSPEKIKELCTNEINNGRLAMLAVMGACVQAKYTGAGPIDNLYDHLTDPGHATILQGFIPK

SEQ ID NO: 240404 - protein, 54 aa, Zea mays
  Clone ID: MRT4577_150831C.1.pep
RPGDLLFAVEGSVSDAAKILGLSTGALSRLILSDDSLRTAANELRASKGLKPLR

SEQ ID NO: 240405 - protein, 32 aa, Zea mays
  Clone ID: MRT4577_150832C.1.pep
ATRTNHYSYNVLVAQRLLDMRNRHCTITVNGV

SEQ ID NO: 240406 - protein, 63 aa, Zea mays
  Clone ID: MRT4577_150833C.1.pep
HASADAWAQIQRSIFRSSHLIINHSNGGDRVFLLPVAFMSSFSFFPMWNNTSLLRHRSWWLPP

SEQ ID NO: 240407 - protein, 103 aa, Zea mays
  Clone ID: MRT4577_150834C.1.pep
SGSSFEPSRFLSLSAFPLILSRCPGVSGGACHTSYAQQRNCCLDHMQSTTEDEPLLAGVRLNAALGWNSADPLVAPPFVLRLCLVGHERLLTGRKVQMGFFQL

SEQ ID NO: 240408 - protein, 139 aa, Zea mays
  unsure (1)..(139): unsure at all Xaa locations
  Clone ID: MRT4577_150835C.1.pep
LEEASCDIRLFDGRLKVYDPDYNLLISAPCTGNKLCMVKLGVVSPVSLLTKTNDVAXMWHSRSGNLNFKALRDLXSKKMVQGMPXVDRVEHVCDVCTLGKQLLTLFPKSSSYRAKKALELLHADLXGQIIPSRPTTRVP

SEQ ID NO: 240409 - protein, 79 aa, Zea mays
  unsure (1)..(79): unsure at all Xaa locations
  Clone ID: MRT4577_150836C.1.pep
MARLSWGYDEHNGPIHWNELFPIADGYQQSPIEIKTKEVXYDSSLRPLSIKYDPASAKIISISGHSFNVDLDDTEDKSV

SEQ ID NO: 240410 - protein, 97 aa, Zea mays
  Clone ID: MRT4577_150837C.1.pep
VYAYFTDYIKRKKNQRQLFAKRTGSSLNVQVQQHQQFTHLYVNKQMQRAAAAAAGLQQLMALSSSHCTVYTGVLCSIQSAVTGQRQVVYISLYVSCV

SEQ ID NO: 240411 - protein, 292 aa, Zea mays
  unsure (1)..(292): unsure at all Xaa locations
  Clone ID: MRT4577_150838C.1.pep
MEVALVERLEAAVARLEAAVASGASLASTAPRDFDALEARSDPAILAYDEFVAEAVGRLTAAAXKIGGKVLDATKVLAEAFAVAKDMLVQANLHQIPALTVDAQGVVKPCRHVVPFETCICVPTNHYYCNHLKSVADSLXSLNLTXYLGKDCGMSFPTAHVEESWQMAEFYNNKVLVEYRNKDPDHVEWAKALKDLYMPGLRDYVKKHYPLGPVWGPAGGAVVSQPKAAAPTPKAPAVKAPPPPAPPAAPLFSTEKSPKSSKPKERMSAVFQEISSKPVTCRLRKVTDDMKS

SEQ ID NO: 240412 - protein, 152 aa, Zea mays
  Clone ID: MRT4577_150839C.1.pep
MAAVWKWKHAVFLVLVTMMRPQAAEAGGAANATAACPLDLGYVATLPWDRAPCEPPVTNGTACCMTLLSVFAVGLASRLRATGRFRLPSARASAACLRAFSAALAAPPLSLPASLVPGCFPVQSQFAISPDYCAGVTTAAEYVAVAGNASAA

SEQ ID NO: 240413 - protein, 178 aa, Zea mays
  Clone ID: MRT4577_15083C.1.pep
HVPKINGEIPSIDEATTDHERLTERLRLYELVENKVKGDGNCQFRALSDQLYQSPDHHEFVRSQIINQLKTNRDAYDGYVPMAYDDYLEKVARNGEWGDHVTLQAAADKYGVKIFVMTSFKDTCYIEILPKVQKSNKVILLSFWAEVHYNSIHPQNDAPRSQTTKRRRWWPFSQHHHH

SEQ ID NO: 240414 - protein, 179 aa, Zea mays
  Clone ID: MRT4577_150840C.1.pep
MGVAGGDGSTKPSAAAMDVESSTAVVAQPTSVLRSVLLSYAYVAVWISLSFTVIVYNKYILDPKMYDWPFPISLTMIHMAFCASLAAALVRVFRFVDLPADPPMTPSLYVATVVPIGALYALSLWFSNSAYIYLSVSFIQMLKALMPVAVYSLAIAFRTETFRRASMLNMLGISAGVAV

SEQ ID NO: 240415 - protein, 55 aa, Zea mays
  Clone ID: MRT4577_150841C.1.pep
RPEYVDDQEGGDAAVGRPPGCSSSSLRMRRRLWRRARVCRRLSAGFKGGCMSDHN

SEQ ID NO: 240416 - protein, 74 aa, Zea mays
  unsure (1)..(74): unsure at all Xaa locations
  Clone ID: MRT4577_150842C.1.pep
FLSSFAPNHPWRIIKSLFCATTQSXQXDVYQSLYSXTNASGEITTHSFLLYNIHDYGTTECARHWNHFSTTKIT

SEQ ID NO: 240417 - protein, 147 aa, Zea mays
  unsure (1)..(147): unsure at all Xaa locations
  Clone ID: MRT4577_150843C.1.pep
CRGCPRRRSPCRXFLRRVLPLLSWXXVSPSXSSFVXRVRVLLXPLALPSCRLAVALRGACXLXLGVVXVVLVXCAFXPPVGGWAVAVPLLLRALPLGGXLALCGSVPPLSAASRFLGSGAVCPPPRSRFGCPAXRCSPLAALLPALS

SEQ ID NO: 240418 - protein, 93 aa, Zea mays
  Clone ID: MRT4577_150844C.1.pep
GYPISGGPLGEVFNPLYPGGSFDPLGLAEDPEAFAGLKVKELKTGPLPMFSMLGFFVQAIVPGKGPLENLVDPIVGPVNNKGWAYAPNLVPGN

SEQ ID NO: 240419 - protein, 267 aa, Zea mays
  Clone ID: MRT4577_150845C.1.pep
MWPLCVISEKLFRMAGDDGAQGAAGSPYPDGRISLARRSYYVDVPHVQQAFTWDCGLACVLMVLRTLGIDCCDGIADLERLCRTTSIWTVDLAYLLNKFSVSFSFCTVTLGANPQYSAESFYREQLQEDIDRVDELFGKALDAGISIQCRSITAYDIAFLLLSGHCIAIALVDKSKLNLPCMSDHDVQQHNDEPDYMGHYVVICGYDADDCEFEIRDPASSRKRERVTMKSLDEARKSFGTDEDILLVSLTGKSGMKLSRKLLACSM

SEQ ID NO: 240420 - protein, 57 aa, Zea mays
  Clone ID: MRT4577_150846C.1.pep
KEGGHLKLLLPSRFQLLLMLMTFMIVLQNFSIPMLPLQLLNLHRYFIEVLANLSNCK

SEQ ID NO: 240421 - protein, 37 aa, Zea mays
  Clone ID: MRT4577_150847C.1.pep
KLCICMYFMLKNNKVPIVLNCQHNHGSCMWHNTKNGR

SEQ ID NO: 240422 - protein, 38 aa, Zea mays
  Clone ID: MRT4577_150848C.1.pep
SSNNVLLIVYHKAIILCSHVVFACREFRGAMLLKVASP

SEQ ID NO: 240423 - protein, 284 aa, Zea mays
  unsure (1)..(284): unsure at all Xaa locations
  Clone ID: MRT4577_150849C.1.pep
MAELATSLVVAPVVSLLKKKVVSLLTDQYKVMEGMEKNYDTLKLRLEAIEAVIVDAEKQGPRRGVQEWLEQVKTAAYKAHEVFDDFEYEVLRRRAKENGHITELGVMDRVKLXTHNRVAFRSRMGYRLRRIVDTFKDLMEEMKTFEFNKLEPKATAASLELREMDFLIDDHEDIVARSRHDERNKMVNILVNANGRVVGGDLMVVPIVGMGGLGKTTLAQLIHNDPQVKEYFHLRKWVCVSDDFSVLNLANKICNASERDLEDAVKKLQEHLNGKRYWLELISY

SEQ ID NO: 240424 - protein, 80 aa, Zea mays
  Clone ID: MRT4577_15084C.1.pep
FNGSCARSSAPAVVPSRGSTIQGLSWLRARITIFYRYSVSRFAHLYASVQEPASSNAIEPSAPAIDARQSRIHKVRIKSP

SEQ ID NO: 240425 - protein, 94 aa, Zea mays
  Clone ID: MRT4577_150850C.1.pep
GGGGPALDSRAYPSPSAGARALPLSPPPFPTPSPPSTPWAAGGGIIPYTFTGPTHLPKLCQERPRGGPPTHEGKGDTTNRGQGGAKLTGLAPDD

SEQ ID NO: 240426 - protein, 94 aa, Zea mays
  Clone ID: MRT4577_150851C.1.pep
QPDRATRRSLSGITTQITTQEANIIDQYGSPRLLDVFMERKQRPSSWRWMPMPSGFAVGANHEEGRKRMDCLWQPRSSTRDESEPLNFLFTHQN

SEQ ID NO: 240427 - protein, 100 aa, Zea mays
  unsure (1)..(100): unsure at all Xaa locations
  Clone ID: MRT4577_150852C.1.pep
XXXTYXXQXNXXXTYXXPXKXXXDSXXXXXTXNXXXXXXXXLSXXPXXTXXNXSXXTCXXXXXXPXXXXXXHXAXXXLNXTXXPTXHXXXXPNXQXXPNR

SEQ ID NO: 240428 - protein, 59 aa, Zea mays
  unsure (1)..(59): unsure at all Xaa locations
  Clone ID: MRT4577_150853C.1.pep
PILTIGFTALSMIRRIPFFFWGFSLYDGSLKXLQRGGGVFFKTPATKSMGLGESLTRPI

SEQ ID NO: 240429 - protein, 34 aa, Zea mays
  Clone ID: MRT4577_150854C.1.pep
KYTHLILLKLERSFQGVTLCKVQSIISSIGSQNC

SEQ ID NO: 240430 - protein, 89 aa, Zea mays
  Clone ID: MRT4577_150855C.1.pep
MVTELTAAQLLAYKGTDPYKPIYIFLWSKVYDVTCGRGFYGPGGAYAVFSCREASRALSKMIKDEVDVSCDMSELTQQELVVLVDWETK

SEQ ID NO: 240431 - protein, 61 aa, Zea mays
  Clone ID: MRT4577_150856C.1.pep
RVAGGSRVHMDEDRARHLENEAGGIFGRNVMTEQLSLLICGRTLPGIYIFIYRSARKQMKG

SEQ ID NO: 240432 - protein, 229 aa, Zea mays
  unsure (1)..(229): unsure at all Xaa locations
  Clone ID: MRT4577_150857C.1.pep
MFGQGRLGQAMALLLFLGMTAALARGCLQCDPNFAEKFSFYRHHVNLKSWWVGDIPVSGMLLSDWIQNTMKELHLAIPAEITRKKLYQVAEAVYQRMDQLYQGKMYFPGXRETGGAGASCYAPELDRSAVTLTSGYFPNELRAIFREQVRLIQNAIIESRIDCQRHCGXEPWSRLRATVAVAQAGEGPGESGAASHILXIYQYETISCSNCTDSHVICFGYYCKYGSCS

SEQ ID NO: 240433 - protein, 93 aa, Zea mays
  unsure (1)..(93): unsure at all Xaa locations
  Clone ID: MRT4577_150858C.1.pep
ICFYNILXEXVCCXILAPPPPSXKQILVVGGRGCVIIVVVPESALCNNEAIVKTTSEAAISIRSPNILNPGEPPEPEPEPEGEEKPTHRKKAP

SEQ ID NO: 240434 - protein, 55 aa, Zea mays
  Clone ID: MRT4577_150859C.1.pep
NIMKFLVVLVAVIAAVSAATPKEAVKAFPYSGFPSNQAYYPGQQAYYPGYQGYQG

SEQ ID NO: 240435 - protein, 85 aa, Zea mays
  Clone ID: MRT4577_15085C.1.pep
YHLDDGRDRDHHLILNIHPAPRELNPPSMVVVLRERPPSCPGGRGRPRSIVLLMYGVVLHLRPKAQQYHFVGLLNLSRILCCKYS

SEQ ID NO: 240436 - protein, 61 aa, Zea mays
  Clone ID: MRT4577_150860C.1.pep
PTRPRTRRRARGFCRLGSRTWAHAQVVPLHEQWASHHCGVFSHYRMHTIGGLILQRGRRTC

SEQ ID NO: 240437 - protein, 121 aa, Zea mays
  unsure (1)..(121): unsure at all Xaa locations
  Clone ID: MRT4577_150861C.1.pep
TPPNRRPSEAAEGEKKRXTXKSADGEEPEAEEAEATETQTTRHRGGGDSXDNGNPXPNGNAKSRRKATEXRNKHXQAAAAADDDXKAGTDDAGADNGNSTAADXEDPKNRDADTGKDDQAT

SEQ ID NO: 240438 - protein, 80 aa, Zea mays
  Clone ID: MRT4577_150862C.1.pep
EVPARPTRTPTRPAEDTTPQNSPFPLVGAKRVRDLGRRELVPKASKRASSSATVGIRPNLYPSHRQAYLSSTPGHSLFGP

SEQ ID NO: 240439 - protein, 77 aa, Zea mays
  Clone ID: MRT4577_150863C.1.pep
VGKLQKFGHRNVIKPRTRGNEPSNTHAPNGPQARRETPEPRPLGRSPPNGPKGWFRFRFQFFFFFFFFFFVFFFFFF

SEQ ID NO: 240440 - protein, 281 aa, Zea mays
  unsure (1)..(281): unsure at all Xaa locations
  Clone ID: MRT4577_150864C.1.pep
MGKEKSHINIXVIGHVDSXKSTTTGHLIYKLXGIYKRXNXXVEKEAXEXNKXSFKYALVXXKLKAXRXXXITIYIXXXKFXTTKYYXTVIXAXXHRYFXKNMNTGTSQADCXVLINDSTTXGFXAXXXKDGQTRXHXPXAFTXGVKQKNCCRNKKDATTPKYSKARYEXIFKEXSSXLKKVGYNPXKXSFVPISGFEGXNMIXXXTNLDLDKGPTLLXALDQITEPKXXSDKPLXXPXQDVYKNXGXGXVPVXRFETWVXKPXMGVTXXPTXLTTEGKSVE

SEQ ID NO: 240441 - protein, 153 aa, Zea mays
  Clone ID: MRT4577_150865C.1.pep
MPCLRRRTQGPRRRPAGAGLPCPLPPHRHHCASLPPMVQVPGGVWTRRGGRVTRVGDVGCFVCLDGGRKGLVHVSQMLGRRRAGATFTLGQVSFKVVLVDGAKLGLSMVDVDQDIGKGLQSMRRRHPVEEDALRANPPTNRSRLTGRRMAADR

SEQ ID NO: 240442 - protein, 114 aa, Zea mays
  Clone ID: MRT4577_150866C.1.pep
GLDQHKGVCYCMASEAMIMCVQGANQYVMLLFSGIKVSLISIWSSSMCSTSTWGVQISPYSGSSSDRSVRFRSSSIWFSRRLYRRYASVRFASDYWVRSRCRRCFHSRWGWICW

SEQ ID NO: 240443 - protein, 152 aa, Zea mays
  unsure (1)..(152): unsure at all Xaa locations
  Clone ID: MRT4577_150867C.1.pep
GTAQRPAARGAGTGGRGRSARTRPISTAPERGKKATKSRSHGTTELKRRGGLRIPARIHHLTRVAWLFMVPFFLRRLRLYRSFYMVLSYFYLFLXEFIFFFISFFLPYCFFFLLVFFFFFSFFIFNHVIKFIFFFWFIFFDFFYTYYTFFLF

SEQ ID NO: 240444 - protein, 126 aa, Zea mays
  Clone ID: MRT4577_150868C.1.pep
TVCLLFTVLNPNSPAHSKKTVEAAPQFTPRKNQEKRPLTEPQGSFPAIRGGERATGAKMDNGPSWGSPQTQEVKAKESLGKPKSRRILDKHTTEKPELQPENTGGKMDNGKGQPWAVFGPRCLFPT

SEQ ID NO: 240445 - protein, 47 aa, Zea mays
  Clone ID: MRT4577_150869C.1.pep
VCVLFSHAVPLVASYVVHMPVPSCFSIPFNVRMGLSLFPKKKKKKKT

SEQ ID NO: 240446 - protein, 134 aa, Zea mays
  Clone ID: MRT4577_15086C.1.pep
TVLHILSRARAHGCFQDGRCLLMGCTCHMRVEKNATESHLDVMLYRNDGGHNSGHHSNREEARSTRWEEQKGRGTGRIPLGNLHLSHTCSSVELKLSVCGSGAPVGGWVGPARVVPGAGSISRRMKWSYPHGKF

SEQ ID NO: 240447 - protein, 42 aa, Zea mays
  Clone ID: MRT4577_150870C.1.pep
MATARWLQVAAMAVALLAEWATAAAPRNPLDVRFKKNYVPTW

SEQ ID NO: 240448 - protein, 36 aa, Zea mays
  Clone ID: MRT4577_150871C.1.pep
KKRARETGFIGVQWVLQGTNRARIGARRPSFIGNPK

SEQ ID NO: 240449 - protein, 107 aa, Zea mays
  unsure (1)..(107): unsure at all Xaa locations
  Clone ID: MRT4577_150872C.1.pep
GRTAXVVSRNAASKTEAGTASAVQRTAATAPTAAGGPVGSNPAPAVAGSTAAGAPAAAEAWAPRVLLSEAGSAQRSKAPPTAAVSIHRRGAETLGCGADACGXPVPS

SEQ ID NO: 240450 - protein, 124 aa, Zea mays
  Clone ID: MRT4577_150873C.1.pep
RHTPLNRILAPTHSLEPGVDQQDFNTYGIRHGKDDVTAQGTFANITIVNNFLHGEVGPKTIHVPTGEKLSAFDAAIRYTSDGHATIIPAAADYASGSSPDCAAKGLMLLRVKAVIARSFQRIHT

SEQ ID NO: 240451 - protein, 52 aa, Zea mays
  Clone ID: MRT4577_150874C.1.pep
RDPQSVIYIPHRWHPLAFQMGLFYKTLKVRFFCCAQTLLVCILLMSNRAGFP

SEQ ID NO: 240452 - protein, 320 aa, Zea mays
  unsure (1)..(320): unsure at all Xaa locations
  Clone ID: MRT4577_150875C.1.pep
DIQMISNCDGSSRPLDHPAGLYDVHVYTDSKTLFNMRSTFDRTSRSGPKGFLAFTWDVLWVVYKKMGPLMLCKILKRWRVQFSEVLXLNNDEEYSXSLCDVWFYLHVSLKTLKXAFVSEYAVWRSDAGRGSLLASLAEAAFLTGLXKNSDIVQMASYAPLFVNDNDQTWNPDAIVFNSWQHYGTPSYWMQTIFRESSGAMIHPVNISSRYSSSLAASAITWQDAENSFLRVKVVNFGSDTVNLTVSTSGLGASVNALGSTATVLTSGNVMDENSFSNPNKVAPVKSQLSNAAEQMQVTLAPHSFTAFDLALAEPKLVAEI

SEQ ID NO: 240453 - protein, 115 aa, Zea mays
  Clone ID: MRT4577_150876C.1.pep
LGNEDCGKKFCRGNYLKGYNAIREAYPDIQMISNCDGSSRPLDHPADLYDFHVYTDSKTLFNMRSTFDRTSRSGPKVSLSLIFTTTLMRQPSFTTSHLHRSGVPGIHLGCSLGSI

SEQ ID NO: 240454 - protein, 99 aa, Zea mays
  unsure (1)..(99): unsure at all Xaa locations
  Clone ID: MRT4577_150877C.1.pep
MFHVSLLKKFHCVPPEAPPPLPLVHNDVITLEPERAVRRRVARGIEKVLVHSKGXSAASATWEDVVSFRAKYPTFQLGDELPLGEGRDSFLLLAPKLVG

SEQ ID NO: 240455 - protein, 657 aa, Zea mays
  unsure (1)..(657): unsure at all Xaa locations
  Clone ID: MRT4577_150878C.1.pep
MDLKQASSGTIFCLLLLFCVGCRCRPSEIEATQTAALKVDASPQLARKIPETLFGIFFEEINHAGAGGIWAELVSNRGFEAGGSHTPSNIDPWSIIGDDSSVFVATDRTSCFSRNIVALRMEVLCDECPAGGVGVYNPGFWGMNIEDGKAYNLVMYVQSPETKDLTVSLTSSDGLQNLASATITVSGTSNWTKVEQKLVAKGTNRTSRLQITTNKKGVVWLDQVSLMPEDTYKGHGFRTELISMLLDLKPRFLRFPGGCFVEGDWLRNAFRWRESIGPWEERPGHFGDVWHYWTDDGLGYYEFLQLAEDLGAAPIWVFNNGISHNDEVDTVAIAPFVKDVLDSLEFARGSADSTWGSVRAAMGHPEPFLVKHVAIGXNEDCGKKFYRGNYLKFYNAIREAYPDIQMISNCDGSSRPLDHPADLYDFHVYTDSKTLFNMRSTFDRTSRSGPKAFVSEYAVWRSDAGRGSLLASLAEAAFLTGLEKNSDIVQMASYAPLFVNDNDQTWNPDAIVFNSWQHYGTPSYWMQTIFRESSGAMIHPVNISSRYSSSLAASAITWQDAENSFLRVKVVNFGSDTVNLTVSTSGLGASVNALGSTATVLTSGNVMDENSFSNPNKVAPVKSQLSNAAEQMQVTLAPHSFTAFDLALAEPKLVAEI

SEQ ID NO: 240456 - protein, 34 aa, Zea mays
  unsure (1)..(34): unsure at all Xaa locations
  Clone ID: MRT4577_150879C.1.pep
SFLSQNPRLLGVGARWSRAGQPXSRRKLCSLRTT

SEQ ID NO: 240457 - protein, 279 aa, Zea mays
  unsure (1)..(279): unsure at all Xaa locations
  Clone ID: MRT4577_15087C.1.pep
MNMCEKDQNLPWGYDLFRDPFAPPNGYYGPPPGYCDGHCCDLHHYGRASHPDETQLHSSQLAYDMYNPSVGIYHPGSTHEHEHETVYVEPSSSSPDTGGDGCFEMEEEVGKRFYPMVPVPHVPKINGEIPSIDEATMDHERLTERLRLYELVENKVKGDGNCQFRALSDQLYQSPDHHEFVRSQIINQLKTGREXYDGYVPMAYDDYXMEKVARNGEWGDHVTLQAAADKYGVKIFVMTSFKDTCYIEILPKVQKSNKVILLSFWAEVHYNSIHPQNGE

SEQ ID NO: 240458 - protein, 83 aa, Zea mays
  unsure (1)..(83): unsure at all Xaa locations
  Clone ID: MRT4577_150880C.1.pep
SIQDMEGIPLYNQRVIIAGKHLWDGRTLAYYNIQKESTLHLLLHLRGGMHIXVKTLTGMTITLEVDTTDTIDNFXAKIHYMEG

SEQ ID NO: 240459 - protein, 72 aa, Zea mays
  unsure (1)..(72): unsure at all Xaa locations
  Clone ID: MRT4577_150881C.1.pep
KTKIGGWSHKKNVDFHRSKMRRMTSTHPFPILHTTGACKLEPGNLQHXPIPRSQQGGKENPKYMVPAPHPYA

SEQ ID NO: 240460 - protein, 313 aa, Zea mays
  Clone ID: MRT4577_150882C.1.pep
MASPTLMQCLVAVSLLSCVAHAQLSPTFYASSCPNLQSIVRAAMTQAVGSEQRMGASLLRLFFHDCFVQGCDGSILLDAGGEKTAGPNLNSVRGFEVIDTIKRNVEAACPGVVSCADILALAARDGTNLLGGPTWSVPLGRRDSTTASASLANSNLPPPTASLGTLISLFGRQGLSPRDMTALSGAHTIGQARCTTFRGRIYGDTDINASFAALRQQTCPRSGGDGNLAPIDVQTPVRFDTAYFTNLLSRRGLFHSDQELFNGGSQDALVRQYSASASLFNADFVAAMIRMGNVGVLTGTAGQIRRNCRVVNS

SEQ ID NO: 240461 - protein, 130 aa, Zea mays
  Clone ID: MRT4577_150883C.1.pep
RGHSGHWPPRPPGGGGKPRYPTPVKGGTNFRGVGRGPLKIIKKNPPGGAVKRGKSHPPGGGTRGTQPGPQLGGKKGKRGSRGKMVSPQKSTKKKNRKQKGENPGGPKGGPTPINWGGPTGPFPRGKTGGP

SEQ ID NO: 240462 - protein, 168 aa, Zea mays
  unsure (1)..(168): unsure at all Xaa locations
  Clone ID: MRT4577_150884C.1.pep
QGCDGSILLDAGGEKTAGPNLNSVRGFEVIDTIKRNVEAACPGVVSCADILALAARDGTNLXARARLLASLHGRSNRSRRRSSDTFPLLRCASPYVTXLGGPTWSVPLGRRDSTTASASLANSNLPPPTASLGTLISLFGRQGLSPRDMTALSGAHTNGQARCTTNRG

SEQ ID NO: 240463 - protein, 53 aa, Zea mays
  unsure (1)..(53): unsure at all Xaa locations
  Clone ID: MRT4577_150885C.1.pep
AVVTTQEXFXFFFFFFFFYFLYKFFFFFFFFRWNDSLLAEHQQTQGVRWWSSS

SEQ ID NO: 240464 - protein, 66 aa, Zea mays
  Clone ID: MRT4577_150886C.1.pep
TLTKREHLNYEGNKNIPKTTPKKKKGKYSKKNPLYPPQGMKRGTHPKIKTVSNRSENLNNEFQTNL

SEQ ID NO: 240465 - protein, 40 aa, Zea mays
  Clone ID: MRT4577_150887C.1.pep
LLLEPPVRHHGVERGDPNDPAAAPARRRLRFRRQNPILNP

SEQ ID NO: 240466 - protein, 140 aa, Zea mays
  unsure (1)..(140): unsure at all Xaa locations
  Clone ID: MRT4577_150888C.1.pep
MDDLPRGASLPPIPSSYSVPPPFAGPSIGEGGLGSSMGREARSQRSHCCATAAEQTSPLDPRPPTEKTKLMNLLXXLGAIXSLPTXVAXVVPYGAFFVPAGSGNAGGGTYAKDKLGNDITVEAWLNTHGPNDRTLAXGLK

SEQ ID NO: 240467 - protein, 53 aa, Zea mays
  Clone ID: MRT4577_150889C.1.pep
GVVGGVIIYKLKQDTPLMLNLTEQPGVFYCGVVGQLVGVLSVLQWIANTLHST

SEQ ID NO: 240468 - protein, 438 aa, Zea mays
  unsure (1)..(438): unsure at all Xaa locations
  Clone ID: MRT4577_15088C.1.pep
MSSANDFKALAEALKSLQESVGANAQAIANLTVGDTFSPDIKIGSGEHHNDRPPRFQKLDFPRYDGKTYPLGFINRCESYFHQQRIMEEAKVWMASYNLEGGAQMWYIQPIGLPPVRGCDHHIVLKLGSSPMAVRPYMYPAAHKDKLERQCATMITHGIVRSRDSTFSSPVILVKKSNGSWRFCVDYHALNALTVKDAFLIPVVDELHDELHGACLFTKLDLRSGYHQVRMRPKDFHKMVFHTHDSLYEFLFVLVFFDNILIYNTSWADHLRHLRAVLDTLRQHCLFVKRSKCSFGVGSVSYLGNVMSTEGIAVDPAKVQAIHDWPQPRSAWAVRGLLCLADYYCKFVHNYGAITAPLTSLLKEGFTWSDEATTAFGALKGAVTSAPVLTLPNFTKPFVVMCDASTHGFGXAVLIQEAHPIAFFSRPMAPRHRSLAAY

SEQ ID NO: 240469 - protein, 98 aa, Zea mays
  Clone ID: MRT4577_150890C.1.pep
PFAKQASGGWEGREVRGLSPGFSTWRKGESRPPHQDGKRQGKTQVHAGEKGRPMLGLQGAAPLLFFFFACFVFFFFGSFSIRLAFFFFFFFFFFFFFF

SEQ ID NO: 240470 - protein, 82 aa, Zea mays
  Clone ID: MRT4577_150891C.1.pep
FLFLFFFFIIFFLYGLGFFIIYNQLTFHVSLYKKFKPTEKRQTSQWRHYPKQRTNEKSKTQPAPTLYKTDNPLDPPALKIKL

SEQ ID NO: 240471 - protein, 138 aa, Zea mays
  Clone ID: MRT4577_150892C.1.pep
MGSVSAASSAVLLVVVLVASLAVGGANAATFTITNRCSFTVWPAATPVGGGTQLNPGQTWTINVPAGTSSGRVWGRTGCSFDGAGRGRCATGDCGGALSCRLSGQPALTLAEFTLGTFGGNRDFYNLSVIDGDNVAMS

SEQ ID NO: 240472 - protein, 100 aa, Zea mays
  Clone ID: MRT4577_150893C.1.pep
QEQKHHHPIRPSKLHPDGPQHEDSDAGPESPPRVARHHLFPPPPGTAGTATGTSGAATLRKTTPSSTTCAFRGAVAPTRETAYALTLVQTGLYTHANSNC

SEQ ID NO: 240473 - protein, 103 aa, Zea mays
  Clone ID: MRT4577_150894C.1.pep
CTNHTLNPNRTRARTQSEPRPEPNAHQNLNLSLYRSLSLLTFHQEISAEGVDMNNDCNCTNNTPCCSELLRVLLLVGYILYFLCHVLTVMLLYDLTAVQLASR

SEQ ID NO: 240474 - protein, 163 aa, Zea mays
  Clone ID: MRT4577_150895C.1.pep
MGSIKRNYSGWAVLPVVAGILLLAAAVMAEGRSTSCIAQCPNRKGLTACLYRCWFGRTPLHLDLVDQESTQEVVLLTASEAECAVYCKTHARDLPRKYSACMVMCQSGPDAANDKILHINDRKEEEKLQEDVEAQLRTSACDECGNTTEFMEYMSCLIRNNCD

SEQ ID NO: 240475 - protein, 71 aa, Zea mays
  Clone ID: MRT4577_150896C.1.pep
PVNWFRAISGGQLPIQITNLSCLLVAMEAGCTNTSGNVDYHVMQGDSEDSGLPLYQMMRPKAAMPTGSGCT

SEQ ID NO: 240476 - protein, 122 aa, Zea mays
  unsure (1)..(122): unsure at all Xaa locations
  Clone ID: MRT4577_150897C.1.pep
NMNGKELDGGNITGNQAQPRGGGGGGGGYGGGRGGGGYGGGRRDGGYGVRGGYGGRREGGGGGYXGGGGYGGRREGGWLAESECSGGEGLEGTGAWAHIWLRPRLSYSIYSIRVYRSFLLPS

SEQ ID NO: 240477 - protein, 84 aa, Zea mays
  Clone ID: MRT4577_150898C.1.pep
LYTILFGVALQAPKKEERGLNYQAGGGQPQKKNTGGAPKRGGNPPEKHKPSKKKGGEPDPPTGKKKGGGGKTGGQKKSPQGTAR

SEQ ID NO: 240478 - protein, 94 aa, Zea mays
  unsure (1)..(94): unsure at all Xaa locations
  Clone ID: MRT4577_150899C.1.pep
LRCCSGTGTTLSVTDQYATRGSLDDILYGKKGVNRAQPAPVLQWMXRAKIAVCADRYVQFLHENAHPGVVHRCIKXNCILLFDHEVAKIRDFNI

SEQ ID NO: 240479 - protein, 72 aa, Zea mays
  unsure (1)..(72): unsure at all Xaa locations
  Clone ID: MRT4577_15089C.1.pep
VIQGRVYCEICCAWFVTIVTEYITERSVTRECTHISTWMPHRSSDGVTDRKGTXTISLLDTQDDDICEVVLA

SEQ ID NO: 240480 - protein, 163 aa, Zea mays
  unsure (1)..(163): unsure at all Xaa locations
  Clone ID: MRT4577_1508C.1.pep
MDGVPNILEKSSHECMYSWYFTREELEKFSPSRKDGITENKESEIRHLYCSFIRDVGIRLKLPQMTLATAVMLCHRFYLHQSLAKNGWQTVATVCVFLASKVEDTPCPLDHVVRVAYETMYRRDTAAAQRIRQKDVFEKQKALILIGERLLLTTIRFDXNIQH

SEQ ID NO: 240481 - protein, 171 aa, Zea mays
  unsure (1)..(171): unsure at all Xaa locations
  Clone ID: MRT4577_150900C.1.pep
MFGFGHHGQNPPAHGGVHQPTFKIFCKADEGYCLTVRDGNVVLAPANPRDEHQHWYKDMRFSNSVKDEEGYPAFALVNRVTGEAIKHSQGEGHPVKAXVPYNPGYQDESVLWTESRDVGHGFRCVRMVNNIYLNFDAFHGDKDHGGVRDGTNIVLWKWCEGDNQRWKIVPW

SEQ ID NO: 240482 - protein, 112 aa, Zea mays
  Clone ID: MRT4577_150901C.1.pep
PTRPPTRTTTRTAQVTTVARAHPSVPGCRHTPPIVQSASQSFQQLYLFYLAATPEHLWNTNGSSRMLWIDNNRPKYPRQTHLPRPIPHNLTKFASQQDCPRMTLYGPTWSAK

SEQ ID NO: 240483 - protein, 43 aa, Zea mays
  Clone ID: MRT4577_150902C.1.pep
IRWSISPFPSEGCPKPFAGIWLAFHIRPGWIAFQGSRSAFLTG

SEQ ID NO: 240484 - protein, 346 aa, Zea mays
  unsure (1)..(346): unsure at all Xaa locations
  Clone ID: MRT4577_150903C.1.pep
MFGFGHHGHHGQNPPAHGGVHQPTFKIFCKADEGYCLTVRDGNVVLAPXNPRDEHQHWYKDMRFSTQVKDEEGNPAFALVNKATGLAIKHSLGQSHPVKLVPFNPEYQDESVLWTESGDVGKGFRCIRMVNNIRLNFDAFHGDKGHGGVHDGTTVVLWEWAKGDNQSWKILPWGDEAYAGGGSSAANAPRFGGGEPTVRIYCKADEGFSATVRNGAVCLAPTNPRDEYQHWIKDMRHSNSVKDEEGYPAFALVNRVTGEAIKHSQGEGHPVKLVPYNPGYQDESVLWTESRDVGHGFRCVRMVNNIYLNFDAFHGDKDHGGVRDGTNIVLWKWCEGDNQRWKIVPW

SEQ ID NO: 240485 - protein, 347 aa, Zea mays
  Clone ID: MRT4577_150904C.1.pep
MFGFGHHGHHGQNPPAHGGVHQPTFKIFCKADEGYCLTVRDGNVVLAPANPRDEHQHWYKDMRFSTQVKDEEGNPAFALVNKATGLAIKHSLGQSHPVKLVPFNPEYQDESVLWTESGDVGKGFRCIRMVNNIRLNFDAFHGDKGHGGVHDGTTVVLWEWAKGDNQSWKILPWGDEAYAAGGSSAANAPRFGGGGEPTVRIYCKADEGFSATVRNGAVCLAPTNPRDEYQHWIKDMRHSNSVKDEEGYPAFALVNRVTGEAIKHSQGEGHPVKLVPYNPGYQDESVLWTESRDVGHGFRCVRMVNNIYLNFDAFHGDKDHGGVRDGTNIVLWKWCEGDNQRWKIVPW

SEQ ID NO: 240486 - protein, 117 aa, Zea mays
  Clone ID: MRT4577_150905C.1.pep
AGRVGISRLLTHSHSPSTRIDSIVRPTIHSSFVHPIIRPLNLLFICYATEIPIVRMFRLINLLCNCYVAEIPIVHSNRPSNYSLSVRLLIVHLSDQSFVHPTIHRSSDCSSNYSSSV

SEQ ID NO: 240487 - protein, 193 aa, Zea mays
  Clone ID: MRT4577_150906C.1.pep
MKPMSSVLFVLLILPMCSRSSSPLQDTCRSFAAGHPAIGYEYCIRVFQADKDSAEATDTRGLAAIAARIAEAKANATAARIAAMGALERDARRRDRLSVCAEAYSDAVDQLGQAEEELARGAEGGAAGIDDAVTQLSAALDAPETCEDAFGEAADTSPLAGEDAEFKKLATVALAVAASLVPPPSTPRPRVSD

SEQ ID NO: 240488 - protein, 77 aa, Zea mays
  unsure (1)..(77): unsure at all Xaa locations
  Clone ID: MRT4577_150907C.1.pep
MNSSSLRRLVPKKEIPTLRQGLDAPRKTTILYKLKLGEIVTTILNMLFNVLTVEDKNISSTVSDDXGQDKITPLCEA

SEQ ID NO: 240489 - protein, 65 aa, Zea mays
  unsure (1)..(65): unsure at all Xaa locations
  Clone ID: MRT4577_150908C.1.pep
WXLCMLHRSLNSAERTAYSYLPLLAVPHQTLTGARSRYSRLLAPCSGALTLSVIRPAVVRVVQET

SEQ ID NO: 240490 - protein, 90 aa, Zea mays
  Clone ID: MRT4577_150909C.1.pep
SVTIMSLLVTFQIVISRQQQVWLVKALIDQMSTVATTCFGFRNLVHLQLYPLLQNAKQSSMHPKVLLVASTGTTSICLLLTWSKQATCYP

SEQ ID NO: 240491 - protein, 666 aa, Zea mays
  unsure (1)..(666): unsure at all Xaa locations
  Clone ID: MRT4577_15090C.1.pep
MDRRSWLWRRKSTDKSPAETETSASSASERITDEQDTAKSSPNSTQSPEVTSKELEDGNDVKVKVLSERLSSVVLDIRAKDDLVKQHSKVAEEAVLGWEKAETEIASLKAQLNAAAAKNSALEDRLVHLDGALKECVRQLRCAKDEQDQTVQGALAQQARQWESHKADLDQFRIDRSGASSRAASLATADIGVMDDFLEMEKLASASKGDAVEDASGQVLRLEEKVKKLAAEKAEREKALHEAQREMRTSRQRVMVAEERSAELQRQLNLANGEKHAMGAEVKAAEAKRGELEGQLELAHAEIAGLLDKGRILEERLESEKALTLXRSQVPGHGGAEGREEXLSAQLETSRSEAKKLGDKIALMERKLEVEKALSIRLATKCHGIDALEAKKKGVELELETAREEIASLQNKASSLELRRVEEEKASSAALALRCQELDELRSQLESSNSRIVELNEKVKTLEDVVEEQRSVTVELESQLRSRRAEISSLKEDISLLQKKLESQKNLSSAYISALGASETEKKELASRFELGEKEAEELRGKMSLLEEQIRKERARSSEFAVKCQKMEEQISCRSLLGHQPVKSSAGRVGGRVGGRVGLAKAAEKLADCQKTIASLSSQLKSLADFDEFPPETETSGADSDDAWDSDLKLLQPASYPTQIGCLAVT

SEQ ID NO: 240492 - protein, 93 aa, Zea mays
  unsure (1)..(93): unsure at all Xaa locations
  Clone ID: MRT4577_150910C.1.pep
DNARTHTQTRNPPLPIYNHSLXRGGGKLILLAKQITHITHTQHNITPLLILRPQPPPYFLKRSWKGPHSTTHAYYYIAPTPHAHFTPNDALSK

SEQ ID NO: 240493 - protein, 108 aa, Zea mays
  unsure (1)..(108): unsure at all Xaa locations
  Clone ID: MRT4577_150911C.1.pep
ALPLRIKQGVFSLLRGDSSLAPLKFLRFLEEFVPDPDVKSGFVPKLTPAIGKTFNFTEKELFKWAQLSLPAALGPGAEGLLASGVGGFVNQAPRVXELFWKIWPPPHV

SEQ ID NO: 240494 - protein, 107 aa, Zea mays
  unsure (1)..(107): unsure at all Xaa locations
  Clone ID: MRT4577_150912C.1.pep
RCKYPAGQKIVFHIQKGCNPNYLAVLVKFVADNGDIVLMEIQDKLSVXWKPMKLFWGPIWRMDTAKALKGPFFIRLTSXSGKKVIGKNIIPAKWKPDSVYTSNVQFY

SEQ ID NO: 240495 - protein, 88 aa, Zea mays
  Clone ID: MRT4577_150913C.1.pep
SDHLLALGPLSLFLLYTPGIASSLFYCMQWSLLLTTILLLMYPAWHHTSTITYVVQRLPIRCVTNIYANASCDYHTCIMSDKYIYKTD

SEQ ID NO: 240496 - protein, 1266 aa, Zea mays
  unsure (1)..(1266): unsure at all Xaa locations
  Clone ID: MRT4577_150914C.1.pep
VKREGKRLNRDLLRIAPVYIGGSSENEKSYRGWESVAGLSDVIQSMKEVVMLPLLYPEFFSSLGLTPPRGVLLHGHPGTGKTLVVRALIGACSQGNRRIAYFARKGADCLGKYVGDAERQLRLLFQVAERCQPSIIFFDEIDGLAPCRSRQQDQTHNSVVATLLSLLDGLKSRGSVVVIGATNRPDAIDPALRRPGRFDREIYFPLPTFEDRSAILSLHTKKWPSPISGAFLSFVASQTVGYAGADLQAICTQAAINALKRTCPLHQILQYAEKGVPHGRVPLPTVLVEDKDWLAALAAAPPPCSKREAGIASNDLVSTPLDSCFVPSLFKPLVHLLISMYLDERVWLPPSLLKACCSIKEVVFSSMEKNTVPHTLWPTYLSSLIQQKDIADRIGTILSSCGLISAQLGNRGSMLLSDVKTQENFCGSRLXIPLVCXMKGGLPHKLSGFRVLVAGAPRSGQQHLIRCVLHGFMGQIVIHKLDLATMVQEGNGDILSGLTHILLKCLNLGRCIIYMPRIDLWAVDKAHNQIEDNMLNTGSGRLASSTADHKKCSEVWNALIEQMDSLLASVSISVLSTSDMRFQDLPSGVRGFFSTHVVDQCLVSSEHTIPRFSVNIDNHSNWDEMVDSCALQLSHDLIRHHVQFLHDESHKNDNHQQKEVFASMNISAEGELKSSENERPLCGVASKENPIQLAAGRAQQEPPPSNVEDKVENDQFFFEGIVQRNPSSRLVKGSESFAIVAFGIQILQHPQFSKLCWATSKLREGPCTDINGPWKGWPFNSCLLQSSTLPGKSLNGGDNVVKGKEKSVCVRGLVAVGLLAYRGVYGSVIEVCAEVRKVLGLLVGQIQTKILEKRNQFRYFRILSQVAYLDDIVNSWAYTYQRTHVDTRTGTSRXRVQVPKNVKGPSMLQEPMXQVAPVAIPAEVQDIPAQHTQDHEVVPGPXRCKAIRLSILQNNLEAIRWTVTXDNHVNSVSSKDAVEHDHVHSALPDVHRGNTHADTVTXTENLLEQTTMGKXRLTYGEDKFRPGIQRSENHTESMEGLSCLQRAGDSVGSPASINNTELPKNNVSSEAHIDDNELRRNDLVNDVESNSIDGKHDTMMNLSVPKISCLYKCCSPCFQSIYKMVHGIISNTLRPNLHCLTADDMHDILSSWCLNLLGSVRKLYSSHDEASCTEVFVRMSNKETHLEHCACQSDIYLSRECVCHLESNGDVETANTDCHPLSGQSLSFFFKDGVWMPLDLTAETKLHCSFRRFCVCSILGTVSMLS

SEQ ID NO: 240497 - protein, 289 aa, Zea mays
  Clone ID: MRT4577_150915C.1.pep
MKCSSAKECQRTKYAAGTNVQVAPVAIPAEVQDIPAQHTQDHEVVPGPTEVQGNPVKYTAEQLGSHTMDCDLDNRVSSVSSKDVVEHDHVHSALPDAHRGNTHADTVTNDGEPIGANNNGKVSRLTYGEDKFRPGIQRSENHTESMEGLSCLQRAGDSVGSPASINNTGLPKNNVSSEAHIDDNDLGSSGKKQKSVTYASRHPSRAAAHHRKITSSSNLNGGIADNYLHTRHVKIVKAWPLHVPPMATEDTKMSIRDSVFSTDKQQNGGFEGLELEEGDCIVYLSAATC

SEQ ID NO: 240498 - protein, 69 aa, Zea mays
  Clone ID: MRT4577_150916C.1.pep
RYNTKCEYKIQSCFNLMLNWAIIHITMRTEMASVTQSSSNREISSSNNSPTYMGNFVGKKMKTNILASF

SEQ ID NO: 240499 - protein, 87 aa, Zea mays
  unsure (1)..(87): unsure at all Xaa locations
  Clone ID: MRT4577_150917C.1.pep
STYQMIRSPCFMAAKPSPASXRGPISNSDKWRIARMPQHRETFQYMSEENLLRFLVFTCIIESLVLPPFFFTCRDLVQKRTSGRQIF

SEQ ID NO: 240500 - protein, 79 aa, Zea mays
  unsure (1)..(79): unsure at all Xaa locations
  Clone ID: MRT4577_150918C.1.pep
APCPLGCSSXAVRAWCXGRPPPPRXGPSSPXAXXAPSAXXGRRRACRASPWRPSRXPXRRPXRRXXGXGRPSLPPXXPV

SEQ ID NO: 240501 - protein, 78 aa, Zea mays
  Clone ID: MRT4577_150919C.1.pep
ILLYLKVLGGEINLTATLHSHVLAHLYLLTVMHHVHDPLLVFLLLLQQLLKHHLRRRVTYCLLFVLYKLLLTRYYLSK

SEQ ID NO: 240502 - protein, 98 aa, Zea mays
  Clone ID: MRT4577_15091C.1.pep
NQNLRFFGGSRHKFYKGVVFRRALFPPNKIFFGASTGGPCKATVCFCLTTPLRFYHPFFFGMPKAICPPPLGVINIYLPRPGGPPLITIRRGLRGFNF

SEQ ID NO: 240503 - protein, 221 aa, Zea mays
  Clone ID: MRT4577_150920C.1.pep
MDASQGVLLSSSLVGGAKGSASWPELLGSAHWEGLLDPLDLTLRRLILLCGDLCQVTYDSFNSDTHSKYCGSCRYSRSTLFARTLFPAAADIFPAAYLYATSQSSFPGGIMVFSLSREAWNKESNWIGYVSVSTDAAAAATGQRVIYVAWRGTIRTLEWVDVLKPELVSPDAILPEGDPARGHARVMEGWHLIYTSSDERSPFSKYSAREHWFAAVPELVA

SEQ ID NO: 240504 - protein, 86 aa, Zea mays
  Clone ID: MRT4577_150921C.1.pep
MMYVVEWRIRWCNGQGYYLADEPRVHFVWQPNQESSILVMSRAFDDYYIEDCGVILAPEVTQRRIDNSDQFVILATVRVAFVPVCL

SEQ ID NO: 240505 - protein, 56 aa, Zea mays
  Clone ID: MRT4577_150922C.1.pep
AGGAPHQWTLLQGRFRVLAGNTFLLHIHIKEFKTGSYIYASAAHAELIMIPRAPGL

SEQ ID NO: 240506 - protein, 53 aa, Zea mays
  Clone ID: MRT4577_150923C.1.pep
MKIDNIIHSLNIYSPCNGACRNLVCTDLFTRGIDIQAVNVVINSPCLYCLFTR

SEQ ID NO: 240507 - protein, 148 aa, Zea mays
  Clone ID: MRT4577_150924C.1.pep
MDQWFNFDHPCKYLLLIDPVIRENRVKKVLVDGGSSINVTFPRTLLALGVALKDLTESDTPFFGIMPTEGEYPLGHIYMPVTFGTSENYRTEFLRFEVARFDCGYNTIIGRSGLAKFMAIPHYSYMILKMPGPQRIIIVRADFQGAAE

SEQ ID NO: 240508 - protein, 165 aa, Zea mays
  unsure (1)..(165): unsure at all Xaa locations
  Clone ID: MRT4577_150925C.1.pep
SAHHGAGXVATPAGRSGPGAWRGSGVVLARGLLTLGADVELPVQYSSMEVRTRLPQDRPRPTHSSFRSAHPGGQVSSYPRYCNPSRNNATLCCTPVHDGRTRNSPLQRRGSRGWANTRSTTEVQPELLHTLQRSVTVLLTLDNLTPRYRLSGESRRIPYGRSPVS

SEQ ID NO: 240509 - protein, 95 aa, Zea mays
  Clone ID: MRT4577_150926C.1.pep
ADAWADAWAKDLSVLWTGAPNCPVCHRTVFGAPCPDKFEAATLGNSTTPYGIINRTVRCAIGATANSCQRSTLTGEQWFHRSHSTKLKGTGLAGA

SEQ ID NO: 240510 - protein, 36 aa, Zea mays
  Clone ID: MRT4577_150927C.1.pep
GTILFFFQSKTSYKGLLTLTLGPMFIHYTLLLNHSR

SEQ ID NO: 240511 - protein, 56 aa, Zea mays
  Clone ID: MRT4577_150928C.1.pep
LSIYSGVMLDKYRFVINNHHRRRVTITLLLARTESYRHRSQGRGPGRRPRSSMVTT

SEQ ID NO: 240512 - protein, 80 aa, Zea mays
  unsure (1)..(80): unsure at all Xaa locations
  Clone ID: MRT4577_150929C.1.pep
RDSIQGITKTSISRLARRDGVKXISGLIXEETLGVLKIFFENVILDAVTYAEHARRKTVTAXDVVYAPKRQARTLHGFAG

SEQ ID NO: 240513 - protein, 46 aa, Zea mays
  Clone ID: MRT4577_15092C.1.pep
YINKTFFKVLIFYVIISIGCCSRTRPGLKVLRILSCYYILNFLLGE

SEQ ID NO: 240514 - protein, 115 aa, Zea mays
  unsure (1)..(115): unsure at all Xaa locations
  Clone ID: MRT4577_150930C.1.pep
MEGDMGRDGGGGVAGGMSDSVLRKVLLSYFYVAVWILLSFSVIVYNKYILDPKMYNWXPFPISLTMLNMGFCLSLVVXLVRVLXLLALPLSSMMSPMPVLRRYDALLSALILSSG

SEQ ID NO: 240515 - protein, 44 aa, Zea mays
  Clone ID: MRT4577_150931C.1.pep
PIKVPCRIPSHYYGASPSDGIDQVATGEYAQPALEIHHLLLFNV

SEQ ID NO: 240516 - protein, 65 aa, Zea mays
  unsure (1)..(65): unsure at all Xaa locations
  Clone ID: MRT4577_150932C.1.pep
MSWQSYVDEHLXCESEGQHLSAXAIVGHDGSAWSXSESFPELKPEEVAGIIKDFDXPGTLAPTGL

SEQ ID NO: 240517 - protein, 111 aa, Zea mays
  unsure (1)..(111): unsure at all Xaa locations
  Clone ID: MRT4577_150933C.1.pep
MXHPKFEHPRHGSLGFLPRKRSSRHRGNFKSFPKDDPKKPCHLTAFLGYKAGMTHIVREVENPGSKLHNKETCEAVADILTPPLVIVVLVAYFNTSLCLRTLNFVLSQHLI

SEQ ID NO: 240518 - protein, 53 aa, Zea mays
  Clone ID: MRT4577_150934C.1.pep
QKAKLTSGHWHEAHICKQVYPDLQTAAQNIHIFTLTPGTKPTSIHIHLQLRLL

SEQ ID NO: 240519 - protein, 66 aa, Zea mays
  Clone ID: MRT4577_150935C.1.pep
RPRQALVLPPVPYRRLHVVLPHQVGGLVRQGPVPSPGLNRAPHPARALQQVKLRLQVVIARERTRG

SEQ ID NO: 240520 - protein, 234 aa, Zea mays
  unsure (1)..(234): unsure at all Xaa locations
  Clone ID: MRT4577_150936C.1.pep
MGSIGRGTANCATVPQPPPSTGKLITILSIDGGGIRGLIPATIIAYLEAKLQELDGPDARIADYFDVIAGTSTGALLASMLAAPDENNRPLFAAKDLTTFYLENGPKIFPQKKAGLLTPLRNLLGLVRGPKYDGVFLHDKIKSLTHDVRVADTVTNVIVPAFDVKYLQPIIFSTYEAKTDTLKNAHLSDICISTSAAPTYFSAHFFKTEATDGRPXRVHLVDGGVAANNPTWSP

SEQ ID NO: 240521 - protein, 107 aa, Zea mays
  Clone ID: MRT4577_150937C.1.pep
GPGPLWGGGLASPKMLHLRGLAGTQTCLPLEFVNGKVSPFTRGEVDGETPAIPPPHLGGFGIFWAPWDPPGLHHLKGTPEKKKKKKKKKKKKKKKKKKKKKNHPHPR

SEQ ID NO: 240522 - protein, 230 aa, Zea mays
  Clone ID: MRT4577_150938C.1.pep
MESNASSNCATVPQPPPSTGKLITILSIDGGGIRGLIPATIIAHLEAKLQELDGPDARIADYFDVIAGTSTGALLTSMLAAPDQNNRPLFFAKDLNTFYLENGPKIFPQKKAGFLTPVANLLGLVRGPKYDGVFLHDKIKSLTHDVRVADTVTNVIVPAFDVKYLQPIIFSTYEAKNDTLKNAHLSDICISTSAAPTYFPAHFFKTEATDGRSREFHLVDGGVAANNPTW

SEQ ID NO: 240523 - protein, 99 aa, Zea mays
  unsure (1)..(99): unsure at all Xaa locations
  Clone ID: MRT4577_150939C.1.pep
SGAFVFFLLKLQMRPFHLQVVANIADYSQQQQLLTFYPNVVGNINAFLQHQQKLPFYPQDVVNNVVFLQQQQLLAFSLTXALTNPTTLXQQSTIGGAHL

SEQ ID NO: 240524 - protein, 50 aa, Zea mays
  Clone ID: MRT4577_15093C.1.pep
QGKCLLEHMVRPIFTQGEASLSPECLANRLMGYVHAWDTTGDVLATLQSG

SEQ ID NO: 240525 - protein, 402 aa, Zea mays
  unsure (1)..(402): unsure at all Xaa locations
  Clone ID: MRT4577_150940C.1.pep
MGSIGRGTANCATVPQPPPSTGKLITILSIDGGGIRGLIPATIIAYLEAKLQELDGPDARIADYFDVIAGTSTGALLASMLAAPDENNRPLFAAKDLTTFYLENGPKIFPQKKXINIHIHAVLRSSIHLCXFRLVRGDLFYYVPQRRFHLSILLLPNGAAAXCICRAGLLTPLRNLLGLVRGPKYDGVFLHDKIKSLTHDVRVADTVTNVIVPAFDVKYLQPIIFSTYEAKTDALKNAHLSDICISTSAAPTYFPAHFFKTEATDGRPPREYHLVDGGVAANNPTMVAMSMLTKEVHRRNPNFNAGSPTEYTNYLIISVGTGSAKQAEKYTAEQCAKWGLIQWLYNGGFTPIIDIFSHASSDMVDIHASILFQALHCEKKYLRIQXTMQDDTLTXNASSVDI

SEQ ID NO: 240526 - protein, 412 aa, Zea mays
  unsure (1)..(412): unsure at all Xaa locations
  Clone ID: MRT4577_150941C.1.pep
MGSIGRGTANCATVPQPPPSTGKLITILSIDGGGIRGLIPATIIAYLEAKLQELDGPDARIADYFDVIAGTSTGALLASMLAAPDENNRPLFAAKDLTTFYLENGPKIFPQKKAGLLTPLRNLLGLVRGPKYDGVFLHDKIKSLXTHDVRVADTVTNVIVPXAFDVKYLQPIIFSTYEAKTDTLKNAHLSDICISTSAAPTYFPAHFFKTEATDGRPPREYHLVDGGVAANNPTMVAMSMLTKEVHRRNPNFNAGSPTEYTNYLIISVGTGSAKQAEKYTAEQCAKWGLIQWLYNGGFTPIIDIFSHASSDMVDIHASILFQALHCEKKYLRIQDDTLTGNASSVDIATKENMESLISIGQELLKKPVARVNIDTGLYESCDGEGTNAQSLADFAKQLSDERKLRKSNLNSN

SEQ ID NO: 240527 - protein, 64 aa, Zea mays
  Clone ID: MRT4577_150942C.1.pep
TPIMIVLRTKLDFEQRQHAFQKLVLEAFMCNLFLILCGLSISRAWVPVEACLPLRTLLTIESTC

SEQ ID NO: 240528 - protein, 90 aa, Zea mays
  Clone ID: MRT4577_150943C.1.pep
WPDHIEDTQADPASQGHGFLVTSLTMDCDGRTIKKSMSLSWTGLAWVALPSSHGSAVQCSYPKGPFGPLPLFVAVWLWQAGRTCTPHASP

SEQ ID NO: 240529 - protein, 123 aa, Zea mays
  Clone ID: MRT4577_150944C.1.pep
RVQRKAHFDAPAHIRRKIMSASLNKELRAEHGIRSLPVRKDDEVLIVRGSSKGAEGKVTQVYRKKWVINIERIHREKTNGATVPLGIHPSNVVITSLKLDEDRKKIIARKSGSKKEAAETKDN

SEQ ID NO: 240530 - protein, 86 aa, Zea mays
  Clone ID: MRT4577_150945C.1.pep
LHHFTSPNNTRSLPPDFFCGTSIYHQSLSHTTYAAMAGPGASRGYIITLLTGSILAGWISVSFFGGMPPWTPRSQDPALSQALPET

SEQ ID NO: 240531 - protein, 88 aa, Zea mays
  Clone ID: MRT4577_150946C.1.pep
IHCGVPPQSETFIVNLKNHAFVIQRTIVRCFRFPRCYVFANTTYSPVFVPFLRGLLVLRHAPTGPTKTRLVLEPPPVGLMHKQLPDGA

SEQ ID NO: 240532 - protein, 159 aa, Zea mays
  Clone ID: MRT4577_150947C.1.pep
FMTQLKKALGECPLLAICTDACKGLEIAVGQVFPQAEQRECFRHLMQNFIKRYSGESGGHMWPAARAYDKEAYEKHLDIIYRGIPDAKLWFVVWDNCNHRFVVKAQLHECSCLEWQHTGKPCQHALALITAQKARDVKMEDSVHEYYSVQKFKNAYARM

SEQ ID NO: 240533 - protein, 141 aa, Zea mays
  Clone ID: MRT4577_150948C.1.pep
MALSSSSSTSIFALALFTTLLLIGSSSAQLSENFYDSKCPKVFYAVKSVLQSALAKEPRQGASIVRLFFHDCFVNGCDGSVLLDGPSSEKIALPNKNSLRGYEVIDAIKSKVEALCPGVVSCADIVTIAARDSCAILGGPN

SEQ ID NO: 240534 - protein, 144 aa, Zea mays
  Clone ID: MRT4577_150949C.1.pep
PACEATRPRLVAQEGSHRWALEGWTTDVAGCEARRTWDLCAVTCARLSRGLERPHGEGTGHRSLERRRDPSATVGQLCSGRREVTSHLKIILVYLESQVPGETGRTYEARLVAIYRHVRENGVEGQPISVSTEQFVNFEWQPVI

SEQ ID NO: 240535 - protein, 82 aa, Zea mays
  Clone ID: MRT4577_15094C.1.pep
PAGSGRKAFLEQDKLIPQVLADLAEVHLNEANLVLGEEKQNKVYEQAINAIKEAQKLIDEKKLDYELPEGLVAFLAEYEEEQ

SEQ ID NO: 240536 - protein, 49 aa, Zea mays
  Clone ID: MRT4577_150950C.1.pep
WLSLPVWQNVLTGLLSGHTKTCAKTPLVETFQDKLSETWYPAPGPARFE

SEQ ID NO: 240537 - protein, 75 aa, Zea mays
  Clone ID: MRT4577_150951C.1.pep
PVRIPGWNTPSRNEHTLLHTLIPHGRANSRRPIHRPTCKLYCTRTIQSIIHSSQSDTNCLYPLLSQSKTLISSMS

SEQ ID NO: 240538 - protein, 65 aa, Zea mays
  unsure (1)..(65): unsure at all Xaa locations
  Clone ID: MRT4577_150952C.1.pep
MAIRYKAXISLLLALTVALSVRAEEEPAAAADGEAQLTLHVHSFDKAVGKHRYMDDEYYAPWSAH

SEQ ID NO: 240539 - protein, 122 aa, Zea mays
  Clone ID: MRT4577_150953C.1.pep
GPVSALKLCSFFASDPDGHRPSVREPNQLGNPVLEFATDFNSRAEYFWSHGLISDATFRARVMNRVTRETSRFVDKYDVTLDVCLSSVLSQSKTLSPHEQGRQRVDVCVEDETVRYLNRRDV

SEQ ID NO: 240540 - protein, 212 aa, Zea mays
  unsure (1)..(212): unsure at all Xaa locations
  Clone ID: MRT4577_150954C.1.pep
PQSVALGNPVLEFATDFNSRAEYFWSHGLISDATFRAFTSACNYSRRTXQVGQRVDVCVEDETVRYLNRRDVQAALHARLVGVDKWAVCSSVLQYELLNLQIPTINVVGSLVRSGIRVLVYSGDQDSVIPLTGSRTLVQNLARDMGLKTTTPYRVWFEGQQVGGWTQVYGGGALSFATIRGASHEAPFSQPGRSLVLFRAFLQGQPLPETFS

SEQ ID NO: 240541 - protein, 484 aa, Zea mays
  unsure (1)..(484): unsure at all Xaa locations
  Clone ID: MRT4577_150955C.1.pep
MAIPLLAPARSNGSRPLALALGLVAAAALCRPGACDDGAAAAEDRIRRLPGEPEVSFAQYSGYVGVDSGGGGGKRALFYYFVEADVLDPASKPLVLWLNGGPGCSSLGVGAFSENGPFRPSGQVLVKNEYSWNKEANVIYLETPAGVGYSYSADAAYYQGVDDKMTAMDNMVFLQRWLQKFPQYRGRDLYIAGESYAGHYIPQLAEAMVEFNKKDRIFNLRGVALGNPVLEFATDFNARAEYFWSHGLISDATYRVFTSACNYSRYVTEYYGGSLSPLCARVMNQVTRETSRFVDKYDVTLDVCLSSVLSQSKILSPHEQVGQRIDVCVEDETVRYLNRRDVQAALHARLVGVDKWAVCSSVLEYELLNLQIPTINVVGSLVKSGIRVLVYSXSGDQDSVIPLTGSRTLVQNLARDMGLKTTTPYRVWFEGQQVGGWTQVYGGGALSFATIRGASHEAPFSQPGRSLVLFRAFLQGQPLPETFS

SEQ ID NO: 240542 - protein, 346 aa, Zea mays
  Clone ID: MRT4577_150956C.1.pep
HASAHASATLCSVNSSSNIASSNSQSHGYSPIAAKGHKDSVYALAMNDTGTLLLSGGTEKVVRVWDPRTGSKNMKLRGHTDNIRALLVDSTGRYCLSGSSDSMIRLWDLGQQRCVHSYAVHTDSVWALASTPAFGHVYSGGRDQSVYLTDLSTRESLLLCTNEYPILQLSLQDDTIWVATTDSSVYGWPAEGRTPQKVFEKGGSFLAGNLSFSRARASLEGSAPVPVYKEPSFVVPGVPAIVQHEIMNNRRHVLTKDTTGSVKLWEITRGAVIEDFGKVSFEDKKKELFEMVSIPAWFTMDARLGCLSVHLDTPQCFSAEIYAVDLNVSGAQEDLKINLAHDTRGC

SEQ ID NO: 240543 - protein, 56 aa, Zea mays
  Clone ID: MRT4577_150957C.1.pep
VHKQHDSFVLAQILWTKLRPPIHAPTVFKIFKSRPCFHSNRARQTSMSQLPGAFVM

SEQ ID NO: 240544 - protein, 50 aa, Zea mays
  Clone ID: MRT4577_150958C.1.pep
LKPWQKTKPCIEVLCHNQVLSPDMSLATVRTYIWKKPEDLILHYRVVQSR

SEQ ID NO: 240545 - protein, 94 aa, Zea mays
  unsure (1)..(94): unsure at all Xaa locations
  Clone ID: MRT4577_150959C.1.pep
NTGYAGVQAALLAVVGQPVADVVVAXVPEPVHGVRVVADPDDLTQGVTVVRAGVVGVAPDSVWSASPEHIIMVRLHEYHTLPVGHVVVGGNPRT

SEQ ID NO: 240546 - protein, 169 aa, Zea mays
  Clone ID: MRT4577_15095C.1.pep
STGTFSHSPPAASEEDMLRASQAVLPFANSMISTAQVIFSGEPSMTLKVLPLLLFGAKYGGLVTVWRLLAAGFFISFTVPKLYSCYSSRIHKRVEILRDQALEAWKSCPRKKLVAAIIVTMFWNMFSVKTRVMAAFVSLVILRYNKKHHKAAEVGSYRDEQGQTMEMDS

SEQ ID NO: 240547 - protein, 94 aa, Zea mays
  Clone ID: MRT4577_150960C.1.pep
APIFYIYKLGSQQRALYLCYDTSYYQGKVRNLQRSEQVDSGNSYRGEGGARAKYFLCEDDASSLSQRHLQPHHLKVRTCWDISGEPCEHVHLKP

SEQ ID NO: 240548 - protein, 329 aa, Zea mays
  Clone ID: MRT4577_150961C.1.pep
PGSIIREDTTGSVKLWEITRGAVIEDFGKVSFEDKKKELFEMVSIPAWFTMDARLGCLSVHLDTPQCFSAEIYAVDLNVAGAQEDLKINLAQETLRGLLIHWSKRKQKSSSHSLCNGDSSIGKDVPSKDSPRSRPEVDDATQNHATHVLPSFEFSTVSPPSIITEGSSGGPWRKRITDLDVTEGDLPWWCVDCITLNRYPKENTKCGFYLHPAEGSPAPNITQGKLSAPRILRIHKVANYVVEKLVLDKPLDGGSDAFVMGLSSAQSQLSVLDSSSRLGLKPWQKTKPCIEILCNNQVLSPEMSLATVRTYIWKKPEDLILHYRVVQPR

SEQ ID NO: 240549 - protein, 478 aa, Zea mays
  unsure (1)..(478): unsure at all Xaa locations
  Clone ID: MRT4577_150962C.1.pep
MHRVGSAGNTAGSTRPRKEKRFTYVLNDADDKKHCAGINCLAYLDGSIFSTSDHLFSGSRDGTLKRWELNNGDASFSATFESHVDWVNDAIIVGDKLVSCSSDTTIKVWNCFSDGACTRTFRRHSDYVICLAAAEKNSNIVASGGLGGEVFVWDLDAALAPVAKSVDAKEDEVPNGNSGPPLTTLCSVNSSSNIASSNSQSHGYSPIAAKGHKDSVYALAMNDTGTLLLSGGTEKVVRVWDPRTGSKXMKLRGHTDNIRALLVDSTGRYCLSGSSDSMIRLWDLGQQRCVHSYAVHTDSVWALATTHSFGHVYSGGRDQSVYLTDLSTRESVLLCTNECPILQLSLQDDTIWVATTDSSVYGWPAEGLTPLKVFEKGASFLAGNLSFSRARASLEGSAPVPVYKEPSFVIPGVPAIIQHEIMNNRRHVLTKDTTGSVKLWEITRGAVIEDFGKVSFEDKKKELFEMVLLKYVMISMFY

SEQ ID NO: 240550 - protein, 63 aa, Zea mays
  Clone ID: MRT4577_150963C.1.pep
LDATRLLALTASTTFTHTSCGCSCQPPTPDHLPTPAHLPPTVHQPPAARITPPVHLLPPVHLL

SEQ ID NO: 240551 - protein, 140 aa, Zea mays
  unsure (1)..(140): unsure at all Xaa locations
  Clone ID: MRT4577_150964C.1.pep
PLGRSPGPPPGPPPGXAGPAAGRPGGXGGGPPGISGPAPGGPPRSPGGGRLPPWGARGQRGAPGEIGXPGGAAQPRPGRXNANPGGPREGPGPQKGGRPHSPFFGPKTRFPGGKTESPNARGKPPRPGARGWFFCPPGGR

SEQ ID NO: 240552 - protein, 81 aa, Zea mays
  Clone ID: MRT4577_150965C.1.pep
ARRVGAEEPLSGGSIKHARSFGPAEDEGNLNGHWVYCIVPLDTMAYLAVLWYGDMFIGKLLPAGNAPILSLNYSPLHLRSG

SEQ ID NO: 240553 - protein, 137 aa, Zea mays
  unsure (1)..(137): unsure at all Xaa locations
  Clone ID: MRT4577_150966C.1.pep
RLIPCRLQHATGGNLIXPHSPTTYCSCLEYSWLVIQMLCPXILTHRFQERKVXMYLPEKLPKRLFKYHHSAGRXFVMLXCGTCTYVHSLQCYLSLXDDPDADTCLRLNYVIVTYANILLMDDLDILIIIYPGRVNSY

SEQ ID NO: 240554 - protein, 93 aa, Zea mays
  Clone ID: MRT4577_150967C.1.pep
SLGTLLLSWNWHLADGRENIGTSETFTLGLSKAPPLHAVGTPLLVPRCIYAEPELSKLLVYAPGPYMNYLSMIANYETEPSFLDAFAYTQYMG

SEQ ID NO: 240555 - protein, 51 aa, Zea mays
  Clone ID: MRT4577_150968C.1.pep
HSRYRWEINSRVTEHMMCRVFSYLDLVDHRSNTRAFVGIQKKMVSSGFQEQ

SEQ ID NO: 240556 - protein, 236 aa, Zea mays
  unsure (1)..(236): unsure at all Xaa locations
  Clone ID: MRT4577_150969C.1.pep
MGKEKSHINIVLIGHVDSVKSTTTGHLIYQLEGIDKRAIDRXEKEAAEMNKRSFKYARGLDKLKAERERGITIDIALWKFETTKYYCTGIDAPGHRDFIKNMITGTSQADCAVLIIDSTTDGFEAGISKDVQTREHALLAFTLVVNHMICCCNKMDATTPKYSKARYEEIVKEVSSYLKIRVYNPAXIAFVPISGLEGDNMIERSTNLDWYDVPTLLDALDHITEPQTASDXPLRL

SEQ ID NO: 240557 - protein, 62 aa, Zea mays
  Clone ID: MRT4577_15096C.1.pep
QRQTSIRSCPSNHFNPMGATLKRATGINRASLSHTYHRRGLCAINAKNGCAFYKVRYDCTRL

SEQ ID NO: 240558 - protein, 65 aa, Zea mays
  Clone ID: MRT4577_150970C.1.pep
GVPAGRHPKGNLHRGNSHSRWLTGRARGLAFTPPGKNPRRKTTRGTNRPVWWPSMSYDAHLPGSD

SEQ ID NO: 240559 - protein, 86 aa, Zea mays
  unsure (1)..(86): unsure at all Xaa locations
  Clone ID: MRT4577_150971C.1.pep
MGKEKTHINIAVIGHVDSGKSTTTGHLIYKLGGIDKRVIERFEKEAAEMNKRPFKYARALDXLNADRETAIPIYIALWKPQTTTYY

SEQ ID NO: 240560 - protein, 140 aa, Zea mays
  unsure (1)..(140): unsure at all Xaa locations
  Clone ID: MRT4577_150972C.1.pep
AKVVAYQQQQQWQQFMQVFSHLAMVNPAVYLQLLSSSPLAVGNAPTYLQQQLLQQIVPALTQLAVANPAAYLQQLLPFNQLAVSNSAAYLQQRQQLLNPLAVANPLVATFLHQQQQLVPYXQFSLSKTPLKQPIVEGAIF

SEQ ID NO: 240561 - protein, 179 aa, Zea mays
  unsure (1)..(179): unsure at all Xaa locations
  Clone ID: MRT4577_150973C.1.pep
HASAGGLVRLHFGTLSLASLISPPTMGXEKSHINIVVIGHVDSGKSTTTGHLIYKLGGGGKRAIDRFEKEAAEMNKRSFKYAGVLDKLKAERERGITIDIALWKFETTKSYCTGIDAPGHRDFIKNMITGTSQADCAVLIVDSTTGGFEARLSKGGQTREHALRASTLGVHQMIXCCRR

SEQ ID NO: 240562 - protein, 101 aa, Zea mays
  unsure (1)..(101): unsure at all Xaa locations
  Clone ID: MRT4577_150974C.1.pep
GATARPVDGHLARQSPKTDXIXERGGPPPFHGXALPYEELACPSRGGLRDVFFRAGDQIGHASHDXMAGAFMICHNCGSRGHTAYEGPSVSLMERFPPRRI

SEQ ID NO: 240563 - protein, 245 aa, Zea mays
  unsure (1)..(245): unsure at all Xaa locations
  Clone ID: MRT4577_150975C.1.pep
MVTKILALLALLALFVSATNAFIIPQCSLAPSAIIPQFLPPVTSMGFEHLAVQXNMQQQALAASVLQQPIAQLQQHSLPHVTLQAITTQQQQQFLPALSHLAMVNPAAYLQEQLLASNPLXALANVVANQQQQQLQQFSATLSQLAMVDPAAYVQQQLLLSSSPLAVXNAPTYLQQQLMQQIVPALTQLAAANPVAYLQQLLTFXQLTLSXSAVYLHSEHRYLIPLVVANPLVAVFLQQQQLLPY

SEQ ID NO: 240564 - protein, 135 aa, Zea mays
  unsure (1)..(135): unsure at all Xaa locations
  Clone ID: MRT4577_150976C.1.pep
MAYNQRYNPDALPAHAEPEQAAQLMNPNNRPPTGAQYNKPMPPPPQQAQNARPDDRYNSRPPPSQGFQSPGPIPGSYGSSSPAPPQSQNWDQQTRYNTSYNSNPQPPXPRFSSQQQQQPYSQAPPQQQQRPSFTS

SEQ ID NO: 240565 - protein, 145 aa, Zea mays
  unsure (1)..(145): unsure at all Xaa locations
  Clone ID: MRT4577_150977C.1.pep
MAGEAKKLFFASEVTLHASRKDCWVVIGGKVYDVTKFLEDHPGGEDVLLHASASGDATEAFEEVGHSTSAVSMMDSYLIGSIKDYVRPSASKATDPWSADVLPXQDDAREXSLLIQIXLDFLLPLFVLGLAFAAWYYLTFISKNH

SEQ ID NO: 240566 - protein, 88 aa, Zea mays
  unsure (1)..(88): unsure at all Xaa locations
  Clone ID: MRT4577_150978C.1.pep
QQIVPAVNQLAVAXLCAYLQQLLPFRIVSVSNCDAYLQQRHKLLNPLPVPNPLVTAFLQQQQLLPYSQFSLMNPALSWQQPIVGGAIF

SEQ ID NO: 240567 - protein, 71 aa, Zea mays
  Clone ID: MRT4577_150979C.1.pep
GKVTIFSSFFIHPSSRNQTRDGAASTHFNPVIKQEIRFNPSLKPNKEHVRPSPQKWVGFDPTHFIPKPNAL

SEQ ID NO: 240568 - protein, 129 aa, Zea mays
  unsure (1)..(129): unsure at all Xaa locations
  Clone ID: MRT4577_15097C.1.pep
GASHKPIKGKLXVATPEXNITLLIPXDMSPLLIXTLSLVQXKSFVYIDVHSIIKGTVDDLGSMELGWYTIVAHXHCRKRLSDYLRLHVLTAIHTPGAALPWLTTGPDNPYASLLKFAVLLTEPLRLNKP

SEQ ID NO: 240569 - protein, 130 aa, Zea mays
  unsure (1)..(130): unsure at all Xaa locations
  Clone ID: MRT4577_150980C.1.pep
PVTSMGFEHPAVQAYRLQLALAASALQQPIAQLQQQSLAHLTLQTIATKHHHHQFLHXLTNLPWGNLATYWNKKLLDSNQFVLPTVVDYNNNHQLNKLLQCFSQLAMVNPAVYLQLLSSSPLAVGNAPTY

SEQ ID NO: 240570 - protein, 154 aa, Zea mays
  unsure (1)..(154): unsure at all Xaa locations
  Clone ID: MRT4577_150981C.1.pep
MATKILSLLALLALCASATNARIIPQCXLAPSDMITQVLPPVTXMGCKHPAAQAYRLQQAIAASVLQQPICQMQQQFLAHLTIHTXASQQQQQFLPALSHLAMVNPAVYLQQQLLAXNPLALANVVANQPHQQLQQFLPALRQLAMVNPADYLQ

SEQ ID NO: 240571 - protein, 163 aa, Zea mays
  unsure (1)..(163): unsure at all Xaa locations
  Clone ID: MRT4577_150982C.1.pep
MGKDKSHINIVVIGHVDSGKTTTTGLLIYKLGGIDERVIDRFEKEXTEMNKRCFKYAWVLDNLKVERERCITIAIALWKFETPQHYCTDIDGPGHCDFIKNMITGTSQADCAVLIIDSTTGGTDAAISKDGQTREHALLAFTLGAKHMICCCNHMDGTTPQYS

SEQ ID NO: 240572 - protein, 234 aa, Zea mays
  unsure (1)..(234): unsure at all Xaa locations
  Clone ID: MRT4577_150983C.1.pep
MGKEKTHINIVVIGHVDSGKSTTTGHLIYKLGGIDKRVIERFEKEAAEMNKRSFKYAWVLDKLKAERERGITIDIALWKFETTKYYCTVIDAPGHRDFIKNMITGTSQADCAVLIIDSTTGGFEAGISKDGQTREHALLAFTLGVKQMICCCNKMDATTPKYSKARYEEIVKEVSSYPKKVGYNPDKVPFVPISGFEGDHMIXRATNLDWLKVPTLPEAPDQIXRPQRPFNQPL

SEQ ID NO: 240573 - protein, 144 aa, Zea mays
  unsure (1)..(144): unsure at all Xaa locations
  Clone ID: MRT4577_150984C.1.pep
SNVLANQHRHQPRQDRPTLGRVAMVSRAGYIHHRRLIKYTSFAVGYAPTYLQQQXMQHIGRSLTQLNVTNPVVYLQQMLPFKQLTMTNSAEYVRLRHPLLNTMVVANPSVDDFLQLAQSMPYKQLPLTNPVLKTHQLIHGRAMF

SEQ ID NO: 240574 - protein, 81 aa, Zea mays
  Clone ID: MRT4577_150985C.1.pep
LDIPNNLTISNNPRENFYKCTHYIHHVLQKKLHAYQDEYDTLNRTREQHLKNHPKAFETNDNSIQHMHTFIDSVLYNAKRA

SEQ ID NO: 240575 - protein, 88 aa, Zea mays
  Clone ID: MRT4577_150986C.1.pep
FINIFFTFFFFFFELEFFFFKIKGSKPANLNFLESQKRVKSPSLRGDRFYTKGRVQIPEPKLWQAYPIPSSKNQLGHRSKGKGEKDTN

SEQ ID NO: 240576 - protein, 89 aa, Zea mays
  Clone ID: MRT4577_150987C.1.pep
VSHHSSTLLWDNINRDHETNTPSLPYPSYKNHPAATNTSLTTAARPYSLTLLIAQLPYQLAPNDLFSDYQHLTMNFVLHHMNHLTIDIT

SEQ ID NO: 240577 - protein, 263 aa, Zea mays
  unsure (1)..(263): unsure at all Xaa locations
  Clone ID: MRT4577_150988C.1.pep
YVVFELMESDLHQVIRANDDLTAEHYQFFLYQLLRALKYIHGANVFHRDLKPKNILANADCKLKICDFGLARVSFNDAPSAIFWTDYVATRWYRAPELCGSFFSKYTPAIDIWSIGCIFAELLTGRPLFPGKNVVHQLDIITDLLGTPSSETLSRIRNEKARRYLSCMRKKHPVPLTQKFPNADPLAVRLLGRLLAFDPKDRPSAEEALADPYFASLANVEREPSRHPISKLEFEFERRRLQKMMFRELIYRXXILEYHXQML

SEQ ID NO: 240578 - protein, 58 aa, Zea mays
  Clone ID: MRT4577_150989C.1.pep
RGGTPRVRENAGGQAFTGKQRALDLVPTKIHDRSPIFLGSYDDIEEIKALYAAEGKKE

SEQ ID NO: 240579 - protein, 116 aa, Zea mays
  unsure (1)..(116): unsure at all Xaa locations
  Clone ID: MRT4577_15098C.1.pep
MSNPWGGIVGAGAWALDAERAEEEERDAAAAPVPAPAPAAGFPSLREATAGAAGKSKKKNKGTTLSLSEFAGFGPGRRQAPAPPEPRGLTTAEMMMLPTAPRERSVDDLDRXRGLG

SEQ ID NO: 240580 - protein, 106 aa, Zea mays
  Clone ID: MRT4577_150990C.1.pep
EPLRFRQRRYLSCQRFPVTCPSPRFLVSASTSSRQWCSRPATSYRECKSARALKLWVCLFGLSNGFYLHPLWPPPPGLGCLWYCNNGHPPCKPWAVSHCVWPPPLQ

SEQ ID NO: 240581 - protein, 72 aa, Zea mays
  Clone ID: MRT4577_150991C.1.pep
YIGRNVNRNTKGHYRSNMKDDDLGKNSNRESTSRFYVMHQEILAFAGPTRRSLIHIVSSITKEMYNHTRNYA

SEQ ID NO: 240582 - protein, 54 aa, Zea mays
  Clone ID: MRT4577_150992C.1.pep
LARASQETLGLLFARVRRRAWVGGELSLAGALGAPWPPAPCPCGWALGLRGAVG

SEQ ID NO: 240583 - protein, 198 aa, Zea mays
  Clone ID: MRT4577_150993C.1.pep
SSHEGGARQNATHTGVEGSRGVEQNPSQGAAQRLERERERGARTGRNPRGNRHGSSSIWTKSKQGVWARAGAVGRLDEGGLADKEVPAGRGAPRPWIGRAEGARLGELHRWSRTPGRKQKGASGAPWQGTGVKRSPCARETREEGALPGTRASSGQQRSQGAEGDGEVLVGRRLEDEGWARDEENLSAPVGEEDKERP

SEQ ID NO: 240584 - protein, 155 aa, Zea mays
  unsure (1)..(155): unsure at all Xaa locations
  Clone ID: MRT4577_150994C.1.pep
MSSSSQTIPVKTVNHQCSSGLQAVADVAXAAAIKAGYYDIGXGAGLQSMSINSIAWEGHVNPKISAFQKAHDCLLPMGITSKNVAHRYGVTRQEQDQAAAESHRRAGAATASRKFKDEIVPMPTKIVDPKTGEEKEVVILVDDGIRPSTYLLYFF

SEQ ID NO: 240585 - protein, 59 aa, Zea mays
  Clone ID: MRT4577_150995C.1.pep
CTASPLRCAYSIRDPQCRRRRMMRTDAPGTDVPAIATWARVGEAPKANRLPGRRNFLGR

SEQ ID NO: 240586 - protein, 78 aa, Zea mays
  Clone ID: MRT4577_150996C.1.pep
DASRLAREQATTRAKWKKKRITKLKTEPNKDEAEIQVGRSRSDCGHDDMRGYTHFIGCEGEHVETSSTCHGDTDRHQL

SEQ ID NO: 240587 - protein, 196 aa, Zea mays
  Clone ID: MRT4577_150997C.1.pep
MGYQPMHGNGGTAGAGTSGSGGGGGGDHLRHHQQQRLHSPRMAGGGSMTRRASSFKRGGGGEIELQIGSPRSPRCDGLGSPPSDSVESSGSGLLLHQSQQNQHLRFRLFKPPVSGGSAVGLGSGDPREEEAREHAVPRLLRRVLAPRRRQNLGRAAGSPSLAMTKTPILKDLSISFSGEKVHQADHHFVYMGGKRE

SEQ ID NO: 240588 - protein, 171 aa, Zea mays
  unsure (1)..(171): unsure at all Xaa locations
  Clone ID: MRT4577_150998C.1.pep
KRRKKKRKKGGVNKEKKXKKKEEEKVRKRRRKKKKKRGGGRRKEEGRKKWGKKRIKRRGRRREKKKKKREAEKEKEKKRNEKKKKKKKRKEKREKXRKRKKKEKRKEEKQNKWKGKEKGRKKKKSDKXKEERRRSKEGRSRGKGRRRETVKKRKIKSNTRREKRSKKHERG

SEQ ID NO: 240589 - protein, 132 aa, Zea mays
  unsure (1)..(132): unsure at all Xaa locations
  Clone ID: MRT4577_150999C.1.pep
MATKXLSLLALLALFASATNAVIIXQCSLAPSSIITQXLPPXTSMGXEHPTVQAYRLQQAIAGSVLQQPIFQLEQQYLGHLTIQTIVTQQXQQXLPXLSHLTLGNPVGYLLQQLFGLNPLAFVNVGGKQPQQ

SEQ ID NO: 240590 - protein, 254 aa, Zea mays
  unsure (1)..(254): unsure at all Xaa locations
  Clone ID: MRT4577_15099C.1.pep
MNALAATSRNFKQAAKLLGLDSKLEKSLLIPFREIKVECTIPKDDGTLASYVGFRVQHDNARGPMKGGIRYHHEVDPDEVNALAQLMTWKTAVANIPYGGAKGGIGCSPGDLSISELERLTRVFTQKIHDLIGIHTDVPAPDMGTNAQTMAWILDEYSKFHGYSPAVVTGKPVDLGGSLGRDAATGRGVLFATDALLAEHGKGIAGQRFVIQGFGNVGSWAAXLITEAGSKVIAISDVTGAVKNSHGIDIAQLM

SEQ ID NO: 240591 - protein, 253 aa, Zea mays
  unsure (1)..(253): unsure at all Xaa locations
  Clone ID: MRT4577_1509C.1.pep
MAAPRVLLLLAAAALLAVSSLGDASGEGPRGRKLLVLVDDLAVRSSHSAFFGSLQARGLDLEFRLADDPKLSLHRYGQYLYDGLVLFAPSTPRFGGSVDQNAVLEFIDAGHDMILAADHSASDLIRGIATECGVDFDEDPEAMVIDHINYASSEVEGDHTLIAGDDLIQSDVILGSKKIEAPVLFRGIGHAANPSNSLVLKVLSASPSAYSANPEAKLASRSSLTGSAISLXVSGMQARNNARVLISGSTGFV

SEQ ID NO: 240592 - protein, 500 aa, Zea mays
  unsure (1)..(500): unsure at all Xaa locations
  Clone ID: MRT4577_150C.1.pep
MYRAAGSHLRSLKHHGASRLASTSVAKQSSGGLFSWLLGGKSSELPPLDVPLPGISIPSPLPDFVEPSKTKVTTLPNGVKIASETSSSPAASVGLYIDCGSIYETPASSGVSHLLERMAFKSTVNRTHLRLVREVEAIGGNVSASASREQMSYTYDALKSYTPEMVEVLIDSVRNPAFLDWEVKEQLQNIKSEIADASANPQGLLLEALHSVGYSGALAKPLMASESAVNRLDVSSLEEFVAEHYTAPRMVLAASGVDHDALISVVEPLLSDLPCVKRPEEPKSVYVGGDYRCQADSPNTHIALAFEVPGGWNQEKTAMVVTVLQMLMGGGGSFSAGGPGKGMHSRLYLRVLTNFQQIESFSAFNSVYNNSGLFGIYAVTSPDFSSKAVDLAAGELLEIATPGXKVTQEQLDRAKEATKSAVLMNLESRSIASEDIGRQVLTYGERKPIEYFLKTVEEITLNDILSTAKEMMSTPLTMASWGDVIHVPSYESVSRKFHSK

SEQ ID NO: 240593 - protein, 142 aa, Zea mays
  Clone ID: MRT4577_151000C.1.pep
MATKILTLLALVALVVSATNALIITQCSLAPSAIITQLLPPATSMGLEHADVQAYRLQLALAVSALQQPNAQLQQQSLAHVNLQTIATEQQQQQLLPSLRHLAAVKPATYLLQQLLASNPLALVNVAAYHQQQQLLQLMPAL

SEQ ID NO: 240594 - protein, 176 aa, Zea mays
  Clone ID: MRT4577_151001C.1.pep
MDSDVEMNAASDEEVMDDEDYYDYCYSDVGDDGDGGSEEELVPVDYDEGLEAEGTDEVVSRREQTFVVLNEEVISERQEEDVSKVSAVLLITREEACALLHHYKWNISKLSDEWFADEEKVRHTVGLLLNGNHEPGSRKLTCGICFEGYSSDTMSSAGCAHFYCHECWEGYISAAI

SEQ ID NO: 240595 - protein, 113 aa, Zea mays
  unsure (1)..(113): unsure at all Xaa locations
  Clone ID: MRT4577_151002C.1.pep
MGKVNSHINIEGIGHVDSGKSTTTGHLIYKPGGIDKRVIDRFEKEAAEMNKRSFKYAXVLDKLKAHRERGMTMDMVLWTIETTKCYCTAIDAHGHRDFIKNMISRSSQADCAV

SEQ ID NO: 240596 - protein, 124 aa, Zea mays
  Clone ID: MRT4577_151003C.1.pep
PPRSTMDRAQLLLVGLPGLLFFSDLTHIFAPAPPHLRQPNNNPPHHNHTTTTNNPHSAHEHPHPAHHYHWHPVHPEQEPKAYKDPIQRARGARKERWTRGRLISRVLVLQRNCKDNDSNRYKHN

SEQ ID NO: 240597 - protein, 320 aa, Zea mays
  unsure (1)..(320): unsure at all Xaa locations
  Clone ID: MRT4577_151004C.1.pep
HGANYHYIPSIENQHHAKRTTGDLTTVAAKILGLVVLVALLVSATXALIIPQGSLAPSAIVPPVLPPVTLMGSQHPSAQAYRLQLALAVSALQQPIVQLQQQXSLAHITLQTIATQRRQHFLPSLSHLAVVNPVAYLAQQMLASNPLALANVGAYQQQQQLQESIQELSQLAMVNPAVYLQLLLFSPLAVGNAPAYLQQQLVQQIGPALTQLGVANPGAYLQQLLPFNQLVVSNFGGDLQQRQQLLNPLAVANPLVATFLQQQQQLVPNNQFFLMNPALQQPIVGGAFFRLQMKWTRQWGPQTDMCFLKKIKILIEIFLD

SEQ ID NO: 240598 - protein, 41 aa, Zea mays
  Clone ID: MRT4577_151005C.1.pep
RKMDTGDFPNIMNQYKGGMATKTPQGWYGSGQLTPRSSRFY

SEQ ID NO: 240599 - protein, 257 aa, Zea mays
  unsure (1)..(257): unsure at all Xaa locations
  Clone ID: MRT4577_151006C.1.pep
PNLRFLVVLVIATNAFIIAQXSLAPRAIIPQLLPAVTSLELXHAAVQAYRLQLGLAESALQQPIAQLQQQSLAHVTLQTIXNXQQQQHFLPSLSHLSMLNPVAYLQQQLLGSNPLALANVATYQQQQQLQQFMPVVSQLAMVNPAVYLQLLLFSPLAVGNGPRDLQQQLVQQIGPALTQLAVANPGAYLQQLVPFNQLGVSKFGGDLQQGQQLLNPLAVGNPLGGTFLQQQQQLVPYNQFFLMNPALQQPIVGGAIF

SEQ ID NO: 240600 - protein, 193 aa, Zea mays
  unsure (1)..(193): unsure at all Xaa locations
  Clone ID: MRT4577_151007C.1.pep
DETTSIALTSTDPLLAGEHARPSASATLRVGNPTQLXRPRASLSKSAKGIALNMLRERCQRMIECHTKSSISRXRDTPMDNREVMNLLLLYVISVTTDTMSALYGLFFNTASTXTTDSCTYTKHQLSNDIKRKVWLNIHLNNARTIAHVFMADPTYLVAEQDNILSTYLINDVSTQLGCXEPCNAAHNKHLCP

SEQ ID NO: 240601 - protein, 224 aa, Zea mays
  Clone ID: MRT4577_151008C.1.pep
MGKEKTHINIVVIGHVDSGKSTTTGHLIYKLGGIDKRVIERFEKEAAEMNKRSFKYAWVLDKLKAERERGITIDIALWKFETTKYYCTVIDAPGHRDFIKNMITGTSQVIIMNHPGQIGNGYAPVLDCHTSHIAVKFAELITKIDRRSGKELEKEPKFLKNGDAGMVKMVPTKPMVVETFSEYPPLGRFAVRDMRQTVAVGVIKSVEKKDPTGAKVTKAAAKKK

SEQ ID NO: 240602 - protein, 237 aa, Zea mays
  unsure (1)..(237): unsure at all Xaa locations
  Clone ID: MRT4577_151009C.1.pep
ALLALLVSAXNAFIIPQCSLALGASXLWNNERIPQSLPPVTSMGFQHPAVQAYTLQLALAASALQQPIAQLQQQSLAHLTLQTIATQQQLQQFLPSLSHLAVVNPVTYLQQQLLASNPLALANVSAYQQQHQLEQFMPVLSQLAMVNPAVYLQLLSCRPLTVGNARPYVHLQMMQQIVPALAQLGVANRPAYFHQLLPFAKQVVANFVGDHHHSRXILNSLAVANPLVDAYMQHQQQ

SEQ ID NO: 240603 - protein, 706 aa, Zea mays
  Clone ID: MRT4577_15100C.1.pep
MERTKVEKITNEMLSGLSGDSSDIESFDVESGNEDVEDRPWRTSHVVFGKSTIRQGQIEAMKDKYFQDVSIVRAGKWPGSWMKEWFYVKNDLNQREDVRGVIQRPIWSRFGIRRPSIALGNEVQACQIAFNTICTYIGTRDLVQEHITYKVWPLANEGEMPKEAAAGSSQSGLAMSDELLVAYSRAEDKAMTAAFGARGKKRLNRVFDVIGFVYPDYCFPVQKQGRKRKVIALTSSGAPKAKKVKGRNYPLATERALVMSIEASAHPVEEPELEKATEQPKVLVTALPKLSATATTLRKRRMASVLDAILVSVKTPPPASAEASGGKIEDAREVVTASISSVHAKAGPSEAAPEKLVEDSLPEKPTTPAPKAPPYEVIMKMTSSTVYRALELGLSAMMKDQLADSLAYNSLKIITLRNKAPEKDKILLSLVERLKSSKARLSAQAEAHEADMQELKKKVAEATENFNVEVVKHEICEIERSRAQKNVDELRATKEKCYDMAMECAKNLKNNFSKVGACSFEHNFIRGNPDEVIQWINGEVEAFEEILSDRGDFCAFSGARGAAFILEKVACDHAKAVAQPDFAFSADDLRNPSAEATTLGGKFYSENEKEPHDALEEAKRVEEADERAGLKGIPFITQLCKFFNFGTNRYLCFNATELSPPPEPYDPETDPSVKEALDIIKIANDAIDKTVDKLLNEAADKVLKED

SEQ ID NO: 240604 - protein, 253 aa, Zea mays
  Clone ID: MRT4577_151010C.1.pep
LSFFFFLFLLFFFFFLFLFSFFFIFLPPFLFLGGEHPTEQAYILQQATAGSGAQQPSAQLQQQYLGHLTIQTIATQQQQQILPALSQLSMVNPVAYLQQQLLASNPLALANAVANQQQQQLQQFLPALSQLAMVNPAAYLQQQQLLSFSPLAVANAPTNLQQELLQQIVPALTQLAVANPVAYLQQLVPFNQLTMSNFGGDLQQRQQLLNPLAVANPLVAAFLQQQQMVPNNRFFLMNPVLLRQPPIGGRALF

SEQ ID NO: 240605 - protein, 137 aa, Zea mays
  Clone ID: MRT4577_151011C.1.pep
NNKRGQQFRPAHRQLAMVNPAADQQQQQQLSSSPLAMVKAPTNRQQQVVQQIVPALTQLAVANPAAYLQQQLPFNQLTVSNSAAYLQQRQPLLNPLAVANPLVGAFQQQQQLLPYNQFSLMNPALSWQQPIVGGAFF

SEQ ID NO: 240606 - protein, 60 aa, Zea mays
  unsure (1)..(60): unsure at all Xaa locations
  Clone ID: MRT4577_151012C.1.pep
SKLEVXRARCRTPLLWQCSIPESSCFMXALHLRQGQAAAGGSCAGGEASQVADAGSTGMX

SEQ ID NO: 240607 - protein, 72 aa, Zea mays
  unsure (1)..(72): unsure at all Xaa locations
  Clone ID: MRT4577_151013C.1.pep
RPEIPGPHAXVPXAXPKPXTVKKFKNIMAVEKKEANGQIRLILLKAPQGCCVXTGDXDRKAXDKTLHAFXDN

SEQ ID NO: 240608 - protein, 249 aa, Zea mays
  unsure (1)..(249): unsure at all Xaa locations
  Clone ID: MRT4577_151014C.1.pep
MGKEKTHINIVVIGHVDSGKSTTTGHLIYKLGGIDKRVIERFEKEAAEMNKRSFKYAWVLDKLKAERERGITIDIALWKFETTKYYCTVIDAPGHRDFIKNMITGTSQADCAVLIIDSTTGGFEAGISKDGQTREHALLAFTLGVKQMICCCNKMDATTPKYSKARYEEIVKEVSSYLKKVGYNPDKVPFVPISGXFEGDNMIERSTNLDWYKGPTLLEALDQINEPKRXPSDKPLRFPSDVNRLWHGT

SEQ ID NO: 240609 - protein, 477 aa, Zea mays
  Clone ID: MRT4577_151015C.1.pep
MVQCTQPPPQLKLPESKITEPTDDENQDLPPKPEKRTRMHHIERHRSCVVTLSDIELNGLQPRHLHQPIEISPGGSQCSLHEETPTDTNASHRHAIADAAWEALKRSMVYFRGQPIGTVAAIDKSQGAALNYDQVFMRDFIPSALAFLMKGEHLIVKNFLVETARLQSREKMVDLFKLGQGVMPASFKVHHRNPTQKTESLLADFGETAIGRVAPVDSGLWWIILLRAYTKWTGDNSLAESTNCQRAMHLILRLCLSEGCDTSPALLCADGCSMIDRRMGIYGYPIEIQALFFMAMRCALSLLKQESDADFVNHITKRIQALSYHLHSYYWLDFQRLNDIYRYKTEEYSQTALNKFNVMPESIPDWIFDFMPSRGGYFIGNVSPARMDFRWFCLGNFIAILSSLATGEQAEAILDLVEERWQELIGEMPLKICYPAMENQEWQIVTGCDPKNTRWSYHNGGSWPVLLWLLVAVSVKL

SEQ ID NO: 240610 - protein, 204 aa, Zea mays
  unsure (1)..(204): unsure at all Xaa locations
  Clone ID: MRT4577_151016C.1.pep
MVQCTQPPPQLKLPESKITEPTDDENQDLPPKPEKRTRMHHIERHRSCVVTLSDIELNGLQPRHLHQPIEISPGGSQCSLHEETPTDTNASHRHAIADAAWEALKRSIVYFRGQPIGTVAAIDKSQGAALNYDQVFMRDFIPSALAFLMKGEHLIVKNFLVETARLQSREKMVDLFKLGQGVMPASFKVHHXPYSEDRNLLADF

SEQ ID NO: 240611 - protein, 152 aa, Zea mays
  Clone ID: MRT4577_151017C.1.pep
MAAPATRVIGSKPADCFQFQDPNTWTCVSELASDVVVEVGDTSFHLHKIPLTSRSGTLQKLVNESTGDGSKPCTVRLDDVPGGAEAFLLAARFCYDVQTELNAGNAVPLRCAAERLAMTEDYGEGNLVEQAESFLSEVLARWSDTVRALGTC

SEQ ID NO: 240612 - protein, 68 aa, Zea mays
  Clone ID: MRT4577_151018C.1.pep
IAQLELWKEKSTGKYEKKVYVLPKHLDEKVAALHLGKLGAKLTQLSKSQADYISVPVEGPYKPAHYRY

SEQ ID NO: 240613 - protein, 38 aa, Zea mays
  Clone ID: MRT4577_151019C.1.pep
ECKILRVDYKEPSHCTCTRGSYIYGHDGCFSIDHDKKQ

SEQ ID NO: 240614 - protein, 94 aa, Zea mays
  unsure (1)..(94): unsure at all Xaa locations
  Clone ID: MRT4577_15101C.1.pep
PSLLADGPTKHGEEVPGKAPRKRGTKAAXKSAPATGXSKKPHRXRPGPSLREIRXYQKSTELXDPQAAFQRLVREIAQDFKADLRFQSSAVSAL

SEQ ID NO: 240615 - protein, 38 aa, Zea mays
  Clone ID: MRT4577_151020C.1.pep
PGLNMVCNTEHYGGTRIIPTLGGALMKREMLGKKRDNN

SEQ ID NO: 240616 - protein, 59 aa, Zea mays
  Clone ID: MRT4577_151021C.1.pep
SEWSAHVVTFMVLAQDLASAVSVDDGSDPQQAASHQRSHTVNLTDDVEQLPCPAVVPDG

SEQ ID NO: 240617 - protein, 82 aa, Zea mays
  Clone ID: MRT4577_151022C.1.pep
YRCFVGRLAWATDDHYLHNAFSTYGEVLESKIILDRATPKSRGFRFVTFSTEEAMRNAIEGMNGKELDGRNITVNEAQSRGG

SEQ ID NO: 240618 - protein, 82 aa, Zea mays
  unsure (1)..(82): unsure at all Xaa locations
  Clone ID: MRT4577_151023C.1.pep
MRKCITIHMRXTRIQVRNAFWELNCLEHGIQADSQITVKKTHRRGDDACNKCVSATGDEKQLPGAACVDVEHTVMDEVRSAT

SEQ ID NO: 240619 - protein, 42 aa, Zea mays
  Clone ID: MRT4577_151024C.1.pep
RRSIATCGSPVCHDHGLPITKGTDIPLPDVMNCSRSDWIRYA

SEQ ID NO: 240620 - protein, 82 aa, Zea mays
  Clone ID: MRT4577_151025C.1.pep
PEEKFYFPKTLDFVGGNRAQKLFCFFLNIRHPPGVVIIIGYSVIKQNPLYIFGPPWLFTGPDSLFYLSRFPLWTFSQLSVQP

SEQ ID NO: 240621 - protein, 55 aa, Zea mays
  Clone ID: MRT4577_151026C.1.pep
RTSDHHPVDISTSCCSTVLCRHCLSPRGEDVYPGDNLSTHTYEDLEESNPASTMR

SEQ ID NO: 240622 - protein, 35 aa, Zea mays
  Clone ID: MRT4577_151027C.1.pep
PDKYRSLCSTEHVRNQAEPLRVLTRRVLISCRPVP

SEQ ID NO: 240623 - protein, 90 aa, Zea mays
  Clone ID: MRT4577_151028C.1.pep
RVTIFPREPLWPLFPPGWVPGWVPLLRPPGGWDLPLGGFRPRVPRLPVPQVGVKKKNRPFLGLSFFFFQGAVGGCCSPFFFFLFPPVGPV

SEQ ID NO: 240624 - protein, 73 aa, Zea mays
  unsure (1)..(73): unsure at all Xaa locations
  Clone ID: MRT4577_151029C.1.pep
MAGXXXXXEGLXXGGXXXXXEVLXDXIQXITKXVIXRXXWRXXVKXISGFFXEENXXXFKIFFENVLGDAVTY

SEQ ID NO: 240625 - protein, 81 aa, Zea mays
  Clone ID: MRT4577_15102C.1.pep
GFPPGDYSPPGGIFFPFLRKKTPRGGTFGFFSKPFGFGPNRGGFFLFCTLLTNFKVGVRLQVKERFVPFYFCPPKKNPPNF

SEQ ID NO: 240626 - protein, 53 aa, Zea mays
  Clone ID: MRT4577_151030C.1.pep
RTGIQKGAYRKKSYTPGKHNHKKFPYLRMKPGLQRRPKCNHSIKVSWCEHTQL

SEQ ID NO: 240627 - protein, 261 aa, Zea mays
  unsure (1)..(261): unsure at all Xaa locations
  Clone ID: MRT4577_151031C.1.pep
LALLALLAFSVSASKALIFPHCSLVPMAIIAQVLSPVTXVGFKHSAAHANRLQQALAASVLQQPIAQLQQQSLAHLTIQAITTXQLQQFLPVLSHLAMVNPAAYLQQQLLASNPLALANVVANHQQQQLQQFLPALSQLAMVNPVAYVQQQQLLSSSPLAVGNAPTYLQQQLLQQIVPALTQLAVANPVAYLQQLLPFNQLTLSNSAAYLQQRQQLLNPLVVANPLVAAFLQQQQLLPYNQFSLMNPVLXRQQPLVGGALF

SEQ ID NO: 240628 - protein, 280 aa, Zea mays
  unsure (1)..(280): unsure at all Xaa locations
  Clone ID: MRT4577_151032C.1.pep
HTHHANRSNNDLTTLATRILALLALLALFASATDAFIIPQCSLAPSAIIAQLLAPVTSMGFEHLSVQANMHQQALAASVLQQPIAQLQQQSLPHLTLQAISTQQQHQLLPALSHLAMANPAGYLQEQLLASNPLALAKVVANQQQQQLQQFLPRLSQLAMVNPAAXVQQQQLFSFSPLAVGNAPKYLQQQLLQQIVPALTQLVVANPVAYLQKLLPFNQLILWNFVGYLQQRQQLLNPLGVANPLVAAFLQQQQLLPNNQFFLMNPVLSRQQPMVGGAIF

SEQ ID NO: 240629 - protein, 78 aa, Zea mays
  Clone ID: MRT4577_151033C.1.pep
ALIVSTSESMYAEQGSFISASAWRSLRRQCNSTEASVCARSLNPCLPKWRLRRPRLHLPFAKQQSGSHEWSGPPFESF

SEQ ID NO: 240630 - protein, 63 aa, Zea mays
  Clone ID: MRT4577_151034C.1.pep
SSPFSSYFASPAQLATATSTVHHALTSYTTCHAHAHYKQNFLPSPPGNKTRVMSLTSSSWLSQ

SEQ ID NO: 240631 - protein, 214 aa, Zea mays
  unsure (1)..(214): unsure at all Xaa locations
  Clone ID: MRT4577_151035C.1.pep
HPSVHACRLQQAIAGSVLQQPIRQCXTHSLAHLTIQTIAAHQQQRLLPALSHLSMVNPAAYLQQQLLAXDPLAVANLVANQTQQQLLQFVPALSQLAMVNPGAYLQQQQLLLSSPLAVANAPTYLQQQLLQHIGPSLTQLGVANPAAYLQQLLPFNQLTMSNSAAYLQQRQQLLNPLAVANPLVVAFXLQHQQLLPYNQFFMMNPALLWQHPIV

SEQ ID NO: 240632 - protein, 159 aa, Zea mays
  unsure (1)..(159): unsure at all Xaa locations
  Clone ID: MRT4577_151036C.1.pep
MGKEKSHINIVVIGHVDSGKSTTTGHLIYKLGGIDERVIERFEKEAAEMNKRSFKYAWVLDKLKAERERGITIDIALWKFETTKYYCTVIDAPGHRDFIKNMITGTYQADXAELIIDYTTGGIEAGISKDGQTREHALLAXTLGVNHMIACLFKMDAPT

SEQ ID NO: 240633 - protein, 80 aa, Zea mays
  Clone ID: MRT4577_151037C.1.pep
RLRASHCNHHYDTPHVTREGTIFKPNCHSFWCRKRNVLMLTDCMLIEGKTLVRTFLRGGAGTNCLDPAWTLTRAILCQTR

SEQ ID NO: 240634 - protein, 263 aa, Zea mays
  Clone ID: MRT4577_151038C.1.pep
MATKILALLALLALLVSATNALIIPQCSLAPSAIIPQFLPPVTSMGFEHPAVQAYRLQLALAASALQQPIAQLQQQSLAHLTLQTIATQQQQQQFLPSLSHLAVVNPVTYLQQQLLASNPLALANVAAYQQQQQLQQFMPVLSQLAMVNPAVYLQLLSSSPLAVGNAPTYLQQQLLQQIVPALTQLAVANPAAYLQQLLPFNQLAVSNSAAYLQQRQQLLNPLAVANPLVATFLQQQQQLLPYNQFSLMNPALQQPIVGGAIF

SEQ ID NO: 240635 - protein, 282 aa, Zea mays
  unsure (1)..(282): unsure at all Xaa locations
  Clone ID: MRT4577_151039C.1.pep
EHSKPHQAKRSSSDLTPVATKRLALLALLALLVSATDASIIAQGSLGPRAIIPQFLPPGTSMGFEHPAVQAYRLQLALAASALQQPIAQLQQQSLAHLTLQTIATHQQQQQFLPSLSHLAVVNPVTYLQLQLLASNPLALANVAAYQQQQRLEQVMPVLSQLALXNPAVYLQLLSSSPLAVVNAPMYLQQQLLQQIVPAVTQLAVANRAAYLQQLLPXSQLDVSVFDAYQPKVRQCVNPLTVVHPLVASFXQQQVSTIXPCIQFSLYKPCIAPFPSVGGSIC

SEQ ID NO: 240636 - protein, 84 aa, Zea mays
  Clone ID: MRT4577_15103C.1.pep
KKKHSIHYIRECEHFFFFTHGAHTYILHNTKLKTTALSFSRAVSQEQKNIFCPRATNHHKNVVRHNTRSQAGHIKRHRNRLLFF

SEQ ID NO: 240637 - protein, 63 aa, Zea mays
  Clone ID: MRT4577_151040C.1.pep
SIHPKWNLPLQPPWLAPTIITCTSNLPLIFGGTTTLPCTSYISPSIAFPTPGQCPVHKRKHSL

SEQ ID NO: 240638 - protein, 242 aa, Zea mays
  unsure (1)..(242): unsure at all Xaa locations
  Clone ID: MRT4577_151041C.1.pep
AGGDSVAWSVVTRALRPATXSGLXHPSAQACTTEQAAAAXVLQQPCSDLPLPSLAHVTMHTIAPQHKHQFLPVLMHLAMRNPGAYLRQQLLASNPLALANVVANQPQQQVQQFLPALSQLAMVNPAAYLQQQQLLSSSPLAVANAPTYLQQQLLQQIVPALTQLVVANPAAYLQQLLPFNQLTLSNSAAYLQQRQQLLNPLVVANPLVAAFLQQQQLLPYNQFSLMNPVLSRQQPIVGGAIF

SEQ ID NO: 240639 - protein, 220 aa, Zea mays
  unsure (1)..(220): unsure at all Xaa locations
  Clone ID: MRT4577_151042C.1.pep
MGKEKTHINIVVIGHVDSGKSTTTGHLIFKLGGIDKRVIERFEKEAAEMNKRTFKYAWVLDKLKAERERGITIDIALRKFETTKHYCTVIDDPGHRDFIKNMITGTSQDDCAALIIDSTTGGFEAGISKDXQTREHALLAFTLGVKQMICCCNKMDATTPKYSKARYEEIVKEASSYLKKVGYXPDKVPLLPHSLGLKGDNLIXRSPTLDWKRALTLLEA

SEQ ID NO: 240640 - protein, 144 aa, Zea mays
  unsure (1)..(144): unsure at all Xaa locations
  Clone ID: MRT4577_151043C.1.pep
PRVRDFEMGVFNRTPEXLKMNLVGKDPALDTPDGPTIESNAIXARYVARSKEHTPXFGSTHIEQAHVEQWMDFATTQVDPAVAWYLYPRLVSRSYVSTTEETAMSSLKRWLDALNTHLAXNTYVVGHADTIRDIGLTCSLYHGI

SEQ ID NO: 240641 - protein, 208 aa, Zea mays
  Clone ID: MRT4577_151044C.1.pep
MASKTLSLLALLALFVSATNAFIIPQCSLAPGAIIPQFLPPVTSMGFKHPAVQAYRLQQALAASVLEQPIAQLQQQSLAHLTIQTIATQQQQALSHLAVVNPVAYLQHQMLASNPLALANVAAYQQQQQLQQFLPALSQLAMVNPTAYLQQQQLLSSSPLAMGNAPTYLQQQLLQQIVPALTQLAVANPAAYLQQLLPFNQLTMSNSA

SEQ ID NO: 240642 - protein, 133 aa, Zea mays
  unsure (1)..(133): unsure at all Xaa locations
  Clone ID: MRT4577_151045C.1.pep
LITLDVHSCDTIHNVRAAIHNKEGIPPDQQRLIFSGKQLXDVRTLADYNIQKEFTIHFVLLLKXGMQIFVMTLTVKTITLGVDSSYTIDNVKAQIQDKEDIPPDQQRLIFSGKHLKDARTLADYNNPEESTLH

SEQ ID NO: 240643 - protein, 266 aa, Zea mays
  Clone ID: MRT4577_151046C.1.pep
MATKILALLALLALFVSATNAFIIPQCSLAPSAIIPQFPPPVTSMGFEHLAVQANMQQQALAASVLQQPIAQLQQQSLPHLTIQAITTQQQQQFLPALSHLAMVNPAAYLQEQLLASNPLALANVVANQQQQQLQQFLPTLSQLAMVNPAAYVQQQQLLSSSPLAVGNAPTYLQQQLLQQIVPALTQLAVANPVAYLQQLLPFNQLTLSNSAAYLQQRQQLLNPLVVANPLVAAFLQQQQLLPYNQFSLMNPVLSRQQPIVGGAIF

SEQ ID NO: 240644 - protein, 137 aa, Zea mays
  Clone ID: MRT4577_151047C.1.pep
HGRAAARSRRRGRYYGRPMLDEVRLRASVGWPARRREESTKRLQPARALYSYRVRMGDGTAHPRTVLAGSPRAEQPILPARLSPTQSPGWVTHVVRARCSTRRSISTSATAGPCRRWSRPAGYRNGGSLSSSSSGWR

SEQ ID NO: 240645 - protein, 49 aa, Zea mays
  Clone ID: MRT4577_151048C.1.pep
QKNIRMYKTIRWMNHIRFSVCDHSRVLNSDVDADPPSISSPVLPLGDGL

SEQ ID NO: 240646 - protein, 47 aa, Zea mays
  Clone ID: MRT4577_151049C.1.pep
PQTASPPSFCMHRWPSLHLRRFTAKKRRKQRSQCIPQTISTKIIIDK

SEQ ID NO: 240647 - protein, 57 aa, Zea mays
  Clone ID: MRT4577_15104C.1.pep
VRLHVRAYLIVPSTAHYQEPDFLFVPVFGSFYPSLLWEMRVSPVKLPRVALIARAHV

SEQ ID NO: 240648 - protein, 52 aa, Zea mays
  Clone ID: MRT4577_151050C.1.pep
MEMMKIACAVLVVASADTVALAAEAPAPAATSGFSSDAPAVGAALWAAVVCW

SEQ ID NO: 240649 - protein, 57 aa, Zea mays
  Clone ID: MRT4577_151051C.1.pep
IRLEAGTSLCLQGGQAVSLAGLKAQRHGVRLGVLERGWRAGRADRCQAWSHYGRLLY

SEQ ID NO: 240650 - protein, 62 aa, Zea mays
  unsure (1)..(62): unsure at all Xaa locations
  Clone ID: MRT4577_151052C.1.pep
MGSPCWYCPSCLCRXCLCDKDDDLSILCDSCDEAYHIYCITPSHTSIPKGQWYCSSCSVERA

SEQ ID NO: 240651 - protein, 112 aa, Zea mays
  Clone ID: MRT4577_151053C.1.pep
GLLPFLRLIELRHVAARRPLPLPLPKRQQLQPTVARRVCPFTDKKTNRANKVSFSNHKTKKQQFVNLQYKKLWWEAGKRFVKLRLSTKALKTIEKHGLDAVARKAGIDLNKK

SEQ ID NO: 240652 - protein, 56 aa, Zea mays
  Clone ID: MRT4577_151054C.1.pep
KGAALEKFHFMIVMGGGGPTFLGGLYFNVLSGPPGVKFISGSITPFFVVTWSGPKF

SEQ ID NO: 240653 - protein, 129 aa, Zea mays
  Clone ID: MRT4577_151055C.1.pep
FELGPVLLRRKFFPAAIKYLQPAIAKWARAEQVLAQVSNPLGVSSKRETNLSKAIPQFQKAVEPPPGFVPPWTPLGAAFYPQKALKSALKAFEGVPLFVPPHKVARPRVDAPRPGVSMSKGGPVKSQNR

SEQ ID NO: 240654 - protein, 85 aa, Zea mays
  Clone ID: MRT4577_151056C.1.pep
WSVLCDCSGRVCPFTDKKTNRANKVSFSNHKTKKQQFVNLQYKKLWWEAGKRFVKLRLSTKALKTIEKHGLDAVARKAGIDLNKK

SEQ ID NO: 240655 - protein, 87 aa, Zea mays
  unsure (1)..(87): unsure at all Xaa locations
  Clone ID: MRT4577_151057C.1.pep
LDSFDVIDYINEALXXECRGTVFWGEILXIXPKDPLFLATKVVTKGRLNKDRILFQVETRKPDRPLFKTKEALKNLPDFIDCIPKLI

SEQ ID NO: 240656 - protein, 43 aa, Zea mays
  Clone ID: MRT4577_151058C.1.pep
KQKVFIFYPILIYNKNNGDFAQNLKNQLYLKILTPQFLKLKIS

SEQ ID NO: 240657 - protein, 53 aa, Zea mays
  Clone ID: MRT4577_151059C.1.pep
YFRLLIKVGNRLLSTDQVVSMMCSQSFVMLFQVNKIRASGALPVQPFVQCLVL

SEQ ID NO: 240658 - protein, 53 aa, Zea mays
  Clone ID: MRT4577_15105C.1.pep
KLGPKPPKLARNNKKPPSPSREIQTWVGLVPPGKLPKHPVSKGTKAVKKFPSS

SEQ ID NO: 240659 - protein, 75 aa, Zea mays
  Clone ID: MRT4577_151060C.1.pep
MGTGSSILGADGEWGETSLGDMPESCVAAVLLYLDPPEICQVARLNSAFRGAASADCVWAAKLPANYRYLAALAA

SEQ ID NO: 240660 - protein, 90 aa, Zea mays
  unsure (1)..(90): unsure at all Xaa locations
  Clone ID: MRT4577_151061C.1.pep
ANKNRPALVVNFFVAASLWVQFTPRGYVSGIAIFGILSTGPPGIAPSALFFGDKLLSPSRAVTPPFRGALVPQTTKKNKTKERKPTKKXI

SEQ ID NO: 240661 - protein, 60 aa, Zea mays
  Clone ID: MRT4577_151062C.1.pep
TLLAGLLMYEVRHAIESSCISLDKVTASNFVALSLHLNHVFILYVGSMGFVKISKGLVYK

SEQ ID NO: 240662 - protein, 109 aa, Zea mays
  unsure (1)..(109): unsure at all Xaa locations
  Clone ID: MRT4577_151063C.1.pep
AETQPRNTTTKFSASSQCNILTTSKGTHTNVAQYSRPRCHQMECDQKIVEITNRAPKHIHQSPFXVLASSALEKEQEKKRCPHSAANISDKRNSCITRLKAXXHVQVIL

SEQ ID NO: 240663 - protein, 256 aa, Zea mays
  unsure (1)..(256): unsure at all Xaa locations
  Clone ID: MRT4577_151064C.1.pep
LLSATNAYIITQCSLAAIYIIPQLLQPTTXEGLEHQHWQAYKIQQANGESVLQQPNADLEQQHLAXHLTIQTVAAQQKQQVLTTLIHLCMENPVVYLKQKAALHHNATLRXLTKAANQQHQQLQQCMPAXLTQLAMVNPVAYLQQKQLLSSSPLAVANAPTYLQQELLQQIVPALTHLVVANLVAYLQQLFPFNQLIMSNFVGYLQHRQQLFNPLAVVNPLVAAFLQQQQLLPNNQFFLINPVLSRQQPIVGGPIF

SEQ ID NO: 240664 - protein, 166 aa, Zea mays
  unsure (1)..(166): unsure at all Xaa locations
  Clone ID: MRT4577_151065C.1.pep
QLAVVNPIAYLQXQMLASNPLALANVATYQQQQLQQFLPALSQLAMVNPAAYLQQQQLLSSSPLAMVNAPTYLQQQLLQQIVPALTQLAVANPAAYLQQLLPFNQLTVSNSAAYLQQRQPLLNPLAVANPLVVAFLQQQQLLPYNQFSLMNPALSWQQPIVGGAIF

SEQ ID NO: 240665 - protein, 111 aa, Zea mays
  unsure (1)..(111): unsure at all Xaa locations
  Clone ID: MRT4577_151066C.1.pep
QLLSCRSPAVANAPTSLQQALLHQIVTALTQLAVAXNPVAYLQQLLPFNQLCMSNSVAYXTHRQQLLNPLAVANPLVAAFLQQQQLLPYNRFSLMNPVLSRQQPIVGGAIF

SEQ ID NO: 240666 - protein, 69 aa, Zea mays
  Clone ID: MRT4577_151067C.1.pep
LVSLPSTCHTGGGHLLAGWLIRPSPAPPRRLQRLHRVTRPQQPATMYRVDSGLGALERFAAYAHMINVL

SEQ ID NO: 240667 - protein, 113 aa, Zea mays
  Clone ID: MRT4577_151068C.1.pep
TPRVGFFRGPKRGFKKPKPPPQPPPKGLAPRFFGTFGSPRRANKKIFWVWPKGLIYPWFFGPKSLPCIVGVLVLTLFFPPVCLKKFPPLAPKVFFFSFSPFGVFSPKIPRFAL

SEQ ID NO: 240668 - protein, 447 aa, Zea mays
  Clone ID: MRT4577_151069C.1.pep
MGKEKSHINIVVIGHVDSGKSTTTGHLIYKLGGIDKRVIERFEKEAAEMNKRSFKYAWVLDKLKAERERGITIDIALWKFETTKYYCTVIDAPGHRDFIKNMITGTSQADCAVLIIDSTTGGFEAGISKDGQTREHALLAFTLGVKQMICCCNKMDATTPKYSKARYDEIVKEVSSYLKKVGYNPDKIAFVPISGFEGDNMIERSTNLDWYKGPTLLEALDQITEPKRPSDKPLRLPLQDVYKIGGIGTVPVGRVETGVIKPGMVVTFGPTGLTTEVKSVEMHHEALQEALPGDNVGFNVKNVAVKDIKRGYVASNSKDDPAKEAASFTSQVIIMNHPGQIGNGYAPVLDCHTSHIAVKFAELITKIDRRSGKELEKEPKFLKNGDAGMVKMIPTKPMVVETFSQYPPLGRFAVRDMRQTVAVGVIKSVEKKDPAGAKVTKAAAKKK

SEQ ID NO: 240669 - protein, 39 aa, Zea mays
  Clone ID: MRT4577_15106C.1.pep
IASGRAYSCWYKNFVGRLVDCTATGGGYIKLRKSAKKIT

SEQ ID NO: 240670 - protein, 269 aa, Zea mays
  unsure (1)..(269): unsure at all Xaa locations
  Clone ID: MRT4577_151070C.1.pep
MATKILSLLALLALFASAANAFIIPQCSLATSSIITQFLPPVTSMGFEHTAVQAYRLPQAIQASVLLHTTFAMLHXQSLAHLSISTIATQQQHQFLPAVSRLAMVNLAAYLPQQLLASDPRALASVVATQPQQQLQQFLPAFSHLXVVNPAASLQQQQLLSSSPLAVDNALTYLQQQXLLQQIVPCSDLTSVXANPVAYLQQLLPFNQLTLSNSAAYLQQRQQLLNPLVVANPLVGAFLHQQQLLAYNQFSLMNPALARQXPIGGGALL

SEQ ID NO: 240671 - protein, 81 aa, Zea mays
  unsure (1)..(81): unsure at all Xaa locations
  Clone ID: MRT4577_151071C.1.pep
FGKWDWSPLKMENPFSGAQKKVKVNLWXGVGPLSAGLNVWVXIRERLPWVIYHELRKAGHLFPVAYGMPTGIVRLLLLGNE

SEQ ID NO: 240672 - protein, 95 aa, Zea mays
  unsure (1)..(95): unsure at all Xaa locations
  Clone ID: MRT4577_151072C.1.pep
PRGPPTVXRAWTPSDTPTHLLAPSAPEATNHGVASPPAPRSRTWARRPASLATIAGSAAPRGPRGATSRRRPRARGSPDLPAPPTSDGRLTGHNS

SEQ ID NO: 240673 - protein, 253 aa, Zea mays
  unsure (1)..(253): unsure at all Xaa locations
  Clone ID: MRT4577_151073C.1.pep
MASKTLSLLALLALFVSATNAFIIPQCSLAPGAIIPQFLPPVTSMGFKHPAVQAYRLQQAIAASVLQQPIAQLQQQSLAHLTIQTIATQQQQQFLPALGHLAMVNPVAYLQQQLLASNPLALANVVANQQQQQLQQFLPALSQLAMVNPAAYLQQQQLLSSSPLAVANAPTYLQQELLQQIVPALTQLAVANPVAYLLQLLSFNQLTMSNSVAYLQQGQQLLNALAAANPLLGALLQKKQXLSYNRFSLMNPV

SEQ ID NO: 240674 - protein, 57 aa, Zea mays
  Clone ID: MRT4577_151074C.1.pep
FIGQWVVSWNDRHDIYVVWFISKLYHRLSWSSRVIDLCVMEFTPIRYVEEPHRTSGS

SEQ ID NO: 240675 - protein, 182 aa, Zea mays
  unsure (1)..(182): unsure at all Xaa locations
  Clone ID: MRT4577_151075C.1.pep
QRPNHHWLTKVLPLLALLAFFVSAPNALIIQHCXLVLRAIIQQFFQPVTXMGLKHYIVQANMQQQAFAESVLQQPIAQLQQQSLPHLTIQAITTQQQQQFLPALSHLAMVNPAVYLQEQLLASNPLALANVIANQQQQQVQQVLATLNQLAMGNPGGYVQQQQLVSFSPLAWGNAPTYLEQQ

SEQ ID NO: 240676 - protein, 226 aa, Zea mays
  unsure (1)..(226): unsure at all Xaa locations
  Clone ID: MRT4577_151077C.1.pep
MCKEKCHINIEVIXGHVDSGKSTTTGHLIYKLGGIDKRVIERFEEDAAEMNKRPFKYAWLLDKLKAYRERRITIDIALRKFATTKDYCTVIDAPRHRVFIKNMITGTSQADCAVLIIDSTTGGFEAGISKDGQTREHAXLLAFTLGVEHMMCCCNQMDATTHKYSKARYDEIAKEVSSYLKIVAYDPXDKIDFVSISVFEGDXMIERSTNLDWQKRTALLEALDQI

SEQ ID NO: 240677 - protein, 258 aa, Zea mays
  unsure (1)..(258): unsure at all Xaa locations
  Clone ID: MRT4577_151078C.1.pep
GLLGPLGLLMNATNAVIISQCLIGSNGIISQILPPHTLMGLKHSXXKLYRLHLALAESALQQPMAQLQQQSLAHLTIQTIATQQQQQQQFLPSLSHLAVVNPVTYLQQQLLASNPLXLAKVVAYQQQQQLQQFMPVLSQLAMVNPAVYLQLLSFSPLAVGNAPRYLQQQLLQQIVPALTQLAVANPAAYLQQLLPFNQLAVSNFAGYLQQRQQLLNPLAVANPLVATFLQQQQQLLPYNQFSLMNPALQQPIVGGAIF

SEQ ID NO: 240678 - protein, 216 aa, Zea mays
  unsure (1)..(216): unsure at all Xaa locations
  Clone ID: MRT4577_151079C.1.pep
EAPSEDAAEAREAASVAQQPYAQSQQQSWAHQTRQTXATQQQQQFLPALSHLAMVNPVAYMQQQLLASNPLALANVVANQQQQLQQFLPALSQLAMVNRAAYVQQQQLLSSSPLAVGNAPTYLQQQLLQQIVPVLTQLAVANPVAYLQQLLPFNHMNLSNFGEYLHQRQQLLNPLVVADPLVSAFLHQQQLLPYNQFSTINPVLSRQQPIVGGAIF

SEQ ID NO: 240679 - protein, 139 aa, Zea mays
  Clone ID: MRT4577_15107C.1.pep
RCINVPRLRHVTFTPIRSPWKACTTCPRPSHLRSLPVDCTPHTWMMIPASDENLMVEDSARKVKMTFHIGVMILDLVYIPLVDSLTLMNNLQVLHGLRLAARRSRTPSTSSSRIALPPREARFDERRGARPSVRSPSCT

SEQ ID NO: 240680 - protein, 75 aa, Zea mays
  unsure (1)..(75): unsure at all Xaa locations
  Clone ID: MRT4577_151080C.1.pep
RGPHRLVFRTLSLSXRQRGFDFPWGYHCFKFPRYCKVSYFSAGSIVHTLVLLDLCSGVVSWWLRCGTLLGGWGRC

SEQ ID NO: 240681 - protein, 60 aa, Zea mays
  Clone ID: MRT4577_151081C.1.pep
CYELLITSSQKCIATLLMKDRPTAFTKVTCCTLRGCLATYHDTRTLLLQKTQLNPCVSQD

SEQ ID NO: 240682 - protein, 249 aa, Zea mays
  Clone ID: MRT4577_151082C.1.pep
MEEVGGDMPLPKQKLSAAPYRDGGGVVLVATGSFNPPTYMHLRMFELAKDELELRGYSVLGGYMSPVNDAYKKKDLLPAAHRIRFCELASKSSSFVMVDPWEAMQNGYQRTLTVLSRIRNSLCKDGVADQGSLKVMLLCGSDLLESFTTPGVWILDQVRTICQDFGVVCIRREGKDVGKLIDNSDILQECKDNIISVDEIVPNQISSSRVRDCIRRSLSIKYLTSDEVIEYIREHKLFMEGNGGDIALL

SEQ ID NO: 240683 - protein, 109 aa, Zea mays
  unsure (1)..(109): unsure at all Xaa locations
  Clone ID: MRT4577_151083C.1.pep
PLIRDTDLYLLSKGTHHRPYEXMGAHPQIHEGTGGTRFVVWAPSARRVSVVGSFNQWDGRRHLMRRRHECGLWEIFVPQVGEGDLYKFEVLGADEVVRVKADPYAFRAE

SEQ ID NO: 240684 - protein, 81 aa, Zea mays
  Clone ID: MRT4577_151084C.1.pep
GAEGSQLDLGACTWRKWRPRGEQERRRAPRELGQGNCSRSEHRGEEGVAGQRKKKRAPCCRGVERHGRRSALPGRVGGRVG

SEQ ID NO: 240685 - protein, 104 aa, Zea mays
  unsure (1)..(104): unsure at all Xaa locations
  Clone ID: MRT4577_151085C.1.pep
LGREPKXIRXPIQXMDAXIXGRXGXAKXXPXXEDAXEXGKXGRXXAXESXXXXDPETGKRSXXKXPXXSKDXXXEGXQRGXREGXAGQEXGEQTDRKTRNREKE

SEQ ID NO: 240686 - protein, 145 aa, Zea mays
  Clone ID: MRT4577_151086C.1.pep
MLSLSRTLARRLFSTAAAGSEGAAAASTSVVRKAQNPLEEFFEVERSTADDQPAPHYGRGWKASELRLKSWDDLHKLWYVLLKEKNMLMSQRQMLASENMHFPNPERISKVKRSMCRIKHVLTERAIADPDPRRTAEMKRMINAM

SEQ ID NO: 240687 - protein, 53 aa, Zea mays
  Clone ID: MRT4577_151087C.1.pep
SKNCPQHKWINVSLARSCGTASKNFFCFAFCPIVVVMFLLNPVVNEKGGHLPP

SEQ ID NO: 240688 - protein, 104 aa, Zea mays
  unsure (1)..(104): unsure at all Xaa locations
  Clone ID: MRT4577_151088C.1.pep
SSRAEMVVLHVKSAPPAAAAAXPMQEVDEETEFLYECAASAVVADVAAALGALAGXQAAILSFCRRLXGERSRIDAACPVLRIAARCEVVLTRRVRFCELQRGV

SEQ ID NO: 240689 - protein, 362 aa, Zea mays
  unsure (1)..(362): unsure at all Xaa locations
  Clone ID: MRT4577_151089C.1.pep
VRTPVRPRVRPRVRGRVGGRVGGAGFSGSHTEEGLASSDARAVNQILVFLKKWFDKCPQFFSSPLYLAGDSYSGMIVPTVHLXAGGEEEGSQPTLILKGYLVGDPVTDFNFGGPSRIPFAHGMGLISGEIYEAFEKSCRVGVSXYPSTECINSLGAIDECIKGICPNHVLEPLCAFASPQPHKMPKLKLNSGAQEMLQLPVYTGEAELHLSEISLQCRTAGYIMSYIWANNDSVREALGIHKGTVPAWSRCSYEIPYTNDIPSTVKYHLDVTTKGYRSLVYNGDHDMVIPFVGTQAWIKTLNFSIVDEWRPWFVDGQVAGFTRSYSNNLTFATVKGGGHTAPEYMPRQCYAMFERWVSGDPL

SEQ ID NO: 240690 - protein, 76 aa, Zea mays
  unsure (1)..(76): unsure at all Xaa locations
  Clone ID: MRT4577_15108C.1.pep
FFLVVWGSVPXLAPRLXXWPLXGXLLXPCSGXXXWSGXCCVXPFLCCCFXPLAVGLAVVXSYXPPWVLAAGGEKXG

SEQ ID NO: 240691 - protein, 99 aa, Zea mays
  Clone ID: MRT4577_151090C.1.pep
TCSLSVSRLYLSLYGLNRPVWAAFPNNPTSCRRLAGRAGCAQDGAFILPCVPLQRTGNRSVFEDTSADYSSAGEDGLLSCWPDRRGRGATKTSQLGALL

SEQ ID NO: 240692 - protein, 58 aa, Zea mays
  Clone ID: MRT4577_151091C.1.pep
WITHVAFFSESLEALKEISELACPNVAFLEEVRFAHDLLAAYQLMYVCCLGEHFVSYS

SEQ ID NO: 240693 - protein, 249 aa, Zea mays
  unsure (1)..(249): unsure at all Xaa locations
  Clone ID: MRT4577_151092C.1.pep
FLMDDFLDEPAATPSAKSAVEPQVDLFADADFQSAIPGAETTAHQDVQETVDLFXGNATFASAFPPQTGFIPPPTSGTPSNSNTSVSKNTVPEPFDPFGDIPLSSFGGSDPFGDFSSSSAPPPPVHSSTGNISTSSQNLEAASDFGAFESNTVDTAKDPFDFSSTGNFGKADVAPLAAPKTDASDFGAFVANTVEATKDPFDLSSSINGRADQTPLAAPKPNTKKENFQVKSGIWADSLSRGLIDLNIT

SEQ ID NO: 240694 - protein, 298 aa, Zea mays
  unsure (1)..(298): unsure at all Xaa locations
  Clone ID: MRT4577_151093C.1.pep
QLPNNTGYQYIALLALLALFVSATNAFIIPQCSLAPSAIIPQFXPPATSMGFXEHLAVQANMQQQALAASVLQQPIAQLLQQSLPHLTIQAITTQQQQQVLPGLSHLAMVNPAGYLQEQVLGCNPLALANVVAKQQQQQLQQFLPTVSQLAMVNPAAXVQQQQLVLFSPLAVGNAPTYLQQQLLQQIVPALTQLAVANPVAYLQQVVPFNQLALSNFGGDLQQRQQFLYPLVVGNPLVAAFLQQQQLVPYNQFFLMNPVLARQQPLVGGAIFLITYEMDSIMGPPNPRVFPRNNPYID

SEQ ID NO: 240695 - protein, 319 aa, Zea mays
  unsure (1)..(319): unsure at all Xaa locations
  Clone ID: MRT4577_151094C.1.pep
MGFGWRTHHAKRTNGDLTTMATKISCLLALLALFASATNASIIAQCSLAPSXIIPQVLPPVTSMAFEHPAVQAYKLQQAIAASVLQQPIAQLQQQSLAHLTIQTIATQQQQQFLPALSHLAMVNPAAYLQQQLLASNALALANVVANQQQQXLQLFLPALSQLAMVNPAAYLQQQQLLSSSPLAVANAPTYLQQQLLQHIVPALTQLVVANPAAYLQQLLPFNQLTVSNSAAYLQQRQQLLNPLAVANPLVAAFLHVTPGFKKANRMRTMYVPEFKVHVHSSQNNMDRQNTVLKVVGIRKQMEYMLEKPQRKAKVIAIV

SEQ ID NO: 240696 - protein, 123 aa, Zea mays
  unsure (1)..(123): unsure at all Xaa locations
  Clone ID: MRT4577_151095C.1.pep
PTHLTHNGLHKILAXLCAFLALLVERXTNAFIYSKQCSLAPSAIIPQFLPPVTSMGFEHPAVQAYRLQLALAASVLQQPIAQLQQQSLAHLNLQTIATQQQQQFLPSLSHLAVVNPVAYLQQQ

SEQ ID NO: 240697 - protein, 62 aa, Zea mays
  Clone ID: MRT4577_151096C.1.pep
YKKLIFLVLRQQHTKPRWKMPKRSEPHYRSTKEFRTVKRNTSERCNLLSNNNRHTLFKRKTP

SEQ ID NO: 240698 - protein, 218 aa, Zea mays
  unsure (1)..(218): unsure at all Xaa locations
  Clone ID: MRT4577_151097C.1.pep
MATKILALLALLALFVSATNAFIIPQCSLAPSAIIPQFLPPVTSMGFEHLAVQANMQQQALAASVLQQPIAQLQQQSLPHLTIQAITTQQQQQFLPALSHLAMGNPAAYLQEQLLASNPLSLGNXVANHQQQQHLQLFVPTLKQRGMENCAVYKQQQHLFLSSPLGGDNAPTYLQQQLLQQIVPSLTQVGXANPGAFLEQXLXSFNQVAVXNCXAYLT

SEQ ID NO: 240699 - protein, 104 aa, Zea mays
  unsure (1)..(104): unsure at all Xaa locations
  Clone ID: MRT4577_151098C.1.pep
MNELRKYQTTARFKDWQVMSVWGIAGVGKSDLVKNLYYERMLKEDPMFDKYGWVHVSHPFNLRDFSRNLXFWIFTQMPWESETXIQECHKLLKEHQCLVVIDDL

SEQ ID NO: 240700 - protein, 65 aa, Zea mays
  Clone ID: MRT4577_151099C.1.pep
GTTPAPSSSELRRGPRHGPRGVAAYRSASFDRRPMCVCVPLVRSHILKRGQVVSVSEMKTRADSQ

SEQ ID NO: 240701 - protein, 148 aa, Zea mays
  unsure (1)..(148): unsure at all Xaa locations
  Clone ID: MRT4577_15109C.1.pep
RSLLNHPTLEPLLDHAIIACVEPSGGSXSHEPYLLLPVPLNGTLXLDNXNIVLSRREFYSTADVLQIFQHMREWLIHMHSXDPPYAHKDAKPGNALITWRXGHAPVATLMDSGSAGPARXEITSRSEALQTQEWAADHCSAPYQAPEL

SEQ ID NO: 240702 - protein, 136 aa, Zea mays
  unsure (1)..(136): unsure at all Xaa locations
  Clone ID: MRT4577_1510C.1.pep
MGRMVQRGELFRGFEWGANPPQPNPIQSKPKSTTIPPPPPXLGKGPGTRDQXPRGPGPPPGGPPPPPGGAGASSFRGGQTCGRGGAPGRALIFIFLGGTPPRGGKKRRRGGPPRTPPWSIPVPRPRGGGPGPWPGP

SEQ ID NO: 240703 - protein, 316 aa, Zea mays
  unsure (1)..(316): unsure at all Xaa locations
  Clone ID: MRT4577_151100C.1.pep
MGKEKIHISIVVIGHVDSGKSTTTGHLIYKLGGIDKRVIERFEKEAAEMNKRSFKYAWVLDKLKAERERGITIDIALWKFETTKYSCTVIDAPGHRDFIKNMITGTSQADCAVLIIDSTTGGFEAGISKDGQTREHALLAFTLGVKQMICCCNKMDATTPKYSKARYEEIVKEVSSYLKKVGYNPDKVPFVPISGFEGDNMIEKSTNLDWYKGPTLLEALDQINEPKRPSDKPLRLPLQDVYKIGGIGTVPVXRVETGVIKPGMVVTFGPTGLTTEVKSVEMHHESLLEALPGDXVGFXVKNVAVXDLKRGNVLPL

SEQ ID NO: 240704 - protein, 255 aa, Zea mays
  Clone ID: MRT4577_151101C.1.pep
MGKEKTHINIVVIGHVDSGKSTTTGHLIYKLGGIDKRVIERFEKEAAEMNKRSFKYAWVLDKLKAERERGITIDIALWKFETTKYYCTVIDAPGHRDFIKNMITGTSQADCAVLIIDSTTGGFEAGISKDGQTREHALLAFTLGVKQMICCCNKMDATTPKYSKARYEEIVKEVSSYLKKVGYNPDKVPFVPISGFEGDNMIERSTNLDWYKGPTLLEALDQIHEPKRASDKPLRLPLQDVYKIGGIGTVPVGRV

SEQ ID NO: 240705 - protein, 239 aa, Zea mays
  Clone ID: MRT4577_151102C.1.pep
MATKILALLALLALFVSATNAFIIPQCSLAPSAIIPQFLPPVTSMGFEHLAVQAYRLQQALTASVLQQPIDQLAVVNPVAYLQQQLLASNPLALANVAAYQQQQLQQFLPAPSQLAMVNPAAYLQQQQLLSSSPLAVVNAPTYLQQQLLQQIVPALTQLAVANPAAYLQQLLPFNQLTVSNSAAYLQQRQPLLNPLAVANPLVAAFLQQQQLLPYNQFSLINPALSWQQPIVGGAIFYD

SEQ ID NO: 240706 - protein, 257 aa, Zea mays
  unsure (1)..(257): unsure at all Xaa locations
  Clone ID: MRT4577_151103C.1.pep
TLPKRSYISNNSNNNGLPRILIPSLRLLAPFCEPPTNAFXIIPQWLSLAPSXLLHEFLPPVTXSMGFEHPAVQAXYRLQQAIAASVLQQPISQLQQQSLAHLTIQTIATQQQQQFLPALSHLAMVNPAAYLQQQLLASNPLALANVVANQPQHQLLQFLPALSLLALVNPAAYLQQSQLLSSSPLAVAFAPTYLLHLLLLQIXPALDXQLVVANPAAYLLQLLPFNQLTMSNSAAFLQQRQQLLNPLAVAYPLVAGF

SEQ ID NO: 240707 - protein, 189 aa, Zea mays
  unsure (1)..(189): unsure at all Xaa locations
  Clone ID: MRT4577_151104C.1.pep
SRSRTSELFDVLWEARRNSVRLRSLLQRKEAAHVVELERRFKLFXDLIQRASRVVSPGDGARGGGDAVVDLEVEANRNPALAAAVAAAATEIDRGSKGGLGLEPKSVSSLHRATSAGTDTEKLGLIQVASLIESSAKKGTTELNLRGKLVDQVEWLPVSLGKLQDVTELDLSENRIMALPSTIGSLRYL

SEQ ID NO: 240708 - protein, 70 aa, Zea mays
  Clone ID: MRT4577_151105C.1.pep
RKTSVLSHSFRIRVGFTKGTSCPIGEALPGSPKSLRMEKRGLFLGAPQFQRLLKFSFVNKKVFSRLARCT

SEQ ID NO: 240709 - protein, 145 aa, Zea mays
  Clone ID: MRT4577_151106C.1.pep
MGKEKTHINIVVIGHVDSGKSTTTGHLIYKLGGIDKRVIERFEKEAAEMNKRSFKYAWVLDKLKAERERGITIDIALWKFETTKYYCTVIDAPGHRDFIKNMITGTSQADCAGLIIDSTTGGFEAGISKDGQTREHALLASTLEV

SEQ ID NO: 240710 - protein, 447 aa, Zea mays
  Clone ID: MRT4577_151107C.1.pep
MGKEKSHINIVVIGHVDSGKSTTTGHLIYKLGGIDKRVIERFEKEAAEMNKRSFKYAWVLDKLKAERERGITIDIALWKFETTKYYCTVIDAPGHRDFIKNMITGTSQADCAVLIIDSTTGGFEAGISKDGQTREHALLAFTLGVKQMICCCNKMDATTPKYSKARYDEIVKEVSSYLKKVGYNPDKIAFVPISGFEGDNMIERSTNLDWYKGPTLLEALDQITEPKRPSDKPLRLPLQDVYKIGGIGTVPVGRVETGVIKPGMVVTFGPTGLTTEVKSVEMHHEALQEALPGDNVGFNVKNVAVKDLKRGYVASNSKDDPAKEAASFTSQVIIMNHPGQIGNGYAPVLDCHTSHIAVKFAELITKIDRRSGKELEKEPKFLKNGDAGMVKMIPTKPMVVETFSQYPPLGRFAVRDMRQTVAVGVIKSVEKKDPTGAKVTKAAIKKK

SEQ ID NO: 240711 - protein, 83 aa, Zea mays
  Clone ID: MRT4577_151108C.1.pep
FSSSLVSVAFVGLLCVPCAPLVSDPPPAFLLGSSRVVLWVSSHWSLWPLLVVVRERASGPVCDAPVRVLPSPGCCAGFRGFIT

SEQ ID NO: 240712 - protein, 167 aa, Zea mays
  Clone ID: MRT4577_151109C.1.pep
MEYSSTRVVCLALALAMVAVTPCAAQNSPQDFVNPHNAARAAVGVGPVSWDENVAAFARSYAAQRQGDCKLVHSGGGPNHYGENIFWGGGSAWKASDAVGLWVGEKQNYDYNSNSCAAGKVCGHYTQVVWRKSTAIGCARVVCNNGGGVFITCNYNPPGNFRGQRPY

SEQ ID NO: 240713 - protein, 114 aa, Zea mays
  Clone ID: MRT4577_15110C.1.pep
SLHVMILPPCLSPMQHAGVAVAVELGISSPATRSTVAHRLPGSALHRGRTRTSPVVLHLRSLLASAIITGRCFPAPSASPAAAEHRSLASTDAPCCCSIQATSGFLPHRSSSAS

SEQ ID NO: 240714 - protein, 271 aa, Zea mays
  unsure (1)..(271): unsure at all Xaa locations
  Clone ID: MRT4577_151110C.1.pep
GRRQGRCPLTPEEVGLMLRALGYRKDVHIYVASGEIYGGARTLAPLKALFPNLHTKETISSKEELAPFSKYSSRMAALDFIVCDESDAFVANNNGNMAKILAGRRXRCCYVISGLLLALTIFRALCRRYFGHKRTIRPNAKRLYPLFLNRGNMSWDAFSSKVHMVQKGFMGEPKELRPGRGEFHENPSTCICERTDGKAVARAKSQDDQVLNSVADQGKGIGEPAVPNHTDEEAGEPDDDGDVPADKEVVDAEMVDDVLAGDPELEQILSD

SEQ ID NO: 240715 - protein, 167 aa, Zea mays; identical to SEQ ID NO: 240712
  Clone ID: MRT4577_151111C.1.pep

SEQ ID NO: 240716 - protein, 168 aa, Zea mays
  Clone ID: MRT4577_151112C.1.pep
MEYSSTRVVVCLALALAMVAVTPCAAQNSPQDFVNPHNAARAAVGVGPVSWDENVAAFARSYAAQRQGDCKLVHSGGGPNHYGENIFWGGGSAWKASDAVGLWVGEKQNYDYNSNSCAAGKVCGHYTQVVWRKSTAIGCARVVCNNGGGVFITCNYNPPGNFRGQRPY

SEQ ID NO: 240717 - protein, 114 aa, Zea mays
  Clone ID: MRT4577_151113C.1.pep
MASLSVAAVAATIAMPSSSGGRGRRLRVASMATQKGQKPTPKTVSGTRRSGTTTVFPRAPPSCTSSPRSRRGRWRCRPSPRSSAWSEAPPRWPRPRSCPGCRAPPADERICSRT

SEQ ID NO: 240718 - protein, 69 aa, Zea mays
  unsure (1)..(69): unsure at all Xaa locations
  Clone ID: MRT4577_151114C.1.pep
MAFHNTAIHAVSEHKATSKSSKGGLLFLVGRIARVLKAGKYAERVCAGAPVYLAAVLXYLAAEVLELAP

SEQ ID NO: 240719 - protein, 193 aa, Zea mays
  Clone ID: MRT4577_151115C.1.pep
MASLSVAAVAATIAMPSSSGGRGRRLRVASMATQKGQKPTPKTVSGTRRSGTTTVFPVGEPGPRPATTSGKAPVKLLTNVEKLRLLTKAERAGLLSAAERAGLSLSAMERLGLLSKLEELGALSAATDPGTPGALLALALPLLAAGPAVVYLVPEEQAWQVALQAVAALVCVVGGAAAVAASTFVSRLQGSSS

SEQ ID NO: 240720 - protein, 51 aa, Zea mays
  Clone ID: MRT4577_151116C.1.pep
IKKIRTVSHPTRLVASLHTHIKPERRECNGPLRFEFPVVKYRCISPLAYYN

SEQ ID NO: 240721 - protein, 47 aa, Zea mays
  Clone ID: MRT4577_151117C.1.pep
SVTNPVRAQIIGPFPSAIAGWGTRIGCFLDSNHFFLDCHRTWPCETR

SEQ ID NO: 240722 - protein, 122 aa, Zea mays
  Clone ID: MRT4577_151118C.1.pep
RLASMVVYESVPPATVSPGDDGLAAGGTEPARHAPLWMTRVTRTTTTGHINIIWGDKYDPDMCALDSLSMEATGDDAHLGTVVAEMFLWCRNEYKTHVCCDFTGEEFKSITSKYKVLSMMLA

SEQ ID NO: 240723 - protein, 131 aa, Zea mays
  unsure (1)..(131): unsure at all Xaa locations
  Clone ID: MRT4577_151119C.1.pep
DGVTTIIPQRSLAHVACLLQQYLRSVVGALXAKEDAQSYKPQDARRLRIKPLXTMXYEQRRGLYELQVFGRTHEAQKLQPLLLSAIKTDALAKLLPCCQRQLFVICIRLATAKSVVDLEAPVLPSTLLATD

SEQ ID NO: 240724 - protein, 105 aa, Zea mays
  Clone ID: MRT4577_15111C.1.pep
AALLLACHPSSGPWVFNSPVLFTAFYLGAAGFVSRLAVVLSGRVLFLARLSRRSLRIGVSLYPSCGWCSANGRPRSPPRARRGWLWCSVCRWSWCSVVSPRRSPR

SEQ ID NO: 240725 - protein, 101 aa, Zea mays
  unsure (1)..(101): unsure at all Xaa locations
  Clone ID: MRT4577_151120C.1.pep
NTTAQLRGEGLKKNLVLGGIIPVGTRFQKFVHRSPQDKNLYFXIQKKNLFSSQIKEGGGGAYKKKFFLFLPNKQFLFNILNPLFPPLFYLKIHKKNFFSFI

SEQ ID NO: 240726 - protein, 542 aa, Zea mays
  Clone ID: MRT4577_151121C.1.pep
MRLKDRQVGSSMLSCEYPDFYIGDDSFSKSEVEIPKEMCGETSGELEFGTPTSGRSWDFLSRSGSPFSASCSSQASHRREPSVVREGKKKILERLSMVSSTVNIEEEMEGRRSTGTLGDMLTISKVKDQEEIGAETLGSPAPELEPEEPFSCLPRSRSLPLSLSYGVAESNGITSGTHEAEKERIRKSSSFREKVSSLFSKKKSTREKVDPSVSNRLKHGGAVTTGDVKEICNHLALDNLQKQHTCLNTDEKNTVQGLVTSSCETNSAADIPAKDISSISSLGVPGIFGGLQDEPSPVSVLDGPFICDNNRRLLYSSENFITSSPQALSRSPLIGSFSRSLSWEDPPLEVMSPNSLRLSRLFSKADEDLDSLTFIQKLVHSRGTGRESCILADPLDPSLLEKISDYEEDGIKFGKRRPKQRLLFDAVNEALIELASMAELAAYPWGRSCSSEHGDCKNGSSSNSAAEEIWRVIRNWSILEKYPPGEAIERNLLLEMILKREVAEAASADTTRLETFDLNTTVCAMVLDGLVEETVVDLTNYC

SEQ ID NO: 240727 - protein, 107 aa, Zea mays
  unsure (1)..(107): unsure at all Xaa locations
  Clone ID: MRT4577_151122C.1.pep
AQSPCATPYIYSLPGHGKLRRVAFVTARASVETLRPSAASIKSSEAFLGHSSRLXAPAYSTRRELKGEANGKGLPSLPSTCYLDGNLTGDNGYNPLGLAEDHXNLRW

SEQ ID NO: 240728 - protein, 72 aa, Zea mays
  Clone ID: MRT4577_151123C.1.pep
GIEPSITSNVLLLITYLVHAVLRSRDQSKPLELRGEDIQGRKAGKLWIGDLTASCASGIKHMIDLQHEGEEI

SEQ ID NO: 240729 - protein, 111 aa, Zea mays
  Clone ID: MRT4577_151124C.1.pep
TGSTAPPTRPCPTGCPWHTTRTPCQWLTQGTLGITTLLTEEACSLIILTVAVNFCSVLVIFPALRLYPASSVVPLSLDQTFWSDICNVIFFVWNQMQHPRVVAIVDYIISY

SEQ ID NO: 240730 - protein, 42 aa, Zea mays
  Clone ID: MRT4577_151125C.1.pep
FAKFAIFMNLKRGRKEEKFKPGVHKTLEGAFVLNQHHPAEHN

SEQ ID NO: 240731 - protein, 96 aa, Zea mays
  unsure (1)..(96): unsure at all Xaa locations
  Clone ID: MRT4577_151126C.1.pep
MHTPPHQRPHTKGGSIMSQTIKRISHVLQRTAPILIWLFHQNXVRTEVRIXGSMYYMXNLALEXAEESTVTKNTRNSLGLILLKGDNITLMMHGGK

SEQ ID NO: 240732 - protein, 116 aa, Zea mays
  Clone ID: MRT4577_151127C.1.pep
DRLLRPEVIAEPEITVTERTVEDECLILASDGMWDVISNDIACNVARQCLEDGNPPPADPTAGGGGGAPAAGVVVVAAREAEPRCLRAASLLARLAIGRETQDNVSIVVVDLKHRD

SEQ ID NO: 240733 - protein, 73 aa, Zea mays
  Clone ID: MRT4577_151128C.1.pep
PSAPPPSRPRLSKTGKGSFVLVGTPGVGSLFYISPLGNGVFLGAFLFLPAAGFRFFFGFWPAFLCVNFIWVLQ

SEQ ID NO: 240734 - protein, 268 aa, Zea mays
  unsure (1)..(268): unsure at all Xaa locations
  Clone ID: MRT4577_151129C.1.pep
MATKILALLALLALFVSATNAFIISQCSLAPSAIIPQFLPPVTSMGFEHPAVHAYRLQQALAASVLQQPIAQLQQQSLAHLTIQTIATQQQQQFLPALSRLAMVNPAAYLQQQLLASNPLALANVVAHQQQQQLQQFLPALSQLAMVNPAAYLQQQQLLSSTPLVLANAPTYLQQQLLQXXNLPALTQLAMANPAAYLQQLLPFNQLIVSNSVAYLQQRQXXLLNPLAVATPLVAAFLQQQQLLPYNQFSLMNPVLSRQQPIVGGAIF

SEQ ID NO: 240735 - protein, 70 aa, Zea mays
  Clone ID: MRT4577_15112C.1.pep
LSMDLHRGGARPAAPGAVEEGDVKVHGLGRQPLHQHWEDSVQRAHCLILVGGHKEPLGGTKTDLSRDLRT

SEQ ID NO: 240736 - protein, 273 aa, Zea mays
  unsure (1)..(273): unsure at all Xaa locations
  Clone ID: MRT4577_151130C.1.pep
RSEPAGPGYPHLARRRRLLLLLSAPSPSFQFQPCGKEKTHINIVVXIGHVDSGKSTTTGHLIYKLGGIDKRVIERFEKEAAEMNKRSFKYAWVLDKLKAERERGITIDIALWKFETTKYYCTVIDAPGHRDFIKNMITGTSQADCAVLIIDSTTGGFEAGISKDGQTREHALLAFTLGVKQMICCCNKMDATTPKYSKARYEEIVKEVSSYLKKVGYNPEKVPFVPISGFEGDNLIERSXKLDWYKGPTXLLEVFDQINEPKRPSHKPLRLPP

SEQ ID NO: 240737 - protein, 119 aa, Zea mays
  Clone ID: MRT4577_151131C.1.pep
MACFFRLPPPAPYCLLIVIIICSPLLSTCSHAKPCTQCCDDDDDDQDLAVLNMSFVSNSGAAGRHLVFVLAPQTMQQPSLFVSPRIPPKLSVEPSSPTWTTITYSVAVLAMCRYILFAI

SEQ ID NO: 240738 - protein, 86 aa, Zea mays
  Clone ID: MRT4577_151132C.1.pep
GSTAPHWPFFYSCVKEQNQPRGYIANKLRPSLLDKKKTTATKFNKTGAIKRRLPKASGRAGAILGRGRKGQDGKTLGGQTGRELGP

SEQ ID NO: 240739 - protein, 235 aa, Zea mays
  unsure (1)..(235): unsure at all Xaa locations
  Clone ID: MRT4577_151133C.1.pep
MGKGAQGSDAAAAGGEVEENMAAWLAAKNTLKIMPFKLPPVGPYDVRVRMKAVGICGSDVHYLRVRDPIRCLCNSTXGIVARLKKKKKMDSDSLRIIDSRRRCASXFVVKEPMVIGHECAGVVEEVGAGVTHLSVGDRVALEPGVSCWRCRHCKGGRYNLCEDMKFFATPPVHGSLANQVVHPADLCFKLPDGVSLEEGAMCEPLSVGVHACRRVGVGPETGVLVVGAGPIGLVS

SEQ ID NO: 240740 - protein, 260 aa, Zea mays
  unsure (1)..(260): unsure at all Xaa locations
  Clone ID: MRT4577_151134C.1.pep
SFLGLLGLLAGAPNASIFQQCXTGSRSHITQFLPPVTXKGFEHPAVQXYRLQQAIAASVLQQPISQLQQQSLAHLTIQTIATQQQQQFLPALSHLAMVNPAAYLQQQLLASNPLALANVVANQPHQQLQQFLPALSQLAMVKRGAYLHQQQMLSCSPLAVANAPTYLQQQLLQQIVPALNQLVVAIRAAYLQQLLPFNQLTMWICAAYLQQRQQLLNPLTVGNPLVDAFLHQQQLLPYNQFSLINPVLSRQQAIVGGAIF

SEQ ID NO: 240741 - protein, 230 aa, Zea mays
  Clone ID: MRT4577_151135C.1.pep
LLATRPENEPFTRMMVFEFAPHGSLSQHLHVKEFEHLDWAARMRVIMGVAYCLQYMHHELSPPMAIHDVRSDTTFISDDYAAKIADVGVWNELAAKAKAGKEDGSSRAEAPPDLPSNAYCFGALMIETISGRVPDPYDHKPICSWASEHLKDKNYGKLVDASLKEHKESELEAVCEVIQECIDPDPTRRPSMRDVVGKLRDALGISPEAAAPRLSPLWWAELELLSVKST

SEQ ID NO: 240742 - protein, 260 aa, Zea mays
  Clone ID: MRT4577_151136C.1.pep
MGKEKTHINIVVIGHVDSGKSTTTGHLIYKLGGIDKRVIERFEKEAAEMNKRSFKYAWVLDKLKAERERGITIDIALWKFETTKYYCTVIDAPGHRDFIKNMITGTSQADCAVLIIDSTTGGFEAGISKDGQTREHALLAFTLGVKQMICCCNKMDATTPKYSKARYEEIVKEVSSYLKKVGYNPEKVPFVPISGFEGDNMIERSTNLDWYKGPTLLEALDQINEPKRPSDKPLRLPLSGCLQIGGIGTVPVGRVETGVI

SEQ ID NO: 240743 - protein, 447 aa, Zea mays
  Clone ID: MRT4577_151137C.1.pep
MGKEKSHINIVVIGHVDSGKSTTTGHLIYKLGGIDKRVIERFEKEAAEMNKRSFKYAWVLDKLKAERERGITIDIALWKFETTKYYCTVIDAPGHRDFIKNMITGTSQADCAVLIIDSTTGGFEAGISKDGQTREHALLAFTLGVKQMICCCNKMDATTPKYSKARYEEIVKEVSSYLKKVGYNPDKIAFVPISGFEGDNMIERSTNLDWYKGPTLLEALDQITEPKRPSDKPLRLPLQDVYKIGGIGTVPVGRVETGVIKPGMVVTFGPTGLTTEVKSVEMHHEALQEALPGDNVGFNVKNVAVKDLKRGFVASNSKDDPAKEAASFTSQVIIMNHPGQIGNGYAPVLDCHTSHIAVKFAELITKIDRRSGKELEKEPKFLKNGDAGMVKMIPTKPMVVETFSAYPPLGRFAVRDMRQTVAVGVIKSVEKKDPTGAKVTKAAAKKK

SEQ ID NO: 240744 - protein, 178 aa, Zea mays
  Clone ID: MRT4577_151138C.1.pep
MATKILALLAFLALLVSATNAFIIPQCSLAPSAIIPQFLPPVTSMGFEHPAVQAYRLQLALAASALQQPIAQLQQQSLAHLTLQTIATQQQQHFLPPLSHLAVVNPVAYLQQQLLASNPLALANVAAYQQQQQLQQFMPALSQLAMVNPAVYLQLLPSSPLAVGNAATYLQQQLLQQI

SEQ ID NO: 240745 - protein, 447 aa, Zea mays
  unsure (1)..(447): unsure at all Xaa locations
  Clone ID: MRT4577_151139C.1.pep
MGKEKSHINIVVIGHVDSGKSTTTGHLIYKLXGIDKRVIERFEKEAAEMNKRSFKYAWVLDKLKAERERGITIDIALWKFETTKYYCTVIDAPGHRDFIKNMITGTSQADCAVLIIDSTTGGFEAGISKDGQTREHALLAFTLGVKQMICCCNKMDATTPKYSKACYDEIVKEVSSYLKKVGYNPDKIAFVPISGFEGDNMIERSTNLDWYKGPTLLEALDQITEPKRPSDKPLRLAFQDVYKIGGIGTVPVGRVETGVIKPGMVVTIGPTGLTTEVKSVEMHHEALQEALPSDNVGFNVKNVAVKDLKRGFVASNSKHDPAKEAASFTSQVIIMTHPGQIGNGYGPVLDCHTSHIAVKFAELITKIDRRSGKELEKEPKFLKNGDAGMVKMIPTKPMVVETFSAYPPLGRLAVRDMRQTVAVGVIKSVEKKDPTGAKVTKAAAKKK

SEQ ID NO: 240746 - protein, 51 aa, Zea mays
  unsure (1)..(51): unsure at all Xaa locations
  Clone ID: MRT4577_15113C.1.pep
MKMGIGLVVCLALVTGNAFXMQMPWPCAGLXGLYRAWARLNTIIGARGLYP

SEQ ID NO: 240747 - protein, 118 aa, Zea mays
  Clone ID: MRT4577_151140C.1.pep
KNPPNRGNFTKGPLELGGTPKGPPQAIFLPPNGGSHGKAPPKSSAYPCVGQGSSPFIPLYGASPPTKEKCGDLSVSWKYYFPCGQPKTFIILTCRCSWSPGMSPPYLYTAAELHCFCS

SEQ ID NO: 240748 - protein, 335 aa, Zea mays
  unsure (1)..(335): unsure at all Xaa locations
  Clone ID: MRT4577_151141C.1.pep
MGKEKIHISIVVIGHVDSGKSTTTGHLIYKLGGIDKRVIERFEKEAAEMNKRSFKYAWVLDKLKAERERGITIDIALWKFETTKYSCTVIDAPGHRDFIKNMITGTSQADCAVLIIDSTTGGFEAGISKDGQTREHALLAFTLGVKQMICCCNKMDATTPKYSKARYEEIVKEVSSYLKKVGYNPDKVPFVPISGFEGDNMIERSTNLDWYKGPTLLEALDQINEPKRPSDKPLRLPPQDVYKXGGIGTVPVGRVETGVIKPGMVVTFGPTGLTTEVKSVEMHHESLLEALPGDNVGFNVKNVAVXDLKRGYVASXSQDDLXRGCNFTXSLIMTP

SEQ ID NO: 240749 - protein, 90 aa, Zea mays
  Clone ID: MRT4577_151142C.1.pep
MLPLWTLSLLLGAVAGKEVCYERLGCFSDDSPWSGITERPLHILPWSPKDVNTRFLLYTNENPNNFQEVAADSSSISGSNFKTNRKTRFI

SEQ ID NO: 240750 - protein, 65 aa, Zea mays
  Clone ID: MRT4577_151143C.1.pep
MAAPAFTTVVVVGALVLLLLLSLAAAAHMSIVSYGARSDEGCGACCTLRVCAAGGAPPTTAGDEE

SEQ ID NO: 240751 - protein, 239 aa, Zea mays
  unsure (1)..(239): unsure at all Xaa locations
  Clone ID: MRT4577_151144C.1.pep
MATKILSLLALLALFASATNASIIPQCSLAPSSIIPQFLPPVTSMAFEHPAVQAYRLQQAIAASVLQQPIAQLQQQSLAHLTIQTIATQQQQQFLPALSHLAMVNPVAYLQQQLLASNPLALANVVANQQQQQLQQFLPALSQLAMVNPAAYLQQQQLLSSSPLAVANAPTYLQQELLQQIVPALTQLAVANPCXAYLQRXLFPFNPTXTMSNSXAVLYNKRQRGYFNPIXAVANPHWS

SEQ ID NO: 240752 - protein, 209 aa, Zea mays
  Clone ID: MRT4577_151145C.1.pep
MAAKRVLLLCGDYMEDYEAMVPFQSLQAYGVTVDAVCPGKKAGDACPTAVHKPIGHQTYAESKGHNFALNASFDEIDAAGYDGLVIPGGRAPEYLAMDEKVLALVRKFSDAKKPIASVCHGQLILAAAGVVRDRTCTAYPAVRPVLVAAGAKWVEADTMKKCVVDGNLVTAAAYDGHPEFISLFVKALGGSVAGADKRILVLLRDYLED

SEQ ID NO: 240753 - protein, 113 aa, Zea mays
  unsure (1)..(113): unsure at all Xaa locations
  Clone ID: MRT4577_151146C.1.pep
PKETNRNARAPRMNARRPAAAPAWTTKRKARSPRSRKTTETESHGNXRRRRESQENRPSTNETPPPTKADSAKGTTKHARQERGQSRRVSSLGRSWNEKKKSKPKAGKKKRAC

SEQ ID NO: 240754 - protein, 98 aa, Zea mays
  unsure (1)..(98): unsure at all Xaa locations
  Clone ID: MRT4577_151147C.1.pep
NNTKSYAVPTHVCFGSLLYPTSVFKCLSIANLFLKYTITNKKVTSIISESATNLSTCPCFIRSGISSACPNSSQVAHSSKIISVPISLXIPLYIRPPG

SEQ ID NO: 240755 - protein, 51 aa, Zea mays
  Clone ID: MRT4577_151148C.1.pep
KSEHELKEGAARMARCGRATAGVEARPGAAERRASAPARADRAVAQGGRGV

SEQ ID NO: 240756 - protein, 106 aa, Zea mays
  Clone ID: MRT4577_151149C.1.pep
RPGADVPTAPAVDPHSPRLEPIRTCHRAPLQRRGPPPEKFHLCRRPVFGAPLGRITWTRGSCPCPRGEAGAFRGAGISRRRWRTTAGDARLRGRLHRRHYRRRDSG

SEQ ID NO: 240757 - protein, 139 aa, Zea mays
  Clone ID: MRT4577_15114C.1.pep
MANSSSGLAVNDECKVKFRELKSRRSFRFIVFRIDDTDMEIKVDRLGGPNQGYGDFTDSLPANECRYAIYDLDFTTIENCQKSKIFFFSWSPDTARTRSKMLYASSKDRFRRELDGIQCEIQATDPSEMSLDIVRSRTN

SEQ ID NO: 240758 - protein, 81 aa, Zea mays
  Clone ID: MRT4577_151150C.1.pep
KTGGGTRQLERSLLLIFFFRGGKLLRGEEDREAHRGGTKNTMEHAFWITTREPGKHGRMEKTRRGALNFYSPLPPGWRGPR

SEQ ID NO: 240759 - protein, 70 aa, Zea mays
  Clone ID: MRT4577_151151C.1.pep
IASVRPFYLVNVDGELFYTHLDKYTRFTYANGSRGPWEYLPINQGPQCESPKHGTWALLKSGSCNLGPSE

SEQ ID NO: 240760 - protein, 59 aa, Zea mays
  Clone ID: MRT4577_151152C.1.pep
YQVPSECAYAKEPSHIYTSNKDNVIKHTRIESNTGRKSTWWVTKRTVLSDRAPMTYPCQ

SEQ ID NO: 240761 - protein, 83 aa, Zea mays
  Clone ID: MRT4577_151153C.1.pep
RYEARIRSRYSQDAASLAISIMEKRLRSSIYAGCDNEPLSRLEIMDRSNISSKCDTQFHGFTGTDGPLGKRMDNSKNSAKLGW

SEQ ID NO: 240762 - protein, 63 aa, Zea mays
  Clone ID: MRT4577_151154C.1.pep
LDNLWRLNFYYLYGGDSSFCCKKKKKKKKKKKKKKKKKKKKKPKKKKKKKKGLSLPGGPFKGA

SEQ ID NO: 240763 - protein, 109 aa, Zea mays
  Clone ID: MRT4577_151155C.1.pep
GGGGKKKRRFLPASRSWAFCRLLVGRVLGAGLSSRRGWGCVAGAVAGARLLFSGGPRSGCCCAVRVRCPCLPRAAVARARLAVAGLLLRGRGSSGGLSSGARFCLTSVG

SEQ ID NO: 240764 - protein, 213 aa, Zea mays
  Clone ID: MRT4577_151156C.1.pep
MTRMSSRAAVVAAAAFLVLAAACPQLASAQPAPGMPPPSPAANNSRLEKAYVALQALKRAITDDPKKLTKNWCGPDVCSYFGVFCAPAPDDPFQRTVASVDLNHGDLAGTLPEELGLLSDLAVFHLNSNRFSGSLPDSLRSLHLLHEIDVSNNQLSGPFPPQLLCLPNVQYVDIRFNNFCGEVPAGIFDKKVDALFINNNHFEFTLPDSFTNS

SEQ ID NO: 240765 - protein, 411 aa, Zea mays
  unsure (1)..(411): unsure at all Xaa locations
  Clone ID: MRT4577_151157C.1.pep
MTRMSLAVSATFFVLAVASAAQPAPSMPPPAVAVNSSRLEKAYVALQALRRAITDDPKKLTENWCGPDVCNYFGVYCAPAPDDPCQRTVASVDLNHGDLAGTLPEELGLLSDLAVFHLNSNRFCGSLPESLRSLHLLHEIDVSNNRLSGPFPSQLLCLPSVQYVDXGERASADRIRLITSTSETSSTATYXLRXTCASRFNNFCGEVPAAIFDKKIDALFINNNHFEFTLPASFTNSTASVIVLANLPRVSGCLPSSIGDMARTLNELILLNSGISSCIPPEIGKLDKLTVLDLSFNSIAGALPDTIGGMRALEQLDVAHNRLAGEIPESICELPHLKNFTYSYNFFCGEPRRCLEVPRVDDRQNCIAGRPDQRPGEECVSFLHQPQVHCDAHGCIAPPPPAVHAPPPPVY

SEQ ID NO: 240766 - protein, 584 aa, Zea mays
  Clone ID: MRT4577_151158C.1.pep
AVRIVDLLNTGSDYIAEVETLQTYQMQTDSERNEVKDMSNRLEACELSTALSKNSSDAMYPIVSKESLLQEMFFSAKTTSGRLHLAKELLKLPTDVLKSFAGSKEGLSTLNFWILDSLGKNATQLLRHCVRLLVLVSTDLVAVRLSGIGKTVKEKVCVHTSRDIRAIARQLVSVWIEVFRREKDSNGGLKLLRRMPSIESSKTKSKDLQSGKPTLRVPNGTLDNNKVVSQRQRTRFASSQSPPKINKKYDNKEMKLETVTAAMSDGKLLSQKQQHGIESKVEECGIPMSEEEAAAFAAAEAARAAAIAAAQAYASVEAEISVPRELPKIPSFQSFVMRDHHLDESDARKRTLKDNFGRLECISENDSKNGEVKDLPENTKYADGDSLKMSHDNFTQQSHSNETACLANAQDHSTDTVVVDGRFTRAWVDTDTICIDGVKDPLAIERWQAQAMEADKEFYSRIRIPDEDDSSSQKHTCRSSASQGADSKPASERQSRGVEHIKQGLVNFIASLLMPLYRGKKIDREGYKTIMRKSVNKIIDTCSEGEKSMTTLEFLDDKRKIKIESFVGKMVDKHLHVVSKSAKP

SEQ ID NO: 240767 - protein, 171 aa, Zea mays
  unsure (1)..(171): unsure at all Xaa locations
  Clone ID: MRT4577_151159C.1.pep
TNRSSLHPKSGPTLHHHSARDAACAEQEQQPVSTELHDPEACCLEMTDDHSSIHRSMIDLLATLHSTSTMPAENSEKTNTAMYLTITKLSSIDLLSIVTFLDTAHTICPMRQMTYDSHPTVXSYIHALQTASNTNISDGLQRNYHDLIDRLLNYRRDNAIMLMTDRQHNPS

SEQ ID NO: 240768 - protein, 136 aa, Zea mays
  unsure (1)..(136): unsure at all Xaa locations
  Clone ID: MRT4577_15115C.1.pep
CLSIAIMSYPILNTNESDSIRMIVPHKQLGRKSDXEAFSHAIYLNTFIEHITILDRVMIFLSVFSXRYVLCSYTHNVAPRGKFIGFVSAEAKTDNPQSELKLEIDLLGYVDEIFYDTYDRYQRVNEPSLNKSFVLT

SEQ ID NO: 240769 - protein, 223 aa, Zea mays
  Clone ID: MRT4577_151160C.1.pep
MATKILALLALLALLVSATNAFIIPQCSLAPSAIIPQFLPPVTSMGFEHPAVQAYRLQLALAASALQQPIAQLQQQSLAHLTLQTIATQQQQHFLPSLSHLAVVNPVAYLQQQLLASNPLALANVAAYQQQQQLQQFMPALSQLAMVNPAVYLQLLSSSPLAVGNAPTYLQQQLLQQIVPALTHQLAMANPATYLQQLLPFNQLAVSNSAAYLQQRQQLLKSI

SEQ ID NO: 240770 - protein, 250 aa, Zea mays
  unsure (1)..(250): unsure at all Xaa locations
  Clone ID: MRT4577_151161C.1.pep
MATKILALLALLALLVSATNAFIIPQCSLAPSAIIPQFLPPVTSMGFEHPAVQAYRLQLALAASALQQPIAQLQQQSLAHLTLQTIATQQQQQQFLPSLSHLAVVNPVTYLQQQLLASNPLALANVAAYQQQQQLQQFMPVLSQLAMVNPAVYLQLLSSSPLAVGNAPTYLQQQLLQQIVPALTQLVVAKPGAYLQQVLPFNQLGGSHSVXYLHRDTVLYSLAGVXPLVATSCDAKTLLANTSFFCEPCL

SEQ ID NO: 240771 - protein, 45 aa, Zea mays
  Clone ID: MRT4577_151162C.1.pep
ATENVRKDKPSLCSFKSSKKTQLGEGHEAKYHLLWHEVDENAKIN

SEQ ID NO: 240772 - protein, 118 aa, Zea mays
  Clone ID: MRT4577_151163C.1.pep
TGGAGRGPPPPPPPGETGGPKTAPGGGPPFAPWGKKPGDPKIRLGPPLFFSPGRSPLHFPPINWSALCRFFLSAPVDPPGVEFSSDVPFFPRNVTQHNNFTEESNISKKCHKQNKKTK

SEQ ID NO: 240773 - protein, 397 aa, Zea mays
  Clone ID: MRT4577_151164C.1.pep
MGKEKTHINIVVIGHVDSGKSTTTGHLIYKLGGIDKRVIERFEKEAAEMNKRSFKYAWVLDKLKAERERGITIDIALWKFETTKYYCTVIDAPGHRDFIKNMITGTSQADCAVLIIDSTTGGFEAGISKDGQTREHALLAFTLGVKQMICCCNKMDATTPKYSKARYEEIVKEVSSYLKKVGYNPDKVPFVPISGFEGDNMIERSTNLDWYKGPTLLEALDQINEPKRPSDKPLRLPLQDVYKIGGIGTVPVGRVETGVIKPGMVVTFGPTGLTTEVKSVEMHHESLLEALPGDNVGFNVKNVAVKDLKRGFVASNSKDDPAKEAANFTSQVIIMNHPGQIGNGYAPVLDCHTSHIAVKFAELVTKIDRRSGKELEALPKFLKNGDAGIVKMIPTKP

SEQ ID NO: 240774 - protein, 447 aa, Zea mays
  Clone ID: MRT4577_151165C.1.pep
MGKEKSHINIVVIGHVDSGKSTTTGHLIYKLGGIDKRVIERFEKEAAEMNKRSFKYAWVLDKLKAERERGITIDIALWKFETTKYYCTVIDAPGHRDFIKNMITGTSQADCAVLIIDSTTGGFEAGISKDGQTREHALLAFTLGVKQMICCCNKMDATTPKYSKARYDEIVKEVSSYLKKVGYNPDKIAFVPISGFEGDNMIERSTNLDWYKGPTLLEALDQITEPKRPSDKPLRLPLQDVYKIGGIGTVPVGRVETGVIKPGMVVTFGPTGLTTEVKSVEMHHEALQEALPGDNVGFNVKNVAVKDLKRGFVASNSKDDPAKEAASFTSQVIIMNHPGQIGNGYAPVLDCHTSHIAVKFAELITKIDRRSGKELEKEPKFLKNGDAGMVKMIPTKPMVVETFSQYPPLGRFAVRDMRQTVAVGVIKSVEKKDPTGAKVTKAAAKKK

SEQ ID NO: 240775 - protein, 106 aa, Zea mays
  unsure (1)..(106): unsure at all Xaa locations
  Clone ID: MRT4577_151166C.1.pep
RPGQPKAPKPHHEKPKKPETPKGPSYEXPKAPKPHHEKPKKPETPKKPEYNQPKAPKPHHETPKAPKPHHETPKKPSYEQPKPKQEQPKKPSYEAPKQPAYEAPHY

SEQ ID NO: 240776 - protein, 447 aa, Zea mays; identical to SEQ ID NO: 240710
  Clone ID: MRT4577_151167C.1.pep

SEQ ID NO: 240777 - protein, 119 aa, Zea mays
  Clone ID: MRT4577_151168C.1.pep
QFEGQIPDTLWASPATVITLANNHFTGAVPAAYEFGAGAGAGAGGRVREVLFLNNNLTGCVPEALGFLPSMQVLDLSYNALSGHLPGTLSCLSGIEVLNLAHNAGRDLTAKKRGSLTAV

SEQ ID NO: 240778 - protein, 77 aa, Zea mays
  unsure (1)..(77): unsure at all Xaa locations
  Clone ID: MRT4577_151169C.1.pep
FIDYPINLSAXDSXXNGXXSSXNIXIICRHGHSSYILSAIGLTXLLPIIWXPADGSFXGNLRPYYVINASRSXRGSR

SEQ ID NO: 240779 - protein, 139 aa, Zea mays
  Clone ID: MRT4577_15116C.1.pep
MANSSSGLAVSDECKVKFRDLKARRSFRFIVFRIDDKDMEIKVDRLGEPNQGYGDFTDSLPADECRYAIYDLDFTTVENCQKSKIFFFSWSPDTARTRSKMLYASSKDRFRRELDGIQCEIQATDPSEMSLDIVKSRTN

SEQ ID NO: 240780 - protein, 143 aa, Zea mays
  Clone ID: MRT4577_151170C.1.pep
WRRQGHHRQVSETGCKNSADLGLLIILESKIPLEEQSPAAAASRALHLVLAEFWLALLVDDVLPLVIQQRLQGTHGLTSLDTEDRANSHHSATAEAGRRAVHSIKLESMGKWPTPCGRKPGTGIEEPPPRAVDIAPTSETAIA

SEQ ID NO: 240781 - protein, 267 aa, Zea mays
  unsure (1)..(267): unsure at all Xaa locations
  Clone ID: MRT4577_151171C.1.pep
MATKILSLFALLALFVSATNAFIIPQCSLAPSAIIPQFLPPVTSMGFEHPAVQXAYRLQQALAASVLQQPIAQLQQQSLAHLTIQTXATQQQQQFLPALSQLAVVNPVAYLQQQLLASNPLALANIVAYQQQQQLQQFLPALSQLAMVNPAAYLQQQQLISSSPLAVVNAPTYLQQQLLQQIVPALTQLAVANPAAYLQQLLPFNQLTVSNSAAYLQQRQQLLNPLAVANPLVAAFLQQQQLLPYNQFSLMNPALLWQQPIVGGAIF

SEQ ID NO: 240782 - protein, 257 aa, Zea mays
  unsure (1)..(257): unsure at all Xaa locations
  Clone ID: MRT4577_151172C.1.pep
MGKEKTHINIVVIGHVDSGKSTTTGHLIYKLGGIDKRVIERFEKEAAEMNKRSFKYAWVLDKLKAERERGITIDIALWKFETTKYYCTVIDAPGHRDFIKNMITGTSQADCAVLIIDSTTGGFEAGISKDGQTREHALLAFTLGVKQMICCCNKMDATTPKYSKARYDEIVKEVSSYLKKVGYNPDKIHFVPISGFEGDNMIERSTNLDWYKGPTLLEALDLINEAKXRPLFFFFFFXLQDAHKXXGXGTAPAGRAE

SEQ ID NO: 240783 - protein, 131 aa, Zea mays
  Clone ID: MRT4577_151173C.1.pep
MKKLCLEPTSFTVKAEGIAKNAPPEFQKTKLVPSYRGSSFLDPKGRGGSTGYDNAVALPAGGRGDEEELQKENIKNAASSTGNITLSVTKSNPETGEVIGVFESVQPSDTDLGAKAPKDVKIQGVWYAQLE

SEQ ID NO: 240784 - protein, 448 aa, Zea mays
  unsure (1)..(448): unsure at all Xaa locations
  Clone ID: MRT4577_151174C.1.pep
MGKEKSHINIVVIGHVDSGKSTTTGHLIYKLGGIDKRVIERFEKEAAEMNKRSFKYAWVLDKLKAERERGITIDIALWKFETTKYYCTVIDAPGHRDFIKNMITGTSQADCAVLIIDSTTGGFEAGISKDGQTREHALLAFTLGVKQMICCCNKMDATTPKYSKARYDEIVKEVSSYLKKXVGYNPDKIAFVPISGFEGDNMIERSTNLDWYKGPTLLEALDQITEPKRPSDKPLRLPLQDVYKIGGIGTVPVGRVETGVIKPGMVVTFGPTGLTTEVKSVEMHHEALQEALPGDNVGFNVKNVAVKDLKRGYVASNSKDDPAKEAASFTSQVIIMNHPGQIGNGYAPVLDCHTSHIAVKFAELITKIDRRSGKELEKEPKFLKNGDAGMVKMIPTKPMVVETFSQYPPLGRFAVRDMRQTVAVGVIKSVEKKDPTGAKVTKAAIKKK

SEQ ID NO: 240785 - protein, 267 aa, Zea mays
  Clone ID: MRT4577_151175C.1.pep
MAASLQAAATLMQPAKIGGRAHSASLPSRPSSHLARAFGVDAGAARITCSLQSDIRDVASKCVDAAKLAGFALATSALLVSGASAEGTPRRLTYDQIQSKTYMEVKGTGTANQCPTIDGGVESFPFKAGKYQMKKLCLEPTSFTVKAEGIAKNAPPEFQKTKLMTFLVPSYRGSSFLDPKGRGGSTGYDNAVALPAGGRGDEEELQKENIKNAASSTGNITLSVTKSNPETGEVIGVFESVQPSDTDLGAKAPKDVKIQGVWYAQLE

SEQ ID NO: 240786 - protein, 447 aa, Zea mays; identical to SEQ ID NO: 240743
  Clone ID: MRT4577_151176C.1.pep

SEQ ID NO: 240787 - protein, 237 aa, Zea mays
  unsure (1)..(237): unsure at all Xaa locations
  Clone ID: MRT4577_151177C.1.pep
DAGRTRSASSEGTPTXLTYDENQRERFLEVKGTATANHCPTIDGGVDSFPYKPGKYQMKKLCLEPTSFTAKAEGIAKNAPPEFQKTKLMTRLTYTLDEIEGPLEVASDGTLKFEEKDGIDYAAVTVQLPGGERVPFLVPSYRGSSFLDPKGRGGSTGYDNAVALPAGGRGDEEELQKENIKNAASSTGNITLSVTKSNPDTGEVIGVFESVQPSDTDLGAKAPKDVKIQGVWYAQLE

SEQ ID NO: 240788 - protein, 105 aa, Zea mays
  Clone ID: MRT4577_151178C.1.pep
HSVGCGAPSGWFVLPAGPGSSLPAWHPVEVGCLCLFFGAWCRALLFARGLCVWLVLSLVGLSLLRVLGVRGFCVWAAPPFLFEAPCVGGGRRREALVPRYSPGGP

SEQ ID NO: 240789 - protein, 160 aa, Zea mays
  unsure (1)..(160): unsure at all Xaa locations
  Clone ID: MRT4577_151179C.1.pep
APATTFAHLXATTVLSRGISELGIYPAVDPLDSKSRMLDPRVVGQEHYDVATRVQQILQEYKSLQDIIAILGMDELSEADKLTVERARKIQRFLSQPFTVAQVFTGIEGKLVDLKETINSFKAILNGEGDNLPEGAFYMVGDFASAKAKGEKILAELEGQ

SEQ ID NO: 240790 - protein, 409 aa, Zea mays
  unsure (1)..(409): unsure at all Xaa locations
  Clone ID: MRT4577_15117C.1.pep
SFSPNLTLYSRRTVASAAAATAASPSPAGGHGRRPLRYAVLGAGFAGLSVAWHLLKHSPRDSRVSVDIYDENGVGGGASGVSGGLLHPYSPKVKLLWRGAEFWKESMDLLRSAEQANGTSVSNTTSQDDNLIWRRGIVRPPTTEKAAAILLEVLLDXLCRYAKFTCHWHXINPKKYLQALFSACQNLADEASSLPSEQKEIKLYKQHVDNLHLLAGNYDSVIICLGAKACSLPELANKLPLRTCRGVIAEFQLPSTTVEEYDSQSASILSDAWLAFQGPRTVSIGSSWQWISENDSSTVSDEESLTAIEELLPKASGVYPRISKWDFVRARAGIRAMPPLTTNGSLPLLGCLDDLLGNKSNCTFWLVGGLGARGLLYHGLVGKLTAKAAISCNENIIPSEFTCWNIVKP

SEQ ID NO: 240791 - protein, 110 aa, Zea mays
  unsure (1)..(110): unsure at all Xaa locations
  Clone ID: MRT4577_151180C.1.pep
MAASLQAAATLMQPAKIGGRAPFASLPSRPSSQLACRAFGVDAGAARITCSLQDVASRCVDAAKLAGFALATSALLVSGASAQGTPNRLTYDXIHRKTYMEVKVTSTTNQ

SEQ ID NO: 240792 - protein, 448 aa, Zea mays
  unsure (1)..(448): unsure at all Xaa locations
  Clone ID: MRT4577_151181C.1.pep
MGKEKTHINIVVIGHVDSGKSTTTGHLIYKLGGIDKRVIERFEKEAAEMNKRSFKYAWVLDKLKAERERGITIDIALWKFETTKYYCTVIDAPGHRDFIKNMITGTSQADCAVLIIDSTTGGFEAGISKDGQTREHALLAFTLGVKQMICCCNKMDATTPKYSKARYDEIVKXEVSSYLKKVGYNPDKIHFVPISGFEGDNMIERSTNLDWYKGPTLLEALDLINEPKRPSDKPLRLPLQDVYKIGGIGTVPVGRVETGIIKPGMVVTFGPSGLTTEVKSVEMHHEALQEALPGDNVGFNVKNVAVKDLKRGYVASNSKDDPAKEAASFTSQVIIMNHPGQIGNGYAPVLDCHTSHIAVKFAELITKIDRRSGKELEKEPKFLKNGDAGMVKMVPTKPMVVETFSEYPPLGRFAVRDMRQTVAVGVIKSVEKKDPTGAKVTKAAAKKK

SEQ ID NO: 240793 - protein, 335 aa, Zea mays
  Clone ID: MRT4577_151182C.1.pep
MAASLQVQAAATLMQPAKIGGRAPSASLPSSRPSSQLARAFGVDAGAARITCSLQSDVRDVASKCVNAAKLAGFALATSALLVSGASAEGTPKRLTYDEIQSKTYLEVKGTGTANQCPTIDGGVDSFPFKPGKYQMKKLCLEPTSFTVKAEGIAKNAPPEFQKTKLMTRLTYTLDEIEGPLEVASDGTLKFEEKDGIDYAAVTVQLPGGERVPFLFTVKQLVATGKPDSFGGPFLVPSYRGSSFLDPKGRGGSTGYDNAVALPAGGRGDEEELQKENIKNAASSTGNITLSVTKSNPDTGEVIGVFESVQPSDTDLGAKAPKDVKIQGVWYAQLE

SEQ ID NO: 240794 - protein, 336 aa, Zea mays
  unsure (1)..(336): unsure at all Xaa locations
  Clone ID: MRT4577_151183C.1.pep
MAASLQVQAAATLMQPAKIGGRAPFASLPSSRPSSQLAXGAFGVDAGAARITCSLQSDVRDVASRCVDDAKLAGFALATSALLVSGASAEGTPKRLTYDEIQSKTYMEVKGTGTANQCPTIDGGVESFPFKAGKYQMKKLCLEPTSFTVKAEGIAKNAPPEFQKTKLMTRLTYTLDEIEGPLEVGSDGTLKFEEKDGIDYAAVTVQLPGGERVPFLFTVKQLVATGKPESFGGPFLVPSYRGSSFLDPKGRGGSTGYDNAVALPAGGRGDEEELQKENIKNAASSTGNITLSVTKSNPETGEVIGVFESVQPSDTDLGAKAPKDVKIQGVWYAQLE

SEQ ID NO: 240795 - protein, 81 aa, Zea mays
  Clone ID: MRT4577_151184C.1.pep
TWGIRSGAGAFKLKPKRAPGSKTRLVPGSGGPVHIFFQHKQPPNLGCPQRPLGPPLLGGQKFFFSLTYWGLNMGRDRATPR

SEQ ID NO: 240796 - protein, 240 aa, Zea mays
  unsure (1)..(240): unsure at all Xaa locations
  Clone ID: MRT4577_151185C.1.pep
MAASLQAAATLMQPAKIGGRAPFASLPSRPSSQLACRAFGVDAGAARITCSLQDVASRCVDAAKLAGFALATSALLVSGASAEGTPKRLTYDEIQSKTYMXEVKGTGTANQCPTIDGGVESFPFKAGKYQMKKLCLEPTSFTVKAEGIAKNAPPEFQKTKLMTRLTYTLDEIEXPLEVGSDGTLKFEEKDGIDYAAVTVQLPGGERVPFLFTVKQLVATGKSESFRGTFLVPSYRGSSIL

SEQ ID NO: 240797 - protein, 49 aa, Zea mays
  Clone ID: MRT4577_151186C.1.pep
PDVAEAAQSGELTPSLRGFLLSIVSGRVVLIGIVGAVVGVSNFDPVKRA

SEQ ID NO: 240798 - protein, 160 aa, Zea mays
  Clone ID: MRT4577_151187C.1.pep
GGRWGLPRFPPFSQDNGLVPFVDPEFLLLGGPGFEGPFWVAPKVWAHPFSPLGGDPFLFVKNSRFFFFARPSPGIPPPPREIRVSCSWLSPCSVPFPSLEALFLLFCPLAPAWCSGRSRPCVPVPPLFWACCRSSFIPAGLPPAKFWVRPVCLPAGFGEN

SEQ ID NO: 240799 - protein, 97 aa, Zea mays
  unsure (1)..(97): unsure at all Xaa locations
  Clone ID: MRT4577_151188C.1.pep
IFARXKFLCVMYXCRCMIWARFLSCQCHCQPCFLAARSGQSGHPGQLLGFGTSVDRWTAPGGGRFPSRRDTPNPSTRTFSNLCSVPQTISAASTGKR

SEQ ID NO: 240800 - protein, 74 aa, Zea mays
  Clone ID: MRT4577_151189C.1.pep
NCHLKCANSWEGRNEPGPFAIKPHGEKGKLRNPNRIPATPSFYPPPPVCKTSGHLKKIKVHPYLKLIRSHASCI

SEQ ID NO: 240801 - protein, 64 aa, Zea mays
  Clone ID: MRT4577_15118C.1.pep
SIFTHLGGRINTQFTRLPFDGLLSNHIPRTTLGSLPLVFHIFKQCGRLPYKPLPISSGGHGGVG

SEQ ID NO: 240802 - protein, 91 aa, Zea mays
  Clone ID: MRT4577_151190C.1.pep
TYPSTARQSIVHTKDMVGAIPNPIAGRACFPANLVMLLTRRRVPKVVILAIYHHSGQLSYMHIEGPLSPIPTGVTTDWPMVYHCMTAITVA

SEQ ID NO: 240803 - protein, 90 aa, Zea mays
  Clone ID: MRT4577_151191C.1.pep
QSSMLQSLKLAMMHRTAYLLDDTQGLEMFCQPMYDMYLLYHSMVFDHRAVMRVLYNIQLTTCMRDLVFLCKRIPRLLCSEQMQFFSDSAY

SEQ ID NO: 240804 - protein, 89 aa, Zea mays
  Clone ID: MRT4577_151192C.1.pep
YINLTFYCKMDKIPEVTNSNSSLHAHDLGFCVLSIATSKSRKAPAPHAQKCNLKSLRSSAQTVINKPVFSLHPEPPGKSGAQTQSKAPF

SEQ ID NO: 240805 - protein, 92 aa, Zea mays
  unsure (1)..(92): unsure at all Xaa locations
  Clone ID: MRT4577_151193C.1.pep
MTNPTXNAGMVGKYITRIGASSRKQIKMMEVSQHYQYCCEFCGKFAVKREAVGMSGCKDXXKVKAGGAYTMNTDSAVTDRSTITLLTEQTEA

SEQ ID NO: 240806 - protein, 109 aa, Zea mays
  Clone ID: MRT4577_151194C.1.pep
FLGPPPPVEGGGGPLKLFPLGAGRRICPGGVLPLKGVPPGGANLGPGFGGGLPDGVAMEAVTMGEHVGLPPPRRGPLFPGVEPRLPGPLLRGPPCSHLGHFFPGGGLGP

SEQ ID NO: 240807 - protein, 173 aa, Zea mays
  unsure (1)..(173): unsure at all Xaa locations
  Clone ID: MRT4577_151195C.1.pep
MLGAARRSGCVLGQLMQTLRPAASAATAARSYSATPKEMTVREALNSALDEEMSADPSVFLMGEEVGEYQGAYKITKGLLDKYGPDRVLDTPITEAGFTGIGVGAAYQGLRPVVEFMTFNFSMQAIDHIINSAAKSNYMSAGQISVPIVFRGPNGGXAAGVGAQHSQCYAAWY

SEQ ID NO: 240808 - protein, 119 aa, Zea mays
  unsure (1)..(119): unsure at all Xaa locations
  Clone ID: MRT4577_151196C.1.pep
GKPTGSTIGLIPPTLGVNTRDKKRNPPRASHWGQKKIPFSQRPPSPLYLIWGKGGGGPGNPPQGGEPPPRHKNHHVWGGWRTNPRPVGIGPTPXAGLPIGRPAPPRGQPRPGGHGGGVG

SEQ ID NO: 240809 - protein, 97 aa, Zea mays
  Clone ID: MRT4577_151197C.1.pep
GNLPVGVKHRVRLKSALKAYLRRDLGRGPCRRSQRPGDTTRRGASRQGRSRTPPPQPAGFCLVGRLRRSKRCACRVGSSGIPASSILAGAGRIYNGN

SEQ ID NO: 240810 - protein, 84 aa, Zea mays
  Clone ID: MRT4577_151198C.1.pep
ICCFSRCNITLTLIARILKSYSFAAVFFFFFFFFFFFFFFFFSSNSHVRGAEIFYYNVYPRTCKFSYYKVSIFASLRPTLDGRV

SEQ ID NO: 240811 - protein, 76 aa, Zea mays
  Clone ID: MRT4577_151199C.1.pep
SLLYLAVDIFFFSFVLFSQEKQLVDFAMRHMYQASNRLPFTKQTLITTRALHADEQARKRQDLNNMCRKLIFGKRL

SEQ ID NO: 240812 - protein, 166 aa, Zea mays
  Clone ID: MRT4577_15119C.1.pep
MLSPPSFAPSHIVPNLTLYSRRTVASAAAATAASPSPAGGHGRRPLRYAVLGAGFAGLSVAWHLLKHSPRDSRVSVDIYDENGVGGGASGVSGGLLHPYSPKVKLLWRGAEFWKESMDLLRSAEQANGTSVSNTTSQDDNLIWSRGIVRPPTTEKAAAILLEVLLD

SEQ ID NO: 240813 - protein, 608 aa, Zea mays
  Clone ID: MRT4577_1511C.1.pep
MDGAPKILEKSSHECMYSWYFTREELEKFSPSRKDGITENKESEIRHLYCSFIRDVGIRLKLPQMTLATAIMLCHRFYLHQSLAKNGWQTIATVCVFLASKVEDTPCPLDYVVRVSYETMYRRDTAAAQRIRQKDVFEKQKALILIGERLLLTTIRFDFNIQHPYRPLLDAMQNLGINQKEVKQVAWNFVNDWLKTTLCLQYKPQYIAAGSLYLAAKLHNIKLPLHGAHVWWHQFDVAPKPLEAVIHQMMELAALKKLMPARPNPVKLKETLCEAKLSLSNSPDSVLNQSSLLISSSSPDIGEPSDKVQVDSCQYLISSHMGDCRVSGPDSSSLNTCANRNVSCKAHDEESLDQALIIKHDSGMMPSSNQTSLYATVGTEGSAELKQDVSHCNDFNIRVNDESLNQVLRNQHGDAIPLPDVVSLDAKVDKERSWCVEPLIANSDCCTDSVNVDSLCTDQRLADAPSGPTADAPSMLAEEESYPFSAKLENIDVARIKGLLMKRKSRREIQDRAIASDGLSEEDWIERELESGIVTKQEANCAAISDELSDEAWIERELESGIVVGPRNEQAITFDGLSEDDWIERELESGIIVEPAPATKKRKLESSC

SEQ ID NO: 240814 - protein, 407 aa, Zea mays
  Clone ID: MRT4577_151200C.1.pep
MLMPPPPCPPTLPHLLRHLRGRMLTTQLLDHLIRSTSSSPFPSLSFSVFILLLRSSLRPSHFTFPFLARAAARLSSASLASALHAHPLRLGLLPADLHVANSLVHMYAACALPDHANRVFDEIPRPNLVSWNALLDGYAKCRDLTAARKVFARMPQRDVVSWSAMIDGCVKCGEHREALALFEMMENAAARSAEEEDGEGGARANDVTMVSVLGACAQLGDLERGRRAHRCLRERGFALNLRLATSLVDMYAKCGAISEAMEVFWAVPVESTDVLIWNAVIGGLAVHGMATKSVEIFLEMQRAGVAPDEITYLCLLSACAHGGLVDEAWEFFRSLEAQGLRPHVEHYACLVDVLGRAGRLEEVYGVVKSMPMKPSVSVLGALLNACHLHGWVELGEVLGRQLVQLQP

SEQ ID NO: 240815 - protein, 40 aa, Zea mays
  Clone ID: MRT4577_151201C.1.pep
FSNIMQLLGKSTKIDYLMEDIVDKLRNRFAGVDDAIQREH

SEQ ID NO: 240816 - protein, 87 aa, Zea mays
  Clone ID: MRT4577_151202C.1.pep
GGNPYLSFNLFFHFITKYKDGKFTLLSDVQLLCDKLCFWSTETESNMLPLFKSGVLPGTGPFIHTSTRTPQWTRPGPRRPWGAMPIP

SEQ ID NO: 240817 - protein, 447 aa, Zea mays
  Clone ID: MRT4577_151203C.1.pep
MGKEKSHINIVVIGHVDSGKSTTTGHLIYKLGGIDKRVIERFEKEAAEMNKRSFKYAWVLDKLKAERERGITIDIALWKFETTKYYCTVIDAPGHRDFIKNMITGTSQADCAVLIIDSTTGGFEAGISKDGQTREHALLAFTLGVKQMICCCNKMDATTPKYSKARYDEIVKEVSSYLKKVGYNPDKIAFVPISGFEGDNMIERSTNLDWYKGPTLLEALDQITEPKRPSDKPLRLPLQDVYKIGGIGTVPVGRVETGVIKPGMVVTFGPTGLTTEVKSVEMHHEALQEALPGDNVGFNVKNVAVKDIKRGYVASNSKDDPAKEAASFTSQVIIMNHPGQIGNGYAPVLDCHTSHIAVKFAELITKIDRRSGKELEKEPKFLKNGDAGMVKMIPTKPMVVETFSQYPPLGRFAVRDMRQTVAVGVIKSVEKKDPTGAKVTKAAAKKK

SEQ ID NO: 240818 - protein, 232 aa, Zea mays
  unsure (1)..(232): unsure at all Xaa locations
  Clone ID: MRT4577_151204C.1.pep
DCQGSPPVPXMGLEPPTWPGHLAQPALAASVLQQPIAQLQQQSLPHLTIQAITTQQQQQFLPALXHLAMVNPAAYLQEQLLASNPLALANVVANQQQQQLQQFLPTLSQLAMVNPAAYVQQQQLLSSSPLAVGNAPTYLQQQLLQQIVPALTQLAVANPVAYLQQLLPFNQLTLSNSAAYLQQRQQLLNPLVVANPLVAAFLQQQQLLPYNQFSLMNPVLSRQQPIVGGAIF

SEQ ID NO: 240819 - protein, 299 aa, Zea mays
  Clone ID: MRT4577_151205C.1.pep
MAEHLASIFGTEKDRVNCPFYFKIGACRHGDRCSRLHNRPTISPTLVLANMYQRPDMITPGVDAQGQPIDPEKMQEHFEDFYEDIYEELGKFGEIENLNVCDNLADHMIGNVYVQFREEEQAAAAYNALQGRFYSGRPIIVEYSPVTDFREATCRQFEENSCNRGGYCNFMHVKQIGRDLRRKLYGRSASRRYHGRSRSRSPPPQRRGHRDRDDYRGGGGGGRGRGSRYDRYDDGAGRGGRHDRYDDGAGRGGRHDRYDDGGRRRHGSPPRRARSPVRESSEERRAKIEQWNREREGKQ

SEQ ID NO: 240820 - protein, 266 aa, Zea mays
  Clone ID: MRT4577_151206C.1.pep
MATKILSLLALLALFASATNAFIIPQCSLAPSSIITQFLPPVTSMGFEHPAVQAYRLQQAIAASVLQQPISQLQQQSLAHLTIQTIATQQQQQFLPALSHLAMVNPAAYLQQQLLASNPLALANVVANQPQQQLQQFLPALSQLAMVNPAAYLQQQQLLSSSPLAVANAPTYLQQQLLQQIVPALTQLVVANPAAYLQQLLPFNQLTMSNSAAYLQQRQQLLNPLAVANPLVAAFLQQQQLLPYNQFSLINPVLSRQQPIVGGAIF

SEQ ID NO: 240821 - protein, 181 aa, Zea mays
  Clone ID: MRT4577_151207C.1.pep
LRPGEPFHSMARTVVLREFGFGGVYRDPRASEAYPFRKSRPPSPAPAPATATPAAASPIRHATNGMLPRERAWSLCFACSAAVKIIMPATELPPVDSPESDDPLPPPHDSPGSPRPWISLSPKGRSSACFYLEITSCVWSTVFDGAYIEVCNELVFGCCQTDSYLMMLTSRYAINWCLVVA

SEQ ID NO: 240822 - protein, 266 aa, Zea mays
  Clone ID: MRT4577_151208C.1.pep
MATKILALLALLALFVSATNAFIIPQCSLAPSAIIPQFLRPVTSMGFEHLAVQAYRLQQALAASVLQQPINQLQQQSLAHLTIQTIATQQQQQFLPALSQLDVVNPVAYLQQQVLASNPLALANVAAYQQQQQLQQFLPALSQLAMVNPAAYLQQQQLLSSSPLVVGNAPTYLQQQLLQQIVPALTQLAVANPAAYLQQLLPFNQLTVSNSAAYLQQRQQLLNPLAVPNPLVTAFLQQQQLLPYSQFSLMNPALSWQQPIVGGAIF

SEQ ID NO: 240823 - protein, 70 aa, Zea mays
  Clone ID: MRT4577_151209C.1.pep
IAFFLHFEFAWPQYFAGSPLIKNLEQQCCHMEVYGKNYPSLSILTHRIVFFGCFALKGWGKKLHFVVSSL

SEQ ID NO: 240824 - protein, 230 aa, Zea mays
  unsure (1)..(230): unsure at all Xaa locations
  Clone ID: MRT4577_15120C.1.pep
VPLGTSRRAGAHHQRSFSLECPPISSNPSPPPQAKXPKGAAMGSRYEVEVTVGSASNLKNVNWRNGDLRPYAVLWVDDGPKCSTRVDPDNGEDPVWDEKVVVPVLPASAARLGDAVLHIDVVHAAGDDADAGVKPLVGSARLPLRDVLDDAGGVGGARVSRTLRLKRPSGRPQGRLETRIAVREAAPPPRYYDPNPYPAPAYXTPAPPPPATRNTRRRPPSPGIPHTPPP

SEQ ID NO: 240825 - protein, 267 aa, Zea mays
  Clone ID: MRT4577_151210C.1.pep
MASKTLSLLALLALFVSATNAFIIPQCSLAPSAIIPQFLPPVTSMGFEHPAVQAYRLQQALAASVLEQPIAQLQQQSLAHLTIQTIATQQQQALSHLAVVNPIAYLQQQLLASNPLALANVAAYQQQQQLQQFLPALSQLAMVNPIAYLQQQQLLSSSPLAMGNAPTYLQQQLLQQQLLQQIVPALTQLAVANPAAYLQQLLPFNQLTVSNSAAYLQQRQQLLNPLAVANPLVAAFLQQQQLLPYNQFSLMNPALSWQQPIVGGAIF

SEQ ID NO: 240826 - protein, 149 aa, Zea mays
  Clone ID: MRT4577_151211C.1.pep
LHTAEVEPVIHLKTLTGEATGRHTPYVPPSLSFQTRMRCSSCNTRTSATCQTQWHSARAHVCEQLNYPVEAAGGDYPRGCTASHRLIQQRDAKTPREALLQYKVYKGQVQNTQGGQQLFLHSYSEEALALELAALEKMQTYREAGAYNA

SEQ ID NO: 240827 - protein, 488 aa, Zea mays
  Clone ID: MRT4577_151212C.1.pep
MNKSLSCYYWRRLQRIRRPRRLPSAPPFRPLSLASSISPPTMGKEKSHINIVVIGHVDSGKSTTTGHLIYKLGGIDKRVIERFEKEAAEMNKRSFKYAWVLDKLKAERERGITIDIALWKFETTKYYCTVIDAPGHRDFIKNMITGTSQADCAVLIIDSTTGGFEAGISKDGQTREHALLAFTLGVKQMICCCNKMDATTPKYSKARYDEIVKEVSSYLKKVGYNPDKIAFVPISGFEGDNMIERSTNLDWYKGPTLLEALDQITEPKRPSDKPLRLPLQDVYKIGGIGTVPVGRVETGVIKPGMVVTFGPTGLTTEVKSVEMHHEALQEALPGDNVGFNVKNVAVKDLKRGFVASNSKDDPAKEAASFTSQVIIMNHPGQIGNGYAPVLDCHTSHIAVKFAELITKIDRRSGKELEKEPKFLKNGDAGMVKMIPTKPMVVETFSAYPPLGRFAVRDMRQTVAVGVIKSVEKKDPTGAKVTKAAAKKK

SEQ ID NO: 240828 - protein, 83 aa, Zea mays
  unsure (1)..(83): unsure at all Xaa locations
  Clone ID: MRT4577_151213C.1.pep
MARLVLSECCGLAPLRRLRAGRGAIAAPSPPALSAAPRRXPAXAXIHRDWALRXSAPTRLASAAXEEDKTSAAPGQEEGAAGG

SEQ ID NO: 240829 - protein, 102 aa, Zea mays
  Clone ID: MRT4577_151214C.1.pep
QVEISSKDGKKVPMKLEVSCGVQTTSSIVEQEVHSWFVGVESWLQQPQPRLASHHHQPISARQEAATMYKLQPEEDHIVCSKPDITSSGPIKVQDIHGPFKA

SEQ ID NO: 240830 - protein, 50 aa, Zea mays
  Clone ID: MRT4577_151215C.1.pep
SAAWNLQCMVTSYRGRSSWNSWQHSQALGGKCLAAYSTTEHEYRCHPGSV

SEQ ID NO: 240831 - protein, 134 aa, Zea mays
  unsure (1)..(134): unsure at all Xaa locations
  Clone ID: MRT4577_151216C.1.pep
PPPGRKKKGANRKKGPHKGDPQKKPPPXGEPXPPPPPVKPKXGGATQKPPXGPPKEGGRRGANPHPPPPENGXLGRPPYKGQPPASPKKAAGKGPPXKQSGGPKRKKSQAATGGEAKGVPQKRPPPPTRPLKLG

SEQ ID NO: 240832 - protein, 110 aa, Zea mays
  Clone ID: MRT4577_151217C.1.pep
YYGHLWIKKAVVLLMLGGVEKNLKNGTHLRGDINMMMVGDPSVAKSQLLRAVMNIAPLAISTTGRGSSGVGLTAAVTSDQETGERRLEAGAMVLADRGVVCIDEFDKMND

SEQ ID NO: 240833 - protein, 768 aa, Zea mays
  Clone ID: MRT4577_151218C.1.pep
MEINEEAMAAHKRAFLDFLDQDVGKGVYMQAVRDMVQNKRHRLIIGMDDLRNHNLDLARRVIRTPGEYMQPASDAVSEVARNLDPKFLKEGERVMVGFSGPFGFHRVTPRDLMSSFIGTMVCVEGIVTKCSLVRPKVVKSVHFCPVTGDFLSREYRDITSFVGLPTGSVYPTRDDNGNLLVTEYGMCEYKDHQTLSMQEVPENSAPGQLPRTVDVIVEDDLVDCCKPGDRVSIVGVYKALPGKSKGSVSGVFRTVLIANNVSLLNKEANAPVYTREDLKRMKEISRRNDTFDLLGNSLAPSIYGHLWIKKAVVLLMLGGVEKNLKNGTHLRGDINMMMVGDPSVAKSQLLRAVMNIAPLAISTTGRGSSGVGLTAAVTSDQETGERRLEAGAMVLADRGVVCIDEFDKMNDQDRVAIHEVMEQQTVTIAKAGIHASLNARCSVIAAANPIYGTYDRSLTPTKNIGLPDSLLSRFDLLFIVLDQMDPEIDRQISEHVARMHRYCTDDGGARSLDKEGYAEEDDGDANAAIFVKYDRMLHGQDRRRGKKSKQDRLTVKFLKKYIHYAKNLIQPRLTDEASDHIATSYAELRDGSANAKSGGGTLPITARTLETIIRLSTAHAKMKLRHEVLKSDVEAALQVLNFAIYHKELTEMEEREQREMEMKQQADHDAGATGGTVDGHGSSGNDPMDVDVGSNDQNVSAERIEAFEALLGQHVLANHIDQMSIDEIEQMVNRESTAPYTRSQVEFILERMQDANRVMIRDGVVRII

SEQ ID NO: 240834 - protein, 94 aa, Zea mays
  Clone ID: MRT4577_151219C.1.pep
GTHDPASAFTLIRVLVVPSTQPAPSQRASAMGSEYIQHRRHPDHGHSNSDHIHAGDLSCVCVRPNFAINPPSVWPVEARYKRSARTRAEFRAYV

SEQ ID NO: 240835 - protein, 116 aa, Zea mays
  unsure (1)..(116): unsure at all Xaa locations
  Clone ID: MRT4577_15121C.1.pep
AWRTRVSPVKDLTTFSGPFIVVKVSHSSEEGLSLSVQPLVRIHNKSDFPLELRFQRPNKASEEAAFVTVRSGDMVDESTGVFDAMDLSGGPKRALMSLALGXNYTLSWHDVGSHFA

SEQ ID NO: 240836 - protein, 37 aa, Zea mays
  unsure (1)..(37): unsure at all Xaa locations
  Clone ID: MRT4577_151220C.1.pep
YXXLAQAFXEASEXAXQSKXXNTMXCNGXXAALXGXS

SEQ ID NO: 240837 - protein, 492 aa, Zea mays
  unsure (1)..(492): unsure at all Xaa locations
  Clone ID: MRT4577_151221C.1.pep
MTSLPERGESPVPPLDSLRQDSAVTVLAAAAVASSSAGSDRKEDSGSRQPKASILSGVFSPPFAIFEGQQQGSSSPACDARSTKSSSGSYGLSRILRRFVGSGSMWRLLGCGRVLTSSDVWFLGKCYKVSPEEEESGDSESDSGHAAFLEDFSSRIWITYRKGFDAISDSKLTSDVNWGCMVRSSQMLVAQALIFHHLGRSWRKPSEKPYDPDYIRVLHLFGDSEACAFSIHNLLQAGRNYGLAAGSWLGPYAMCRAWQTLIRTNREQADAVDGKENFPMALYVVSGDEDGERGGAPVVCIDVAAQLCSDFNKGPSTWSPILLLIXPLVLGLDKINPRYIPLLKETFMFPQSLGILGGKPGTSTYIAGVQDDRALYLDPHEVQMTVDIALDNLEADTSSYHCSVVRALALEQIDPSLAIGFYCRDKDDFDDFCSRASELAEKANGAPLFTVXSQSSHRNKCXQDDGLGCSGSSMANDDDLDGSGEAEEWQIL

SEQ ID NO: 240838 - protein, 182 aa, Zea mays
  unsure (1)..(182): unsure at all Xaa locations
  Clone ID: MRT4577_151222C.1.pep
TFMFPQSLGILGXGKPGTSTYIAGVQDDRALYLDPHEVQMTVDIALDNLEADTSSYHCRYVCRCGMKSDEWNCRFVXMHAQMMGSDSCVWTCTALSEPXLEQIDPSLAIGFYCRDKDDFDDFCSRASELAEKANGAPLFTVXSQSSHRNKCXQDDGLGCSGSSMANDDDLDGSGEAEEWQIL

SEQ ID NO: 240839 - protein, 38 aa, Zea mays
  Clone ID: MRT4577_151223C.1.pep
DFFEHQSLLFSPCVQHEGFVFHVDECKPFMWHTRWKDK

SEQ ID NO: 240840 - protein, 147 aa, Zea mays
  Clone ID: MRT4577_151224C.1.pep
NVLEVKKNPNWICPVCRGICNCSLCRTKKGWFPTGSAYRKAIGLGYKSVAHFLIATHRASSVNSSSVDNNKLPSAKSETSCISDHANESPEDGETTSKAKQNKATRRRVRKSSDGDNDSRSGSVVTSDCQDDQANKDAGCVTPSTKP

SEQ ID NO: 240841 - protein, 156 aa, Zea mays
  Clone ID: MRT4577_151225C.1.pep
MISAKRVAHLAKKWHRMAAQRRQRLTWGGAGAAAKQAGESCSSVASKGHCAVYTADWARFEVPLACLSTLVFRELLEMSQEEFGFSGGDGSGRITLPCDTAVMEYAMCLLRRSASAELEQAFLSTVAGNVVPVRQPRGAVRRSLPAGCCLVLFSVV

SEQ ID NO: 240842 - protein, 413 aa, Zea mays
  unsure (1)..(413): unsure at all Xaa locations
  Clone ID: MRT4577_151227C.1.pep
MTGSSKPFGFSSAMPLAAVLLPLLVLGASSVCQGQGAASHNITAILAAYPEFTDFSAALVSTGAAAEIDRRSTVTVLAVDNAVMARLKAQKLQLDDLQRVIYLHVLLDYFDAAKLGSIQGGFAQAASLYQASGKAQGSDGIVNITVFPDGRVAAFTPSGPSNRLPTAFYQRSIKEQPYYIAVLQVRDLIWSPAPADGVQAPPPAPQPDAAPGLTDLLSKNGCGGFASLLAATADAVTKYDSSAAGLTVFCPADEAVEAFNSTFKNLTADAQLALLLYHGVAEHYSAQSLKAINGDVSTLASDGSKNNNGYNLTIRADGDTVKISSASASAATVTKTLLDKAPLSVYLIDAVLLPRXSLTTTRDTLRPPLRRPPRLHMHLHLPLRRSRRRLPLYRSRRRRRLHMHPHPHLPLLR

SEQ ID NO: 240843 - protein, 398 aa, Zea mays
  Clone ID: MRT4577_151228C.1.pep
MAIHPRTTGGRRQPLPLPLKGALLAAIAVATALSVLFVLSFTDTLTFTDTLPYLGFRPRDVDKRDGNRRYLYWGSRVDCPGKHCGSCAGLGHQESSLRCALEEALFLDRVLVMPAKMCLSSVHNTKGVLQSSNATSQQRWETGSCAMESLYDIDLISRTVPVILDNPRSWYEIISRSTKLGEDGLVVHVQGVSRAELKQNSNYSGALLINRTASPLAWFMECKDRTKRSSVMLPYTFLPTMATRKLRDAANKMKEILGDYDAIHVRRGDLLKNRKDRFGVERSLHPHLDRDTRPEFIKKRIAKWIRPGHTLFISSNERTPGFFSSLSDKYRLAYSSNFSSILNPIIKNNYQLFMVERLIMQGARTFVKTMKEFDEDLALCDDPKKNTKDWREPVYTDD

SEQ ID NO: 240844 - protein, 115 aa, Zea mays
  Clone ID: MRT4577_151229C.1.pep
ILFFFHFCLYITCSFFLFVVFILPFFMVKKKRGGSVNTTKTPRGVCFYDKKKFFSSKQEWYHNNLSAGEANIFLATLWGAFKNSTTPFTLDVRGGAPPLRGGTLLITLASIGTFF

SEQ ID NO: 240845 - protein, 277 aa, Zea mays
  Clone ID: MRT4577_15122C.1.pep
MVQEELPQAWWFDSHNLARPSPWLNSTLSELDDKTKQMLKLIDQDADSFAQRAEMYYKKRPVLVDMLGDLYRTHRSLAEQYDLLKHGSGTRHTVFGLSSCTQSRSSTNGRTTPRSSCSASTYDSESEVDDPGQEEYEAEQLARAGMAKTESPPPPPEQQQQEQREQAEQQMRAEIERLKAQNAALQKAAEESAAALRAELAGKDEEKREVIRQLASSMDVMRQENLTLREHISRGSSKRSSAPRAGAAFDLRKVARGLFSARLFTAHCRPTGPIVAL

SEQ ID NO: 240846 - protein, 96 aa, Zea mays
  Clone ID: MRT4577_151230C.1.pep
KKKRFAKSNNVKKNLGGPGTKIKKLGPTKPYLETTSTHFLIKQLDLFKPPPNFENKNALQKFTGGGLRTLWPGIGLTLMEAYHLGKGGMFFLGGLF

SEQ ID NO: 240847 - protein, 49 aa, Zea mays
  Clone ID: MRT4577_151231C.1.pep
MNRNPRVTISRRKWRKAHFTVPSSDRRMLMYTALSTELRHKHNECCITI

SEQ ID NO: 240848 - protein, 84 aa, Zea mays
  Clone ID: MRT4577_151232C.1.pep
IGRFISSAGTPACPGAKLILRASHLILVGSPFMHPRLYACCILVCMLCGFLTPQHKASRVSACPESTQLGLKVRVCLFTSGLIA

SEQ ID NO: 240849 - protein, 69 aa, Zea mays
  Clone ID: MRT4577_151233C.1.pep
AVSAFEHAGFSSLDVVALHMCYCWFLWFLFIFPHNRHGNPWLCQPDPCCKACSAKRVSNSVISLAASSK

SEQ ID NO: 240850 - protein, 55 aa, Zea mays
  Clone ID: MRT4577_151234C.1.pep
LFYIYTYIQLGDRPSTNTLTEKNLPLPNLINLHHIHLSTASLLSNKPAPIALPYK

SEQ ID NO: 240851 - protein, 72 aa, Zea mays
  Clone ID: MRT4577_151235C.1.pep
NAVIRCWLGQNVRVCRVQCVGQVVRIVNRRSGCVQSVASGPQAINTPCTANKENDGKAIEKQTTSVRLAFGP

SEQ ID NO: 240852 - protein, 125 aa, Zea mays
  unsure (1)..(125): unsure at all Xaa locations
  Clone ID: MRT4577_151236C.1.pep
SFFIFPPGPVVFFSISPRKGPGWGLLGGPFRILLRAPRFSPGGLAFRWPFTAQVDCFFQLCDLFPNTGGGGLIWGPGPPWWPGPPVFGPFSCTHGRFSFLKKPRRFPHMSPRRLVXXXWGDNKRV

SEQ ID NO: 240853 - protein, 90 aa, Zea mays
  unsure (1)..(90): unsure at all Xaa locations
  Clone ID: MRT4577_151237C.1.pep
GKVKMIMASNLPDVLDPSGLGSXPLGRNIEISLPNQPSRMEVFKIHSTCIAQHWEIDYXTILKLSEGFNGADLSNLFTETGMAAIRAERD

SEQ ID NO: 240854 - protein, 68 aa, Zea mays
  Clone ID: MRT4577_151238C.1.pep
VRFIRLRTVARVTRSRKATHQVVSVSCNAFNGRMGQSQLYLWLLSRCIPVISFCWLTLLLWPAFLVKR

SEQ ID NO: 240855 - protein, 243 aa, Zea mays
  unsure (1)..(243): unsure at all Xaa locations
  Clone ID: MRT4577_151239C.1.pep
FLRCFVNACPSKWVSWLHLAEFWYNSSPHSAIGRSSFVALYGYEPRHFGIQPDTVVASSDLDTXLRDREAMTALIKQHLARSRARMRRQADKHHSERRFQEGDMVWVKLQPYIQSSLAPRANQKLAHRFFGPYKVIARIGSVAYKFDLPASSXLHPVFHVSQLKKSAXPGMFRSLQLFHLTSLICXVPESFLRRRLLSHGLRPHHQVLVKWSQWPESLATWEDEDLLRRQFPSAPAWGQASAQ

SEQ ID NO: 240856 - protein, 57 aa, Zea mays
  Clone ID: MRT4577_15123C.1.pep
YLHTLFQARPQFKNRLVVYVDHYVSRYSAFYFPWLIGSSHGCSYNSYSFPAKKCALL

SEQ ID NO: 240857 - protein, 81 aa, Zea mays
  Clone ID: MRT4577_151240C.1.pep
AYIEAILPLISLRRGASSSLKQVREQAYNSLASPQRILEAEQALVACGVGHPPLTLQASGHALQLNYSVSRSPSRSASPVA

SEQ ID NO: 240858 - protein, 106 aa, Zea mays
  Clone ID: MRT4577_151241C.1.pep
LPLVRPLLFFFVFLLVGKPRTILLVALPSLKQLNTILPSERFYLLAHFLWTKNAIHTHCQCLLPSHFCTPSMQLMSSLALIYTAYIIFRAYYVMAFTVFNISIPAH

SEQ ID NO: 240859 - protein, 696 aa, Zea mays
  Clone ID: MRT4577_151242C.1.pep
TNYQLSEACIGALIKLGKDRPNCKLDMVKAGIIEHALDMILDVPVSVSSSIAELLRILTNNSGIAKSSAAAKMVEPLFLLLRRPDVTMWDQHSALQALVNILEKPQSLAALKLTPSQIIEPLISFLESPSQAIQQLGTEVLSHLLEQEHFQQDITTKNAVVPLVQLAGIGILSLQQTAVKALENISQSWPKAVADAGGIFELSKVIVQDDPQPSQALWESAALVLCNVLRYNSDNYVKVSMAVLVRLLNSTMESTVTIALSALLVQEKSSSRCAVAMAEAGAVRALLELLKSHRCEESAARLLEALINNSRVRETKVAKYAIAPLAQYLLDPQSKNQSAKFLVTLALGDIFQHEALARASDSVSACRALVSLLEDQPTDDMTTVAICALQSLVMHSRTNRRAVAEAGGILVVQELLLSPNVDISGQAALLMKYLFSNHTLQEYVSNELIRSLTAALERELLSTSTINEVILKTIYVIFSNFKKVRFSEAATLCIPHLVCALKDGNEAAQESVLDTLCLLKESWPQMNEDIAKAQSLISAEAIPVLQMLMKTCPPSFHERADSLLHCLPGCLTVTIIRGNNLKQTMGGTNAFCCLQIGNGPPRQTKVVNHSMCPAWNEGFTWLFDVAPKGQKLYIICKSKNTFGKSTLGRVTIQIDKVVTEGVYSGFFSLSHDGGKDGSRTLEIEIVWSNRPSNDCM

SEQ ID NO: 240860 - protein, 107 aa, Zea mays
  unsure (1)..(107): unsure at all Xaa locations
  Clone ID: MRT4577_151243C.1.pep
PPHYEVDIGGKKKVPAPKKVAIEGQKXGAYFLGTKKXHPVQRNIYKRPQARAPAPFIKKPFGQGRLLACLFAPPWQSGRIYGSLLEGKEPGFFLKNPPPKRGKGVLS

SEQ ID NO: 240861 - protein, 73 aa, Zea mays
  Clone ID: MRT4577_151244C.1.pep
KRRPSSALNLELMANTTTSSPSSKTGNYECQQMPNMTMEENAPAGYVPNAIDDEECPPMHHPINCGRVHPSAH

SEQ ID NO: 240862 - protein, 74 aa, Zea mays
  Clone ID: MRT4577_151245C.1.pep
VMVTSSTLSLSSHSPVINMKYTLACRCDDSYVQLASPLQVKILLNLKCCKMDGCNISDMVSKEYHKPMNKKPSH

SEQ ID NO: 240863 - protein, 103 aa, Zea mays
  Clone ID: MRT4577_151246C.1.pep
LPAWLFAVWGGNVIPPLCQGNFPVAGVFTPPVCSSVVGCWPRLGGPFSFVISLVGWPPRLFGAFECLWVFCPCRCSCVFCSGGSPAPWWLCSSTTPYFWAPAA

SEQ ID NO: 240864 - protein, 60 aa, Zea mays
  Clone ID: MRT4577_151247C.1.pep
FLGPRPVCAHDDHVRRGSCSGAPYTAHSPATPAWSSPTLDWPSLLSSEQTCMLAASAASI

SEQ ID NO: 240865 - protein, 42 aa, Zea mays
  Clone ID: MRT4577_151248C.1.pep
LKIGSKNKPTFNFSIPSYSLKHLTTFSLPFYIFFYFIILSSF

SEQ ID NO: 240866 - protein, 175 aa, Zea mays
  Clone ID: MRT4577_151249C.1.pep
HQQEAFLILNELIVALKSKKESRKLAYDVLLATSTNLRSPESNSADSDLQRLFTMVMGYLSSPSPHIVSGAIAALSLLIYSDANFCMEVPNLIESVLVLLQHKAIEVTKAALGFVKVLVTSLQPQKLLNLQADIISGILPWSLVTKHHFKGKVVLILEILIRKCGFDAIDLNTPD

SEQ ID NO: 240867 - protein, 88 aa, Zea mays
  Clone ID: MRT4577_15124C.1.pep
VGRRNPLQQRGLHLTTCLEHYPFHEGRASPLPARRTGADGATKPARCGHETQEQEAEAIWNTRRDPLELQELRLKDTEICTTRRTRAT

SEQ ID NO: 240868 - protein, 124 aa, Zea mays
  unsure (1)..(124): unsure at all Xaa locations
  Clone ID: MRT4577_151250C.1.pep
AFTTFLSXSGVGKLVRRAVXVDHEPSVVDEVRAGTVRQLLRPXEALISXRRMQQSCWECGRYYNGKQXVQLYIDGIRTLVCDSVGVQAXVVITAAGGGQALSTGSIVAKRLSVELAKKSRFGSA

SEQ ID NO: 240869 - protein, 49 aa, Zea mays
  Clone ID: MRT4577_151251C.1.pep
SWSGYFAPQALRLIFPFWSGVLCCKGTGILFRSGMMAIISLRPAINPSL

SEQ ID NO: 240870 - protein, 59 aa, Zea mays
  Clone ID: MRT4577_151252C.1.pep
LWFYKFFPQMVNKINPPVFSFLKKKKKKKKKKKKKKKKKKQNTKKKKKNPKGRPPTSKL

SEQ ID NO: 240871 - protein, 101 aa, Zea mays
  Clone ID: MRT4577_151253C.1.pep
KKKTKGVKKYPLGGMGTLYKHIEQVGGVYNIQNLDQPRAKLTFDQKRNRPPLHNQAIIFLNPSYRETNFPRRDAPFFNRLYLKGPLGYNHSRECLHRIPAV

SEQ ID NO: 240872 - protein, 65 aa, Zea mays
  unsure (1)..(65): unsure at all Xaa locations
  Clone ID: MRT4577_151254C.1.pep
RRSGAGWMMHNGNEKDAGAGDPLQRERGPVITVDRGKYQNLSIPLPLPQXSTGPFATGSRLPRIL

SEQ ID NO: 240873 - protein, 78 aa, Zea mays
  Clone ID: MRT4577_151255C.1.pep
ININKKKRGLRYKESNLTYPSLQHIIFFIGDLKLNKLAPFLQRNNWKNLVVTKINPFAEHHLLPSWCNTKKARTNCLS

SEQ ID NO: 240874 - protein, 110 aa, Zea mays
  Clone ID: MRT4577_151256C.1.pep
KQIYRVAYTRAFKRAVLFQGLKKFAPPQGGAPKRRAPPWAPIKRGGSSLLTGRHTRPGLNYICFRADDYDDDHNDLSQLFWGAGKKNKPIHGHFLKGLFWKACGKFRTFK

SEQ ID NO: 240875 - protein, 55 aa, Zea mays
  Clone ID: MRT4577_151257C.1.pep
EPLPKRHGNWTKGTTNAACLAISIPIQHHVMLEKALKTHVSRIDNKKCPAPTDLT

SEQ ID NO: 240876 - protein, 48 aa, Zea mays
  Clone ID: MRT4577_151258C.1.pep
KNFCIRRLSAYMFPTVARHPRIVRHAPVEVFVPVREKIPYSPVALEPN

SEQ ID NO: 240877 - protein, 67 aa, Zea mays
  Clone ID: MRT4577_151259C.1.pep
LLHVGVLSGPAHMQISRVQDVAAVVEEVSLPKNVYASTVFKGPVFLEIVQNAHTVYEQLELAGESHA

SEQ ID NO: 240878 - protein, 74 aa, Zea mays
  unsure (1)..(74): unsure at all Xaa locations
  Clone ID: MRT4577_15125C.1.pep
TLNCCGLDXSMDQFISDICPKKDVLETFTVKSCPDAIKEVFDNKFHIIGAPGIGIAVVMIFGMIFSMILCCAIR

SEQ ID NO: 240879 - protein, 96 aa, Zea mays
  unsure (1)..(96): unsure at all Xaa locations
  Clone ID: MRT4577_151260C.1.pep
PTNPNQKTPPTLNNNQSPTSIQPKPHTNXNNKPNIHSPKTRYKPTPPTTITIPKTLTPPPHKIKXPPTSPTNTXILLPTTHFSQIPHTYNTXQNYH

SEQ ID NO: 240880 - protein, 32 aa, Zea mays
  Clone ID: MRT4577_151261C.1.pep
KDMFTMDYRYPLSAFQAFAICLSSFDTKLACE

SEQ ID NO: 240881 - protein, 414 aa, Zea mays
  Clone ID: MRT4577_151262C.1.pep
MSQTGEAQVPLLQTQEADAEWSSKPRRIALFVEPSPFAYISGYKNRFQNFIKHLREMGDEVLVVTTHKGAPEEFHGAKVIGSWSFPCPLYQNVPLSLALSPRIFSEVNKFKPDIIHATSPGIMVLGALAIAKMISVPMVMSYHTHLPAYIPRYNLNWLLEPTWSFIRCLHRSADLTLVPSLAIAEDFETAKVVPANRIRLWNKGVDSESFHTKYRRHEMRVRLSGGEPEKPLVIHVGRFGREKNLDFLKRVMERLPGARIAFVGDGPYRAELEKMFMGMPAVFTGMLQGEELSQAYASADVFAMPSESETLGQVVLESMASGVPVVAARAGGIPDIIPKDKEGKTSFLFTPGDLDECVRKIEQVLSSKDLRETVGKAAREEMEKCDWRAASKKIRNEHYSTAISYWRKKMDKSN

SEQ ID NO: 240882 - protein, 70 aa, Zea mays
  Clone ID: MRT4577_151263C.1.pep
VLVVTTHKGAPEEFHGAKVIGSWSFPCPLYQNVPLSLALSPRILSEVNKFKPDIIHATSPGIMVLGALAI

SEQ ID NO: 240883 - protein, 64 aa, Zea mays
  Clone ID: MRT4577_151264C.1.pep
SLCEWSETNNSRSTNTFHIYLCLYLCWHNPRLLHIICWHTARGRPPGTLTYSLTLTLDSTRPTR

SEQ ID NO: 240884 - protein, 534 aa, Zea mays
  unsure (1)..(534): unsure at all Xaa locations
  Clone ID: MRT4577_151265C.1.pep
MSPQPAPDLAEDKERDTNVFIEAAPGSPAKVAEGDGHGHGSPPTSPVAWFRMLARELHWSFVFGVVATYGISQGLGGGISRVASDYYWKDVQRVQPSVAQVYQGVTSIPWMVKPLWGLLTDVLPVAGYRRRPYFILAGFIGVIAMLILALYSKLHALFALLALMTGSASVAIADVTIDACVAENSIVYPHLAADMISLNGFCSSVGGLIGFSISGFLVHAIGAQGALGLLTIPSALVILSGTLLKEVHIPNFPYEQAHKKFVEASXKMLTALKCPEVWRPCVYMYISLALSVDIQEGMFFWYTDQSAGLSFHEGFIGFMFAIGSVGSLVGVILYQNILKDHSFRSLLFSSQLLLSLAGMLDLILVLRLNLKMGIPDYYFAVIDEGVSKMINRIKWMPLLVLSSKLCPTGIEGTFYALLMSIDNIGSLTGSWVGGLLLHLLRITRTEFKNLWAAILIRNMMRLLPLALLFLVPRSDPNSTLLPSDLLNEGDDDEAQRVENVELTSLPANRNSCDGKSLHDGERDDDEASLLANRS

SEQ ID NO: 240885 - protein, 89 aa, Zea mays
  Clone ID: MRT4577_151266C.1.pep
LATAATVPTAISAASVRSAYLEHVKERHQLLVLRIVGRGPGCVVAAAASLVRRRRLGIVLATVSRSPSHESLLSLWLDASWLVAQPGRA

SEQ ID NO: 240886 - protein, 162 aa, Zea mays
  unsure (1)..(162): unsure at all Xaa locations
  Clone ID: MRT4577_151267C.1.pep
MSSSRRPRGRQLRWPEGDGHGHGSPPTSPVAWFRMLARELHWSFVFGVVATYGISQGLGGGISRVASDYYWKDVQRVQPXSVAQVYQGVTSIPWMVKPLWGLLTDVFPVAGYRRRPYFILAGFIGVIAMLILALHSKLHALFALXALMTGSASVAIADVTID

SEQ ID NO: 240887 - protein, 57 aa, Zea mays
  Clone ID: MRT4577_151268C.1.pep
DPGIFLCRHICCHVVSMYFLGLRGLSLQGSRPLQIWRPCAWLTVCVPRVHARRGAWL

SEQ ID NO: 240888 - protein, 71 aa, Zea mays
  unsure (1)..(71): unsure at all Xaa locations
  Clone ID: MRT4577_151269C.1.pep
QESFESRTWCXFTCAFGTFLWRLHHHNLRLVFYKSLPLLVFPSPPSSLFKPLSSLPVRSPPSPLLFLMTLL

SEQ ID NO: 240889 - protein, 108 aa, Zea mays
  unsure (1)..(108): unsure at all Xaa locations
  Clone ID: MRT4577_15126C.1.pep
LGRYKKQVVNGRRVPQPLGLGFNLANLGGLGDGSDENPEPVEPKVGGPRLGGCGQPPEVGVRLGRQNPLFGFLDGKADPLRPRRLSKDDMVCRRRHHGLFPWSSGPXF

SEQ ID NO: 240890 - protein, 224 aa, Zea mays
  unsure (1)..(224): unsure at all Xaa locations
  Clone ID: MRT4577_151270C.1.pep
MSVSNKTVFTLNNGVKMPGVGFGTFANEGAKGETYKAVIAALKTGYRHLDCAWFYLNEGEVGQAVRDFLAEDNGVKREDLFICTKVWNHLHEPEEVKWSFENSLKNFGLDYIDLFLVHWPIAAEKGDDYQPKIGPDGKYVIKKDLTENPEPTWRAMEEIYASGKARAIGVSNWTIDGLKQLMAFAKVKPAVNQIEIHPFLXNEXLVKFCLENDILPAAXSPLGS

SEQ ID NO: 240891 - protein, 153 aa, Zea mays
  unsure (1)..(153): unsure at all Xaa locations
  Clone ID: MRT4577_151271C.1.pep
MSSTALSTAAVRTFGXTGDXSGVDTHRXEKRRLSNRESARGAGLRKQKNLDELEQEVARLXADNARVGARAVDIAYYDTRVEQENTVLRARADELGDRLRFCNEVLRLGEELSGDDMDIHEXEMPEDDPVLHTWYLAYPDAVMPIGAQDMLHY

SEQ ID NO: 240892 - protein, 39 aa, Zea mays
  Clone ID: MRT4577_151272C.1.pep
RRRLYPPRKAYFLLFIRRTLSLIVAPCNEGQAPSYCSEY

SEQ ID NO: 240893 - protein, 128 aa, Zea mays
  unsure (1)..(128): unsure at all Xaa locations
  Clone ID: MRT4577_151273C.1.pep
MVASMISSSALGEAPHGLPPLVRRASSFAVVCSXKKIXTDKPYGIGGGLTVDVYLNERKAKGKGAYQFVDKYVANDDGYRPIYKEDDWSPXGDYYVDGTTGLLSXADTLAGILDDEPLTPYKCNAHCV

SEQ ID NO: 240894 - protein, 77 aa, Zea mays
  Clone ID: MRT4577_151274C.1.pep
SSISSRWPCSRKHCSPKQSLVVMPSHQCCKNSSTSSSAPCLTSSAPGLREHETAIPLILQPIPFMMMTPCLRMDSSH

SEQ ID NO: 240895 - protein, 64 aa, Zea mays
  Clone ID: MRT4577_151275C.1.pep
LPDTSRWQARNGYGSAHLITPAACTIFVHQKPTGSWLGVSSWDYHRATCYATGALRMCMHTEHN

SEQ ID NO: 240896 - protein, 143 aa, Zea mays
  unsure (1)..(143): unsure at all Xaa locations
  Clone ID: MRT4577_151276C.1.pep
AQRQQLCVKKHGGKSHTNQFVPWXAVGAVNXTRSVQQHQLPSSKKLVAKPQQFLPCNQVAALNXPAYWQQQQLVPYXSQLAGVNRSPFVIQRQWCRFCQPVVLSAGTFSQGQQCQPFNQRGLTNREAFNKQPVIGGASLSLNK

SEQ ID NO: 240897 - protein, 101 aa, Zea mays
  Clone ID: MRT4577_151277C.1.pep
MPSRLRKTRKLRGHVSHGHGRIGKHRKHPGGRGNAGGMHHHRINFDKYHPGYFGKVGMRHYHLKRNQSFCPTVNLDKLWTLVSEQTRVNAAKNKNGVAPII

SEQ ID NO: 240898 - protein, 63 aa, Zea mays
  unsure (1)..(63): unsure at all Xaa locations
  Clone ID: MRT4577_151278C.1.pep
QRAFPGVKVKRLERGPPPIFSMLGFLVQAILSGRGPFKNFFETFFYPVKKXRWXFATNLVPGN

SEQ ID NO: 240899 - protein, 69 aa, Zea mays
  Clone ID: MRT4577_151279C.1.pep
FGSNSNQSYFNDSCSEHRSRESFISDILLEDYSMKWLPRRYGLKCAFVQLIDGLGKQHYVLIKTVYVHI

SEQ ID NO: 240900 - protein, 103 aa, Zea mays
  Clone ID: MRT4577_15127C.1.pep
TVDQVLSEVSRVLVPGGRFISMTSAGPHFRIRHYAQPCYDWSLRHTTYSSGFHFHFYVMHKGRELTVSQLALGAQILSPPSPPAPPCFLQDSDNEDFLSAIQL

SEQ ID NO: 240901 - protein, 151 aa, Zea mays
  unsure (1)..(151): unsure at all Xaa locations
  Clone ID: MRT4577_151280C.1.pep
MPPPRPHRALDLRRPIGLRRHPRTTEARKKRRDEEEXNYIEATPNGPKNWGRIKPKRANCSAGRMQNHIDLARERVXLVPDLHLLNHSYRPAQAFIRNRGHDIMARVNGDAGRLAINGTEYDLTQMHWDSHYEHTVRRRNNAVKLHMTHES

SEQ ID NO: 240902 - protein, 92 aa, Zea mays
  Clone ID: MRT4577_151281C.1.pep
GTTTRTVLPPDPSTLRANCSPGTNSPLFGSLSDCHGYAVGTLSSPHTHPRGILPPGFKKRTVRTRSSRSVRLSRHLGCLTVLHTPTNVLSGY

SEQ ID NO: 240903 - protein, 69 aa, Zea mays
  Clone ID: MRT4577_151282C.1.pep
LPAHAFTDRHMSIHGVRLHKGICQRYAPCKVYFVLFCDTFVRRITRKLNVILSSTYRLFSPIFLLAHTK

SEQ ID NO: 240904 - protein, 46 aa, Zea mays
  unsure (1)..(46): unsure at all Xaa locations
  Clone ID: MRT4577_151283C.1.pep
IFFALFLNXAFTISYLPITITDFPLNNERNPLEYSTTYYILSDITT

SEQ ID NO: 240905 - protein, 41 aa, Zea mays
  Clone ID: MRT4577_151284C.1.pep
LLPYQGIILPLSEKPFIGFEPMTYALPWHYSTTELKGLFIQ

SEQ ID NO: 240906 - protein, 77 aa, Zea mays
  Clone ID: MRT4577_151285C.1.pep
FGSIEQTAVVGSLTCNLYAHTTLLVKIVNKIVYRSQCLLTQNSVACNVVVYTHVARGISPQIVKCYHSGTNKRVCCP

SEQ ID NO: 240907 - protein, 55 aa, Zea mays
  Clone ID: MRT4577_151286C.1.pep
APLMSWVLAATPIQSAALYSALLSVSFVSFSSLFGHFPRLALNSCLSLGLLMSAI

SEQ ID NO: 240908 - protein, 70 aa, Zea mays
  Clone ID: MRT4577_151287C.1.pep
PPVSQPVLASTPLVLSNNVPPPPPRSTFHSLTYSLSLSLSLVTLLVLGRSYDTIIFLERFSNFPRVPIQI

SEQ ID NO: 240909 - protein, 51 aa, Zea mays
  unsure (1)..(51): unsure at all Xaa locations
  Clone ID: MRT4577_151288C.1.pep
XISPPLCILFYYHYSNTSHLHLPFITLHSKSSMPPINNYISXYXIFSXFXX

SEQ ID NO: 240910 - protein, 106 aa, Zea mays
  unsure (1)..(106): unsure at all Xaa locations
  Clone ID: MRT4577_151289C.1.pep
RPGPELIAGPTSPQVGGRPKETXQRLPSKAGQKKTRHKNKGTRDEQAERXKNARKQGKPAGNQGTEEGQAPRGGHTKPSQKRTTGNQGATKNGGGGTPRRGPGPRP

SEQ ID NO: 240911 - protein, 90 aa, Zea mays
  Clone ID: MRT4577_15128C.1.pep
RPAGADLGENWSRGTVRRGRGMGELQGGRPSREGRQANPIKGGTTSSTWVEGEHGARSSTRETLPIAMGRENAGRWSREGEGDRCCWKGP

SEQ ID NO: 240912 - protein, 73 aa, Zea mays
  Clone ID: MRT4577_151290C.1.pep
ISIEISCVTTEWPMSCLFAHGLKTHRLVLLNQFRVYLRATVLDGIETATIPYYTNLNNSDGGPFNPLALQQAL

SEQ ID NO: 240913 - protein, 53 aa, Zea mays
  Clone ID: MRT4577_151291C.1.pep
SYTGLKSPPVAFLIPIHNTGNSPYTLDHSNKIEEPAGFTSHLPWLWVYPQNTL

SEQ ID NO: 240914 - protein, 721 aa, Zea mays
  unsure (1)..(721): unsure at all Xaa locations
  Clone ID: MRT4577_151292C.1.pep
MAAAAAASMVVVREVLGLDVVDEVDQPIIDYIANVLADEDFDFGAPEGHGIFEALGELLIDSGCVSDQEHCLQVCSKLCEKFGKHGLVKPKQAMRSLVTPLRMNAGMDDDVAPKKPQPEVFDGPLLSSRDKAKIERRKRKEERQREVQYQMHVAEMETLRAGMPPVYVNHSNDGGPAVRDIHMENFSVTVGGRDLIQEATITLAFGRHYGLVGRNGTGKTSFLRAMALHAIDGIPKNCQILHVEQEVVGDDTTALQCVLNADVERVQLLQEEARLVQQQKDLEIEAEFGQSSDKGKDGFDKDSISKRLEEIYKRLELIDADAAEARAASILAGLSFTPEMQRKRTKQFSGGWRMRIALARALFIEPDLLLLDEPTNHLDLHAVLWLETYLLKWPKTFIVVSHAREFLNTVVTDILHLHGRKLHAYKGDYDTFERTREEHLKNQQKAFETNEKARQHMQTFIDKFRYNAKRASLVQSRIKALERMEHVDAVVSDPDYKFEFPTPDDRPGPPIISFSDASFGYPGGPTLFKNLNFGIDLDSRIAMVGPNGIGKSTILKLISGXDLQPTSGTVFRSPKVRMAVFNQHHVDGLDLTVNPLLYMMKCYPGVPEQKLRAHLGSFGVSGSLALQSMYTLSGGQKSRVAFAKITFKKPHIILLDEPSNHLDLDAVEALIQGLLIFQGGVLMVSHDEHLITGSVDELWVVSEGRVTPFSGTFKDYKKMLK

SEQ ID NO: 240915 - protein, 37 aa, Zea mays
  Clone ID: MRT4577_151293C.1.pep
MAEDKETDSPQPPAKLPRLSRADTSAGKHARAGSSTF

SEQ ID NO: 240916 - protein, 151 aa, Zea mays
  Clone ID: MRT4577_151294C.1.pep
SGMSSYSNMRCCPCRSLAGHWCACSRSSLRGTYHVRVFSSADHLSPGEVIQPCHMRCGIPRWKVEAWYWNGLSCSSTPFFVVLNARKFSPGLWALRCRSSPSGCDPPGPQRQVMLKKARGSVPRYRDLGFGDTFVLSPESIIISRPASRVP

SEQ ID NO: 240917 - protein, 62 aa, Zea mays
  Clone ID: MRT4577_151295C.1.pep
PAAHCHLKHVYLTLCSALAFSALCAYLHILLNVRGALTTVGCVASIHFLIFLPPLPDQDRNL

SEQ ID NO: 240918 - protein, 120 aa, Zea mays
  Clone ID: MRT4577_151296C.1.pep
QKMKRAKCKFDHYTCNIMINIYGRRGWIQDVSNVLAELKDRGVEPDLYSYNTLIKAYGIARMPEDAVKLMQEMRVKGISPDRVTYANLIAALQRNENFLEAVKWSLWMKQTGVAGCGART

SEQ ID NO: 240919 - protein, 199 aa, Zea mays
  unsure (1)..(199): unsure at all Xaa locations
  Clone ID: MRT4577_151297C.1.pep
DSCHVGSWAITXDTYESGKIIAIGDVTGSIRNTAGMGVPALVKHRNEGHAMKDFDGAEVLDSTELLVHDCDVLVPCALGPRVRRDNAPDVKAKFVIEAANHPTDPEADEILAKKGVVVLPDIYANSGGVVVSYFEWVQNIQGFMWDEEKVNDELEKYMSSAFQHMKAMCKSLDCDLRMGAFTLGVNRVARATLLRGWEA

SEQ ID NO: 240920 - protein, 45 aa, Zea mays
  Clone ID: MRT4577_151298C.1.pep
RHFKVFQGMRQMPPSQKQFQFSASVYDSALLIILMLAGKSLVTKC

SEQ ID NO: 240921 - protein, 67 aa, Zea mays
  unsure (1)..(67): unsure at all Xaa locations
  Clone ID: MRT4577_151299C.1.pep
PLYGAWLPPPPKRVSGRSPGSYVQIVRSQVRCVICQVRFTCRADLQGLAYCWLALRGXGLPSPARIL

SEQ ID NO: 240922 - protein, 151 aa, Zea mays
  Clone ID: MRT4577_15129C.1.pep
MADRVTVVSPRDPWPFSTVTVDDLEALVADGLLRPLSGDPQPEWMAPPSRAASSPPPGYVLSFVSFHERGFGVPASHFMRAILHVYEPRLFIRLQEVGFHKPSLPPVLEDTVDRAAQRVAAEKRKEKKDAKKARARERMQARDALERLRRR

SEQ ID NO: 240923 - protein, 164 aa, Zea mays
  Clone ID: MRT4577_1512C.1.pep
MSRSVESLVVGRVKREVLDCFSPCVKMVVTYNSNRLVFNGHEIYPSAVVSKPRVEVQGGDLRSFFTLVMTDPDVPGPSDPYLREHLHWIVTDIPGTTDASFGREVVSYESPRPGIGIHRFIFVLFKQKRRQQQTVAAVPSSSRDHFITRQFAAENDLAHPVAAF

SEQ ID NO: 240924 - protein, 116 aa, Zea mays
  unsure (1)..(116): unsure at all Xaa locations
  Clone ID: MRT4577_151300C.1.pep
RRGAECSSSQGKWQSWWEDTEKSRKGSSLNFSKRKIFTDIFNNDLGGPYAFLEPPFVQRPLLYKIQARRKKRIQITVSLYASTNTQAQNIFPLYVLLARPTSNISLXGHSPIYRAG

SEQ ID NO: 240925 - protein, 119 aa, Zea mays
  Clone ID: MRT4577_151301C.1.pep
YCFFWAPPRTSWVTFFAVWARLPCLSFLDLFCKGLSIFFWVGRFPRFLPPSPPLVLLSFRLPPFLLSLFPLVFFWLCSLCSLPAPPSPPPPFQNLLKLLKKKKKKKKKKKKKKKKKKKK

SEQ ID NO: 240926 - protein, 125 aa, Zea mays
  unsure (1)..(125): unsure at all Xaa locations
  Clone ID: MRT4577_151302C.1.pep
SRLRVPGWYTGVDPSVLCCKLHVRLSIDEGAMYERLDVHLHACHQADVEAQRSLLRSTPAPXSLGAVVAVRAFGTPFVAIADRDKFRLGRVSSMAADMVLLNPAHAKVMSIYEEIVRPVLSSYID

SEQ ID NO: 240927 - protein, 100 aa, Zea mays
  Clone ID: MRT4577_151303C.1.pep
PAGRRQGLRQPAHGGRPRRHQGVSLNFYLLRWGQTSQKGRLLCVCVSRRPQLFKSSPAPNFIGLFSTLVLYGKLEMDMHVSVWYISIHCTSCFFKLFPCD

SEQ ID NO: 240928 - protein, 43 aa, Zea mays
  Clone ID: MRT4577_151304C.1.pep
GGGGYGGGGGGYGGGGGSGGGGGGYGGGNRGGGFGNSPGNWRN

SEQ ID NO: 240929 - protein, 65 aa, Zea mays
  Clone ID: MRT4577_151305C.1.pep
WSSMFFYRGVSLNLAGPSTKRILGGPGYFFKIEAVIPSVRGAGPPWFSYLGGEGRFIVFGSQPVF

SEQ ID NO: 240930 - protein, 80 aa, Zea mays
  Clone ID: MRT4577_151306C.1.pep
FYVLLYTKNHYRGGNLIELICTRSELVNVQLTNSMTGAQSCNYRHSLRTHATNNAPGCLPNDCSPNPGLRISSFAIMTYD

SEQ ID NO: 240931 - protein, 69 aa, Zea mays
  Clone ID: MRT4577_151307C.1.pep
IYVRIGAVRNPSSGPLPHVPSLDPKVIPREYPLSVHLIFVIVPRYRVPPVILPNMDTVCVSVFTFINHN

SEQ ID NO: 240932 - protein, 268 aa, Zea mays
  unsure (1)..(268): unsure at all Xaa locations
  Clone ID: MRT4577_151309C.1.pep
MSVAAGLSFAAHVCCLRIFTPPDFPPRFREGALEDMLPLPNELLERTGYAPIPHPAPPVGPPSPSTRDGHLRPSVTRPXPLRRRSSASPPASVECPPFXSQQPRRGSPRPPPPRCSSSPHPGAPAPLSRRRSTRTPCPPWTRPTSGGAAAGAGSLCSGPGTPSTRTSGGSWASAPHARRRNRGARDPPPPRAAGSRAPWQRPPRSSPTAALPSADDESTGATTRAPCACHLDQDLLLRKRTETPPTGCPPRTDARRLRRSSRRAGRAA

SEQ ID NO: 240933 - protein, 238 aa, Zea mays
  unsure (1)..(238): unsure at all Xaa locations
  Clone ID: MRT4577_15130C.1.pep
MGTQAAENFEPPAKDVRTDEQKKIDDWLPITSSRNAKWWYSAFHNVTAMVGAGVLSLPYAMSELGWGPGIAVLVISWVITLYTLWQMVEMHEMVPGKRFDRYHELGQHAFGDKLGLWIVVPQQLIVEVGVNIVYMVTGGRSLKKFHDVICDGKCKDIKLTFFIMIFASVHFVLSQLPNLNSISGVSLAAAVMSLSYSTIAWGASVDKGKMVDVDYNLRAXTTPGKVFGFFGALGEVAF

SEQ ID NO: 240934 - protein, 113 aa, Zea mays
  unsure (1)..(113): unsure at all Xaa locations
  Clone ID: MRT4577_151310C.1.pep
PRVRPRVRTVMPFVVEVVLEIAKLCDVYSMERLLDDESEGQVLSVLSEAGLFGCGGLLKDMVFFCSTVNGRTYHDRQLEPDWHIYTSPXEMXTNXARFIKFQLHIFPQRPERI

SEQ ID NO: 240935 - protein, 45 aa, Zea mays
  unsure (1)..(45): unsure at all Xaa locations
  Clone ID: MRT4577_151311C.1.pep
PTPPAATRKLKQQANXNPLPPXTNHKNLCPESAPMQXKAANGLPR

SEQ ID NO: 240936 - protein, 90 aa, Zea mays
  Clone ID: MRT4577_151312C.1.pep
LSKTVLIVHSRVEDANLLLGAFNRNEMSLDSESTITVELTTMNINNSDYVGYGSIRHNDGEGRYRCITRAHDHADLHQIRPLRRVLSRHL

SEQ ID NO: 240937 - protein, 108 aa, Zea mays
  Clone ID: MRT4577_151313C.1.pep
ANKQTGRNGVRDEYKACAVMVVTQCIYAALALLSNAAFTGGMSPLVFDVYRQAVGTIVLVPVVIAVNMKKINEMTTGLGLTGLSLVLLVFLVGATVNQCMYYQGVNLG

SEQ ID NO: 240938 - protein, 81 aa, Zea mays
  unsure (1)..(81): unsure at all Xaa locations
  Clone ID: MRT4577_151314C.1.pep
MHGSSKFTICSEATDMYRQLPWQGLFRQEWKRTWPFLTXLHLTGFIITNMTVNFTEDDLKNSKFVQEHNKKLLTNQAQELL

SEQ ID NO: 240939 - protein, 77 aa, Zea mays
  Clone ID: MRT4577_151315C.1.pep
FQGWLNIVFWPYCFCMLLVFGFALVFRFCDSLLVLGSSIALRSRSTWALYLKKKSKEIKNKKKKKKKKKEKKKKKSG

SEQ ID NO: 240940 - protein, 219 aa, Zea mays
  unsure (1)..(219): unsure at all Xaa locations
  Clone ID: MRT4577_151316C.1.pep
MSDVTAVMDLEEEEPRLSLPPGFRFHPTDEEVVTHYLTPKAVNNAFSCLVIADVDLNKTEPWDLPGKAKMGEKEWYFFVHKDRKYPTGTRTNRATEKGYWKATGKDKEIFRGKGRDAVLVGMKKTLVFYTGRAPRGDKTPYVMHEYRLEGQLPHRLPRSAKNDWAVCRVFDKDLAAKNAPPQTAPAGRXXXMEDPYALLXVDDFLXNPDLLNXADLPML

SEQ ID NO: 240941 - protein, 87 aa, Zea mays
  Clone ID: MRT4577_151317C.1.pep
FNPMHPIIPHTNGKQMGQLTMSESTRSRDLNKAIRFEPFTKHHVTPCVRRSPQNQAITPRQEHQCRSSQQVTSIGPLILPNTRRAPF

SEQ ID NO: 240942 - protein, 48 aa, Zea mays
  Clone ID: MRT4577_151318C.1.pep
RPKPLKSYLTNTYRKIVFTPYEFNSTHIIYKKKDSMDITLAGGGPHFF

SEQ ID NO: 240943 - protein, 499 aa, Zea mays
  unsure (1)..(499): unsure at all Xaa locations
  Clone ID: MRT4577_151319C.1.pep
PPARPPPPPGHAHAQTXPHVVLVPSPGVGHLMPMAELARRLVSHHALAATLVTFNLSGDPDAKSAAVLSSLRAANVSTATLPAVLLDDLPDDASIETVLFEVIGRSIPHLRAFLRDVGSTAGAPLAALVPDFFATAALPLASELGVPAYIFFPSNLSALSVMRSAVELHDGAGAGEYRDLPDPLPLPGGVSLRREDLPSGFRDSKESTYAQLIDAGRQYRTAAGILANAFYEMDPATVEEFKKAAEQGRFPPAYPVGPFVRSSSDEGSVSSPCIEWLDLQPTGSVVYVSFGSAGTLSVEQTAELAAGLENSGHRFLWIVRMSSLNGEHSDDMGRDYCDGGDENDPLAWLPEGFLERTRGRGLAVSSWAPQVRVLSHPATAAFVSHCGWNSTLESISSGVPMVAWPLFAEQRVNAVDLSEKVGVALRLRVRPDDGLVGREEIAAVVRELMEGEDGRAVRRRTGDLQQAADLAWAPDGSSRRALEEVVSRWKAGAIRRAAV

SEQ ID NO: 240944 - protein, 40 aa, Zea mays
  Clone ID: MRT4577_15131C.1.pep
NASNNGLFTYPLGCLIGICIQSFLHKKIGHGPTFISGTIF

SEQ ID NO: 240945 - protein, 73 aa, Zea mays
  Clone ID: MRT4577_151320C.1.pep
AGLKGHPTLKKSKMGSDHQNRRGGWGLGRGTQIKIQMQREKTKRGLSSWAHPQMDHYGKFKCVKQCPKRRGDP

SEQ ID NO: 240946 - protein, 79 aa, Zea mays
  Clone ID: MRT4577_151321C.1.pep
RVLWTGRLLPHVPLPGYLPSPSTGPWNAMALGTNFGGGAAAGVFGGAGFQADRAVTFLPLKRGTIFGIHAGDPFKNNGP

SEQ ID NO: 240947 - protein, 59 aa, Zea mays
  unsure (1)..(59): unsure at all Xaa locations
  Clone ID: MRT4577_151322C.1.pep
PGTIQQPYPLSLHTSLXHHNIQSILTQHLQQHNLPTINQIVTANLSKYLHQQXYFPFNQ

SEQ ID NO: 240948 - protein, 101 aa, Zea mays
  Clone ID: MRT4577_151323C.1.pep
PFWFTSPRGLWLARAGILQSCIYSPWLTSLRSFVGCPFMRSSSQWCLLTAWSMWDCLSSFGGLFVGSCFRFCSFSSVLIFLPGLFWAGLVHVCLGLKPFFS

SEQ ID NO: 240949 - protein, 333 aa, Zea mays
  unsure (1)..(333): unsure at all Xaa locations
  Clone ID: MRT4577_151324C.1.pep
MADKPSRALVVYAAGHAAALIPPPGSAAAGSHLDAFASRACCGLLTLRSPPTSHPTTGTEDNSSTILELAQLLDVYDHLYPGKNAESGQEXPSGSTGAXVPKLFERFMGLRAALVTSCPHVSSFAANLGFHVFKTNDFAPQSGSSSITKEDGLIKRAFDLLGFSDGDVQETSEFDLVFMHVAMENTSSKLGKLGMKTDINRLDKLVGAVLESAPVGSAIASRIHVSVILSYGSASGNKDEFSLLTSSTETDSDLNLLRPRQSYTMKTGRTLDDVRLHHPILLAQWQDGVTRVDLAKGFSFEEFMKRGGNLAMLAERFLHEVAFKLWKAPKYGA

SEQ ID NO: 240950 - protein, 133 aa, Zea mays
  unsure (1)..(133): unsure at all Xaa locations
  Clone ID: MRT4577_151325C.1.pep
ELYLISLXPITLRMVVVKLLYFAXGAAVRQIHVESGEYVWXCXLSIIIQGTADIWNTLSENVKGVIXFFRSDXYWRTFILICDEVAIIQSYDDAGDFTDKERLKTRIHMNLLFYTIERAIVLIGTILLLIMHK

SEQ ID NO: 240951 - protein, 61 aa, Zea mays
  Clone ID: MRT4577_151326C.1.pep
PRTLCSKLTCMVCHMVTLVPVRTFCEYLFPCLPYKSAVFTLLYLLLALFSSKVCLIRASTC

SEQ ID NO: 240952 - protein, 49 aa, Zea mays
  Clone ID: MRT4577_151327C.1.pep
TDIPTHDSPSFFHPFLSHLPPRSIPSSSLRFHQFILPLLKASIHQPFLP

SEQ ID NO: 240953 - protein, 796 aa, Zea mays
  unsure (1)..(796): unsure at all Xaa locations
  Clone ID: MRT4577_151328C.1.pep
MSEEKKVAAEMKLSLSEEMHLGFLRSMSKTNTEKITKEILEGLSEDTGDSDSYDADSGGEDSEDRPWRPSHAVFGKSSIKENHLVNMRGRYFRDLSVVRADEGEKTYPTPEEDEVVIFRSFLKAGLRFPLSHFVVEVLKIFEIYLHQLIPEAIIRMNIFVWAMRSQGLEPDAKSFCNMHELLYETKPWGKEQYHNNFGCYSFGSRSGSSCPVPTFRKRWPGDWTTEWFYVKNDLKSREDIKKIIMYPIWQRFGLRRPKVEMNEAAEECQRAFGVVCSFIGTRDLTQEHIAFRVWPLADNWEMPKETIKETDEGGLVRLKYTFKYGDKFVEPDDDWLKSIETVSDELLGAYSKAEDTALSAAFGGRKRKRLNRVFDAIGFVYPDYRYPIRGQKRKGTASAKEKAAAAPSEPAPKRKRIKXSHIGHAILNQPRCLSSPEXSSATEAEEPTLLPEVAEMAEAPTTKELEEPKVLLPETKEMVXRHRQKRWKKQTDQLKEQKXEILSPSVEIEVARIKKGPTVTPKRKRMVNVLDVLETIKLPSTTPKKTAEISEALAEVSVAEAPKQQTGVESGPSEPTKAIPSEAEEIKIAKATEELKMSEPASVEEIDTAVPEASSKTYDYIMRHASGKKLSEEEVFEANHYAKELKYPKGALIFNGTDEEDFLYCLPDNKELSVCREMSRSMGFLKLEAGLSAMTKEDLADSLAYNSLKGLILSNALRAQKSAEDESYEIAFNDLRSEVIKLRNKALEKDKILLTLIDKVKKDEAASKVQAEAHKREIKDLQKQLARAREERICNT

SEQ ID NO: 240954 - protein, 49 aa, Zea mays
  unsure (1)..(49): unsure at all Xaa locations
  Clone ID: MRT4577_151329C.1.pep
YXWISFVAFYRYIVLHKXKPFVXKPLCRXLTFNRSXRGSCXAXXRCXXL

SEQ ID NO: 240955 - protein, 96 aa, Zea mays
  Clone ID: MRT4577_15132C.1.pep
NNDRLEYLLVDVDSHGAAPRSESPSPSRQRTPWSTSSHRTASLCGSTTPPQRRRIYPFHLKETRGPGSLPRTENGVEVTQIHTQAASPFVFRLRVG

SEQ ID NO: 240956 - protein, 183 aa, Zea mays
  Clone ID: MRT4577_151330C.1.pep
ENLSDELLRVYSKAEDTALSAAFGGRKKKRLNRVFDAIGFVYPEYRYPIRGQKRKGTTSAKEEATAVPSEPAPKRKRIKVLTHRPRYIEPASVPEFTGETSSGTEAEKPTLLPEVAEMAEAPTTIELEEPKILLPETEEMAEEPSTEKMEEAKGSTEGSKISEILSPSAEIEVAGTKKGPTVT

SEQ ID NO: 240957 - protein, 109 aa, Zea mays
  Clone ID: MRT4577_151331C.1.pep
IRLEAEPTRLEDIDVLEEERLNTVIQSARYQQTLKRYHDKAVRHRSFAVGDLVLRRILTKEGRHKLSPLWEGPFIVSEVTRPGSHRLTQMDGTEVGNSWNIEHLRKFYP

SEQ ID NO: 240958 - protein, 174 aa, Zea mays
  Clone ID: MRT4577_151332C.1.pep
HDFAVTENHAIIPDQQIVFKLQEMVLGGSPVVYDRNKTARFGVLPKRATDASRLRWVDVPDCFCFHLWNAWEDEATGEVVVIGSCMTPADAVFNESAAGEESFRSVLSEIRLDPRTGTFSRRAVLSDADQVNLEAGMVNRQLLGRMTRYAYLAIAEPWPKVSGFAKVDLEAGTV

SEQ ID NO: 240959 - protein, 47 aa, Zea mays
  Clone ID: MRT4577_151333C.1.pep
VRKRPKNPFYFFLPAFPSFLRTTSTKTLKPLPLDGSSGLPFFMVTTN

SEQ ID NO: 240960 - protein, 46 aa, Zea mays
  Clone ID: MRT4577_151334C.1.pep
DLVVVLHNGAARKVKCSSSTTKVRVLPLTLYSSKKVVFCSFPPFDH

SEQ ID NO: 240961 - protein, 53 aa, Zea mays
  Clone ID: MRT4577_151335C.1.pep
SSFFSPPRSPLPIQETITQRFLLPACFLPSRPFNLLGCSSYHVNQHQVFWSGM

SEQ ID NO: 240962 - protein, 73 aa, Zea mays
  Clone ID: MRT4577_151336C.1.pep
PHASVGWFGVLIYCWWTYSSRGGCGTGALVPCVPRGHFVLPRRPILQLAVLCCIWGWRGPTPNSGMWEMGPLD

SEQ ID NO: 240963 - protein, 575 aa, Zea mays
  Clone ID: MRT4577_151337C.1.pep
MGSRRRRHHHHGRWVVPSVAPAAAAFAAAGLLLLVVAFHCFLSLPLSDASGGSRVFRRPNPPFLLNKPADVRRNVIGAVDFAVPSGGSKLGEELWESKAAGNFFGCSNATKQFADAEAVTKSDRYLMIATSGGLNQQRTGIIDAVVAARILNATLVIPKLDEESFWKDASDFAEIFDVDSFISSLSNDVKIIRQVPDRNGKPPSPHKMRIPRKCTSKCYESRVLPALLKKHVVQLTKFDYRLSNKLETDLQKLRCRVNYHALRFTDPILQMGETLVQRMRGKSGRFIALHLRFEPDMLAFSGCYYGGGDIERRELGEIRKRWKTLHASNPDRERRHGKCPLTPEEVGLMLRALGFGKDVHLYVASGDVYGGEETLAPLKALFPNFHSKETLANKELAPFLPYSSRMAALDFIVCDRSDVFVTNNNGNMARMLAGRRRYFGHRRTIRPNTKKLYSLFLNRTSMSWDTFASKVQTFQKGFMGEPNEIKLGRGEFHEHPVDCICAKSKGKSVQSRPHLVKGAGEAVENHSIDGELDWKDLDYGEHTPLGRGDSSNETESDDVRIGGSDIPELEDMMSD

SEQ ID NO: 240964 - protein, 207 aa, Zea mays
  unsure (1)..(207): unsure at all Xaa locations
  Clone ID: MRT4577_151338C.1.pep
MASSPSDLTLDYKPNGNGNGAAYAVTIPKPPQETLVVDGHHHHHQHHHLTAGEQTTQKLREFLARLEEERLKIDAFKRELPLCMQLLNHAMESYRQQLEAYQMGSLQGAPARPLVLEEFMPLKNIGIDAAADKMGNPTSEKASWMESAQLWNGPAATADVAARGPQTPKESAEXARTAPQAPATXQRNGGGGGAFLLFAKDKTAVAE

SEQ ID NO: 240965 - protein, 63 aa, Zea mays
  Clone ID: MRT4577_151339C.1.pep
IVQLPNYSFEQNRRTKPIYCPKNIFFLQQNLTLFNFLITNYPNVKVPSTLSNSITFHKLKHKT

SEQ ID NO: 240966 - protein, 73 aa, Zea mays
  Clone ID: MRT4577_15133C.1.pep
MMNEAKLKKMAGAGRTGRKGSLHRKNKAVNKTTPTDDKLLQSTLKRIGGNTMPGMEEVHIFKDDAARRAQNAK

SEQ ID NO: 240967 - protein, 85 aa, Zea mays
  Clone ID: MRT4577_151340C.1.pep
IRPQKDMTHSTLQMNLNPKSHHGSIKGGAGDRIFFKRRFFIYTTRRRPLEFCAPFPDRISCNCNKSNRSWGPICRCFKPSPPPRG

SEQ ID NO: 240968 - protein, 54 aa, Zea mays
  Clone ID: MRT4577_151341C.1.pep
ALNCKVYCRVGFGELLNFKELDLKNHLYVTSDYLTYLNLVVLIHMKSLFASKQN

SEQ ID NO: 240969 - protein, 56 aa, Zea mays
  Clone ID: MRT4577_151342C.1.pep
THLQARLPPVITTSMPLIRKLLSSPTKACRVQHPIGDLACFPLYMKGKKGRLWTSK

SEQ ID NO: 240970 - protein, 40 aa, Zea mays
  Clone ID: MRT4577_151343C.1.pep
GLPRIYSLHWSHRRLSTCSWYISFRSLTNSMPHFLGMLVK

SEQ ID NO: 240971 - protein, 80 aa, Zea mays
  unsure (1)..(80): unsure at all Xaa locations
  Clone ID: MRT4577_151344C.1.pep
NYLNYHNPLLNLVNLTPLIDYNNTLXNNSIILPHHPPMPKYIPFYHNFVLYLNKALTTNHHVKISQLPSANNITLSPHXK

SEQ ID NO: 240972 - protein, 70 aa, Zea mays
  Clone ID: MRT4577_151345C.1.pep
LSLLLAFRFSLTDIYFGQLELWVMPNGYELVLNPETRTAFFLANFLIVFLWLLIFIHLIHVCLHMIQFII

SEQ ID NO: 240973 - protein, 68 aa, Zea mays
  Clone ID: MRT4577_151346C.1.pep
GDWVLRGRPGSHLGLPNSNGADGSRCVGGCVTGNRRRYPWEGRLVRDRRGRSTPQPAALSHWAPTYRS

SEQ ID NO: 240974 - protein, 66 aa, Zea mays
  Clone ID: MRT4577_151347C.1.pep
LVKVGLPQHEQCCPPLEGVVDLKPALGLCTPIKANVLGIPPKGPLSFTLIPNNWGKICPKNFPCPN

SEQ ID NO: 240975 - protein, 204 aa, Zea mays
  unsure (1)..(204): unsure at all Xaa locations
  Clone ID: MRT4577_151348C.1.pep
MVGVTSLLPVFFSLTHLLYFCPLLSPAPPRGPPQXGGGSPXPPRKGAPPRGGGAPPGPRPXNPATGGSPPPPGGGGPSLWGTGGAPPGGGRRSPPGAXPPSGGGPPGPQKIGXRNPPPEPGAPPRGGAPRINRGGLREEQPGPPPGEDKGPNPPRSKNPPPPPXLPPGPTGKTPPPPGGGPNTGXRSAPPPGNPTPKKRGGSAP

SEQ ID NO: 240976 - protein, 50 aa, Zea mays
  Clone ID: MRT4577_151349C.1.pep
PRNPVTDCYSCWAAANLIRQTQLSYTNYTSLEEPSPTLLISWNKVVKFVE

SEQ ID NO: 240977 - protein, 54 aa, Zea mays
  Clone ID: MRT4577_15134C.1.pep
INCPLQILSPLAQSSCLLPVPPNLTDPPVLSTPCYNNTLSFGTFPCVLKVSSPS

SEQ ID NO: 240978 - protein, 151 aa, Zea mays
  Clone ID: MRT4577_151350C.1.pep
MDNIQAKARYYNAQLDKELSKYPQLNQFQAATGVPKTYLALGAGTFMTAMIFFNFAGKLLSNVLGWVYPAYRSFKALETPSKDDDKQWLTYWAVYGFVSILESFTDVLLYWFPFYFFLKSVFLLWLMVPSFNGAATIYLRILRPFLVQHRG

SEQ ID NO: 240979 - protein, 52 aa, Zea mays
  unsure (1)..(52): unsure at all Xaa locations
  Clone ID: MRT4577_151351C.1.pep
LRCRQSRSSRLRAAAAGPLIWLSISVXCPRPTNAHNSLLHPPPQVVRPLVLQ

SEQ ID NO: 240980 - protein, 47 aa, Zea mays
  Clone ID: MRT4577_151352C.1.pep
ETHEVFLSVTTFCILVCLISRYSFSNDSISFNYYLSYFIILFLSFYW

SEQ ID NO: 240981 - protein, 88 aa, Zea mays
  Clone ID: MRT4577_151353C.1.pep
VPSGLAMQCDRVVAYCPHKEGQDNRSSATARKASLPPVICLTFIHACPLSFGQYQVLHIQYPSYSVHTRHKAIFSSHRFFTFSLRLLT

SEQ ID NO: 240982 - protein, 56 aa, Zea mays
  unsure (1)..(56): unsure at all Xaa locations
  Clone ID: MRT4577_151354C.1.pep
PPPHXSYIPSPPPPVTHSSAHLPGRRSIQLVDRSSIRMSACTVSGFQRSRETVASQ

SEQ ID NO: 240983 - protein, 66 aa, Zea mays
  Clone ID: MRT4577_151355C.1.pep
GRGCLCIHSYAGFVYLRAGVSIPVTNPPLFWRCQPERSWWLEVGWAQGYRVECYGIASGAARRGWS

SEQ ID NO: 240984 - protein, 45 aa, Zea mays
  Clone ID: MRT4577_151356C.1.pep
HAAGASPAIQSRGIAKSVGDWYFGRAQVKAIDCPYPCDGTCRNII

SEQ ID NO: 240985 - protein, 63 aa, Zea mays
  Clone ID: MRT4577_151357C.1.pep
RDVTLTGHSTAHLRLPHRCPSPDHLPLHGYSSPSPFGGHLRPLSMCRTPDGRVGRDLSHARAN

SEQ ID NO: 240986 - protein, 168 aa, Zea mays
  unsure (1)..(168): unsure at all Xaa locations
  Clone ID: MRT4577_151358C.1.pep
KAPTGKKPKPKKPPPAGKPAGKEAGEGKKGKKKAKKPGKTNKTNTXKXQKQAHPDXGXPPKARPNKNPXTNDXXEKXAAEPAKRARKNKKPTATPRENQTAGRXAPPGEXAKHAVPEGTKPATKXTPKKNKAARRRKTGPKEKRKGKRPAPAVKTEEWPTPWATLPQT

SEQ ID NO: 240987 - protein, 204 aa, Zea mays
  unsure (1)..(204): unsure at all Xaa locations
  Clone ID: MRT4577_151359C.1.pep
RNVHDPASDVPAPWSSRLPQLSPYMNDNTDGDTFADSPCGSPPWNSHSLDEITDADVSRMRKKWGSAQMPFAGVSASQQPRKDVSKGLKKLWKFGRKTRGGDGLVNXLSXASTASEYDEDMEDGRDLVVGSSDDFKKSRMGYLASYDDFVEDEVFAEQEQSLRSSIPNPPANFRPREDQLTGRAPRSFFSLSTFRSKGGDARLR

SEQ ID NO: 240988 - protein, 96 aa, Zea mays
  Clone ID: MRT4577_15135C.1.pep
MDEYQTRRSPAGERFIGMFSSPSTPSSSPTEPSFVAGDELHEDDFLFSSPDAAAPQPDGPRSPGRGAPQGHLGLLAALALHEGDKRLLVRGGHGGG

SEQ ID NO: 240989 - protein, 621 aa, Zea mays
  Clone ID: MRT4577_151360C.1.pep
CTVQSKQSVKENITGKDFDARSQVRYENNQVFNISTPQKLGILSLEESIGKFYEHYMQKRDATLKEGWKLQREEKEAMLKAMHDSLERSKAELLTKFSRSADVPDSTYVSHCSQKIPPSRSARKNKDQGVGSFLVEEEMNSDYLSGDGSSRSADSRKHFSNKVASTQKASAGPIHKRSSRTASSGYANRRNPPENPLAQSVPSFSDLRKENTKPSPGVSRASARVQQKSFARSKSIIEESKSILKEDQSRRSQSMRKNQIPDELKDISSGNDDIYNWAPSRISKNQSEGPFAYSTRRSGPPKPFLRKGNGTHPVIGIAGFQAAAAMMANALHHGDSGDFEDQQEDSPDDAKEEEEYESMEENLRESDFPADSDSENPRVSHEFGNSDDPGSENGDADFPSKAPAIGGTKFTAFTGNVHNPAGDVPAPWSSRLPQLFPYTNDNSDADTFADSPSGSPPWNSHSLDEITDADVSRMRKKWGSAQMPFAGVSASQQPRKDVSKGLKKLWKFGRKTRGGDGLVNDWVSASTASECDDDMEDGRDLVVGSSDDFKKSRMGYLASYDGFVENEVFSEQEQSLRSSIPNPPANFRLREDQLTGSSLKAPRSFFSLSTFRSKGGDARLR

SEQ ID NO: 240990 - protein, 82 aa, Zea mays
  Clone ID: MRT4577_151361C.1.pep
PDPFDNNFSPNIGVNRGFLISDQELKFFPQGKGPPGPFVDQFGATQKNFFASFAQSMFNMGNINPLRDPSKEKVPPPSKRVT

SEQ ID NO: 240991 - protein, 114 aa, Zea mays
  Clone ID: MRT4577_151362C.1.pep
APRGERYASRARHTALDPYVPFCLTFLLLLAAHCVPAAHANHAVELPHHGSDIERTDFFDHDVLSILWSGRGLCSGCVKHSRAKAVYLSPYRNIHRTGTHERSLHDACSTIILL

SEQ ID NO: 240992 - protein, 69 aa, Zea mays
  Clone ID: MRT4577_151363C.1.pep
TGVRSRAGGAAQKRRTKKLILGSRLDMPVVAGGHRGRGRQGAGRGRGRGRRVAVLALVRHHQHGRVLVP

SEQ ID NO: 240993 - protein, 74 aa, Zea mays
  unsure (1)..(74): unsure at all Xaa locations
  Clone ID: MRT4577_151364C.1.pep
ELQTIPEEKTSEGNQHTRWIRLVPFAHYTQSQTNXILHDQVSLQKAIHQKGFTLGFDPAQSIDITIHFGVHDRR

SEQ ID NO: 240994 - protein, 120 aa, Zea mays
  Clone ID: MRT4577_151365C.1.pep
LDHDGPDVLYDERAHEVLDVGHEEGRFSDLLAWISWRRIRCWSMHIWEAHTSSWSFFTVELEHVEHHEVYLSAQLERLQQLELVVMALRIAVLRERVQAIHGEVPSPPRWRRIIHRSRIG

SEQ ID NO: 240995 - protein, 87 aa, Zea mays
  Clone ID: MRT4577_151366C.1.pep
EPVSGLIGRVDAGDERNTKKVGGIAGRLRLSATVTPNFPPYITFPPIFPLFFHLPQRFPLNTPPIPHYNYKYYFSYLFIIHYHFFST

SEQ ID NO: 240996 - protein, 61 aa, Zea mays
  Clone ID: MRT4577_151367C.1.pep
EILETSSQSLRTIREESRIPAAGIIGGLHKGMNGKAEENAKMRDRLTLRDSNEQLESIFYE

SEQ ID NO: 240997 - protein, 85 aa, Zea mays
  unsure (1)..(85): unsure at all Xaa locations
  Clone ID: MRT4577_151368C.1.pep
NKNLRLVVPTRHVSSTHIXMIVIVVILSIGCSTLLRSVSIVRTRTRLKVLGISRSVSIVRASLEVSSISRHQTGAPYNRGQAHCY

SEQ ID NO: 240998 - protein, 610 aa, Zea mays
  Clone ID: MRT4577_151369C.1.pep
MALSASRVQQAEELLQRPAERQLMRSQLAAAARSINWSYALFWSISDTQPGVLTWTDGFYNGEVKTRKISNSVELTSDQLVMQRSDQLRELYEALLSGEGDRRAAPARPAGSLSPEDLGDTEWYYVVSMTYAFRPGQGLPGRSFASDEHVWLCNAHLAGSKAFPRALLAKSASIQSILCIPVMGGVLELGTTDTVPEAPDLVSRATAAFWEPQCPSSSPSGRANETGEAAADDGTFAFEELDHNNGMDDIEAMTAAGGHGQEEELRLREAEALSDDASLEHITKEIEEFYSLCDEMDLQALPLPLEDGWTVDASNFEVPCSSPNPAPPPVDRATANVAADASRAPVYGSRATSFMAWTRSSRQSSCSDDAAPAAVVPAIEEPQRLLKKVVAGGGAWESCGGATGAAQEMSGTGTKNHVMSERKRREKLNEMFLVLKSLLPSIHRVNKASILAETIAYLKELQRRVQELESSREPASRPSETTTRLITRPSRGNNESVRKEVCAGSKRKSPELGRDDVERPPVLTMDAGTSNVTVTVSDKDVLLEVQCRWEELLMTRVFDAIKSLHLDVLSVQASAPDGFMGLKIRAQFAGSGAVVPWMISEALRKAIGKR

SEQ ID NO: 240999 - protein, 48 aa, Zea mays
  Clone ID: MRT4577_15136C.1.pep
LVLLIGNLLLGYLLFTCGGIWGAGGGSQKSIAQQGVGNNVHELTKGGR

SEQ ID NO: 241000 - protein, 612 aa, Zea mays
  Clone ID: MRT4577_151370C.1.pep
MALSASRVQQAEELLQRPAERQLMRSQLAAAARSINWSYALFWSISDTQPGVLTWTDGFYNGEVKTRKISNSVELTSDQLVMQRSDQLRELYEALLSGEGDRRAAPARPAGSLSPEDLGDTEWYYVVSMTYAFRPGQGLPGRSFASDEHVWLCNAHLAGSKAFPRALLAKSASIQSILCIPVMGGVLELGTTDTVPEAPDLVSRATAAFWEPQCPTYSEEPSSSPSGRANETGEAAADDGTFAFEELDHNNGMDIEAMTAAGGHGQEEELRLREAEALSDDASLEHITKEIEEFYSLCDEMDLQALPLPLEDGWTVDASNFEVPCSSPQPAPPPVDRATANVAADASRAPVYGSRATSFMAWTRSSQQSSCSDDAAPAVVPAIEEPQRLLKKVVAGGGAWESCGGATGAAQEMSATKNHVMSERKRREKLNEMFLVLKSLLPSIHRVNKASILAETIAYLKELQRRVQELESSREPASRPSETTTRLITRPSRGNNESVRKEVCAGSKRKSPELGRDDVERPPVLTMDAGTSNVTVTVSDKDVLLEVQCRWEELLMTRVFDAIKGLHLDVLSVQASAPDGFMGLKIRAQFAGSGAVVPWMISEALRKAIGKR

SEQ ID NO: 241001 - protein, 78 aa, Zea mays
  Clone ID: MRT4577_151371C.1.pep
PLPFFGGGPGFFGGFAFAPAPYFLPRVIGLPISKPQRVPLSWLAPRVGPLLGGPPKILSPPGGVRPIKKGPKTPPFFS

SEQ ID NO: 241002 - protein, 69 aa, Zea mays
  Clone ID: MRT4577_151372C.1.pep
KQRLNIYRIFSFTRSTIFQLNSKLYIIIRAYNQTDAITERALLYYPHIDILLYPTETKLLARQAETGLP

SEQ ID NO: 241003 - protein, 125 aa, Zea mays
  Clone ID: MRT4577_151373C.1.pep
AMIRKAKRDVELGGCVVPAGTEIMIPIMAVHHDAGVWGDDATEFDPARFADDGGRRPRQQMAFFPFGGGARVCIGQYLALMEAKIALATVLQRCKFRLSPAYVHAPRVLMILNPQHGAPVIFRPL

SEQ ID NO: 241004 - protein, 258 aa, Zea mays
  Clone ID: MRT4577_151374C.1.pep
GRVGAAGVGRGGRGQGRRGDPGAGRGHAGLAYCESGVPRDQARFAVVFSHGFTGFREDSVRASQEVAEELGVYMVGFDRAGYGQSDPNPTSSSTIAGAVAAGPWGHSGIQHQEPRKARGRGPRPRRNGAAGQGARAGLRREDAEAAATGVRAGQVDLPCRGAAEGAAQGRPPPGVRRVRGQQGGREVQGRLLPRLHRLPPRHRPPGAGQCPAPASGSGSARKRFELLWIRLCSPPQFLYTWLYGAIRATTRTSLLWAS

SEQ ID NO: 241005 - protein, 262 aa, Zea mays
  unsure (1)..(262): unsure at all Xaa locations
  Clone ID: MRT4577_151375C.1.pep
ETAFQXXHLGHYEFRVMAFGLTGAPGTFQCAMNHTLSPLLQKCVLVFFDDILVYSSSXEDHLCHLEQVFTLLDQNXWKVKMSKCHFAQRQVSYLGHIVSAAGVATDPTKICAIEDWPTPSCVKDLRSFLWLAGHYRKFIRHFGIICQPLHALLKKGAVFIWTSNHSTAFQALKQALITAPVLSLPDFXSSQFTIETDASSLGVGAVLMQKGHPLGFLSXSKALGTKSRGLSAYEKXYMAWLVAVPQWRPYLQSGKXIILTDD

SEQ ID NO: 241006 - protein, 89 aa, Zea mays
  Clone ID: MRT4577_151376C.1.pep
MMRVAVVGGGLSGLVAAHELARSGGARVTVYEKEDHLGGAKTVAVNGGSGPVLVDLDFMVFNRVRNIKQLHFHLLLEISLLSIYIICAK

SEQ ID NO: 241007 - protein, 64 aa, Zea mays
  Clone ID: MRT4577_151377C.1.pep
LGSVYLHGGPPSKVDDARDTTRVTSCPVESSNESPPSGTSEQMAGISASGGSDSMSSGMTSSSA

SEQ ID NO: 241008 - protein, 51 aa, Zea mays
  Clone ID: MRT4577_151378C.1.pep
IGLEVKSKTAKLQDFKSFLLKDSETSQRLANLRQRVEQFARAFPMPGFDEH

SEQ ID NO: 241009 - protein, 163 aa, Zea mays
  unsure (1)..(163): unsure at all Xaa locations
  Clone ID: MRT4577_151379C.1.pep
KSRCKVVSRGTIRVNESFILKDVALVSNLHFNLLSVSQLLKDDYEVRFKKGLSRVLDARGDLICQISPFGRVLXADFSHSSGSSRCLLAGSSSSLWKWHRRLGHLSFDLLCRLRSLDLIQGLPKLXFEKGLVCHPCRHGKMIAATHSPVTKVMTXHPGELLHM

SEQ ID NO: 241010 - protein, 104 aa, Zea mays
  Clone ID: MRT4577_15137C.1.pep
DPAVVSMKDEVHAEVPVAFIIDSEGYEISDNEVNQFDPKQVVFFKRIARVLFTNCIPKNPSAKIFRKNFRARLAPGIPSNPYSQSESDMHVRIILLRCVPKINV

SEQ ID NO: 241011 - protein, 75 aa, Zea mays
  Clone ID: MRT4577_151380C.1.pep
MWAHLAVALFVALAVAPPARGSDVPSFPLSQAQSPSNSSSPSNAASRPCHLDLSAELFGGVAAACGAGGGPGSLD

SEQ ID NO: 241012 - protein, 128 aa, Zea mays
  unsure (1)..(128): unsure at all Xaa locations
  Clone ID: MRT4577_151381C.1.pep
ASGLARPCRHELRNLXPFLLLDEFTVSKPAGFPDHPXRGFETVTYMXRFVASAQLNASLPWGGGATHASCSLKRHHPCGSGYWLLQGAFTHQDFAGHKGTIRTGDVQWMTGGRGXVHSEMPXGDXVHK

SEQ ID NO: 241013 - protein, 50 aa, Zea mays
  Clone ID: MRT4577_151382C.1.pep
LLHGDTISNMVRNVANLEQNRYIFFSIAPKNSNPMIDIVALTNLLIYSLH

SEQ ID NO: 241014 - protein, 65 aa, Zea mays
  Clone ID: MRT4577_151383C.1.pep
STKGTDDSSTNTAIYPNKNGHCSNTEGKAWDPLQRRQQAKLLEVLLHQPQVRASDCVKLVIHTNM

SEQ ID NO: 241015 - protein, 122 aa, Zea mays
  Clone ID: MRT4577_151384C.1.pep
LYFFFFFFFFFFFFFFFFFFLGEKRLHRMGGNNITNYGSSGPYYGYFTSRKEFTENLWLKNFTRRPPTLRGWGGFLGLGGTPFPSRGGAVLDEGLHPEVGRPGGVFLQKLRGRRAVSLGVRP

SEQ ID NO: 241016 - protein, 102 aa, Zea mays
  Clone ID: MRT4577_151385C.1.pep
EAATGSQRPPWQTQDAHAATATGEHQKQTPRPHARPPERADPHNQKGSRPKQTQPRPEADQERPSVHPNRSGESTGADTAESQPAASRRAGEQDRNDTTGRN

SEQ ID NO: 241017 - protein, 166 aa, Zea mays
  unsure (1)..(166): unsure at all Xaa locations
  Clone ID: MRT4577_151386C.1.pep
VRGLPXAPXFPVXCLAPGLRLXVXCPRXRCSVFPXLXLXALPXLRSPXXPXXPSAXAXXVPXAXAAPXXVXSPPAGXXXLVRLXGLLLRPVRPGGVXXRAGGPAVGPRRLVGPXXLPXLLVPPGPXLPXRXLXXCPXGSRLLVGXXXGPCPLFFSRFFCXXXAXFV

SEQ ID NO: 241018 - protein, 71 aa, Zea mays
  Clone ID: MRT4577_151387C.1.pep
DALGTSLHLIASVSSRRAISLIYSGRRGRPQVQHNRAQTSEPILLPYLRITFANFSLLHRYKRHTLTTLET

SEQ ID NO: 241019 - protein, 50 aa, Zea mays
  unsure (1)..(50): unsure at all Xaa locations
  Clone ID: MRT4577_151388C.1.pep
SPTRDSTVGRGRDAARARDRQGRVGSCSLGEATTEELANELXELAEGARD

SEQ ID NO: 241020 - protein, 149 aa, Zea mays
  unsure (1)..(149): unsure at all Xaa locations
  Clone ID: MRT4577_151389C.1.pep
MRPPPKGGHXEGGVADSMSGSREGGGGGRRFGGGTSGRGDKGGRGGMTPKGGRGDRGRLGHSGGMKGRSKDGRVSTSHRGCYFLMXKEDALCSTNIXPGRVXYREKPDSAQNEDGTNVPYRVWNPLRSKLGAAELGGADNIWIAPGSRE

SEQ ID NO: 241021 - protein, 62 aa, Zea mays
  Clone ID: MRT4577_151390C.1.pep
RMSTVKVLLVGAMLAAHRSCRYCPQRCSSVTKIVDISTARRSRRLCGQADDTAFNAAMSSSQ

SEQ ID NO: 241022 - protein, 115 aa, Zea mays
  Clone ID: MRT4577_151391C.1.pep
PVLNDLLSALWLTLKQPFGQFLKRSMVPMRQLSSRHALTRGPRIQVSNFHGFFVNFRPSKKARNSPVYVQIFIPFNNTGYFSQKPPLDVSPSFNTVFWSKTKQRKKNKKKKNKNV

SEQ ID NO: 241023 - protein, 138 aa, Zea mays
  Clone ID: MRT4577_151392C.1.pep
PPPLIGSLRERDRASASHVQWSPRGCASTKIQNSLDQKLQLPIVVKGLVLRTLDKVSCCYKVYSALGHGLCHHIFAYLLLKEYESIFNMTHFLASEKHQLDTLLLLSNSTLHTCLYEDPKFLGPKASASNSRRGKNGQ

SEQ ID NO: 241024 - protein, 74 aa, Zea mays
  Clone ID: MRT4577_151393C.1.pep
PQRQSYGHIFNTVHVLFRFIAHMGMAYAITFFACYLLLKEYESISNMRLHFLASEKHQLDQFAFVLLLLCSYLL

SEQ ID NO: 241025 - protein, 309 aa, Zea mays
  unsure (1)..(309): unsure at all Xaa locations
  Clone ID: MRT4577_151394C.1.pep
MIVRTYRRRSRSISVWDXDEDPPPSPPRSRKEGRRSGRGGARRGGGLELAEAPAMAPTVTLMEAEEYGEMMESVDDVTFALDGLRPAAQKRTRRASLLALLGICDSAERRRVLRSQGXIIDAILVLDIDDPPCAIAAGALLFVLASDVQDNNLLSSETCVHFLLKLLNPPVNVVDAKAPSIGSKLLGISKFQMLNSSNKDADSSSEDILLKVEEILLSCKEIKPLDSDDKKTTRPELCSKWLALLTMEKACLSAVALEDTSDMVLRXGGNFKETLRQLGGLDDIFNVMVNCHSELEKLVKDARQQRNSS

SEQ ID NO: 241026 - protein, 79 aa, Zea mays
  Clone ID: MRT4577_151395C.1.pep
RTLLLHTSFFFQGHARAFMHMQHALTISLISSLLLLRFLRILQILITKIMPSFSVFAVRSKNNAVLKWGGEVPILGVRL

SEQ ID NO: 241027 - protein, 162 aa, Zea mays
  unsure (1)..(162): unsure at all Xaa locations
  Clone ID: MRT4577_151396C.1.pep
MIVRTYRRRSRSISEGGGGVSSSQEAFDFDADVDVLGSSASQPLPPSQESSSMWDFDEDPPPSPPRSRKEGRRSGRGGARRGGGLELAEAPAMAPTVTLMEAEEYGEMMESVDDVTFALDGLRPAAQKRXAAASLLALLGICDSXERXRVLRSPGLGQQIID

SEQ ID NO: 241028 - protein, 51 aa, Zea mays
  Clone ID: MRT4577_151397C.1.pep
EQTSKVLIAFNLVTGGRQHVRCGFSSVTTVASKIFYLCVLQLQPVALVRLR

SEQ ID NO: 241029 - protein, 88 aa, Zea mays
  unsure (1)..(88): unsure at all Xaa locations
  Clone ID: MRT4577_151398C.1.pep
YCLQFGSKSVLSMSRLKCALRGFDLRVLLILLIGVPILIFAIYVHGQKVTYFLPTIXEKPPKPFTILPHYYHXNVSMXNLXQLHGWKV

SEQ ID NO: 241030 - protein, 153 aa, Zea mays
  unsure (1)..(153): unsure at all Xaa locations
  Clone ID: MRT4577_151399C.1.pep
MLPLAHPTRHPHPRPASRASPPERSPARARAGPRLPRRSSNALTLTRARSPTAEPGENTETTSAPASSSVLSFLCPLLKFFGGGDPSQERNDIVEVATSSLSSLARLPWGSNVAASSTESVSTPTSAPNLSLYDFEVCXPFCMKVREGMTDFD

SEQ ID NO: 241031 - protein, 52 aa, Zea mays
  Clone ID: MRT4577_15139C.1.pep
SGTWHYCSLGSSTSYVSVCSITNISNIDFIRECSIFFHRKCFQSHASHACMF

SEQ ID NO: 241032 - protein, 107 aa, Zea mays
  unsure (1)..(107): unsure at all Xaa locations
  Clone ID: MRT4577_1513C.1.pep
KKKKKKKKKKKKKKKKKXKNNKRKKDKKKKKKKKKKNKNNHQKKKKKKKKKKKHQHKKKKKSXXRLLVPPVLLPCPVVLAVLRLGAVALGASSWQSRARGVSAARPP

SEQ ID NO: 241033 - protein, 127 aa, Zea mays
  unsure (1)..(127): unsure at all Xaa locations
  Clone ID: MRT4577_151400C.1.pep
PLFTIQPITTNALPDGAIFLAQILMFVGNMYVWQPKCIGPXLPTRQXVMTAFCHIYDGYQIDAVKMKVCXNVLGLIKAGQPQHXKYCPLLEDLVYLYSALRLCTAIKVNGLGIHLELLLKLNFILNN

SEQ ID NO: 241034 - protein, 88 aa, Zea mays
  Clone ID: MRT4577_151401C.1.pep
FTGKSERFTVYGSILDDVHRHLLRVYLERGYFWEHSLYLHNLTSSHSDERMLHLKSVQSCRHAYSLFILVWLLPHRPPPSGYDYDFVR

SEQ ID NO: 241035 - protein, 177 aa, Zea mays
  Clone ID: MRT4577_151402C.1.pep
MADGTRKTLILREIPEGDVRSLLSDRESLAPCDVAVFVYDSCDEYSWQRARDLLVQVATHGENTGYEVPCLIVAAKDDLDQSSQALQESTRVSQDMGIETPIPISVKLRDLNNIFCRIVHAAQQPHLSIPETETGKARRQYRQLLNRSLMVVSVGAAVAVVGLAAYRVYAARKNSSS

SEQ ID NO: 241036 - protein, 238 aa, Zea mays
  Clone ID: MRT4577_151403C.1.pep
MAGATSLAAAANLAGKSSVRVVVIGDPGTGKSSLIVALATEQFPENVPRVMPPTRLPADYFPDRVPITIIDTSSSAEQKPKLIAECQAADAVVLTYACDRPATLERLSSFWLPELRRLQLKAPVIVVGCKLDLRDEQQVSLEQVMAPIMQSFREIETCIECSALRQIQVPEVFYYAQKAVLHPTAPLFDQELQALKPRCVRALKRIFIICDNDKDGALSDVELNEFQVRCFNAPLQPT

SEQ ID NO: 241037 - protein, 648 aa, Zea mays
  unsure (1)..(648): unsure at all Xaa locations
  Clone ID: MRT4577_151404C.1.pep
MASATSPAMAANLAGKSGVRVVVIGDPGTGKSSLIVALATEQFPENVPRVMPPTRLPADYFPDRVPITIIDTSSSPEQKPKLIAECQAADAVVLTYACDRPATLERLSSFWLPELRRLQLKAPVIVVGCKLDLRDEQQVSLEQVMAPIMQSFREIETCIECSALRQIQVPEVFYYAQKAVLHPTAPLFDQELQSLKPRCVRALKRIFIICDNDKDGALSDVELNEFQVRCFSAPLQPTEISGVKRVVQEKMPEGVNETGLTLTGFLFLHALFIEKGRLETTWTVLRKFGYDNDIKLRDDLIAVPIKRAPDQTLELTSEVVDFLRGIFNMFDIDNDGALLPAELEDLFSTAPENPWSCDPYKDCAEKNVLGGLSLEGFLSKWALMTLLDPTNSYANLVYVGYPGEFSSAFTVTRKRRVDRKKQQTQRNIFQCFVFGARGSGKTSLLQSFIXEGNLLMPCHLTANALQQILSKWLXGTRKTLILREIPEGDVRSILSDRESLAPCDVAVFVYDSCDEYSWQRARDLLVQVATHGENTGYEVPCLIVAAKDDLDQSSQALQESTRVSQDMGIETPIPISVKLRDLNNIFCRIVHAAQLPHLSIPETEAGKTRRQYRQLLNRSLMVVSVGAAVAVVGLAAYRVYAARKNSSS

SEQ ID NO: 241038 - protein, 80 aa, Zea mays
  Clone ID: MRT4577_151405C.1.pep
GSHARSFCAIAPAAGSAAPESAAGAPASAKVADRDVRVLAIDLEGARREVVGLAGQTLLRALANAELIEPASQRHEDIDA

SEQ ID NO: 241039 - protein, 42 aa, Zea mays
  Clone ID: MRT4577_151406C.1.pep
IYHAVIKIINYFSLLILIRYAVSNILYFSDSNGHVFYNVSEN

SEQ ID NO: 241040 - protein, 61 aa, Zea mays
  Clone ID: MRT4577_151407C.1.pep
SLLRALTLFLALRSGFCLRQLCPHVLINMMCAINFVLFKKKKKKKKKKKKKKKKKKKRGGV

SEQ ID NO: 241041 - protein, 102 aa, Zea mays
  unsure (1)..(102): unsure at all Xaa locations
  Clone ID: MRT4577_151408C.1.pep
VTYVVVQLCKMRFLPTFFPTWECGIYDLMWEFMKASVDVAALIGLNLVMSRTAGKGEYKIMAAXLGWATAELIMSRCIRLWVGSRGIDYXWEYIQMEHGSNI

SEQ ID NO: 241042 - protein, 97 aa, Zea mays
  Clone ID: MRT4577_151409C.1.pep
PSGKKGGAKSLGDQTLFKFFQHGVGKPKPKPKEKFPWELWEMGFIFKKSPVSRPPVKRFKKKVSPNFLRPKFRLGSLKILGPPGRKFITDLVPPVKL

SEQ ID NO: 241043 - protein, 156 aa, Zea mays
  Clone ID: MRT4577_15140C.1.pep
SALIRELRLLWWPLPSAAETGSGTLQCSPVSAALKSTLARGCPRRWSLLVWRSARAAPVWRAGVGAHRSFPQGGVVDDQLGWVVLRRHRLQFVQEECGQVFVGLSHRPAGWAPHAMSASKAVDRSSPVWLAIGVKRWQESEWDWRAVEYVETGGVG

SEQ ID NO: 241044 - protein, 344 aa, Zea mays
  Clone ID: MRT4577_151410C.1.pep
MARVASLLLTVIVAAAASLLLLLAPSAAELTRVEHPPKNEGSLAILAVGDWGRRGQFNQTLVAQQMGVVGEKLDIDFVISTGDNIYDDGIANTSDPLFKECFTNIYTAQSLQTPWYIVLGNHDYTGNALAQQDPAIREVDSRYLNLAKSFIVNSGIADFFLLDTSPFYLKYWNSSKYDWRDVAPRDTYIQNLLDDLDDALVQSEAPWKIVVGHHPISSGCEHGNTTELQELLRPILEARGVDMYVNGHDHCLQHISSRNSPVQFMTSGGGSKAWAGKFKTTSDKIEFIYDGQGFMSMQLSSTEAHLVFYDVAGNVLHSYDSTKSEEEDDGWPAGQQAAVRGSID

SEQ ID NO: 241045 - protein, 65 aa, Zea mays
  Clone ID: MRT4577_151411C.1.pep
YNSEYGNINTGQIPESFRIRVPESVAESVTLLCPVKPSRGQRVPQCLASPSHAHPDPASSRPRSR

SEQ ID NO: 241046 - protein, 89 aa, Zea mays
  Clone ID: MRT4577_151412C.1.pep
AVGLQRQIGPRGTGRLRLLAVALGIRRRLPAVRGVGGGSRRHGGRCRAGGAREVVHGHNSQALQEQQARLVRPLETPPAGRARGQPSVT

SEQ ID NO: 241047 - protein, 66 aa, Zea mays
  unsure (1)..(66): unsure at all Xaa locations
  Clone ID: MRT4577_151413C.1.pep
SCVFSFFFFMLPLFLSSIMFYMMMLQCXCYSVFYIMLXHYLPFMFKPMGMTIPPMFLQQPFVGAAF

SEQ ID NO: 241048 - protein, 99 aa, Zea mays
  Clone ID: MRT4577_151414C.1.pep
GRGEKEKIWIIKSPGLGEFVQGGKNWTFFLRGFRPAFWGKGFMFRRWTWDFSGQKMVSETWCGENQAHAGGLLLERGGMIKNKISWAPYPYPKRENFGK

SEQ ID NO: 241049 - protein, 76 aa, Zea mays
  Clone ID: MRT4577_151415C.1.pep
RTNNSYSYMSILASLFLQNVELEFPEECRSHFLWLQHRPNKRTHNCNSDMSSFASLFLAIVDIGIPREDPLESACR

SEQ ID NO: 241050 - protein, 90 aa, Zea mays
  Clone ID: MRT4577_151416C.1.pep
GVTLGQVVDQLYVSARYPTLGLSAPPKAFAQIKDKEIMRARLIMFSRCGFLVQAIVIDKGSVENLAEHFADAVNNKAWACSTKFVPCQVS

SEQ ID NO: 241051 - protein, 81 aa, Zea mays
  Clone ID: MRT4577_151417C.1.pep
IVTYGLTTDIFLCYVHVFEGGVICPKFIQTCCRKKKRVVCKPKKTMENLAIIIFLRGGGHPFNNPPGDFLGAQPFESKHAL

SEQ ID NO: 241052 - protein, 105 aa, Zea mays
  Clone ID: MRT4577_151418C.1.pep
PFRHLSKSKLVLKHGVLGKNFFGTTLLLPSRYNPHCPSVGPTLTNTHGFSVPKLPVLPWHSVIMAFNSADRLPSVQISQPYPRASESHRRTPTERAPVGGLGHCA

SEQ ID NO: 241053 - protein, 169 aa, Zea mays
  Clone ID: MRT4577_151419C.1.pep
KNLHGRRLFRPWALHACMETDYRTCRLSASVRASIKHKTDNSALAMMNGTDENPITQIYYLRDDDARPDSKDTMIYDKHRPSPAPPIYPASQRPLATETAITYTNLIRAQPARLCPAPQASEGSNHAKYSALIGGPGDTSLSLRRPSLRSNTWGLANIEGITQTDKNVV

SEQ ID NO: 241054 - protein, 187 aa, Zea mays
  Clone ID: MRT4577_15141C.1.pep
MTKDEGRSRESFVKKVQSMMMNELQATPWPPSYKPPQLPMYDGHSDPKQFLMSYEATISSYAGNTAVMAKSFVMAVMSVAQTWYSSLCPRTITSWQKLKDMLRREEACRYSEMTRGFRGRFHPRHVRTIHNPSTNDDRANHTHGNQQSSQSSGMQQTSYRPPAPRGRGGRSLGGRFNTQPRRLFCLF

SEQ ID NO: 241055 - protein, 57 aa, Zea mays
  unsure (1)..(57): unsure at all Xaa locations
  Clone ID: MRT4577_151420C.1.pep
NTVCPVTAARCAYATIQSYRLQEAITASXLRAVAWTAQQPCALSQQRSLVNVYMQRI

SEQ ID NO: 241056 - protein, 72 aa, Zea mays
  Clone ID: MRT4577_151421C.1.pep
LYIYKNRKRKGKIKKEKRFPQLVGPGGIRPSRAQARAATRAGGPLGPPAGERRRGHGPTCQMDGEADDARKG

SEQ ID NO: 241057 - protein, 132 aa, Zea mays
  Clone ID: MRT4577_151422C.1.pep
PPLPGSLGVCTPWEDGFRQWRPLGVSSRSFRRRAPFLVLCSNPFFEGLSVFYFPHLGLFPFSPPRGFPGGRPLSRLLGVAPIPGVRAPPPGVPPPVVPHGFFPVALCRWGPFGFPAFLPLLFAFFFRLPSVV

SEQ ID NO: 241058 - protein, 110 aa, Zea mays
  Clone ID: MRT4577_151423C.1.pep
TICSEMLNASDVHRHPVLDVVVCGSCRFLVIEKNRLEDPVSGSYCTWCAQSELIQSCSSCKLLFCTNCLSRNLGEECLSEAKATGWQCCCCVPSQLELLISECDKALSGV

SEQ ID NO: 241059 - protein, 136 aa, Zea mays
  Clone ID: MRT4577_151424C.1.pep
HPVFHVSQLKSALGRRQVVVPHLPFTNDPLQVPVQVVDRRMIQRNRTMIAQVKVVWSGMDAELATWEDAEALYNRFPRAPAWGQAVIEERGNVSTKGEQALSEEERSGEGRQREEESKRARIRRRNVRLCGPEWAM

SEQ ID NO: 241060 - protein, 54 aa, Zea mays
  Clone ID: MRT4577_151425C.1.pep
VIVISIEVRDVAFVSDGVLQRHVSGGLVKPAFRVAVHIIVLYESPLHSHVSCIY

SEQ ID NO: 241061 - protein, 124 aa, Zea mays
  Clone ID: MRT4577_151426C.1.pep
AWGLAKVAANLGVNNAGGAVPDPEALLAGSPGAGAGADGPKARAALGQFPRLYFDMELALAGAYDEINAREYPAGKEMAVEGIALGRRFDPVFPQAGMPSLLARRAEYAHQIPVLCIAIPALIE

SEQ ID NO: 241062 - protein, 214 aa, Zea mays
  unsure (1)..(214): unsure at all Xaa locations
  Clone ID: MRT4577_151427C.1.pep
LGSTGGDNGSAFSAADMNHXAAAHPALRSHLXVRPNNDRFSRDQLACSXSLQSRKQRGNLIFTTRSGRLGRRNEVQWLSPXQIPQREWIPSDFTFNAATSSHDIECAWNVHGKGVSDWDHFCDNDPXRIVVXSNSXDCGHSSYHMYXDGTXLLKDMVMDAYRISISWATILSKGSSEGGINPDAIKYXRYVIXLMVENGIXEXYVTILHWDVPL

SEQ ID NO: 241063 - protein, 58 aa, Zea mays
  Clone ID: MRT4577_151428C.1.pep
QQTQSHTTTQATPTLSHDNTPTYTVILTNSLIYKPYFIFTSFFTTSYFVLHLFYLLYR

SEQ ID NO: 241064 - protein, 140 aa, Zea mays
  Clone ID: MRT4577_151429C.1.pep
HASGQLEHNLYVPGSNTIEPLSIFVKNYIDLISAKYPYWNRTKGADHFFVACHDWGPYTTKLHDELRKNTIKALCNADLSEGFFIRGKDVSLPETFLRSPRRPLRDIGGRPAAQRTILAFFAGQMHGRVRPVLLKYWGNK

SEQ ID NO: 241065 - protein, 80 aa, Zea mays
  unsure (1)..(80): unsure at all Xaa locations
  Clone ID: MRT4577_15142C.1.pep
PTFFGISPPLRRMVPGGSNQFPGMFRRKAFLLWDPGKGMDKMEFPXAESHMTDLVFEAHQYQDAPPDEGGDEDEEEVHDE

SEQ ID NO: 241066 - protein, 83 aa, Zea mays
  unsure (1)..(83): unsure at all Xaa locations
  Clone ID: MRT4577_151430C.1.pep
MSVACKEDKKPAEGGAYINLKVKGQDANEVFFGLKRSTQLKMLMNAYWDRQFVNMNAIAFLLDGRXRLLKEXTPDNLEMEDGN

SEQ ID NO: 241067 - protein, 82 aa, Zea mays
  unsure (1)..(82): unsure at all Xaa locations
  Clone ID: MRT4577_151431C.1.pep
YVSSEFGSRRQQLLYPTTRNPAQPACIAATDYISMGGLHILQVITTATTTCVDGSSSIDHTAXLELWMTTTHGPGCKSCMVS

SEQ ID NO: 241068 - protein, 230 aa, Zea mays
  Clone ID: MRT4577_151432C.1.pep
HCIFFQGPYTTKLHDELRKNTIKALCNADLYEGFFIRGKDVSLPETFLMSPRRPLRDIGGRPAAQRTILAFFAGQMHGRVRPVLLKYWGNKDDDMRIYSRLPHRITRKRNYVQHMKSSKYCICPMGYEVNSPRIVEAIYYECVPVIIADHFVLPFDAALNWSTFSVVVPESDVPKLKQILLAIPESRYITLQANVKRVQKHFMWHPNPVKYDIFHMILHSVWFSRVNQIR

SEQ ID NO: 241069 - protein, 50 aa, Zea mays
  Clone ID: MRT4577_151433C.1.pep
FWGFVIAKEIAQRILTATTANIRSHLIEAYELIFVAGSWRTRRVSPRPQL

SEQ ID NO: 241070 - protein, 230 aa, Zea mays
  unsure (1)..(230): unsure at all Xaa locations
  Clone ID: MRT4577_151434C.1.pep
MAHYNFKKITVVPSAKDFIDLTLSKTQRKTPTVIHKHYQIHRIRHFYMRKVKFTQQNYHDRLSQILSDFPKLDDIHPFYADLMNILYDKDHYKLALGQINIAKNLVDNVAKDYVRLMKYGDSLYRCKQLKRAALGRMCTIIKRQRQSLEYLEQVRQHLSRLPTIDPNTRTLLLCGYPNVXKSSFINKVTRADVXDVQPYAFTTKSLFVGHMDYKYLRWQVVDTPGILDHP

SEQ ID NO: 241071 - protein, 131 aa, Zea mays
  Clone ID: MRT4577_151435C.1.pep
RIELESRRMSELFVAHLVNTTLLAPSSPESLYFLRMYETTTSWRFAGSSMTRNSGSRHKQHEIGNQIIEVDEHVVGTTWVDDEVVIKAERAERARWRAGNKTRGEARRGNSTRHGEQRGSAGGNSIRPTSS

SEQ ID NO: 241072 - protein, 133 aa, Zea mays
  unsure (1)..(133): unsure at all Xaa locations
  Clone ID: MRT4577_151436C.1.pep
LSHGKNWAWNLGFDDFLRXGLIEYLDVNEENNALIALYEHMDQDDVERSSITHIEIEPLSILGVVSGLIPYPHHNQSPRNTYQCAMGKQAMGNIAYNQLFRADSLLYLLVYAQRPLLTTKTXELVGSTATEFT

SEQ ID NO: 241073 - protein, 89 aa, Zea mays
  unsure (1)..(89): unsure at all Xaa locations
  Clone ID: MRT4577_151437C.1.pep
FMKAELYILFSVKLPDSLSPNQFXALETMLPPKAVSQYTDMELVEFEKTXLNXVNIQTEIRRRQHQHQKASAQNEDIPGGAHRVQWDHQ

SEQ ID NO: 241074 - protein, 109 aa, Zea mays
  Clone ID: MRT4577_151438C.1.pep
WQLGSSWLQQLQKKDTPASENGKGNAMKTDKEPAVRGLGKHFEQLRKLKKKECNNEGSSSEKEECSNNYSSMNGTQVSDMIAADEANNGADISKLMSEDAFLSLKSLGA

SEQ ID NO: 241075 - protein, 98 aa, Zea mays
  Clone ID: MRT4577_151439C.1.pep
MAAAEEEIAVKEPLDLIRLSLDERIYVKLRSDRELRGKLHAYDQHLNMILGDVEEVVTTVEIDDETYEEIVRTTKRTIPFLFVRGDGVILVSPPLRTA

SEQ ID NO: 241076 - protein, 41 aa, Zea mays
  Clone ID: MRT4577_15143C.1.pep
LTITELKQYEKLPTKKKQSTSPLGPIKLLILNKFYFFHIFL

SEQ ID NO: 241077 - protein, 73 aa, Zea mays
  unsure (1)..(73): unsure at all Xaa locations
  Clone ID: MRT4577_151440C.1.pep
FKESKDLGANWPGSFAWFFLGNFERVSGSPGRFGLVLFGPHDGCQPFIKRAAQWXLKXYSAKKTGAQKIFSPA

SEQ ID NO: 241078 - protein, 95 aa, Zea mays
  Clone ID: MRT4577_151441C.1.pep
YSRPCMFALFDTFIVDLAINGRYVSRLAPLYLSFVLNVRWFGLIVTQVLFHPVLHIFRCRSAMLWTFLFEKWAPRHVPVRYCRVRPRAQTGFPCF

SEQ ID NO: 241079 - protein, 106 aa, Zea mays
  Clone ID: MRT4577_151442C.1.pep
GCRSSPVVRFRCRSRCSIALLQREAGTSHSRREVVAQVLAQVVVVVGGGESVHFSAFVGWRGSTQMPQQGALGYWMSACVTVPVPGIGITASGVFETWCLCSSDAS

SEQ ID NO: 241080 - protein, 50 aa, Zea mays
  Clone ID: MRT4577_151443C.1.pep
GLFALAINLQVSISMDIPIQNESKPYHCLLLIFLYIDSFIAISCMHSNVH

SEQ ID NO: 241081 - protein, 71 aa, Zea mays
  unsure (1)..(71): unsure at all Xaa locations
  Clone ID: MRT4577_151444C.1.pep
LAPIPVTGPGINPARSLGSRVIYNKHKPWGAHXIFWVAPXLVGAAIPAFYQQYIFRPGAIKALGSFSTNAS

SEQ ID NO: 241082 - protein, 44 aa, Zea mays
  unsure (1)..(44): unsure at all Xaa locations
  Clone ID: MRT4577_151445C.1.pep
PTEPTREESVYMDNLAEHAERYEEMVEYMERVXRYAGGYGGGDQ

SEQ ID NO: 241083 - protein, 63 aa, Zea mays
  Clone ID: MRT4577_151446C.1.pep
SESQGRMDTIYFLCATERAISRKSMFNYKAALFLETLVLNYRGEAVLTSRTWAVRIHRLVYTN

SEQ ID NO: 241084 - protein, 66 aa, Zea mays
  Clone ID: MRT4577_151447C.1.pep
VKIKNVRLCILAQVPIITYTRASTLSPSHNYSSSSTSVADYFAAPFLVSAWIFPPFIMKNPPNLQS

SEQ ID NO: 241085 - protein, 534 aa, Zea mays
  Clone ID: MRT4577_151448C.1.pep
MDPKGKGMVVNDKEKKSFLNEPRDDKPTDSSSSHKKKDGKKKRRIKKIVYYDSDASSSSPRDDDDDDSSLKKKTDTLKISHEGNDATMITKMELVEGELGRFAMIRGEEPTQTYNRLKTLVNKIRSYGSTRWTDHDVVRLMLRSFTVIDPHLVNLIRENPRYTKMTPEEILGKFVSGRMMVKEARHMDDALNDPLPIYESQPVALKATSSKEALPSKVAQVEAADLNKDEMALIIKRFKTALRGRMEYPNKNKTKGKRSCFKCGKTGHFIAQCLDNENDQGQERHGKKEKKKSYRKAKGEAHLGKEWDSDCSSSDSDDEGLAASAFDKSSLFPNERHTCLMAKEKKVNVRETPKYTTSSDDDSSDDEVDYSSLFKGLDRVKVEKINELIDALNEKDRFLEKQEDILYEELDKFVSVQKSLALETKRNEMLSSELSACHESISSLKILNDDLNAKIEEVNKSSSCVEHVVICNRCKDFDVDTCNEHLIAITKLNDEVSSLNAQLKTCKSDFEKLKFARDAYTIGRHPSIKDGFGF

SEQ ID NO: 241086 - protein, 134 aa, Zea mays
  Clone ID: MRT4577_151449C.1.pep
NKQKRRRVRQQTICQKHEQSKAQQTKRTIATRQQQQFRPAMSHQAMVNPAANLQQQLLASNPPALANEGANQPQQQLQQLQPALSQLAMVNPAAYPQQQQLLSSSPPAVAKAPTNLQQQMMQQIEPALTQQDGQ

SEQ ID NO: 241087 - protein, 70 aa, Zea mays
  Clone ID: MRT4577_15144C.1.pep
RCCSCSLFFPSVRKLPSGPCFFLRPTTSFGCLLRWIFLRLLRPSTDSALAPSFSTPPTLMRALHELFINH

SEQ ID NO: 241088 - protein, 90 aa, Zea mays
  Clone ID: MRT4577_151450C.1.pep
RHLICLVQKPVKASIAIRPLLIGFSRNSLGPPYPLEEAEWLHRPRCVYLPPCESRPAELAQGSADSPAPAVQKGTTVQRTCESPRIFGRG

SEQ ID NO: 241089 - protein, 153 aa, Zea mays
  Clone ID: MRT4577_151451C.1.pep
MGPKPASKTATKTGKQANAAAKAALKGSYANKKRAIRKSTSFHRPKTLELSRAPKYPRKSVPHAPRMDAEKVLIHPLNTESAMKKIEENNTLVFICNVKANKRQIAAALKKQYDVSCVKINTLIRPDGSKKAFCRLTADVDALDIAATKLAIV

SEQ ID NO: 241090 - protein, 67 aa, Zea mays
  unsure (1)..(67): unsure at all Xaa locations
  Clone ID: MRT4577_151452C.1.pep
QSVQREYHGDFTIIVSNMVIVCTLVASAVYKSDMYKFIGVAGETTVXVEEHKELNLLSNEVFCKGSS

SEQ ID NO: 241091 - protein, 63 aa, Zea mays
  Clone ID: MRT4577_151453C.1.pep
YFGVFHTQFSIGGFFLDFFVSPLQYVVFKKKTGDFLKKKGGRKNNRGVFLKNPGGILGVNKTP

SEQ ID NO: 241092 - protein, 42 aa, Zea mays
  Clone ID: MRT4577_151454C.1.pep
ESLVSSSRPSHTGAPGIVLSPTGSGLLYFAHYLKLCISTALR

SEQ ID NO: 241093 - protein, 138 aa, Zea mays
  Clone ID: MRT4577_151455C.1.pep
MGVGNGSADVNQQTARNEIRDETAPLLPVKVEEEGFHEFNGASFSGAVFNLSTTIVGAGIMALPASIKMLGLIPGLLMIIFVALLTEASIDMLIRCSHQGKITSYGWLMGEAYGQWGRIALQASVVINNIGVMIVYMI

SEQ ID NO: 241094 - protein, 71 aa, Zea mays
  Clone ID: MRT4577_151456C.1.pep
TLMEKAKGQYLHVHHDDFLRRRPSKNSNSAIINLIYPSAENFCCDNLHAHTISINVIELCYIYVGWANFVG

SEQ ID NO: 241095 - protein, 150 aa, Zea mays
  unsure (1)..(150): unsure at all Xaa locations
  Clone ID: MRT4577_151457C.1.pep
LDTGSLRIWLGIRSTLGCVIVNLVAHPSFYGVQDXAIXDTYVKVNCIVASFLLHHQPPLDKKSFVSYIQKHIXNLTGELDSEKDSEYHLMRSSVQPPFSLLYRKTSHIFLITPFNDDAPVILSYYIHGASTSTFLYFSLGLKDTSRYLTC

SEQ ID NO: 241096 - protein, 46 aa, Zea mays
  Clone ID: MRT4577_151458C.1.pep
STYCYHDPPKDDYSRGRKHRGPIQISCHQLTSQAEVAKDTSRRPQN

SEQ ID NO: 241097 - protein, 122 aa, Zea mays
  Clone ID: MRT4577_151459C.1.pep
ILLTTPPAGKTPRPHGDATATDIKDNTTHDSDSNDTPSMAPSDGDTAYDKASTFGMEATPRITMTETLPGSTKSLAGSNATRANWLTSLGTTMTANLLNNWRAGGTPTPYMKGRSHHSREQK

SEQ ID NO: 241098 - protein, 101 aa, Zea mays
  Clone ID: MRT4577_15145C.1.pep
GLKIRLQRQYPTDITKQEPPPNTIHLPASCAGDNNKSLAHHNRLHAGMFRTQRPKPMATATLRPKATEFPTRLHPCLSAPLLYGLLSTNGWLPNSNVWPTF

SEQ ID NO: 241099 - protein, 109 aa, Zea mays
  unsure (1)..(109): unsure at all Xaa locations
  Clone ID: MRT4577_151460C.1.pep
AAQPYPASTSSESALEVADGSVTVAEAEEPTPSSKPNVKFRXITSILNTQFIADSQKVKTVPHLMTDDIIDLMMLPTIKRRSSLFNGIIITVHXAGVHTTICSRTIIAG

SEQ ID NO: 241100 - protein, 123 aa, Zea mays
  unsure (1)..(123): unsure at all Xaa locations
  Clone ID: MRT4577_151461C.1.pep
PARFWPPRRGGPPALFQXKSFGGLTGXWGGGQPPPPPPWSPRGPGFFGARTQGWGGLQPLPRGGPRAQGEFPPQGYXPPGGRHPRPFVPAWVPFVCLWLPGCPGSLFLAFVGARPQLLFEFRQ

SEQ ID NO: 241101 - protein, 65 aa, Zea mays
  Clone ID: MRT4577_151462C.1.pep
QRTSTGIRCFPSMPCNQITSCIFSSRYGACIIVPLIGCSSSLLHKRYNLRFSTNLEKNSFRSRAE

SEQ ID NO: 241102 - protein, 52 aa, Zea mays
  Clone ID: MRT4577_151463C.1.pep
LPHSIGVAASLGPPGFSHYVSGCDSCLELSPESHFPTVTPSALLSPSGRLTL

SEQ ID NO: 241103 - protein, 191 aa, Zea mays
  Clone ID: MRT4577_151464C.1.pep
MVLAPGEDEIHSRLQILELDLSAALKTLRSRFDKVLSDLSNSNGATVLDDISDDWEFEETKVMQAQEELRSIRAKIAVLEGKMALEIIERNKIIEDKQRRLDKVEKALSELRTVCIMWANPASDVLVVGSFDGWTSQRKLERSENGMFSLNLRLYPGRYEIKFIVDGVWKNDPLRPTVHNNGHENNLLLVT

SEQ ID NO: 241104 - protein, 47 aa, Zea mays
  Clone ID: MRT4577_151465C.1.pep
LPFVQLALTDPSFFYQQHIISWCPILDCSLVVIQYKVLRMMSVANQK

SEQ ID NO: 241105 - protein, 153 aa, Zea mays
  Clone ID: MRT4577_151466C.1.pep
LLGLQYKIQYRPGSENRVADALSRRVDAECQAVSAVVPQWLKNVQTSYEKDPEALSLIAKLSLDPTAAPHFILKEGILRYKGRIWLGDDPQLKNRVLSALHTSAIGGHSGIPATYRRVKSLFAWPKLKQFIQEFVQQCQGCLQAKPDRLAYPG

SEQ ID NO: 241106 - protein, 105 aa, Zea mays
  unsure (1)..(105): unsure at all Xaa locations
  Clone ID: MRT4577_151467C.1.pep
SCPGSALSPDALQFHRLLLCTWPPLTAGGDICFRPPSSSKRRSSRRCSSPLSAQPAGYKSSSAQPQPFFLLCRALWVGFRLPAFEAPKPRPWXLPPWXLLSPPRS

SEQ ID NO: 241107 - protein, 87 aa, Zea mays
  unsure (1)..(87): unsure at all Xaa locations
  Clone ID: MRT4577_151468C.1.pep
LGGNDGQWIERFAGKTVDCNKGDCPNEKRQRSXGYDDVPMGGAAAGPFMDTSTNAVVKPEEPKPLALSDRDMVFYTGKRVVVSKSDG

SEQ ID NO: 241108 - protein, 223 aa, Zea mays
  Clone ID: MRT4577_151469C.1.pep
MALVRGRPASLLLLAALLCAATFLAVPAAATGKTGQVAVFWGRNKNEGSLREACDTGTYTIAIISFLGVFGRGNYHLDLSGHDVSAVGADIKHCQSKNILVFLSIGGFGNQYSLPTAQSAADVADYIWNAYMLGTRKGVYRPFGDAFVDGIDFFIENGAPANYDELAKRLWNFNKDFRGRTPVQLTATPRCGYPDRHVEWALATGLVGRIFVRFYDDADCAAN

SEQ ID NO: 241109 - protein, 177 aa, Zea mays
  Clone ID: MRT4577_15146C.1.pep
MSEEYNMDDALKAKNVAETKFHARDIRGARKYALKAQNLCPTLEGILQMVSTLEVHLAAESKIDGESDWYRILSLGAFADEEEVKKQYRKLALLLHPDKNKSVGAEEAFKLISEAWSVLSDTSRKVVYDEKRRNHSVVNVTNGIYTYDKKANKRARKMPLLQLLPPPLLQPQLRLPL

SEQ ID NO: 241110 - protein, 103 aa, Zea mays
  Clone ID: MRT4577_151470C.1.pep
KGGRVTRWFALLSLGDWISPGVYGSGVSTGFPVGGRYASLRRGGKPRYILLRGRAMNTYNTSVPRIRTRAEEHPLFTVCHLQRTIGRLAEGTSEILGGNVPST

SEQ ID NO: 241111 - protein, 225 aa, Zea mays
  Clone ID: MRT4577_151471C.1.pep
MDMEVYERLTAETSHYRGTRFDALIGLDEVEPSDEEEDEEEEERAAGAGAGDELLCPFCSEELDAVGLWCHMDDEHRAEVNAGVCPICTDKVDMNLIVHISSQHRGFLKDKWRNQQGSSGVRYSTLALLKKDLHERISGSSRAAPVSTVPDPLLSSFVGSFYEVDLPKDAKKESLVETEVRSDNIEQRAAESFDEPLLPEVKEEKTRRSQFVQGLVLSLMFDDIL

SEQ ID NO: 241112 - protein, 108 aa, Zea mays
  unsure (1)..(108): unsure at all Xaa locations
  Clone ID: MRT4577_151472C.1.pep
QLEAQCQETCKDTVQIHDITGKDCQDIANKGAKQSGLYFIKPLKANQQFLVYCEIDGSGNGWTVFQKRLDGSVDFKRNWIQYKEGFGHLSPTGTTXFWLGHERFFDST

SEQ ID NO: 241113 - protein, 81 aa, Zea mays
  Clone ID: MRT4577_151473C.1.pep
ELAGRHASADLTEAVLGRWFNWTPRHTFPGRRKTPYSRCVFKLYMSFSHSPLFLFWFMKYNKLINHQFIAHNLIISNNIKN

SEQ ID NO: 241114 - protein, 110 aa, Zea mays
  unsure (1)..(110): unsure at all Xaa locations
  Clone ID: MRT4577_151474C.1.pep
MTLLHEESHKLLKVYDRRGSMVLTGSNTRRYASLCSCIFIDARYNELECHEIXIHHYVXLLDRYVRSVXELDLIXNCHNAYYILDEIFIFGELQESSKRXVARLIAAQDS

SEQ ID NO: 241115 - protein, 208 aa, Zea mays
  Clone ID: MRT4577_151475C.1.pep
KIQEALRSLNEYKRSRELDGVSYYDSFKLQREVHDFNANVKRLELAGLWDEIVEMLRRRELPDGFEAREEWVSLGTLFRRLVEPLDIANYYRHSKNEDTGSYLSKGRPRRYKYTQKWHEQLQRVPVGSSLESCFWAVVEELQAEMADGRAFEDLRDRLVKLENDAHGWYNSGSLGKDVFLGSSSFVAWWRTLPEQHRAASSIAKLVSL

SEQ ID NO: 241116 - protein, 106 aa, Zea mays
  Clone ID: MRT4577_151476C.1.pep
MEKFLKHTSIHGLWLLSIILFASSVIHARIISGQIKEDANARSLTMTTVTSAGDNMTGSVDGEASSGLLSAKYFFGFYLCKKTGRIYRGLPECMAHCLLGVCTKAY

SEQ ID NO: 241117 - protein, 69 aa, Zea mays
  unsure (1)..(69): unsure at all Xaa locations
  Clone ID: MRT4577_151477C.1.pep
TQETKLLLVIVPVVCDEDGNPFGDDSSTSRSCSLSYLSLSMALGGXFLWAHTFSLLRWGGGLWCCLFAF

SEQ ID NO: 241118 - protein, 123 aa, Zea mays
  Clone ID: MRT4577_151478C.1.pep
RNLEILVGKQTENISTLQQANEELQKNIYTLTEQSQQVKVEMQSDLKAIQEEKNAVLSQLKQSETSVQNLENEVIRLKEELSVQLENNSTLDKQFEEARSNLHAEISELRADKNTSLLKLQTS

SEQ ID NO: 241119 - protein, 64 aa, Zea mays
  Clone ID: MRT4577_151479C.1.pep
KITPPHFPRSIIWWSIQTQIDIWDERKLLSHWIKTIAGKDWLLVTVGSMHTYYQKIFSTHYPLE

SEQ ID NO: 241120 - protein, 109 aa, Zea mays
  unsure (1)..(109): unsure at all Xaa locations
  Clone ID: MRT4577_15147C.1.pep
LFGVTSRGSSHGSFVDGISTRKLVLVVGLDFYYSDRRDCRFGDLQSEMANMNTFLALSEAINWPSGSYSVRMCSFGTLQLFILFILISHXLYCIQLYKGILYKKHCRVP

SEQ ID NO: 241121 - protein, 83 aa, Zea mays
  Clone ID: MRT4577_151480C.1.pep
PFRRVGNDDRHARRRAPGGGGGGRGRRVRRRWPSPCTRTTPPPCHVGRQPPQPPPPPCGRKNRSSIEAVLYPLRLGEGPGERR

SEQ ID NO: 241122 - protein, 217 aa, Zea mays
  unsure (1)..(217): unsure at all Xaa locations
  Clone ID: MRT4577_151481C.1.pep
MGHSLSSHSKSTLSSSFAPPARDYTQDLPDEILALVFASLSPTDRNACSLACSRWMEVDATTRHRLSLDARAALGNAAPALFARFTAVTKLALRWARGSGADSLSDYGAAAVAXRCPXRLSRLKLRGLRQLSDAGLASLAAAAPAIRKLSVASCTFGPKAFVAVLQSCPLLEDLSVKRLRGLPDTAXPPLSLLRTSNFHRASSLRSCCLKELYSALC

SEQ ID NO: 241123 - protein, 63 aa, Zea mays
  Clone ID: MRT4577_151482C.1.pep
LLNRRPFFFFFLQERKKHSHCLFNIPKMSELDNIFRLAYYNQYLQKNHINYPLIKLYIPQSGS

SEQ ID NO: 241124 - protein, 545 aa, Zea mays
  unsure (1)..(545): unsure at all Xaa locations
  Clone ID: MRT4577_151483C.1.pep
MGHSLSSHSKSTLSSPPRRSRSLSPMSPPPLRLTAPMQIAAEDSGSDSSSSFAPPARDYTQDLPDEILALVFASLSPTDRNACSLACSRWMEVDATTRHRLSLDARAALGNAAPALFARFTAVTKLALRWARGSGADSLSDYGAAAVATALPSGRLSRLKLRGLRQLSDAGLASLAAAAPAIRKLSVASCTFGPKAFVAVLQSCPXLEDLSVKRLRGLPDTAGATTSIAEDIKFPPTSSLRSVCLKDLYNALCFVPLVASSPNLRSLKILRCSGAWDLPLEVIAARAPGLVELHLEKLQVGDRGLAALSACANLEVLFLVKTPECTDSGIISVAEKCHKLRKLHVDGWRTNRIGDFGLMAVARGCPDLQELVLIGVNPTVLSLRMLGEHCRLLERLALCGCETVGDAEIICLAERWAALKKLCIKGCPVSDRGMEALNGGCPSLVKVKLKRCRGVSYECIENLKVTRGESFSISLDVVLEHDARSASENGAQENGQAQITALTDQMAGMDLPVNAAGAQSSTHTITRMRSVVSALRRRFGNPPPP

SEQ ID NO: 241125 - protein, 134 aa, Zea mays
  unsure (1)..(134): unsure at all Xaa locations
  Clone ID: MRT4577_151484C.1.pep
GVIRPPKEVFDPPPPYIKSLPPWGEFPEGISPLNSPLGGPQFPGSVPLTPAPVPKIGLGPQEKPXPNPVAPPPPTXSPLMAPPFPPRPKPPCTLNPPLPPRVLXVSPFPFEPPPPPKXYPVDVPPHPPPKNFFF

SEQ ID NO: 241126 - protein, 82 aa, Zea mays
  Clone ID: MRT4577_151485C.1.pep
TFTPLKNKRSPPPETKFAMVFDLFKKPPLLKIWGRGGFFHPPPMRRHYVEKQFHPLFGGDPPWKRGPNSQKPFPKKGGGNET

SEQ ID NO: 241127 - protein, 154 aa, Zea mays
  Clone ID: MRT4577_151486C.1.pep
MAGLAGRPGSWGGLVLRVGQALFAAACIGVMGSSLGFASYTAFCYLIASMGLQMLWSFGLACLDGYAIRANKDLTSPILLSLFVVGDWVTAILSFAASSSAAGVVILFQKDVLFCRRYPQLPCGKYELATAFAFLSWALSATSALIMFWLLAAF

SEQ ID NO: 241128 - protein, 73 aa, Zea mays
  Clone ID: MRT4577_151487C.1.pep
KYKRKKNQYIFVNKGEKKIKKKIYKDVNNECTLEIPSSGRHHTIGMLGTKICTKDVSAYPDNKRSNQEICTDR

SEQ ID NO: 241129 - protein, 48 aa, Zea mays
  Clone ID: MRT4577_151488C.1.pep
LVLIECAFREPLSSALVQIRTIFMQRRNLELNICSCVVPNNNYTTLVS

SEQ ID NO: 241130 - protein, 734 aa, Zea mays
  unsure (1)..(734): unsure at all Xaa locations
  Clone ID: MRT4577_15148C.1.pep
MSEEYNMDVALKAKNVAETKFHARDIRGARKYALKAQNLCPTLEGILQMVSTLEVHLAAESKIDGESDWYRILCLGAFADEEEVRKQYRKLALLLHPDKNKSVGAEEAFKLISEAWSVLSDTSRKVVYDEKRRNHSVVNVTNGIYTYDKKANKRARKNAAAAAAAAAAAAAAEATTRPVGIDTFWTSCNRCRMQYEYLRIYLNHNLLCPNCHNAFLAVETGFPXMEAAHHSHGQPSSSXQQNHNSTKHSYGSTSRTSSIPGTGNGGYQQDNTYDSYNNQGFQWNQYSKTTTAAVTNAYSTQALEKQRRKHDESYSYNYSESGNTYVXMRKLLQGAVASQSGEGITMMLIPXDYGGXQRNSCCNCKHRTNCCFYXVGRVNGTSAERFRSAVSGRRANVLGEITQIDTRNLLLEKAKATVCEKLHELNITPSSRAADRRGSEGKLYPCDNNXRSTVSSLTNLARESSYATQEXEIQVPATDDKNPEQRRVPVSIDVPDPDFHDFDKDRTEKAFDTDQVWATYDCEDGMPRLYVMVQKVLSTRPFRIRMSFLNSKSNIELAPINWVASGFQKTCGDFRVGRYQVSETVNIFSHRVRWTKGPRGIIRIVPQKGDTWALYRNWSPDWNELTPDDVIYKYEIVEVADDFTEERGLTVIPLLKVAGFKAVFHRHVDPEEVRRIPKEELFRFSHRVPSRLLTGEEGSNAPKGCHELDPAATPVDLLKVITEHKEDAVAQSPK

SEQ ID NO: 241131 - protein, 50 aa, Zea mays
  Clone ID: MRT4577_151490C.1.pep
VMGLFISAFHKVYMNSNLYYIDTFGLLEGVDTKARLQFSVNSTVLLFIYL

SEQ ID NO: 241132 - protein, 71 aa, Zea mays
  Clone ID: MRT4577_151491C.1.pep
KSYSPPPPPVLYNIGYPYNLLFFFYIFFYKFIFFLYFFFLFFFFFFFFFFFFFFFFFFFFFFPTPRTRGRT

SEQ ID NO: 241133 - protein, 70 aa, Zea mays
  Clone ID: MRT4577_151492C.1.pep
ADRSQSCASLFLPSRGSGDPLRGERERESPMALLTRNDKREISVMQSLTTQCRLPPIRSCSQRRGQQRHS

SEQ ID NO: 241134 - protein, 81 aa, Zea mays
  unsure (1)..(81): unsure at all Xaa locations
  Clone ID: MRT4577_151493C.1.pep
MPYTAPRPSPHHHSRVLSGCGANAASHGASCAAVPAEVARHHEHSVRAVQCCSAVVHAIAAPMGAVXSVVQHFYRPQAYKH

SEQ ID NO: 241135 - protein, 32 aa, Zea mays
  Clone ID: MRT4577_151494C.1.pep
TLNDSLPRTLNGFNNLTLTKPYTLKLLSPFYR

SEQ ID NO: 241136 - protein, 73 aa, Zea mays
  Clone ID: MRT4577_151495C.1.pep
FRGRFGKKLYKFLKNKKKNEELGTTQIKLMYLEWHWKNILSYSFGSHKQLVQMVSDPYDKTLTEKPWQTLKAP

SEQ ID NO: 241137 - protein, 60 aa, Zea mays
  Clone ID: MRT4577_151496C.1.pep
AIAIPTRRARFYFVGMEEGGWRREEGQMVCLCDHEWRAGARLSSCGPVIGGRETVSFRSK

SEQ ID NO: 241138 - protein, 123 aa, Zea mays
  unsure (1)..(123): unsure at all Xaa locations
  Clone ID: MRT4577_151497C.1.pep
LTKPRRPSEKERFDAGLGLARQSGLWRKPELXRAQYALSGIXTAARDLMTXDENNPPTISEDQSHHLRMNXYGLLARGQNKLDYINTLTFKNSLARDMLTLDLKGGMTNDIHHAQVLTNQCYI

SEQ ID NO: 241139 - protein, 42 aa, Zea mays
  Clone ID: MRT4577_151498C.1.pep
RDYNKQQYLNMLEFCVEHISIYLNRVKDVRPIECPIKFRYCR

SEQ ID NO: 241140 - protein, 98 aa, Zea mays
  Clone ID: MRT4577_151499C.1.pep
TEKENLCLYGYPDETWEVTLPAEEVPPEIPEPALGINFARDGMNEKDWLALVAVHSDSWLLSVAFYFGARFGFDRETRRRLFSLINNMPTIFEVVTGA

SEQ ID NO: 241141 - protein, 45 aa, Zea mays
  Clone ID: MRT4577_15149C.1.pep
RADSARVTLQVVRFTSEQTYPESRLLITAASLPRRRYSWPTATAV

SEQ ID NO: 241142 - protein, 80 aa, Zea mays
  unsure (1)..(80): unsure at all Xaa locations
  Clone ID: MRT4577_1514C.1.pep
VWVFFFFFFFFFFFFFGARSYPIRLDKLILRLVPNYLFHRVLYFFTPVLMVVGGTHTFSTNSFLLXALKNKTFPLGKSSF

SEQ ID NO: 241143 - protein, 67 aa, Zea mays
  Clone ID: MRT4577_151500C.1.pep
GARTAIFTQLRRALLHKAERYKRDCLRWLQLINVRAWNCNLSVAGLNWTFFSIGYHHQGTGDRGDNR

SEQ ID NO: 241144 - protein, 129 aa, Zea mays
  Clone ID: MRT4577_151501C.1.pep
TGHGLYGYSPIKWKRHLTRCLNRLNDRFRRTIFRLRFDYHFLPYFNPSTNTDKYIFKYKHVSYIRISIRVFTRFSSNCVLLQEAPVNNGICASRRNLDGFRIDVMPPAMYVAQHLLPAFHDRVEKNYAM

SEQ ID NO: 241145 - protein, 93 aa, Zea mays
  unsure (1)..(93): unsure at all Xaa locations
  Clone ID: MRT4577_151502C.1.pep
METDLTAAQLLAYYRTDPSKPIYVFVRGKVYYVTSCRGFYSPSGAYAVFSGREASRALCKMFNDEGDVFGDPFGLTDKELRLSXTWETNFLAK

SEQ ID NO: 241146 - protein, 219 aa, Zea mays
  Clone ID: MRT4577_151503C.1.pep
PTRPPTRPPTRPPTRPFISWRCSSLGDAEGIEKLASLAKEHGKNNVAFLCLFMLGKVEDCIQLLVDSSRIPEAALMARSYLPSKVPEIVAIWRNDLSKINPKAAESLADPSEYPNLFEDWQVALTVEKSVASQRDHYPPADQYLNHAEKSDMILVEAFKRMQVIEHEEPEDAAEENGEPDQQASEEKEMHNTDDADEHEETVSVNGNEGEEQQVLTEHE

SEQ ID NO: 241147 - protein, 227 aa, Zea mays
  Clone ID: MRT4577_151504C.1.pep
MEVLVDKPEEKVVVNASNLGNFVGKPVFQAERIYNQTPVGVVMGLAWNAMGGSTLYIETAKVEESKGKGTLFVTGQLGDVMKESAQIAHTVCRAVLLEKEPNNPFFAKSKLHLHVPAGATPKDGPSAGCTMVTSMLSLAIGKSVKKDLAMTGEVTLTGRILPIGGVKEKTIAARRSGVKTIIFPSANRRDFDELASNVKEGLEVHFVDKYSEIYDLVFTSDTKTQES

SEQ ID NO: 241148 - protein, 253 aa, Zea mays
  unsure (1)..(253): unsure at all Xaa locations
  Clone ID: MRT4577_151505C.1.pep
MPAMAVDKQRLLPLFVLALVTPACLASGGEEPARFQIPQDGSVVELDEGNFEAALAAVDFLFVDFHAPWCGHCKRLSPQLDEAAPVLAGLSTPIVVAKVNAEKYKKLGSKYGVDGFPTLMLFDHGVPTEYTGSRKAGQLVESLRKLVAPDVSVLKSDAAIKSFLQEAGVGFPLFIGFGVDESSIAEYGARYKKKAWFSTANDFSEDLMAVYDFDKIPALVSXHPKYNEQSVFYGPFEGXFFEDFIRQXLLSDT

SEQ ID NO: 241149 - protein, 54 aa, Zea mays
  Clone ID: MRT4577_151506C.1.pep
HEGGSERQGRKRPRLGNCGEEGEGALRSGCRGKRGRRRCNYGDQRGASCKSGRR

SEQ ID NO: 241150 - protein, 103 aa, Zea mays
  Clone ID: MRT4577_151507C.1.pep
MGLFDMFSEQHGEVHQTPHEHKGHLSHELIAGAASYEAVKAYQKHCEEKGEPVDHRTAKALLAGFAGAALDKLIETKGLDFIDKQKAKRHAEEQVKQYYEEER

SEQ ID NO: 241151 - protein, 212 aa, Zea mays
  unsure (1)..(212): unsure at all Xaa locations
  Clone ID: MRT4577_151508C.1.pep
TLGFGRDALIFSRSSSLLRTRGAASSIFLPAAAPERPALCSSLPRALASXRGAPGAGSSAPGHPLSPSPWSXFSSRALLGSMANVPQAPPSSPAAXAPCAPAPARVPLLVAPSESPWSSTRGSPLSSPPASTPSSRSSLDCARPPALLSRSSSTLPLFPWLTALLLNAAVLCARAWGFLAVARAPSSALLGHGRHDVAPCSRPTPCVRLRPS

SEQ ID NO: 241152 - protein, 112 aa, Zea mays
  unsure (1)..(112): unsure at all Xaa locations
  Clone ID: MRT4577_151509C.1.pep
IREDLRPQFMIDGXAHTGDIGKWQPHGTLADCDRRNKIFKLSQGEYVALVNLEHVYGXSKXIDSICVYGNRLECCIVGVXNSNQSALERCAKQNGVTGSFAELRQHPMFREH

SEQ ID NO: 241153 - protein, 274 aa, Zea mays
  unsure (1)..(274): unsure at all Xaa locations
  Clone ID: MRT4577_15150C.1.pep
MAAPAPATTGDLLRVDPLELRFPFELKKQISCSMQLSNHTDDYIAFKVKTTSPKKYSVRPNTGVVLPRSTCDVVXVDLSTYQSVCVWASHHPFCRFYVFICTVVVTMQAQREAPPDMQCKDKFLVQSVVAPAGITVKDVTGDMFTKESGYKMEEVKLRVTYVAPPQPPSPVPEESEEGSPPRASESENGDGPSGGFTRALRERIEPQDKSTEAGALVSKLTEEKNSAIQQNHRLRQELDLVRQEISKRRGGGFSFIVVIIVALIGAILGYLMKS

SEQ ID NO: 241154 - protein, 453 aa, Zea mays
  unsure (1)..(453): unsure at all Xaa locations
  Clone ID: MRT4577_151510C.1.pep
QFAHQPDSDRSRSGLYNEPQLTCPVSLKYNAGPIFTYSMGNVVFLHVSRPDVVRDINLCVSLDLGKSSYLKATHEPLFGGGILKSNGEAWXHQRKIIAPEFFLDKVKGMVDLMVDSAQPLLMSWEERVDRNGGITDIKIDDDIRAYSADVISRTCFGSSYIKGKEIFMKIREPQQAVSKPDVLAEMTGLRFFPSMRNKQAWELHKQVRKLILEIVKESGEDRNLLSAILHSASTSRVGIAEAENFIVDNCKSIYFAGHESTAVTAAWCLMLLGLHPEWQNRVREEVHEVCRGQPVDSRSLQKMKNLTMVIQETLRLYPAGAFVSRQALQELKLGGVHIPKGVNIYIPVSTMHLDPELWGPDVKEFNPERFSDVRPQLHSYLPFGAGARTCLGQGFAMAELKILISLIVSKFVLKLSPHYQHSPTLKLIVEPELGVDLTLTKVQSVCTKRGTAI

SEQ ID NO: 241155 - protein, 39 aa, Zea mays
  Clone ID: MRT4577_151511C.1.pep
AEDDVTFAALADEDRRGEGHACLPIGKLFAPGNHSITPP

SEQ ID NO: 241156 - protein, 142 aa, Zea mays
  unsure (1)..(142): unsure at all Xaa locations
  Clone ID: MRT4577_151512C.1.pep
RPIRLTXXEDTTSSSRXFIKILFQELSEHLGIRLLNERLNDPNMQGSFESIFPKDHPKNTRFSINFFTSIGLGGITESLREYLKNMPRLIMQQQKPESSESDSSGSESGSESSSSGSSSESESESSPDERDRRRSNKRRKRT

SEQ ID NO: 241157 - protein, 810 aa, Zea mays
  unsure (1)..(810): unsure at all Xaa locations
  Clone ID: MRT4577_151513C.1.pep
LEAGRDEQVPAGTENSKPSVPVPVPANSVSPLRRRPNHHDDVSPRHRKRRASPSLCPPRSPFLGVDADRRRRSRASPPDFDIRGRRCDAKPSEEKENGHAKPGKDEDGDNRSPRRDRVSDREEGSERRRIRDMVSDDEKVEGRRRRRARDPDDRRGKQDRERNRRRHRRRSPSSESGSSPNERRHRRRRRDEGSRRRDDRSRREDELRRSPMKRELTPPLSPPPPXLPEMIPGRTGGIYIPPFRMAQMMRDMEDKSSPEYQRLTWDALKKSINGLVNKVNATNIKNIVPELFAENLVRGRGLFCQSCIKSQMASPGFTDVFAALVAVVNTKFPEIGNLLLVRVVLQLKRAYKRNDKPQLLAATKFIAHLVNQVVAHELVALELLTVLLENPTDDSVEVAVGFVKECGAMLQDLSPQGLHAIFERFRGILHEGEIDKRVQFLIEGLFAIRKAKFQGFPAIRPELDLVEQDDQFTHEISLEDHLDPETNLNVFQANPNFVEDEKAYENLKRSILGAESSEDEEGSDAASDDDDDDDDEEESDEEDEEQMEIRDRTETNLVNLRRTIYLTIMSSVDFEEAGHKLMKIKLEPGQEMELCIMLLECCSQERTYLRYYGLLGQRFCMINKVYQENFEKCFVQQYSMIHRLETNKLRNVAKFFAHLLGTDALPWHVLAYIRLTEEDTTSSSRIFIKILFQELSEHLGIRLLNERLNDPNMQGSFESIFPKDHPKNTRFSINFFTSIGLGGITESLREYLKNMPRLIMQQQKPESSESDSSGSESGSESSSSGSSSESESESSPDKRDRRRSNKRKRT

SEQ ID NO: 241158 - protein, 38 aa, Zea mays
  Clone ID: MRT4577_151514C.1.pep
SKSARNILLGICNLSKYSNLMVLPFYPKLHFLSSTLAL

SEQ ID NO: 241159 - protein, 75 aa, Zea mays
  Clone ID: MRT4577_151515C.1.pep
HPSSTTELVILIAPNSTILIYLPTELDMQSSVEIDINVETTMAHHHKAIQSEPSILRQPKSNNSLVEFCTCWFFG

SEQ ID NO: 241160 - protein, 83 aa, Zea mays
  Clone ID: MRT4577_151516C.1.pep
LGYCFFFFFFFFFFQNETSGPFLPPNVTPETQPTGFSCLVKLPFQQETRTITLLGFGWFEHFQPTKNFGWLKNNLTFRPNTTF

SEQ ID NO: 241161 - protein, 36 aa, Zea mays
  unsure (1)..(36): unsure at all Xaa locations
  Clone ID: MRT4577_151517C.1.pep
IKTLACXXNLKQQTLIQYNFNIHLTNIINSFXTYHL

SEQ ID NO: 241162 - protein, 143 aa, Zea mays
  Clone ID: MRT4577_151518C.1.pep
MPSPLFLSRNPNTSLGTTNPHLSSPPVSAAMSTTGVYVPPMRRLRSVIASTNGSLAPPPSAAAQAQQTRTPEWLVDGRSLSPQSPPQLRRRDIPPLPRPPLPEHYRQQSAGFARYAYDDFSEDDSDKDIDPHVSFEQRCIYLR

SEQ ID NO: 241163 - protein, 348 aa, Zea mays
  Clone ID: MRT4577_151519C.1.pep
MAMPSSPSPTRLPTASSSYWCYQCDRFVRAASPLSSPACPSCGGGFLEEMSAPPPRPAYLRRPRAHHAADSRAASPFNPVIVLRRSPPAAASFELLYDDGAGSGLRPLPETMSDFLMGSGFQRLLDQLAQIEAAGGLAAGARDAPPPASKAAVQAMPVVSVAAADAHCAVCKEAFHLGAEAREMPCAHIYHADCILPWLALRNSCPVCRHQMPTDAIPLEQEEEATVGLTIWRLPGGGFAVGRFAGGRTPEERELPVVYTEMDGAGFNSGRRPRRVSWGSRQAASTNRGTVRRFLRNVFACFGRGHASSSSRSHAVPELNDDAFSHGSRSRSTSWRLEDGHADATVQS

SEQ ID NO: 241164 - protein, 49 aa, Zea mays
  unsure (1)..(49): unsure at all Xaa locations
  Clone ID: MRT4577_15151C.1.pep
QKSFNNVKQXQKCIYHIFFYNINKLLVSNNIYLTSNKFLSTYTSNTFSY

SEQ ID NO: 241165 - protein, 106 aa, Zea mays
  Clone ID: MRT4577_151520C.1.pep
GRDGSYEPFFFHGNRIASCNVKPVVTNSTLEASFSPDGDHIISGSGDGSVYAWNVRSGKVARWGSTDDEPPLVRWAPGSLMFVTGSSELSCWVPDLSKLGSFTISK

SEQ ID NO: 241166 - protein, 327 aa, Zea mays
  Clone ID: MRT4577_151521C.1.pep
MTSPPRVSMEITDDMLKSMEVGLAFRDYNGRISSMDFHSKATNYLVTASDDESIRLYDTQNAVCLKTINSKKYGVELVCFTDNPNIVLYSSKNGWDESLRLLSLNDNRFLRYFKGHLDRVVCISFCSEKENFLSGSLDRTVLLWDQRAEKSQGLLRVQGRPAVSYDDQGMVFAVAYGGHIRMFDARKFEKGPFEIFSVGNNDSEAHVIKFSSDGRRILLTTKAGRVHVLDSFHGNSIASCNVKPVVTNSTLEASFSPDGNHIISGSGDGSVYAWNVRSGKVARWGSTDDEPPLVRWAPGSLMFVTGSSELSCWVPDLSKLGSFTISK

SEQ ID NO: 241167 - protein, 264 aa, Zea mays
  Clone ID: MRT4577_151522C.1.pep
IHTLTGSIPAEVVSLSSLTSYLGLSYNSLTGQIPSEVGKLTNLVLLDLSANQLSGDIPAALGKCVELAQLQLNDNLLQGVIPQSLSGLQGMQELDVARNNLSGPVPKFFADWPSLNYLNLSYNRLEGSVPVAGVFGNASAFSVAGNKVCGGVTALQLPPCPTVEDEEPDDAEKRRPRRLAVIIGTVVGSTSLLLLAFCGLLLLIMRRRKRAPANLPLAEDQHWQVSFEEIQNATDQFSPSNLIGVGSFGSVYRGILPEPGARQG

SEQ ID NO: 241168 - protein, 161 aa, Zea mays
  Clone ID: MRT4577_151523C.1.pep
FRWTAQVRLVQIPLRHQPNKMHCACPACFKKTGFMGKICTPSYQDQGSCLCIRKKPSWKPSQVCNKCSSIRPLKHKQIHLAGVVGHNHQTNKRFHTPAVSGSGPVATVPTHVAAVRPAASTRLARSMSPWKVAGGLKEERGHGGRRSEEDRSRSRRERRLG

SEQ ID NO: 241169 - protein, 46 aa, Zea mays
  Clone ID: MRT4577_151524C.1.pep
FSPTTTPKTLPTYKCPLVSNNFHSKTLPTLSSNLLLLVFTIYINLL

SEQ ID NO: 241170 - protein, 60 aa, Zea mays
  Clone ID: MRT4577_151525C.1.pep
YMNKLLGHNNLKGYRGVTYGANYFFFSKITCYFFYFLFSSTREYRFWKRLSPRLVRLGRA

SEQ ID NO: 241171 - protein, 287 aa, Zea mays
  Clone ID: MRT4577_151526C.1.pep
MAEKLRDLSQPVDVTLLDATVAAFYGTGSKEERSAADQILRDLQNNPDMWLQVVHILQNSQNLNTKFFALQILESVIKYRWNALPVDQRDGIKNYISDVIVQLSSNEVTFRQERLYVNKLNIILVQVLKHEWPARWSSFIPDLVAAAKSSETLCENCMAILKLLSEEIFDFSRGEMTQQKIKELKSSLNSEFRLIHELCLYVLSATQRPQLIRATLATLHAFLSWIPIGFIFESPLLETLLKFFPMAAYQNLTLQCLTEVAALQFGDFYNVQYVKMYTFFMIQLQAI

SEQ ID NO: 241172 - protein, 154 aa, Zea mays
  unsure (1)..(154): unsure at all Xaa locations
  Clone ID: MRT4577_151527C.1.pep
TYRASTAPVIKSSPEIDPAGDGLRTRTYVRQTARPNIAAKLNATRHHRLPIVCTRAARCERPARALLTELAVRPCAHRLYHQPSKQPVRRRWRGHRRRRDPSSKSPLFYMKATWSFTSGFTMAPPLPPXPEFEDHPRIPSESPXLTYYHSWTER

SEQ ID NO: 241173 - protein, 75 aa, Zea mays
  Clone ID: MRT4577_151528C.1.pep
ASWNLLRCYVKVLLVLSSGFGPRLVCFLGQGFLVVYIKWPAYRREIHIPVLCQACCICQDHPSYACSKKKKKKSK

SEQ ID NO: 241174 - protein, 80 aa, Zea mays
  Clone ID: MRT4577_151529C.1.pep
LLGENSPVPPARLLPLPLGLPKHLRSHISHVVLIVTLSPPIYLPWPWHCARCEPSSTLYYSGWLMIWDYPPYMARLLMYG

SEQ ID NO: 241175 - protein, 107 aa, Zea mays
  Clone ID: MRT4577_15152C.1.pep
SAQSKPEYPENGSKNSPALPSYMAATQSAKAKLRGNSSPRLSSDSAEKNGFTRRHSLPSPNNGKIISHSPRTQRPTHAGGKDGAKGDKAMLSSRDASERPLKAEWRR

SEQ ID NO: 241176 - protein, 213 aa, Zea mays
  unsure (1)..(213): unsure at all Xaa locations
  Clone ID: MRT4577_151530C.1.pep
MGTEKRAMDSVAVVAVPFPAQGHLNQLLHLSLQLASRGLDVHYAAPAQHIRQARARVHGWADEALQSVQFHDLRISGYVSPPPDPTADSPFPSHLMPMFNAYIAGARAPLAALLDTLSGSCRRVVVVHDRINAFASEEAARLPNGEAFGLHCLALSMLLGRMDANHQLLRENGLVFTPVEHCATKEFLECASRDRTSKEXSPTGAGILDNTCR

SEQ ID NO: 241177 - protein, 41 aa, Zea mays
  Clone ID: MRT4577_151531C.1.pep
AAYLFIIQQTQMADFATCKTMESTRVFQNTAKTGKSRIWVC

SEQ ID NO: 241178 - protein, 65 aa, Zea mays
  Clone ID: MRT4577_151532C.1.pep
ALEQTLLQSPLQLESSLLLVGVLNFGAHKESTRESVSCSVNTGAAHGSGLRWHNSVLGNKLVEIV

SEQ ID NO: 241179 - protein, 78 aa, Zea mays
  Clone ID: MRT4577_151533C.1.pep
QDPENFKFSTPFFSRKDMFLSLKFKRFRAHYLLSNFAKGGNLNTGGIFFGRKKRGFKTLGFTKNFFTPKVFFFFGKNF

SEQ ID NO: 241180 - protein, 105 aa, Zea mays
  Clone ID: MRT4577_151534C.1.pep
MGRARPARGLDLRPRHGPQCGPCRPRPTIRLGRARYGPCQKLCALGRPIRYSTNVHLYMLLLQCSCVSTGGSARNVRKKYKPHHLWQPSPPDLSSNQSNCFYDSL

SEQ ID NO: 241181 - protein, 104 aa, Zea mays
  unsure (1)..(104): unsure at all Xaa locations
  Clone ID: MRT4577_151535C.1.pep
XFXFFXKSHGKGFFWGSFRFYITHVIMSPFQIKHESHSNRTPHIRGKDPVDRGQARGVQWNKNNETTLWDTGLYGFDAPGGKGAKWALARGELNNRISRPSCEL

SEQ ID NO: 241182 - protein, 35 aa, Zea mays
  Clone ID: MRT4577_151536C.1.pep
AFFSSMEHCVLHLCVLSAPTAVRCYFLKFLIEIFP

SEQ ID NO: 241183 - protein, 198 aa, Zea mays
  Clone ID: MRT4577_151537C.1.pep
METIKCCIACILPCGALDVVRIVHSNGRVEEISGGPVLAGEIMKAYPKHVLRKPPSTCPADGGIVVQKPVILPHNAELQKGKIYFLMPVMATPAPEKPAAKPQPPPAAGQSAAAASVARRRRRRKDHAAARPDGGGAAPACSSGAGARPPEGEKERLLANERYLSEIMKEKASTARDRRRGRVAVWRPHLESITEDDL

SEQ ID NO: 241184 - protein, 200 aa, Zea mays
  unsure (1)..(200): unsure at all Xaa locations
  Clone ID: MRT4577_151538C.1.pep
MSSNKKSSLTGYLPDILMAAAAPLIAYFVIRNLLTRLDPEAQQKEEARAKATAATRKLDAILTSKRRKSYSEYDSEDDDETDSRHRRPRIQDLNLNTYEQTIAMEVVAPEEIPVSFEDIGGLDSIIEELKESVIYPLTMPHLYAHSSSLLSAPSGVLLYGPPGCGKTMLAKALAHESGACFINLHISTLTEKWYXXDSNK

SEQ ID NO: 241185 - protein, 196 aa, Zea mays
  unsure (1)..(196): unsure at all Xaa locations
  Clone ID: MRT4577_151539C.1.pep
METIKCCIACILPCGALDVVRIVHSNGRVEEISGGPVLAAEIMKAYPKHVLRKPPSTCPADAAGIVVHKPVVLPPSAELHKGKIYFLMPVMAXPPRRRXPENKPPAARLQPPPPGQTASSAARTRRRRRKEKDRTTAAQEGAAGLAPEEGDKERLLANERYLSEIMKETASTSRDRRQGRVAVWRPHLESITEDDL

SEQ ID NO: 241186 - protein, 103 aa, Zea mays
  unsure (1)..(103): unsure at all Xaa locations
  Clone ID: MRT4577_15153C.1.pep
RTTTTVAHITIQTMETHHERQLLPSPAAYASHGDSPDSYXQQQLLACNPLALTNVAANQQQQLLQQFLPALNQLAIENPDNXLQQQQLLSSNPLGVDNAPTYL

SEQ ID NO: 241187 - protein, 62 aa, Zea mays
  Clone ID: MRT4577_151540C.1.pep
VDRQSSVWTSWFIYEDKYLQNPTYVKNLHLKRGGILLHGYILLQHMTTSVWRIFSSNLGLNN

SEQ ID NO: 241188 - protein, 172 aa, Zea mays
  Clone ID: MRT4577_151541C.1.pep
QRNIVVGRPPLPSCDGVKGSDRRRPQAKQGSRNGVARPPAATSAADVGASAFAMPLSSGAYTGTGQYFVRFRVGTPAQPFVLVADTGSDLTWVKCRGAAGPPASDPPAREFRASESRSWAPLACSSDTCTSYVPFSLANCSSPASPCAYDYRSVPHHLPISIPQEQAPPQQQ

SEQ ID NO: 241189 - protein, 93 aa, Zea mays
  Clone ID: MRT4577_151542C.1.pep
SDASTLLFIYKVMRRGLRRRQHCIRHLRRRCCRLPGHPRLEVGWRARLRATAVSVLVCSTADGRVPRLALCDPLVRSLCRCLHECSRGEPAAC

SEQ ID NO: 241190 - protein, 161 aa, Zea mays
  unsure (1)..(161): unsure at all Xaa locations
  Clone ID: MRT4577_151543C.1.pep
MASRGHLLLLALLVLAAAAAAASGGGRQHQQRQRGGRKPKPARPWLDLVPAAPGASLGERARDDARRHAYIRSQLASRRRRAADVGASAFAMPLSSGAYTGTGQYFVRFRVGTPAQPFVLVADTGSDLTWVKCRGAAGPPASDPXRRASFAPPSPGSWAPL

SEQ ID NO: 241191 - protein, 58 aa, Zea mays
  Clone ID: MRT4577_151544C.1.pep
ALLLIGKASYCCPGIILNTLSMTCTVSVRLINLVIHFYNIVLWNFFLFYSYFNSVPNC

SEQ ID NO: 241192 - protein, 144 aa, Zea mays
  Clone ID: MRT4577_151545C.1.pep
IVELLSNIAQRNQAQSQSSQPSTSSANNPSQSSGLISNSIFSNALSQALFAAGAGGAGNTGDTGTGGNDTVTSTQSTSTRQNPSDGSNLPNSNENYAERFANELQTMREMGLFEDMMNIQALIVSNGDVEAAINLVLSDSGHFN

SEQ ID NO: 241193 - protein, 297 aa, Zea mays
  Clone ID: MRT4577_151546C.1.pep
MPFSRPAVGFLVRLVGVRPSCCPPSRAFAAVRAQKIQLPKKKRRLDEVCLERFQQYSRTYIQSWILQGKVIVDGRVVNKAGTQVSDKSVIEIKAEIPKYVCRAGHKLEAAIKGFDIDCDGKIALDSGLSTGGFTDCLLQHGASHVYGVDVGYGQVAEKIRTHERVSVIERTNLRYLSQLPEPVDLVTLDLSFISILLVMPAVIKVMKTDSTLITLIKPQFEARRSQVGGGGIVRDPLVHQEVLDRIISGVEEFGFCNKGWIESPIKGAEGNKEFLACFNRIPISESQPEAEAKEPVT

SEQ ID NO: 241194 - protein, 140 aa, Zea mays
  unsure (1)..(140): unsure at all Xaa locations
  Clone ID: MRT4577_151547C.1.pep
ASPQTRVPNYLRACLPSPASMHGCFFRSGSPRRPQALHSGGGVVITVVSRGGEGGVRAKIVVSRGELERIAAGVAWRQCSGGXRRRSRERAEPSAHSXAAVSLGGQVARAPPRSEPEEGAGVARLGDGWRPALDGIPEEA

SEQ ID NO: 241195 - protein, 119 aa, Zea mays
  Clone ID: MRT4577_151548C.1.pep
SGHSSHKAPARKTRCVKAYEPTHATEAGNLVLRGAPSRCPCGRRRGHPDAGHVCHELEDEPDAQLASVAPLGEHPHWTQDNGDQALHACGRPLPHAGKSSSSSCCSCLTWIGLNQSCSL

SEQ ID NO: 241196 - protein, 75 aa, Zea mays
  Clone ID: MRT4577_151549C.1.pep
PDSPDRSYRVEISGKVSDEVSGKKLYCLGKLAPTVEKMKLGFGMRVPRIIQWSWFTSRSRGCESCVPLRLCGIHC

SEQ ID NO: 241197 - protein, 50 aa, Zea mays
  Clone ID: MRT4577_15154C.1.pep
CLRQSKELHNNLELAQKSIVDHTSAQRKRKARVISEYAVMARSIIRKKVQ

SEQ ID NO: 241198 - protein, 124 aa, Zea mays
  Clone ID: MRT4577_151550C.1.pep
FQAGPSDPQCFLFILVGNKIDLDGGSKRMVSFPECASFLIYIYSKYPAVSLPFPQVPEKKAREWCASKGDIPYFETSAKEDHNVDTAFLCIARLALEHEHDQDIYFKTVVEQVPDTEQTSGCAC

SEQ ID NO: 241199 - protein, 77 aa, Zea mays
  unsure (1)..(77): unsure at all Xaa locations
  Clone ID: MRT4577_151551C.1.pep
AVFSEVDRVLRSQGKLIVRDPPDTINQFDSMDKSLQWEVRISYPKVSXGLIWVQNSMWRPKEFTASKLNVLRRTTST

SEQ ID NO: 241200 - protein, 83 aa, Zea mays
  Clone ID: MRT4577_151552C.1.pep
KHFFSTLIRRFLLQLSFPFSSATWMHELQKNPARGQLLRLHAGEVPSHHAKSRRQQPGGGRGLTVRGRFVPVKPGNKKRQPPF

SEQ ID NO: 241201 - protein, 572 aa, Zea mays
  Clone ID: MRT4577_151553C.1.pep
MASTSVPELTADKKCDKAIADTAAPLTSQGHSEEPTGKVSTLVPALPVVIAAGDGAASSGVIENRNGMDNSADGSLKRDDSEGAEKSSLRGSVKDSSVSAKCSDRASSLSKASGSAKISGQPADMIESGKSSLYRASGGSDLSDESTCSSICSSVSKPHKSNDSKWEAIQVVRTKEGSVGLGHFRLLKRLGCGDIGSVYLSELSGTKCYFAMKIMDKASLATRKKLLRAQTEREILQCLDHPFLPTLYTHFETDKFSCLVMEFCPGGDLHTLRQKQPGKYFPEKAAKFYVAEVLLALEYLHMLGIIYRDLKPENVLVREDGHIMLSDFDLSLRCAVSPTLLRSSNPSGDNQKGNPAYCVQPVCIEPACMQPSCVTTTTCFSPRFFSSKSKEKKDKKAKADLANQVRPLPELVAEPTDARSMSFVGTHEYLAPEIIKGEGHGSAVDWWTFGIFLYELLFGKTPFKGSGNRATLFNVVGQPLRFPESPVVSFAARDLIRGLLIKEPQHRLAYKRGATEIKQHPFFEGVNWALIRCATPPDIPKPVEIPRSVASSSQKATSAAEKGSDYLELEFF

SEQ ID NO: 241202 - protein, 42 aa, Zea mays
  Clone ID: MRT4577_151554C.1.pep
NLLYVVCAYKIIYIFYIVESSRCETRGGRAGATKLLLRFYLV

SEQ ID NO: 241203 - protein, 150 aa, Zea mays
  unsure (1)..(150): unsure at all Xaa locations
  Clone ID: MRT4577_151555C.1.pep
MFGSSGPQAQRGPCPFALLVLLLLGPSSVLAISFHLPVNSRKCLREEIHKDLLVTGAYEITDQSGGAGGLRTHLKITDSAGHILYSKEDATKGKFAFTTEDYDMFEVCFESKGTGRIPDQLVILDMKHGVEAKNYEEIAXVEKLKPLEVE

SEQ ID NO: 241204 - protein, 73 aa, Zea mays
  Clone ID: MRT4577_151556C.1.pep
PKLNYRAHLQKKNCSTQTLNCSTQTLFTKECRKNISYLLKCHKYPANYYIISYISKSKQTDASQNFLFQTNVD

SEQ ID NO: 241205 - protein, 258 aa, Zea mays
  unsure (1)..(258): unsure at all Xaa locations
  Clone ID: MRT4577_151557C.1.pep
PAGPGLFYTELVQGIPPVFRHLIEKIPSIHSVLIFVSMKHLPIPSVDMSERFLFRQVDREDYKVFQCVARYGYRDPFEEAQDFVDKLVEHLQYYIRDVNLYGLGCEPMMKQSSSYCSSRAESFASHEKTKVKAVYAEEMLTPAESFSEHARQASGKSKLFTQFQGDKMNIVDMMKIQQGQQAVLEEXSKGVVYIFGEXSEVVARPHSSLIKKIAINYIYSFLRXNSRNGXKMLSIPRXQILKXVGVSYESVWMKDRDI

SEQ ID NO: 241206 - protein, 71 aa, Zea mays
  Clone ID: MRT4577_151558C.1.pep
SRPEARVSVWRRLSSVKSNSKNLVWRRKFHQHLPEDRAAPVLPHKPIPMEGEDRGFVSQVPNGVHSKRRRV

SEQ ID NO: 241207 - protein, 124 aa, Zea mays
  Clone ID: MRT4577_151559C.1.pep
GYLEAGREGLRKGDTDRHHLRQPGGGGQARARGGQGARPPDPHHLQVARRRRLSRRSVSPLLLARLHPCPDPLSLVVSRHRPAPPDLLGFDLSSRASATPLVYPDWVRLPGDFVVVGYLYSLSV

SEQ ID NO: 241208 - protein, 52 aa, Zea mays
  Clone ID: MRT4577_15155C.1.pep
KDCLNVPSPYVIDPTLTLQSCLLHTTVVLMLILTSYDDLNRYDIKTLHISSA

SEQ ID NO: 241209 - protein, 102 aa, Zea mays
  Clone ID: MRT4577_151560C.1.pep
YHTSRYGLDPLDQPTLSLPRSWRSCSSTRCALNAARSRANRRFSDPLSCRVCTLSPFPSMCKWAWSVALRSHPVCSKCCEVDGHGISPPCSLHLLLCLSCRT

SEQ ID NO: 241210 - protein, 124 aa, Zea mays
  Clone ID: MRT4577_151561C.1.pep
LFPFSQLGTAHAQQQQLLPFNQWAALNPAAYLQQQILPPFSQLAAANRASFLTQQQLVPFYQQFGANPATLFQLQQLLPFGQLALAGPGASCQQHILAAPLSFRLVLGWNSKIKFFGVRYGAPP

SEQ ID NO: 241211 - protein, 171 aa, Zea mays
  unsure (1)..(171): unsure at all Xaa locations
  Clone ID: MRT4577_151562C.1.pep
CGGQAQAVTGSIQPLSAQALAGSLSSQQVTGTTLQVPGQVAIQQISPGGQQQKQGQSVTSSSNRPRKTSSLSLFFRKVYHLAAVRLRDLCAKLDISDELRKKIWTCFEFSIIQCPELMMDRHLDQLLMCAIYVMAKVTKEDKSFQNIMRCYRTQPQARSQXVYRSVLIKGK

SEQ ID NO: 241212 - protein, 126 aa, Zea mays
  unsure (1)..(126): unsure at all Xaa locations
  Clone ID: MRT4577_151563C.1.pep
CLCHDPLNYQGRFYEXTPCYLTRYFPSDYLWDTVALLCHPXTLTRNRKLEVIHSWWTILQALLFVFPXSCANNGDKLRXSAWYKASTHIFSEVVLYYLRNPNLAHAQSILAIWTXQEVLMGFMQRY

SEQ ID NO: 241213 - protein, 47 aa, Zea mays
  unsure (1)..(47): unsure at all Xaa locations
  Clone ID: MRT4577_151564C.1.pep
LSVXVRSXXXXXASDSXMRQHALELICTDEXDTHLSAEMYISMDSTV

SEQ ID NO: 241214 - protein, 86 aa, Zea mays
  Clone ID: MRT4577_151565C.1.pep
ELPHADGQMCLTLPTLFSKRHPADLHSVENNLLSAYHHLLLLLVINEPDYQQIQTILFVYIHSPLIIFSEFYYPIIAKNYLSKSDI

SEQ ID NO: 241215 - protein, 84 aa, Zea mays
  unsure (1)..(84): unsure at all Xaa locations
  Clone ID: MRT4577_151566C.1.pep
GVILQQAEPLVYRKRDWEEYCAATIIPNQLVNLERXVENAGTAFLXFEQEVNRVISVEEXAQELNLVPTQYLQCVKTGSRKLGR

SEQ ID NO: 241216 - protein, 76 aa, Zea mays
  Clone ID: MRT4577_151567C.1.pep
VPKKAKDLRVFPLGPPRRNCPGKNFGFRALETMLAHFMAPFFWEVSGFPAGGAMGKSLRGTLCRKEKFFLVPKIAS

SEQ ID NO: 241217 - protein, 196 aa, Zea mays
  unsure (1)..(196): unsure at all Xaa locations
  Clone ID: MRT4577_151568C.1.pep
MNDADVSKKIQHMVRFIRQEDDENGIQISVSAEEEFNIDKVHLVDPENXKIRQXMNAKRSRLKXSRKLEDSMQVNASRIKILRAHDDLXTKMKDDAMKELLLVSTHTTREYKNLXKDLIIQGLLRLKEPALLLRCXRKDDHHHVXSVLHSPXHEYASTADVHEPEIFVDHDVYLPPAPRHHDAHGQICSGGIVLAS

SEQ ID NO: 241218 - protein, 75 aa, Zea mays
  unsure (1)..(75): unsure at all Xaa locations
  Clone ID: MRT4577_151569C.1.pep
FNRQMFMSSCGTRKRCRSLVQIGLSLIRREDGXSLXVCALHXSCVTFLLXQYSSDLYCWRRITSLRVACVRCLLL

SEQ ID NO: 241219 - protein, 104 aa, Zea mays
  Clone ID: MRT4577_15156C.1.pep
MKFTAIFTLALASVAVAAPTDMATTQVEARGGKTPSHGGEGSSGSVCSDDRVQVNIQEVHGVLGLISIVGTILNQNGGGAFCCDAGAPQFGLININALNCVKIL

SEQ ID NO: 241220 - protein, 188 aa, Zea mays
  unsure (1)..(188): unsure at all Xaa locations
  Clone ID: MRT4577_151570C.1.pep
PLFFFFFSFFFFFFFFFFFFFFFFFFFFFFFFFGNGNNQLPRPKXNPGDKSPPPFPQKGGKXQNPPHGLRPPTPGGGNRHPQNPGTNGGTPPKPPKKRPGAGPPPKKXKTQGPXYYSPEGPXAFLPRPPTGPPNTKKKGGQKTGGRTLXPGGQPPPCGERRGPXNERPPPGGPGGNFLEATQNGPGAG

SEQ ID NO: 241221 - protein, 75 aa, Zea mays
  unsure (1)..(75): unsure at all Xaa locations
  Clone ID: MRT4577_151571C.1.pep
TXXRRASXXIRNLRLCTXRRSXKGVPVPXGESQXXAXXKWVSXXVCXSEAWGLLXXQLXNYWATLYPXVVKWVAK

SEQ ID NO: 241222 - protein, 51 aa, Zea mays
  unsure (1)..(51): unsure at all Xaa locations
  Clone ID: MRT4577_151572C.1.pep
VDVGNTSXTQHVLAKRIEASEVILGKHVLENHIDQMSTDEVEQSINRDYKI

SEQ ID NO: 241223 - protein, 95 aa, Zea mays
  Clone ID: MRT4577_151573C.1.pep
MASRWRGNRWSVGCFKFNVDGALMLFQDVQALESSYEHTVRDWTRNVELAVWMAIFHARDRIACRGGRGYGVPFQLGTAWYRTRVILDTCSFNSR

SEQ ID NO: 241224 - protein, 46 aa, Zea mays
  Clone ID: MRT4577_151574C.1.pep
KACYHRAPVRKRSLQMQSFSWIHQTSIMTQHGQGPVGKHPGRMVAI

SEQ ID NO: 241225 - protein, 103 aa, Zea mays
  unsure (1)..(103): unsure at all Xaa locations
  Clone ID: MRT4577_151575C.1.pep
ERFEVQGLQPNGEEMTLKQFLDYFSTEHRLEITMLSQGVSILYSFFMPAAKLXERLDQPMTEIVSRMSKRKLGRHVRALVLDLWCGEEXGDDVDVPYIRYTRR

SEQ ID NO: 241226 - protein, 72 aa, Zea mays
  Clone ID: MRT4577_151576C.1.pep
PSIVRAGDVNCGFGSGSSGGNTRDSLRGDRDSHPQAGGVEHSNRGGPQDQENGGERLHWNIVCFLPGHCLNF

SEQ ID NO: 241227 - protein, 82 aa, Zea mays
  unsure (1)..(82): unsure at all Xaa locations
  Clone ID: MRT4577_151577C.1.pep
LPAKWFSLRIGMLLSGGDYTASILRKCSQATTASLISSXFSPSMSSVCENPMLLPYRIQHAITACILPLSRLFLQQSWILLQ

SEQ ID NO: 241228 - protein, 39 aa, Zea mays
  Clone ID: MRT4577_151578C.1.pep
MICEPLHHMNSVCTLVSEQFTFCEGDRFLSLSPKVPRRP

SEQ ID NO: 241229 - protein, 108 aa, Zea mays
  Clone ID: MRT4577_151579C.1.pep
DLRLAQTANLRIKEKLPSWTGLTTKKAFFLFKKGKGKNAITQRAPRHSNQNKPHTVRAQAKNNLNGAGSAFLNRDYPNVHKQVGSRITRRPTIGPQSRNLFGKNSQVP

SEQ ID NO: 241230 - protein, 262 aa, Zea mays
  unsure (1)..(262): unsure at all Xaa locations
  Clone ID: MRT4577_15157C.1.pep
MEAAPPTSPPSLVLLLLLLLLIISPPSSAFLSPKGVNPEVQALMTIKSMLKDPRGVLKNWDQDSVDPCSWTTVSCSPENFVTGLEVPGQNLSGLLSPSIGNLTNLETVLMQNNNITGPIPAEIGKLTKLKTLDLSSNHLYGGIPASVGNLESLQYLRLNNNTLSGPFPSASANLSQLVFLDLSYNSLSGPVPGSLARTFNIVGNPLICGTNXERDCYGTAPMPPYNLNSSLPPAMSKSHKFAIAFGTAIGCIGLLVLACGFL

SEQ ID NO: 241231 - protein, 273 aa, Zea mays
  Clone ID: MRT4577_151580C.1.pep
MMPLSQTDFSPSQFTSSQNAAADSTTPSKMRGASSTMPLTVKQVVDAQQSGTGEKGAPFIVNGVEMANIRLVGMVNAKVERTTDVTFTLDDGTGRLDFIRWVNDASDSFETAAIQNGMYIAVIGSLKGLQERKRATAFSIRPITDFNEVTLHFIQCVRMHIENTELKAGSPARISSSMGVSFSNGFSESSTPTSLKSSPAPVTSGSSDTDLHTQVLNFFNEPANLESEHGVHVDEVLKRFKLLPKKQITDAIDYNMDSGRLYSTIDEFHYKAT

SEQ ID NO: 241232 - protein, 187 aa, Zea mays
  unsure (1)..(187): unsure at all Xaa locations
  Clone ID: MRT4577_151581C.1.pep
MMPLSQTDFSPSQFTSSQNAAADSTTPSKMRGASSTMPLTVKQVVDAQQSGTGEKGAPFIVNGVEMANIRLVGMVNAKVERTTDVTFTLDDGTGRLDFIRWVNDASDSFETAAIQXINYNVYIVPKAFQXTFSVGKSPCFCADVHWLSRNGMYIAVIGSLKGLQERKRATAFSIRPITDFNEVTLHF

SEQ ID NO: 241233 - protein, 158 aa, Zea mays
  unsure (1)..(158): unsure at all Xaa locations
  Clone ID: MRT4577_151582C.1.pep
MMPLSQTDFSPSQFTSSQNAAADSTTPSKXLRLPSXFSSTSNRWPPYPRTECSVDLQMRGASSTMPLTVKQVVDAQQSGTGDKGAPFIVNGVEMANVPIILLFVLWSVDMQMFSALIHLPRFPFQIRLVGMVNAKVERTTDVTFTLDDGTGRLDFIRW

SEQ ID NO: 241234 - protein, 274 aa, Zea mays
  unsure (1)..(274): unsure at all Xaa locations
  Clone ID: MRT4577_151583C.1.pep
SIDQSRAQEPAINRGIPNAAPSPPGSPVQSNPTPVRRRFRAARDRIVAGSASRRTARIPAPDRRASAAAPRRLICCGRLLLGRGVGWTGKRSGWVAATWRPPTSPAPPPPXAITMQDPNQNQNQNQNQNQSQFLFSANSTALQLFGSAAVPTVGPAGYINYTGNTHLPVMNQASTSNIGAGNENLLKLQVPLSDYHQQSAGRLARVGNPGAVSTGLRLSYEDDERNSSITSGSGSMASLPATMSCVDGFMAELGQXKQEINFYLRPQAAKSASG

SEQ ID NO: 241235 - protein, 52 aa, Zea mays
  Clone ID: MRT4577_151584C.1.pep
SIVLYTLADYSRLVPYFIIGGTVLNLDRQICIFLNIYTYVLGGGDVLYRIIY

SEQ ID NO: 241236 - protein, 177 aa, Zea mays
  Clone ID: MRT4577_151585C.1.pep
IRHEASLREVAAAGRCSADSGMPPAVAPASPRQDPSGSSLSAAAAAASMANPVLGLGLAPPGAEPSAGTPPSSRRAPRLAKRRHAPASSRFRAAQASVGTWNPFGGGGGTDGQNRGFVFGAASPVSQQPSEPAVEISSSSEAPFVFQSVRENLPRFEEGLSGSSMLPDKMGKLNLRT

SEQ ID NO: 241237 - protein, 64 aa, Zea mays
  unsure (1)..(64): unsure at all Xaa locations
  Clone ID: MRT4577_151586C.1.pep
YTESINPHHTLPRARALTKALLILSNIPIRVPGKTKRFPKEELKWVAWLGTFXKPRRGAIKLAT

SEQ ID NO: 241238 - protein, 85 aa, Zea mays
  Clone ID: MRT4577_151587C.1.pep
ALEIENMCLWGREKKKKKKKKKKKMGGRFRGSCFPAPALRLLPFLLGPPISFPLASVYHLLFWNTPAVPPLIFLPFFPPLAHLGY

SEQ ID NO: 241239 - protein, 119 aa, Zea mays
  unsure (1)..(119): unsure at all Xaa locations
  Clone ID: MRT4577_151588C.1.pep
MVPPFLTLLSPSLEGPPTAAWLHRSSTQSPYSAPPVPPLPREATPYKFRIDSPKPAPARKNTKTAAXPLTVGVPGGLTHRAVLGIIRGVRSLELYDASSPNSRHXTTTSGAPPAHFQLT

SEQ ID NO: 241240 - protein, 91 aa, Zea mays
  Clone ID: MRT4577_151589C.1.pep
MGLLVVSAGGTSPTGLPFGADQFDERKEQHSKQGGLARFYCAQGISSYLATLVVNIVNARTRRHGGSAGWVTDDINAGRIDYFYYAMAVLS

SEQ ID NO: 241241 - protein, 88 aa, Zea mays
  unsure (1)..(88): unsure at all Xaa locations
  Clone ID: MRT4577_15158C.1.pep
RRTVCDRPPRALRCAGPSQPSTATRVPTPAPCANPGTTGVEKXSARHSPVVMLYTDTPYARVLTGPSSPSLGPLSTDGFPNCMRYKRS

SEQ ID NO: 241242 - protein, 51 aa, Zea mays
  Clone ID: MRT4577_151590C.1.pep
VHSCSTLSAPDRVPCPGRRTQRPSGWGWNKSSTVTCISIASFAPLELIYSF

SEQ ID NO: 241243 - protein, 30 aa, Zea mays
  Clone ID: MRT4577_151591C.1.pep
LEDGVDAEDTRNEARSVQRQVNLLPNIASN

SEQ ID NO: 241244 - protein, 141 aa, Zea mays
  Clone ID: MRT4577_151592C.1.pep
RLKIRWRETPWLSGCPRMLLVRACVATLAPIPFLPCGGGGKTGASPSFPSFVLFFLLFRLSVWRRKKQEMRSSLLPESPYVPSAPRLRQGCCWLQTLICIHPATAVRVLHCNRGRIWGWWLVVSMGFTRNQNLFGNFLGVQ

SEQ ID NO: 241245 - protein, 168 aa, Zea mays
  Clone ID: MRT4577_151593C.1.pep
MEYSPKLAVVVLLALASAMAVTGQNSEQDFVDAHNAARADVGLGEVTWDATVAAFAQDYADQRRGDCQLIHTPDGRPYGENLYGGGGGGTEWTATDAVNSWVSEKQYYDHDSNTCSAPEGESCGHYTQVVWRDSTAIGCARVVCDSGDGVFIICSYNPPGNFPGVSPY

SEQ ID NO: 241246 - protein, 61 aa, Zea mays
  Clone ID: MRT4577_151594C.1.pep
SIHPQGACTRPLVLDRKENPNEGVLLKQVPTTMIIVFSWIHTCRVSSLYAASQVPVVSKLD

SEQ ID NO: 241247 - protein, 89 aa, Zea mays
  Clone ID: MRT4577_151595C.1.pep
LEWSFLLMVQSNRGGSMEFVVPPAAPSLFFPLSVGFFASGSFGFLRVTGILPLKVGTPPRFSQGARLFFATCPVVFGLSRGCWSPCLLP

SEQ ID NO: 241248 - protein, 120 aa, Zea mays
  unsure (1)..(120): unsure at all Xaa locations
  Clone ID: MRT4577_151596C.1.pep
MREEQDALAVLTLAASATSTHTSGGCGRQPQPTDHLPPPVHMPXPVHLTAAVHIPPTEQLPPPDQLPPPIHEPQTEHLPPPPCHYHTKPHRPEPHPQPHPCPRQQPHPIPRQLQETSGKG

SEQ ID NO: 241249 - protein, 83 aa, Zea mays
  Clone ID: MRT4577_151597C.1.pep
TVVGTCSVGVSCIFLKDNKSKLVLLLIMSHTRWHVNSLFGTSQIFLCRMQHQQTCCCKNMGGIVMALGLNMNGNCCCSERVGV

SEQ ID NO: 241250 - protein, 82 aa, Zea mays
  Clone ID: MRT4577_151598C.1.pep
EAGRQATIEGPCIADDSGPRLIIGFGVWLRRLHALYICVAFGLSVFVRTICRWLWRGNKRLCICPGQLCVIQFANTARMGCL

SEQ ID NO: 241251 - protein, 62 aa, Zea mays
  Clone ID: MRT4577_151599C.1.pep
MVLQNNIYSLDPPGELENLLLKMKRLAHSNNFFFMDVKCQRCLIITTVYSHSHTGGVCPGFQ

SEQ ID NO: 241252 - protein, 305 aa, Zea mays
  Clone ID: MRT4577_15159C.1.pep
MEEAPPSSSPPSPPVMLLLLLLLIVSSPSSSSALLSPKGVNPEVQALMTIKNTLKDPHGVLKNWDQDSVDPCSWTTVSCSLENFVTGLEVPGQNLSGLLSPSIGNLTNLETILLQNNNITGLIPAEIGKLTKLKTLDLSSNHLYGGIPASVGHLESLQYLRLNNNTLSGPFPSASANLSQLVFLDLSYNNLSGPIPGSLARTFNIVGNPLICGTNTEEDCYGTAPMPMSYKLNSSQGAPPQAKSKSHKFVAVAFGAAIGCISILSLAAGFLFWWRHRRNRQILFDVDGKRTSTFTFTPPDAWADP

SEQ ID NO: 241253 - protein, 86 aa, Zea mays
  unsure (1)..(86): unsure at all Xaa locations
  Clone ID: MRT4577_1515C.1.pep
GNNEETGXPXXXXAAXXXGGXXPPXXAXXPSXXXRXXGQTXXXXPXREXXXXRGXERPQXXXXEEEXXERQNKXXKNPRENPSQGS

SEQ ID NO: 241254 - protein, 62 aa, Zea mays
  unsure (1)..(62): unsure at all Xaa locations
  Clone ID: MRT4577_151600C.1.pep
SVASFLRHREPEPAXSAPAPKKXQEAVTKAQKXDGNKRKRSRKESYSVYVYKVLKQVHPDTG

SEQ ID NO: 241255 - protein, 68 aa, Zea mays
  Clone ID: MRT4577_151601C.1.pep
QVPSFAPVFSQNCGANLPATFFFMGPKSSGGKQPPLYVGAPWASVLFCIPGFVKLVVVKLAWFNWLGV

SEQ ID NO: 241256 - protein, 45 aa, Zea mays
  Clone ID: MRT4577_151602C.1.pep
KGRVVSRLHGKEDRMQMVLNLKKRKGGRKGWRKGWRKPVVEFRIG

SEQ ID NO: 241257 - protein, 54 aa, Zea mays
  Clone ID: MRT4577_151603C.1.pep
TPILGGDRDSIPGIGTPKSMLLNMNLGLHHQDSSSRYGKGTGSTVLDFHVSGKG

SEQ ID NO: 241258 - protein, 99 aa, Zea mays
  Clone ID: MRT4577_151604C.1.pep
THESTLPSALFCYCLWSKPFYTALTPSIESVPLGRITGERSQAADPLFCRPDGSGPGRLAAVEARFWDVEDLRCLRDRTGGSLQCGGSGCVLPALRPLG

SEQ ID NO: 241259 - protein, 182 aa, Zea mays
  unsure (1)..(182): unsure at all Xaa locations
  Clone ID: MRT4577_151605C.1.pep
MNTLHVRATTXSIVNRLGNRAQNSFSDCSFVRLMPKVIRNALSLANXTSRSERDGAQMRSETXEKERERKGGHAXARGXKREGEIGQIRGRGEEEQDDLLHIXTRKEGVASEGEVVHRYPHLVTPSEPEVXQAPSAAFKAYSKGMDPTVERLKSGVQKFKTEVYDKKRXLFEPLKSGQSPRY

SEQ ID NO: 241260 - protein, 190 aa, Zea mays
  unsure (1)..(190): unsure at all Xaa locations
  Clone ID: MRT4577_151606C.1.pep
GADCEPPACPSWWTPPVHQRGYFVSVRXSKRLVNTPDAPPTNFTYCIAKLYESSAFVVKFSHNYFNHMLLNILKQNNVNXKGACSTSTLGTALPFVTLKXTASAQFMFYRNPIADMLLTEAQLDLGLVRXAMVLHYDSISLILRAGAASAHIGRHVPHPIPSIRAPAPTKPNVPLPPLGPHPPPIPGIST

SEQ ID NO: 241261 - protein, 107 aa, Zea mays
  unsure (1)..(107): unsure at all Xaa locations
  Clone ID: MRT4577_151607C.1.pep
GDQRVRSEGAAHPRAPHEWIAILFPNLCGDAWSSMVPCAKPAATSPVKIGVVLSRGQAPFGQQCLXGIFDYLRERAKGTTLYGCKGGQAGIMKXTLVQLTKDFVCPY

SEQ ID NO: 241262 - protein, 71 aa, Zea mays
  Clone ID: MRT4577_151608C.1.pep
GFCLWPRSPHPHSGARPLERTASPAPSWSEAPSQRGCGGCLTVLLSSLVIKLLPSYGVKGRGQGLRTKGGR

SEQ ID NO: 241263 - protein, 105 aa, Zea mays
  unsure (1)..(105): unsure at all Xaa locations
  Clone ID: MRT4577_151609C.1.pep
NGRWEQTHKAWEPRVNYQKGDYCSKEVRSLAPAGFGRNGGGVKKNVVKEKFREVXRXRAGANNNNNNGNNGGNGLVGRKTRXKKEINTXTGKVNKRRESFLARVN

SEQ ID NO: 241264 - protein, 71 aa, Zea mays
  Clone ID: MRT4577_15160C.1.pep
MTNHGHLWKCKLLRRFFIKKKKKKKKKKKKKKKKKKKKKKKKKKKKKKKKKKKKKKKKKKKKKKKKKGGAF

SEQ ID NO: 241265 - protein, 312 aa, Zea mays
  Clone ID: MRT4577_151610C.1.pep
MGERRRRASTASLGGGGGGGAGGSGVAPARNEEDKAAEQPPPTLWFALKRSLHCRSELSEVHVPRANKAAGPVVAGSGGGHLSSFVGTLRPGTPGPAWAGAGHGLPCSGSVRGGVRCTPPRSPCVLLERNGSVVSGHRASSCEETAKDGGAGKGSGGLSCHRCGEQFSKWEALEEHHLSRHAVTELVEGDSSRKIVEIICRTSLLKSESSCVRIERVFKVHNTQRTLSRFEEYREAVKLRASKLPKKHPRCLADGNELLRFHGATLSCALGGGGSSSRLCASDKCAVCRIIRHGFSGRKEGKTGVGVFTTST

SEQ ID NO: 241266 - protein, 300 aa, Zea mays
  Clone ID: MRT4577_151611C.1.pep
MGERRRRASTASLGGGGGAGGSGAVPARNEEDKAAEPPPPTLWFALKRSLHCRSELSEVHVPRANKASGPVVASGGHLSSIVTKRASARSGCSRSIANLRDVIHGSKRHPGQPPSCSPRSIGSSEFLNPIAHEVVLSTNSRCELKITGFGGCGGLAAVGTGAAAAHDACGGGDGGVVSSFVGTLRPGTPGPAWAGAGHGLPCSGSVRGGVRCTPPRSPCVLLERNGSVVSGHRASSCEETAKDGGAGKGSGGLSCHRCGEQFSKWEALEEHHLSRHAGEEAAACICIYHRPDSRPASFSW

SEQ ID NO: 241267 - protein, 90 aa, Zea mays
  Clone ID: MRT4577_151612C.1.pep
MALCLLVLFSIGMGMATAAANRKLGYGPGGGGGGSGSGCGGCCGYGGPGYGSGPWYGDGGGSVRVAGGYGHSGRRRGGGGEGAGARWLWV

SEQ ID NO: 241268 - protein, 176 aa, Zea mays
  unsure (1)..(176): unsure at all Xaa locations
  Clone ID: MRT4577_151613C.1.pep
VPSVWPKKKSSHVGTDNILDSDLSWSILRCNNDGQKLHSVQKIACLAECNMKLAVALTLLEECFIRMVDPRTGVDMIPHVLYNKGSNFARVDYQGFYTVILEKGDEILCVASIRXFRRQGMCRILMSIIEKMLCSFNXKXLVLSAIPELVSTWVSGFGFXPIEDAERKQLXNVNLM

SEQ ID NO: 241269 - protein, 47 aa, Zea mays
  Clone ID: MRT4577_151614C.1.pep
PPCHEPLSAARAVLTRKADHALARSRTPAPFDFFPSIVTLSPVFPVK

SEQ ID NO: 241270 - protein, 467 aa, Zea mays
  Clone ID: MRT4577_151615C.1.pep
YIPLRSIIKDGMVTWEGIVCNCCKKNLSVSDFMAHAGRSHPQSSLGLFLESGKSYTLCLVEAWSAESMSRRSNAWGRKVEAIDESDDTCGFCGDGGELLCCDNCPSTYHQACLSAKELPEGSWYCHNCTCQVCGGPFSEKEVSTFSAIFKCFQCGDAYHDTCIEQEKLPLEDQISQTWFCGKYCKEIFIGLRSHVGTDNILDSDLSWSILRCNNDGQKLHSVQKIACLAECNMKLAVALTLLEECFIRMVDPRTGVDMIPHVLYNKGSNFARVDYQGFYTVILEKGDEILCVASIRVHGTKAGELPFIATSVDFRRQGMCRILMSIIEKMLCSFNVKMLVLSAIPELVSTWVSGFGFKPIEDAERKQLHNVNLMLFPGTSLLTKRLDGFIMATKPGEEKDIHEVSGVPNLKRMPNGKANEHFKLHDLDLSGTEFKAEVSVNGPFRTLKHECGSAAWFQSTKLAVGEV

SEQ ID NO: 241271 - protein, 85 aa, Zea mays
  unsure (1)..(85): unsure at all Xaa locations
  Clone ID: MRT4577_151616C.1.pep
RPPPFFFIPPNQKXLYFFLRSFFNFFWGLNPHLTTTPTFQGQKRTKYPFFWCANQLFWGPTQEKPQRPLSWGIPPPPPCKKPDNI

SEQ ID NO: 241272 - protein, 199 aa, Zea mays
  Clone ID: MRT4577_151617C.1.pep
VAPERLLVPLSRKQATFEAPLSHSSNPSSSSQSSPPAICNNSSRTPPKNSNNNNGAATMEPRTPPSHSHQVARTYTPTPSAATQHARVSRRISDTGLDRLPLFDNPDSDRPEASNPSEAIAALGQLHCTTPNGRLFCLDSVRLGRDLGSCPDVSWDAVGMCPARGRIPTVSCPRIFLCKSLTFFYHSFLVHDNTSSHFD

SEQ ID NO: 241273 - protein, 408 aa, Zea mays
  Clone ID: MRT4577_151618C.1.pep
VALPSAFLYLTSSAATRATLLDLKPFSARCAPAVAPLRVFMYDLPARFHVAMMGAAAGAGFPAWPPSAGGIRRQHSVEYWMMASLQDGGAGPERGREAVRVRDPDAADAFFVPFFSSLSFNVHGRNMTDPDTEADRLLQVELVDILWKSKYWQRSAGRDHVIPMHHPNAFRFLRAMVNASILIVSDFGRYTKELASLRKDVVAPYVHVVGSFLDDDPPDPFEARHTLLFFRGRTVRKDEGKIRSKLEKILKGKEGVRFEDSIATGDGINISTEGMRSSKFCLHPAGDTPSSCRLFDAIVSHCVPVIVSSRIELPFEDEIDYSEFSLFFSVEEALRPDYLLNELRQVPKRKWVDMWLKLKNVSHHYEFQYPPRKGDAVNMIWRQVRHKIPAVNLAIHRNRRLKIPDWWG

SEQ ID NO: 241274 - protein, 210 aa, Zea mays
  Clone ID: MRT4577_151619C.1.pep
MLGQKSIKVNGADCGVEAILLGVITSIGGFLFGYDTGQISSMLLFSDFKERFAQGPAGDKEWNPYIQSILVSLMSIGSLIGALSGAYTADWWGRRKSMTFGVAVFIIGNIIQISAMESWVHMMMGRFIAGLGVGNLSVGVPMFQSECAPREIRGAVVASYQLMITIGILISNIACFGFKKMDTSSASWRIVIGLGILFSLSLGIGILIVP

SEQ ID NO: 241275 - protein, 63 aa, Zea mays
  Clone ID: MRT4577_15161C.1.pep
KGVKTFTSWARTSGGRQGGCRCLKSLAKRVKRVNMGPVAPIPGKWGVSVGFPISMSPDCNKFS

SEQ ID NO: 241276 - protein, 87 aa, Zea mays
  Clone ID: MRT4577_151620C.1.pep
LVQYPNLTLTYTPDGDTTVNRPLHHSTADEVNIYNKYSISDDTIINSARKSVYDPVTFLRAYDKYAGTWMTIKHLFASQKKKKKTRA

SEQ ID NO: 241277 - protein, 122 aa, Zea mays
  Clone ID: MRT4577_151623C.1.pep
TELRITQLVERRKKNSQLIQFRDKTGEESPTMANNQTKKSSEREKKKEFQDVVPSQSSSKKSKRGIKNKEEGNRHLVAMLMAAACIRTVLELPHLSLSLSLSLFPSLSLSCLSLSLSISRPA

SEQ ID NO: 241278 - protein, 88 aa, Zea mays
  Clone ID: MRT4577_151625C.1.pep
NVKLPRESSAGTEMAQLVCGGCHTLLMYIRGATSVQCSCCHTVNLAMEGKSCDFDSCTKEEEEEKKILLSVYCVVWKAQQPSNSILTS

SEQ ID NO: 241279 - protein, 72 aa, Zea mays
  Clone ID: MRT4577_151626C.1.pep
HPPAASFRDLVLERKISEAVGSELLLKRSKDSGMEGRLDAYFEQATACCNPSPSLRPDTKKILKRLEDIARQ

SEQ ID NO: 241280 - protein, 68 aa, Zea mays
  Clone ID: MRT4577_151627C.1.pep
PSVSVIETWYNSSPSEVRQINQLVTHIMLSENGCNHSPKSSHVMLQDTQSSAREVDFTSSGAGMGLAQ

SEQ ID NO: 241281 - protein, 58 aa, Zea mays
  Clone ID: MRT4577_151628C.1.pep
VAAFMFHRVVKFMFHCKPAIVLVSCPLFAGKKKKKKKKKKKKKKKKKTKKKKKKAPRA

SEQ ID NO: 241282 - protein, 116 aa, Zea mays
  unsure (1)..(116): unsure at all Xaa locations
  Clone ID: MRT4577_151629C.1.pep
DEGCLPPLACAVITLLWSQIFLIGWPVFNFCGCWNNPGVTQISVLANNPLFSGRRTNEDAAYGRPFQQLSMLDDXWDPPCGVSFTAGGVVDTRRITDLVASVLAPAPFFLFPFFGG

SEQ ID NO: 241283 - protein, 99 aa, Zea mays
  Clone ID: MRT4577_15162C.1.pep
LPTTTGETTGCDPEEDRRAHTARRGSERTAKKSPNSRKTAGPGSEGREARTKGRRSTGAHHGQDTTHNERGENKQAENEPALPKADRQKKQEKPKLGTK

SEQ ID NO: 241284 - protein, 54 aa, Zea mays
  Clone ID: MRT4577_151630C.1.pep
ITWTAYRKHPLALIDEHTYTMSIRRMVRLLHAYKLHKLSSEKTTLFTLRGDEPR

SEQ ID NO: 241285 - protein, 83 aa, Zea mays
  unsure (1)..(83): unsure at all Xaa locations
  Clone ID: MRT4577_151631C.1.pep
SILFYFILTTFFSKKIIFNXXXXXXXXXXXXXXXXXXXXXXXXXXXXXXXXXXXXXXXXXXXXXXXXXXXXXXXXXXXXXXXX

SEQ ID NO: 241286 - protein, 93 aa, Zea mays
  Clone ID: MRT4577_151632C.1.pep
LNKQNVRRIRPPSAITGGDPRPRGRCCLYCPGCHHHRCSSVPLSLRSRPCRQDPLDYDHPLCKRRAVHAKTVKGIMILADDGFASTPCTIKPV

SEQ ID NO: 241287 - protein, 65 aa, Zea mays
  Clone ID: MRT4577_151633C.1.pep
LTQINTNSCILILNGARDGHDREHVTQMNMNPRSDHGSIMVGAVDRIFIRRCYKLLLFASSWFVS

SEQ ID NO: 241288 - protein, 68 aa, Zea mays
  Clone ID: MRT4577_151634C.1.pep
IGPRPHPPMGGNSEAIKAKEPKDRQQVALTVSPAEATTSAVGSLTSGSDHISPAGDGDHLCTGGQRLH

SEQ ID NO: 241289 - protein, 95 aa, Zea mays
  unsure (1)..(95): unsure at all Xaa locations
  Clone ID: MRT4577_151635C.1.pep
GGGKGPFIGSPPPQRDPWSKGILFPPLKKGRPKHQLTRGGAPFQWPGVXWATDTPARGPCLGFCQGCVEKTGNWVSPRAMPCIFIPPQKRALFFL

SEQ ID NO: 241290 - protein, 75 aa, Zea mays
  Clone ID: MRT4577_151636C.1.pep
NKGCGTCTALVEVNSLEICWCGSVRLAQSLAPGLSRCSRSRVLWDRYRYVHRVSIYSAGLSLRAAYALSNSWIVM

SEQ ID NO: 241291 - protein, 38 aa, Zea mays
  Clone ID: MRT4577_151637C.1.pep
SLLRTDKWCLSRVRTVKGKLHCRRTLAELYGNHSGGSV

SEQ ID NO: 241292 - protein, 141 aa, Zea mays
  unsure (1)..(141): unsure at all Xaa locations
  Clone ID: MRT4577_151638C.1.pep
GPLSIEEHIXAFNKKGGDAXWHXIPNYRSLIALDVPIAAPTLELLDYIEYTELXYFRDFNXIDINEYACFLTRTGYTGEQWLXISVPSENAXDLAQAILQRSEGNVRLTGSCARDSLRLEAGLYLYGNDLEHHMTPVEAGL

SEQ ID NO: 241293 - protein, 129 aa, Zea mays
  Clone ID: MRT4577_151639C.1.pep
MGLRESLFGCFGAGGQEQGQEPAAAGPASRRPGGVGKRTLRRLSTANLRSLSLQDLSRKLETTKLHAFTLDELKAATKNFSTTNFLGEGGFGPVYKGFVDGRLRPGLQPQHVAVKYLDSDGVQGHREWL

SEQ ID NO: 241294 - protein, 85 aa, Zea mays
  unsure (1)..(85): unsure at all Xaa locations
  Clone ID: MRT4577_15163C.1.pep
MSYYNMGGKVLYKGGTKRHLKVLRYIIQKMTNAWIRCLAMKXEIXRIYDLIYXETRDGLKIFPENVIRDSDTYTKHGRKMTVTAM

SEQ ID NO: 241295 - protein, 133 aa, Zea mays
  Clone ID: MRT4577_151640C.1.pep
PAGESPIAAVVNPAHPSQLQPRHMVHRLLVPHPSMVSPCPDGVKCDLKSSPGQGNHHRVAPQCGQQHRRHRFGLVDLVVVEEVVVVVVFPTVLALFLDVSPAGPDVFPRVLVLPSFAIRSPCLPFVVLPSFGW

SEQ ID NO: 241296 - protein, 111 aa, Zea mays
  Clone ID: MRT4577_151641C.1.pep
KKQKKKKKKKKKKKKKKKKKKKKKKKKKKKLKKKKKKKKSFYLGRTPLRGDFWGFFSHWRPFWLPFRGPFWPFSGPFYNSLAIFLHLFFWEKPWGYPFYSLCKTSPFPPLF

SEQ ID NO: 241297 - protein, 45 aa, Zea mays
  unsure (1)..(45): unsure at all Xaa locations
  Clone ID: MRT4577_151642C.1.pep
NIXXRDAATTYXXVYIQXLCHXNLTXKXXXXGXXXXEXXWXGXXG

SEQ ID NO: 241298 - protein, 84 aa, Zea mays
  Clone ID: MRT4577_151643C.1.pep
LSFNDDGLFHPSRVSFEAVVDEQTFGVLSIPRRTNRQSVPTGVSERACTLPRVWFRMTVPAASAAAFSTGAPLPSSAYLTVLKK

SEQ ID NO: 241299 - protein, 171 aa, Zea mays
  unsure (1)..(171): unsure at all Xaa locations
  Clone ID: MRT4577_151644C.1.pep
MMCLSSTTFTAMXVNVPXSSSFGEALVTMRXTALYVMPAEDTDXPSYGPHRWLYLGPLSGEPPSYLTGEFPXDYGWDTSGLSRYPNTVSNNRELXVIHSLCTMLLALGCVFPXLLYRNGFKFVEAVWFKAGSQIFTEGGLDYLGNPSLIYAQMILYIXGCQVLLMPAVEGY

SEQ ID NO: 241300 - protein, 49 aa, Zea mays
  Clone ID: MRT4577_151645C.1.pep
APQPRPRWGPVHILSLYVNSVLFMWGVSPWYPVLNTRCLVPFTERATGK

SEQ ID NO: 241301 - protein, 60 aa, Zea mays
  Clone ID: MRT4577_151646C.1.pep
PNLPHNHTCTIFKPKSRVNQLFQLMTWFVNQILKELQVIHSVCPAHGASRLILTPEDLYT

SEQ ID NO: 241302 - protein, 181 aa, Zea mays
  Clone ID: MRT4577_151647C.1.pep
AGFFPEGAPRGPPAGGVSEDNAGLSGDFPPPMVIFGGFYPLMGWQRRFPHVFPPKGKKVFVAQYPSMFPGFFGFPGLPQGSKVLQEIKAFFYNPIPPPQLSHGLWPNPLPFPFRVMTHDCWLGFLFAVQKKTFFILKQGAKLPFGGPPSFVFLKKKKKKKKKKKKKKKKKKKKKKTRGGSP

SEQ ID NO: 241303 - protein, 123 aa, Zea mays
  Clone ID: MRT4577_151648C.1.pep
PTRTSQVTVSKDVSSREASKDVTWMGASWKCQRSLKHYKSFCRTGITISVHSFVYIMGEEMNRLIAYVEDLYEDTNSCNMVKVQWFGKADEVGVLLPMDFDDREIFFSLGRQDLNVICIDGLA

SEQ ID NO: 241304 - protein, 164 aa, Zea mays
  Clone ID: MRT4577_151649C.1.pep
MDIITQLQDQLDEMAVLAVNTFGTLQRDAPPDRLSSSYPDPLNPNPKPEDDSKPQVQAQPGAPPPPPAQAQAQAQPPAPDLTEQPKAMSRALVLAAKKFDALVAAVPLSSEEDQVKRIQELQAENEVVGLELQKQLEAAERELKQVEVLFNEATDNCINFKKLD

SEQ ID NO: 241305 - protein, 92 aa, Zea mays
  Clone ID: MRT4577_15164C.1.pep
TRGEKTALKSGWTSPQHSCQNASPRKHDNLLVEHLTGPWFSMTTNFIGPKQLFALLGGEIHRPLPWLTTRPAPLRWVLPDLPKCLKGAHGLI

SEQ ID NO: 241306 - protein, 64 aa, Zea mays
  Clone ID: MRT4577_151650C.1.pep
NPLRLHYHCYFVHETRGFDVVAPFTSKEIVNDSNGHLNLFMGMLGKNLNTSNCTQKTVCHTCSY

SEQ ID NO: 241307 - protein, 201 aa, Zea mays
  Clone ID: MRT4577_151651C.1.pep
HQLKICDFGSAKVLVRGEPDISYICSRYYRAPELIFGATEYTTAIDLWSTGCVMAELLLGQALFPGESGVDQLVEIIKVLGTPTREEIKCMNPNYTEFKFPQIKAHPWHKVFQRRLPPEAVDLVSRFLQYSPNLRCTALEACMHPFFDELRDPNTRLPNGRPLPPLFNFRSQELKGVPPEVIDRLVPEHSRRQSLFMALRT

SEQ ID NO: 241308 - protein, 56 aa, Zea mays
  Clone ID: MRT4577_151652C.1.pep
RVGLSGGVAGGVSDASECEVHPQICWLGPLARKRQSFYGRVGRAGYWGFGTGGAGV

SEQ ID NO: 241309 - protein, 164 aa, Zea mays
  unsure (1)..(164): unsure at all Xaa locations
  Clone ID: MRT4577_151653C.1.pep
TEYTTAIDLWSTGCVMAELLLGQALFPGESGVDQLXVEIIKVLGTPTREEIKCMNPNYTEFKFPQIKAHPWHKVFQRRLPPEAVDLVSRFLQYSPNLRCTALEACMHPFFDELRDPNTRLPXGRPLPPLFNFRSQELKGVPPEVIDRLVPEHSRRQSLFMALRT

SEQ ID NO: 241310 - protein, 105 aa, Zea mays
  Clone ID: MRT4577_151654C.1.pep
LFFPPPVGFVWKFFFLKAGDQRKPILLSQFSRGPRPRILPLFPTPPIFPPPKKFWNSQKRLGFPNLTGISLFFYMGYRGPIFNSPRVLVLLFPFLLPKIKIVFPP

SEQ ID NO: 241311 - protein, 24 aa, Zea mays
  unsure (1)..(24): unsure at all Xaa locations
  Clone ID: MRT4577_151655C.1.pep
CTRRPPLLNAFYTLKKKKGGRXRX

SEQ ID NO: 241312 - protein, 206 aa, Zea mays
  unsure (1)..(206): unsure at all Xaa locations
  Clone ID: MRT4577_151656C.1.pep
DHVRLLGEITTTGHLYLLACYDXSPKYSQNLEKDAAXMNKTTIXNAWXLDKLXCEREMSITIDIALXQSESTKYYRTAIDAPGHPASIKNVIIATSHFDXAVLIVDSTTDGFEVGISKDGQMQEHAXLLDITVGVQSMTCCXYPRDDTTPQYSXAAMIDNENECSSYLKKGADHPDEIAFVRISEVHCENMVERSSNXLDWYKDPT

SEQ ID NO: 241313 - protein, 179 aa, Zea mays
  Clone ID: MRT4577_151657C.1.pep
CVISPVVFWIFYKAYDIGMEEGYPAPYAKIYRGIALLGVNGWNQLPKYCLRFCLAFFLLAVAICALKEVAKARRWWVQDYIPSALGMAVPFFLGSFFTIDMCVGSIVLYLWSKSDRVRAHMFAPAVASGLICGDGIWSLPSSILSLINVNPPMCLRVFSADTNYQVEEFLWTLRNPAAT

SEQ ID NO: 241314 - protein, 184 aa, Zea mays
  unsure (1)..(184): unsure at all Xaa locations
  Clone ID: MRT4577_151658C.1.pep
LICFDPIRPSDSEWTCSLLCFAXLHLPCMQXWAXQASGPVEPCPXWGCPKCRLVYPKGEIHSYYVMIXSRTVKRVSHPWILPHCCGDVCGRRLDANVEYGCEHICLVVGHPXGCXPCHVVDLKATXSCGVTGSHSAXGHNRYSCGGKCKRRISCGLHHCTDNCHDGPCPTGAVLSRHKCECAEI

SEQ ID NO: 241315 - protein, 132 aa, Zea mays
  Clone ID: MRT4577_151659C.1.pep
MMMGDLLFYGGTTEAAATATSGGGMDQFSAFQQQEPLQVQAPPDPHSHEELNFDCLSEGCNPYRGGGVAVITGAEAAGAPGRALGALHDTMGEDKTSGHLQGQQYGAGGSTTFVFRGAAGESSEQTPVGIKG

SEQ ID NO: 241316 - protein, 61 aa, Zea mays
  Clone ID: MRT4577_15165C.1.pep
KKVVFKSRSGKTTLGPKNSFAFSGSRDLLWTPSFLPPKGFCTPPLKTPPFFFIPKIGYSPS

SEQ ID NO: 241317 - protein, 412 aa, Zea mays
  Clone ID: MRT4577_151660C.1.pep
MAALSVPLHAAAGSRAAAADPVKVPCVRSTGSAHFGRAFPSVAVSSLAARHIEPMRAIATQAPPAVPQYLSGEKTKIGINGFGRIGRLVLRIATSRDDIEVVAVNDPFVDAKYMAYMFKYDSTHGPFKGSICVVDDSTLEINGKKVTITSKRDPAEIPWGNFGAEYVVESSGVFTTTDKASAHLKGGAKKVVISAPSADAPMFVVGVNENSYDSKMNVVSNASCTTNCLAPLAKVVHEEFGIVEGLMTTVHATTATQKTVDGPSMKDWRGGRGAGQNIIPSSTGAAKAVGKVLPELNGELTGMAFRVPTPNVSVVDLTCRIEKNASYDDVKAAIKAASEGALKGILGYTDEDVVSNDFVGDSRSSIFDAKAGIGLSSSFMKLVSWYDNEWGYSNRVLDLIAHMALVSAAAKL

SEQ ID NO: 241318 - protein, 204 aa, Zea mays
  Clone ID: MRT4577_151661C.1.pep
MSTAIRTPVSSRSTYPRMTSRSTEMDSAPYRDASLSVDERVEDLIQRMNMEEKAGQLFQQITFPGPNGTVTNSSSSSIQGLHMTHFNLNSAITDVRQTAQYYNSLQQLALDSRLGIPITLSSDPRHTFVDATGSQIAAIKFSQWPGSLGLAAIRDAELVHTFADIARREYKAVGIRSALHPQIDVATEPQWARITTTMGENATL

SEQ ID NO: 241319 - protein, 167 aa, Zea mays
  Clone ID: MRT4577_151662C.1.pep
MGALSAPLRAVAAGSRVAASDPVKVSCVRSTGSAHFGCAFPYIRASSSAARNLEPLRAIATQAPPAMPQYSSGEKTKIGINGFGRIGRLVLRIATSRDDIEVVAVNDPFIDAKYMAYMFKYDSTHGPFKGSIRVVDDSTLEINGKKVTIYSKRDPAEIPWGNFGAEY

SEQ ID NO: 241320 - protein, 64 aa, Zea mays
  Clone ID: MRT4577_151663C.1.pep
ASVWRGCDALPYLTASNRDGETHFRAPHTLKTLCPMPLNKANSIQGSLTPCASGDSYACMLVMR

SEQ ID NO: 241321 - protein, 411 aa, Zea mays
  Clone ID: MRT4577_151664C.1.pep
MAALSAPLRAVAAGSRVAASDPVKVSCVRSTGSAHFGCAFPYIRASSSAARNLEPLRAIATQAPPAMPQYSSGEKTKIGINGFGRIGRLVLRIATSRDDIEVVAVNDPFIDAKYMAYMFKYDSTHGPFKGSIRVVDDSTLEINGKKVTITSKRDPAEIPWGNFGAEYVVESSGVFTTTDKASAHLKGGAKKVVISAPSADAPMFVVGVNENSYDPKMNVVSNASCTTNCLAPLAKVVHEEFGIVEGLMTTVHATTATQKTVDGPSMKDWRGGRGAAQNIIPSSTGAAKAVGKVLPELNGKLTGMAFRVPTPNVSVVDLTCRIEKSASYDDVKAAIKTASEGALKGILGYTDEDVVSNDFVGDSRSSIFDAKAGIGLSSSFMKLVSWYDNEWGYSNRVLDLIAHMALVSAKH

SEQ ID NO: 241322 - protein, 167 aa, Zea mays
  Clone ID: MRT4577_151665C.1.pep
PPAAAPAPPPPPAPTTSVVRAPPFLPCRARRQWSAPLPSHAEISVDSRCPRAAPYLRSTSIWHVGEVRSPPNPRDRCHCPPSLLQPHAPTITCLALRSAEVIYKKLRDDADKESVVVQGGEHRRDERAMGAPAADAHTSPPTRRGPCSHMPRRCVSAKPITSPPCLG

SEQ ID NO: 241323 - protein, 114 aa, Zea mays
  Clone ID: MRT4577_151666C.1.pep
HAYVRRVHRLRLWLTASVSSGCPIPSFRSASPGIITRWRPCPCTSATISCRWSSSSLEANHRSTRPNSWCVIRTTTSSPSDQILLSHSQRTKGHAKIGSPTDFCSSSSSFTYRM

SEQ ID NO: 241324 - protein, 69 aa, Zea mays
  Clone ID: MRT4577_151667C.1.pep
PIYRHGGQPIQKKYRPLKLGDNFKAFYRGLKGLYILKGGPFSEKKPKFFWLKVLGLGNTLDLWNIFLSK

SEQ ID NO: 241325 - protein, 125 aa, Zea mays
  unsure (1)..(125): unsure at all Xaa locations
  Clone ID: MRT4577_151668C.1.pep
MKGASHMLLEEPFHLASGLVPRQXMEFPSLTKIXVGRLGPNRHSAGITQECLIAGMSVARFDFSWMDAGYNQKTLDNLRKAGQKGKKLCPVMLDTLAPEIQVHNSSGEPIELKAANDVIITAEIY

SEQ ID NO: 241326 - protein, 49 aa, Zea mays
  Clone ID: MRT4577_151669C.1.pep
LNKKHGLVLVGSPNLGGFFAPPSPVFPGPAPIRGFNSKKRPFWCSKHKP

SEQ ID NO: 241327 - protein, 100 aa, Zea mays
  Clone ID: MRT4577_15166C.1.pep
PPPPLVPPGPRVLGGATPGRKGPPPPPPGGPPGPGRVPPPGLINPPGGGNPTPLGLPGAPKEGRGITGGAGSSNWALEGAPPRPRGKYAQKTRARKKPFW

SEQ ID NO: 241328 - protein, 101 aa, Zea mays
  Clone ID: MRT4577_151670C.1.pep
LRRSALLPLSEIFVLRTFGGSGADLLWHFIEGVYDLKTFGGEEDPQQLRTLSAVDHAINHRLVTHFCRVSCSTPIILTRDHVRMTVLYYRVYGLPTSLVKT

SEQ ID NO: 241329 - protein, 272 aa, Zea mays
  unsure (1)..(272): unsure at all Xaa locations
  Clone ID: MRT4577_151671C.1.pep
VGTALSTMYSKCGNLEDSMVVFRRMPDRDVISWNSIISVFSQHGRGSDALDMFEEMKLEGTAPDHITFINLLSACSHMGLVDRGWFYFRAMTKDYNLIPTLDHYACMVDILSRAGQLKEAKDFIDSITIDHGTCLWRIVLGACRSLRDFDVGAYAGEQLMELGTEDSSAYILLSNIYAPPCKWTXVERVRHLMRLRGVSKDLGCSWVELYNRVHVFVVGEQQHPEAENINVELIRLAKHMKDEECFLFDDEKDELGDSHEGEQMELISTTYY

SEQ ID NO: 241330 - protein, 59 aa, Zea mays
  Clone ID: MRT4577_151672C.1.pep
PGPKLKELKNGPPPMFSMLGFFVQAIVPGKGPPKNPPGPFVGPGNNKAWGFPPNFVPGN

SEQ ID NO: 241331 - protein, 54 aa, Zea mays
  Clone ID: MRT4577_151673C.1.pep
RRRVPIKKKVPHVPKKRGIRIYHLGQGRRQRLLHPVRRCGAYESPYPSLHEHPP

SEQ ID NO: 241332 - protein, 64 aa, Zea mays
  Clone ID: MRT4577_151674C.1.pep
YHAVLDHVISCFSFSRFPNRHLSVSYPSSSCVSVYLSPSPLCVYVLRFQGKLYHACSCNLTGHY

SEQ ID NO: 241333 - protein, 51 aa, Zea mays
  Clone ID: MRT4577_151675C.1.pep
FLPMYTILRIALYEDSRPKYIHRCRIEDRETDRVQQRLYETKYNKDTCIDI

SEQ ID NO: 241334 - protein, 76 aa, Zea mays
  unsure (1)..(76): unsure at all Xaa locations
  Clone ID: MRT4577_151676C.1.pep
MMSCRARRRQWRVDSFLFTSESTNXGHPDKLCDSVSDAVLDACLAQDPYRMVACXTCTKTNMMMVVCXITTNATVD

SEQ ID NO: 241335 - protein, 50 aa, Zea mays
  Clone ID: MRT4577_151677C.1.pep
KIYMHFKELPNLCFRWPPKAVANLANLSPVCFVLHFQNFILESHYEPNTS

SEQ ID NO: 241336 - protein, 263 aa, Zea mays
  unsure (1)..(263): unsure at all Xaa locations
  Clone ID: MRT4577_151678C.1.pep
PSRLFRTLGPPPPHATDEKPKSLSRGHSQKKKLPPACRLPSPRVPKPSSRPLAFGVLPSILAPAFSRAPMSXPPPMGPPFSAQDPAPSPSXAPAPDXIQAPPPPARPPXRPRTSATTPPTTASTRRPRRSPPRRGPGGPRSPAPLPAPSTSSTAFASAATATXQGPSLPVRKSRPXPDPTTSPSRWPTGRRTRPFDPPPPLRAPPTPHAPTTTPLSGTRLSVRWVPRSPPRLRTPTRSYWPGPEKGRPNRSSGAAGTPGSAAR

SEQ ID NO: 241337 - protein, 208 aa, Zea mays
  Clone ID: MRT4577_151679C.1.pep
MADDDPVRFNISSPTDTQRFRQFIDDLRVRLRDESRPYVMQDAMRLRQQEDDPTGWLNLELSTSEHTITLRLRTDNLYVVGFRNGAGTWFELRHNDGHASRIPGSTALRVSEGYTGGDNTLELDESVQIGRGAVEEAINALAAYDGTAADKDLKVWLVRLLVRFVESIRLNAIADRPLDGPDTGLTSQLVSLIKKWQKLCNLPAGGGQ

SEQ ID NO: 241338 - protein, 56 aa, Zea mays
  Clone ID: MRT4577_15167C.1.pep
CLASPVETIAPWCSLAGRVLRLLTRLGSIWPPCLCVCISALWYVSTFASLSYILGS

SEQ ID NO: 241339 - protein, 71 aa, Zea mays
  Clone ID: MRT4577_151680C.1.pep
YKSGRPGTQVCLHCTHTPHAGEPSMHTRTEPDSSGAHPSNSRAFFRGGHEPKTDGAGGPGVLPGPGGGGPL

SEQ ID NO: 241340 - protein, 93 aa, Zea mays
  Clone ID: MRT4577_151681C.1.pep
ASWWRPSSGAGVTLSASRATCSDPGINKCEVERCRVSRGRASVGSKRAWYALSASSCSSLLSAATALAACLQGGVRPRRLPAVAVASYTYWAW

SEQ ID NO: 241341 - protein, 272 aa, Zea mays
  Clone ID: MRT4577_151682C.1.pep
LQFSEHCGHPGTAFGATLAHKSNQYLHICCVSYSKTTSFVGPCAKQTRSTNPEVCVLPFVRFRSSFHQRAREKIKDVAGWTWDRPRRTRPSPPPRRPCRPRPPARARAPWTWPPPPRAPPARARTPPAAAAPRRDRGRRRRSRRAPPPPATARRPWRRARRRGRGRGPGAPAPPSRPPWTRRSSPRTRTRTRPAPRGGGACGGGATRGSWRRAPWRRRRRRGRPRPPRSARPRARRRARSGSRRGGDPSAGLPPVRLYIYDLAPAPTARWSA

SEQ ID NO: 241342 - protein, 86 aa, Zea mays
  Clone ID: MRT4577_151683C.1.pep
MVLQNDIDLLNPPAELEKLKHKKKRLVQSPNSFFMDVKCQGCFNITTVFSHSQTVVVCPGCQTVLCQPTGGKARLTEGCSFRRKGD

SEQ ID NO: 241343 - protein, 48 aa, Zea mays
  Clone ID: MRT4577_151684C.1.pep
MKTTMNAPAAKPKSSKSAAPSKAKVKPSKARAPSYMGDTDLGLLFVLV

SEQ ID NO: 241344 - protein, 37 aa, Zea mays
  Clone ID: MRT4577_151685C.1.pep
LVSPSSDHLVRSSDLVGFGLYISKMRACIPCQMYLAP

SEQ ID NO: 241345 - protein, 383 aa, Zea mays
  unsure (1)..(383): unsure at all Xaa locations
  Clone ID: MRT4577_151686C.1.pep
QIPCAVKKEASVAELTDEQRPDAESHASIKSRRSVRRRQELEAEVVVKTTFHGKEEKDYQGRSWITPPKDAKATNDHCYIPKSXVHEWVGHTKGSRPSGFFPKYGHLLLSASMDCKIKIWDVLGSRTCMRTYMGHSKAVRDISFSNDGTKFLSAGYDRNIQYWDTETGQVISTFSTGKVPYVVKLNPDEDKQHILLAGMSDKKIVQWDMKSGQITQEYDQHLGAVNTITFVDNNRRFVTSSDDKSLRVWEFGIPVVIKYISEPHMHSMPSMALHPNSNWLAAQSLDNQILIYSTKERFQLNKKKRFAGHIVAGYACQVNFSPDGRFVMSGDGEGSCWFWDWKSCRRFKTLKCHNGVCIGCEWHPLETSKVATCGWDGVIKYWD

SEQ ID NO: 241346 - protein, 80 aa, Zea mays
  Clone ID: MRT4577_151687C.1.pep
GVPVVQRTLYMAQHVSLNATFYGLIIKGECIGRNDTQELDDGHLMHDPGVSSINTIYTNWNDCMHMRIMTNDVQCLSKEI

SEQ ID NO: 241347 - protein, 142 aa, Zea mays
  Clone ID: MRT4577_151688C.1.pep
LCVVPYKNPAAGVLLDHLPVVRLYAGAVPSVRRCHQITAATAARDAVAASETSAAVGGEQARAEPVYAEAPGQKQRVLLRVGSVGKADLAKAQLPLHLVRVFVVVVFLLFVVGGRIRAPERSEWYRTAPPATLACPCRTAGG

SEQ ID NO: 241348 - protein, 88 aa, Zea mays
  unsure (1)..(88): unsure at all Xaa locations
  Clone ID: MRT4577_151689C.1.pep
PRVRCAGRATMVGIFMAXLVYSLTGVGLVDQMGHFLVNTLLLVTVAGAFLVSKTKDVXSLKKLMAEFTLXDSQWQESGQDDPTEGPKN

SEQ ID NO: 241349 - protein, 51 aa, Zea mays
  Clone ID: MRT4577_15168C.1.pep
LHLCIITCKVQRVGANVSIRDYDWQKGSKGWGDHAVTGPLIYGALCAAPKH

SEQ ID NO: 241350 - protein, 161 aa, Zea mays
  Clone ID: MRT4577_151690C.1.pep
MDKCNLSSMHGIPTQRCSSTLKEASEDPDAIELMCPLCRGEVKGYTLVEPARKQLNRKRRSCMEDGCSYMGTYRELCKHVQKKHPTANPRAVDPLHAYRWKRLLFRSSLHDMICSTTSEAMRRFCSHMLQIEEVVAALREGGDHRGATNDDQLIHDLLTSR

SEQ ID NO: 241351 - protein, 226 aa, Zea mays
  Clone ID: MRT4577_151691C.1.pep
MTKYTRNKKSSSSHSSSRFKRVSRKEMSFAVEKYAWTNATCPVCMEFPHSAVLLLCSSHGNGCRPYICASSYQHSNCLDQLVMSCRKEASEDPDAIELMCPLCRGEVKGYTLVEPARKQLNRKRRSCMEDGCSYMGTYRELCKHVQKKHPTANPRAVDPLHAYRWKRLLFRSSLHDMICSTTSEAMRRFCSHMLQIEEVVAALREGGDHRGATDDDPLIHDLLTSR

SEQ ID NO: 241352 - protein, 227 aa, Zea mays
  Clone ID: MRT4577_151692C.1.pep
RRGVNVLHDGRRALARRLRPFPDPRASLLRPGLDRGGVRDHAALLRWACRGGGLGDIRSGAGPHQQRRLRRDAHRVHRRRPHRGQIRQEAIMPVLGWRWLLALSSAPCFVLLIFFPLTPESPRYLCSRGRTMDATVILERIARMNKGTLPPGVLIFRPEKHVDNNLGTSETALLIAEDNTGIEEDTSSKSSGIVAFQALWSYDLIRSTFLLWVIYLANYFTYYGAIL

SEQ ID NO: 241353 - protein, 123 aa, Zea mays
  unsure (1)..(123): unsure at all Xaa locations
  Clone ID: MRT4577_151693C.1.pep
SPLRHQPLNIRSLIPRIVAHPSLSLSLCLGYTWRAAAEFFAPAATVRGVASLVDNIGVLVAACLRFRRQRDWMTTRSRPCIHEDKVSIVDERVWKYSPAGSRYPSFIFIXXIXXXFXFFFFFF

SEQ ID NO: 241354 - protein, 230 aa, Zea mays
  Clone ID: MRT4577_151694C.1.pep
MAAEGEASMYYTTDDALSLVGFGRFQTLVLAYSGLGWIAEAFEIMLLSFVGPAVEADWGISGAEQGLISSAVFAGMLIGSIAGGLIADRYGRRTGFLFTAVVTAVFGLLSAFSPNYASLLTLRFVVGLGLGAGHVLSTWFIEFVPAAKRGTWMVVFHACWTVGTILEALLAWAIMPVLGWRWLLALSSAPCFGLLIFFPLTPESPRYLCSRGKTMDATVILERIARMNKG

SEQ ID NO: 241355 - protein, 67 aa, Zea mays
  Clone ID: MRT4577_151695C.1.pep
NASYDTRLCSCTDSFSVSVVKLILGSTQAPCFFYIKIHGQNAGGYINGGAYKKIWALVLLPSWFRAQ

SEQ ID NO: 241356 - protein, 51 aa, Zea mays
  Clone ID: MRT4577_151696C.1.pep
IHVQSCFRFKIFEQSLTRLNKILCLCPVPSVAPCVLLANYSSIHCVAVDHF

SEQ ID NO: 241357 - protein, 141 aa, Zea mays
  Clone ID: MRT4577_151697C.1.pep
PELILGFNALLPKGYAIRLGEENKRGDFAQAINFLNMISNRLQHDEQVHKAFLDILNMYRTDNKCIQDVYHDDAMLFKDHKDLLEQFQHLLPDTPVGPQAVVSMGGLVQQEDTSVIEPPAAKLLHSDNKDIVYLSHADRDF

SEQ ID NO: 241358 - protein, 231 aa, Zea mays
  unsure (1)..(231): unsure at all Xaa locations
  Clone ID: MRT4577_151698C.1.pep
MEALPPTLTSASEQPPLYDGTTRLYMSYVCPYAQRAWITRNYKGLQEKIKLVPMNMADKPGWYKEVYPNNQVPSLEHNKRVIGESLDLIKYIDSNFDGPKLTITDDPERQRFAEELLGYSDAFNRAFLDALRSEGAMTTEAVAALDKIDSALLKFDDGPFFLGQLNLVDIAYAPFIEGFQIFFAGMKNCDITRXRVHIQKFIEEMNKIDACTQTKQDPQVLLALPRKKLGI

SEQ ID NO: 241359 - protein, 128 aa, Zea mays
  Clone ID: MRT4577_151699C.1.pep
RAKNKGAPPPKKGGPSNGKKTKRKKKGGGGGTPQRKKKKKRGGGGGKPPPGGGGTGAGGTGPGAPPGGGSPTHGGPPPGGPRQEPNLAKRGAKLLPGENGNPPTRTKKKKTGGEKRKPRGPKRGNKPT

SEQ ID NO: 241360 - protein, 37 aa, Zea mays
  unsure (1)..(37): unsure at all Xaa locations
  Clone ID: MRT4577_15169C.1.pep
XAAXAVPRHDVCARRRXAREEXVXLDGXYRPIWAAFP

SEQ ID NO: 241361 - protein, 86 aa, Zea mays
  Clone ID: MRT4577_1516C.1.pep
HESRCSCLRATSLSVQRASPGRLDMLILWILSRQVLRVAAHEGVITSAPAVVEDTLLVHAGTESRQRPHTAAAPSGISSCPCSLSS

SEQ ID NO: 241362 - protein, 43 aa, Zea mays
  Clone ID: MRT4577_151700C.1.pep
AQSRCCKMVAGAVHSGGTRSMRCHRMHADVGGIQLSGLRWMLV

SEQ ID NO: 241363 - protein, 229 aa, Zea mays
  unsure (1)..(229): unsure at all Xaa locations
  Clone ID: MRT4577_151701C.1.pep
MASGNVSTVYISVIDDVVAKVREDFITYGVGDAVLNELQALWEMKMLHCGAISGNIDRNRAPPASAGGAPGAGATPPVHDLNVPYEATSEEYATPTADMLFPPTPLQTPIQTPLPGIDTGMYNIPTGPSDYAPSPISDMRNGMGMNGSDPKTGRPSPYMQPPSPWMNQRXWGVDVNVAYEESREDPDRMMQPQPLTKDFLMMSSGKRKRDEYPGQLPSGSFVPQQDGCA

SEQ ID NO: 241364 - protein, 96 aa, Zea mays
  Clone ID: MRT4577_151702C.1.pep
SWQGIARERTARMRSIIVASRAGGDRKTGEELGEAAGWRQHGVGWGPLRHPLPCSWSTRRGSRRTATAARTLKSLKKGAQYPREGLQSRCGHLRCV

SEQ ID NO: 241365 - protein, 101 aa, Zea mays
  Clone ID: MRT4577_151703C.1.pep
MGMGALTTPTNHTRAAHARRGYILSNRRLPETLPLVIQLRPFIPSFRTDMRADTTNPTTGPGKSMLEPVDDHQLLRISPTDRLPSAAAEDNDEAEPSFVCL

SEQ ID NO: 241366 - protein, 176 aa, Zea mays
  unsure (1)..(176): unsure at all Xaa locations
  Clone ID: MRT4577_151704C.1.pep
LGGAGPPGRIFFWAPFPGGLKFPPPPWXETVKVFFMGGGHLGWGVFPPGPQGGALPQGSPPPPGGVRGFSLEALFGAAFPQGVSKVGAGVFFFFFPRFFLGALPRVVFFGGNGPPLYPLLGSPKKGPSLNQVLFPPPLLPQGKAPAVSGFPLFFYILPGASQATGFAPPFSRGGWN

SEQ ID NO: 241367 - protein, 148 aa, Zea mays
  Clone ID: MRT4577_151705C.1.pep
MKPNSDGIAFALSYTTKGFPVDMNKDKDLGVYGDYLNDAPGLVVSGGTVLRHVDIPPATECTMHRTVSLDYGCVLEGEIECLLDSGEKRFMKRGDVAIQRGTMHQWINHSPTEWCRMLFVLQECQPLKLGGETVGEELAGMAGVRPSD

SEQ ID NO: 241368 - protein, 45 aa, Zea mays
  Clone ID: MRT4577_151706C.1.pep
VVLHLTACSLYGLIWVGKPSMPLFVSRGSILQFRNPDPQPSELSP

SEQ ID NO: 241369 - protein, 100 aa, Zea mays
  Clone ID: MRT4577_151707C.1.pep
ASLVFFFHNRAQLGCSLFAQLVWVFPQHKGGGFPPNSLGFFKNWGRFCPPERGTGFAFGGQCPRAGGRFIIWTWSRLFYSLHETKNIVWPGIKKKLFFPP

SEQ ID NO: 241370 - protein, 59 aa, Zea mays
  Clone ID: MRT4577_151708C.1.pep
VQCTSTLCELLPQGHNRFNVHLLRKTPPYTWIGEGPSSVHLIPNYCTSVTNIYTVCGYF

SEQ ID NO: 241371 - protein, 72 aa, Zea mays
  Clone ID: MRT4577_151709C.1.pep
PFSINRGALSCPWQFFTHSPLFSLAATFLLPCLFFPTTAHLQLRCGRYFPWPSSPPCQELASDFPHLDLNFP

SEQ ID NO: 241372 - protein, 61 aa, Zea mays
  unsure (1)..(61): unsure at all Xaa locations
  Clone ID: MRT4577_15170C.1.pep
KIFSXAPPPPQRGCFSSKNKKRNCSRLSCLGVYPLLLFDLTLAMFKKKKKKKKKKKKHPPP

SEQ ID NO: 241373 - protein, 121 aa, Zea mays
  unsure (1)..(121): unsure at all Xaa locations
  Clone ID: MRT4577_151710C.1.pep
MSKHFGKAAASPPPKFPQPTAGPGGGENPQPSGKARWSRQPPNGPTPGXPGAGTTPAGLRKLAGPXGPAPRGARSEPGGRPPSRLMASSLTPGGPPPGGPPRPPDGSPQPPSGGPPAPPPG

SEQ ID NO: 241374 - protein, 225 aa, Zea mays
  unsure (1)..(225): unsure at all Xaa locations
  Clone ID: MRT4577_151711C.1.pep
APAAGSQSPPCRPRCSLXLLILLVAAPRPWSVAXASPGGAKPRAFPLRSRQVPVGALPRPPSKLRFHHNVSLTVSLAVGTPPQNVTMVLDTGSELSWLLCATGRAAAAAADSFRPRASATFAAVPCGSARCSSRDLPAPPSCDAASRRCXVSLSYADGSASDGALATDVFAVGDAPPLRSAFGCMSAAYDSSPDAVATXGLLGMNRGALSFVTQASTRRFSYCIS

SEQ ID NO: 241375 - protein, 61 aa, Zea mays
  Clone ID: MRT4577_151712C.1.pep
PLNSTPDQYLSTHISLQLLLISLILPSTGTFLYLHSKNDNFLLTQPKTYPIYPVHQTTTTS

SEQ ID NO: 241376 - protein, 178 aa, Zea mays
  unsure (1)..(178): unsure at all Xaa locations
  Clone ID: MRT4577_151713C.1.pep
AVRRAXFFPEQSSVRSLPPAXVRRALFLFLHADAPLCSHFPGAQLFFCMQSLPARVFFSLHADAQCPVTSLAHRTFFFACSRSVWSLPPAARADIFFAVLQNLFLHAASGLSFWLCMTTCGWKIFYLVNSRGAHAEIFFILFFLLVLVWSHQLCCARRLSLLFSLTSSFSSRHAFFFP

SEQ ID NO: 241377 - protein, 104 aa, Zea mays
  Clone ID: MRT4577_151714C.1.pep
LGCRFIGLISTHWGALLENPSPAPGRGEKRAKGGPARKGKPGTKPIADEPETQAQGQRGPRREPTHKKGGGLKGRFPGGKRGGPTAKKKGAKPGERRVEKRGPP

SEQ ID NO: 241378 - protein, 169 aa, Zea mays
  Clone ID: MRT4577_151715C.1.pep
MGLHGGVVVLRAAVLAAVLGFVAAAGFISNDALLERGHDTTGRSLLQAKKDCPVSFEGANYTVITSRCKGPLYQPTLCCGALKDFACPYSTYINDVSTNCAATMFSYINLYGKYPPGLFANTCHEGDKGLTCPEDTPQIEPGQKASGAAAVAAPAALAAAAVSLLLMSC

SEQ ID NO: 241379 - protein, 151 aa, Zea mays
  Clone ID: MRT4577_151716C.1.pep
MRKPAFPLFFLDLCHRRPSDHIWLASSRTDCPVSFEGANYTVITSRCKGPLYQPTLCCGALKDFACPYSTYINDVSTNCAATMFSYINLYGKYPPGLFANTCHEGDKGLTCPEDTPQIEPGQKASGAAAVAAPAAALAAAALAVSLLLMSC

SEQ ID NO: 241380 - protein, 162 aa, Zea mays
  Clone ID: MRT4577_151717C.1.pep
MSKIGVLNKPFWYTAGNQKYLTDTTTLLIINLILIGWAKGPRWANIINPGSVNTDPIFPKKKLTGTNVGYPGGLWFNPLGWGNGSPEKIKELPPKEIKNGPLAMLPVMGPWFQAKYTGTGPINNLFAHLANPGHATIFQALTPKGGVELIITILRRATTHAS

SEQ ID NO: 241381 - protein, 147 aa, Zea mays
  Clone ID: MRT4577_151718C.1.pep
MEEYQQVHQQQQQQGGRGSNKIRDIVRLQQLLKKWKKLATVTPSAASSGGRSSVPRGSFAVYVGEEMRRFVIPTEYLGHWAFADLLREAEEEFGFRHEGALRIPCDVDSFQGILRLVQQGQGGRRNEPAAMCDCDCSCSSETEILCR

SEQ ID NO: 241382 - protein, 101 aa, Zea mays
  Clone ID: MRT4577_151719C.1.pep
SLLSLPATSLHLLSPSRATRSAAAARSCHPPARSSVNLLSPESRRPPSPARRSVAPVRRSISSAPRPPSHGGATLRPVVRRPALNPSRPSFSAISGQPLTP

SEQ ID NO: 241383 - protein, 85 aa, Zea mays
  Clone ID: MRT4577_15171C.1.pep
MAGSARSAAAKHAYRMFVAPSRGGAAARGPGAGAAEEFDESDVWGSFGADSQYSSPGAELGAGWARPIPGSGARRKKPAPPLPVA

SEQ ID NO: 241384 - protein, 63 aa, Zea mays
  Clone ID: MRT4577_151720C.1.pep
PQQNLRLGPGRGTSLENLHSLVRWIVAMDSAKPLVVNILDFYDKELRSLSGLQHDSLVFTWKA

SEQ ID NO: 241385 - protein, 221 aa, Zea mays
  Clone ID: MRT4577_151721C.1.pep
KWNSGMGNQLHLLQVNIAMRGIALLKVGGRMVYSTCSLDPVERDSARAELLRRSGNSVELLDVSSELPELVRRPGLSTWKVQDRESWFQSHDEVPHNRKNVVFPSMFPASNRTEESHTVCGDVEVNINNMNNFSRNINIEETSKLNQDMDGVSVSPTKILECTSNIVSSKFPLHRCMRIVPHDQNSGAFFIAVLHKLSPLNGSKIKDTKIQHTLGTDRTIQ

SEQ ID NO: 241386 - protein, 146 aa, Zea mays
  unsure (1)..(146): unsure at all Xaa locations
  Clone ID: MRT4577_151722C.1.pep
PLTLQQPKRVSSNXPVVHXTAQNMKEQELQQLALGNLARYCQQQEHLACKQLAALNSAACLQHQLPFIDVGGDYPQQLITFNTTGLXKSAWYKQQRQVPPYXLLADVSPEDFLTQQPLMSFYLTAAPNAGTLLRLLQQLAFNQLAL

SEQ ID NO: 241387 - protein, 674 aa, Zea mays
  unsure (1)..(674): unsure at all Xaa locations
  Clone ID: MRT4577_151723C.1.pep
VIANDLNMRRCDLLIHNTKRMCTANLIVTNHGAENFPYCSLAKDCSGSYKDPCKLQKLEFDRILCDVPCSGDGTIRKGHDMWRKWXTGSLFCLLFYASLYVSSGRNLLLLFRNSGMGNQLHLLQVNIAMRGIALLKVGGRMVYSTCSLNPVENEAVIAEVLTASYWLGPIRCDAIRGVPGDQKRXEDTTQNECAPLIYQSRGHGSQVKTDAHGTPLHIPALMICCXEPLSSFEXGNSVELLDVSSELPELVRRPGLSTWKVQDRESWFQSHDEVPHNRKNVVFPSMFPASNSTEESHTVCGDVEVNINNMNSFSRNINIEETSKLNQDMDGVSVSPTKILECTSNIVSSKFPLHRCMRIVPHDQNSGAFFIAVLHKLSPLNGSQIKDTKIQHRLGTDRTIQFQKEPKPETRPYETTLTRRQHNVSEVDDTEVLGRGQKLGTDSQTSKDKNSSEVEIVSILAESGDRMELQKQSRWEGVDPVLVLNDEAVIKSIQSFFGIKESFPLEGHLVTRSPDNARRIYYVSKSVKEILELNSKVVGQLKIASLGVKMFERHRSKDPCPCAYRLSYDGLSLVLPSISERILYASALEFHRLVQYRSISFAHFTDTRFGEQAASLTPGCCVVVLLEGNRRVDSICKDPSTIAVVCWRGKGTINVMVSPSDRKDLLERMAYRFG

SEQ ID NO: 241388 - protein, 92 aa, Zea mays
  Clone ID: MRT4577_151724C.1.pep
LVLDLEWSIKAGAQRKGWYTGRASKGWPCIFPLRLVWKPKERPPPRSIGRCPYVRQWYAVRSCVYYYVGLLEPKHPVVFGKTWALPYVWFFP

SEQ ID NO: 241389 - protein, 83 aa, Zea mays
  Clone ID: MRT4577_151725C.1.pep
PAGRTFQLAVGMSIPTTRNLYSLTTSGTLARSTQALWIKLAVKLTMLLWNSLSYNSTVRTLPNLLPTASLKMFQYHVSTHRLL

SEQ ID NO: 241390 - protein, 89 aa, Zea mays
  Clone ID: MRT4577_151726C.1.pep
EDVPVPCDRTTGLLYHAETFCLCTYGASTLIVHDNERRLHTMRRIRIHLGDSVTLESHRTTLAYHAATCEHTYGSFDLTNTMNTMTSNV

SEQ ID NO: 241391 - protein, 54 aa, Zea mays
  Clone ID: MRT4577_151727C.1.pep
LADHLHQWTAYSSFTMTAARRSRRHRLTYPRPDALLTTRGPIRILKLVSGQLRC

SEQ ID NO: 241392 - protein, 92 aa, Zea mays
  unsure (1)..(92): unsure at all Xaa locations
  Clone ID: MRT4577_151728C.1.pep
MAGSMISSTALEVGPHGLPPISRRASSFTVVCSKKKIETDKAYLIGSGPTVDVNDSXHKSLGQGRGPFXDKDGANGDGDSTIYNEDEXSPTG

SEQ ID NO: 241393 - protein, 122 aa, Zea mays
  Clone ID: MRT4577_151729C.1.pep
ALNTRPRIRYRTTNIDNDQSKRICRNIPTKITTITIIYLNTIKESTRIRSKSKDRNMSTDPKRRQRFLRIVYQRRNSLRSAMHRHRTLTNRNILPQRRGRGTKKEEGILMQHSCYQAHKSAQ

SEQ ID NO: 241394 - protein, 169 aa, Zea mays
  Clone ID: MRT4577_15172C.1.pep
MFVAPSRGGAAARGPGAGAAEEFDESDVWGSFGADSQYSSPGAELGAGWARPIPGSGARRKKPVDGGGGGGAAGSLPMNIPDWQKILGVEYRDHHRAGEWEPGADDDDDDDGSSYGRARGGAEMVPPHELAWRSRAASLSVHEGIGRTLKGRDLSRVRDAVWKKTGFED

SEQ ID NO: 241395 - protein, 59 aa, Zea mays
  Clone ID: MRT4577_151730C.1.pep
YQIARILPYGAQCSVQTLATLDGDQNRARRTCSNLTLAMFLTRHTAYVPNLTVAKFKQK

SEQ ID NO: 241396 - protein, 105 aa, Zea mays
  Clone ID: MRT4577_151731C.1.pep
EKNRARSHKPKSKGAGGGPNQFRGEDINYDRYHSAKHPKHYHRVQGGWFFLSENGKGKEANATSRAKITIRDLKHQPHNIKQEPRGGRGRTSPPGGCGSIRGPAS

SEQ ID NO: 241397 - protein, 163 aa, Zea mays
  Clone ID: MRT4577_151732C.1.pep
FGTRPKSTAQIIHTLNDTSHQTHTHTHKFRKENCQRRSPSDHEATKMQRPDSCQPASHHSCSISMDAHTTAAGHHQRPQIESRGQPHEHQLCSHGGDDDDDFHVTTHPPIRSQIARGNFGRKKKTHLPGHPGAFPCLSPLCLEAHESTPRTSTGDERERERER

SEQ ID NO: 241398 - protein, 122 aa, Zea mays
  Clone ID: MRT4577_151733C.1.pep
RTRGRKKVDSASTSLLSPYLHFGELSVRKVFHQVRMKRLMWSNDDNHAGEESCTLFLCSIGPRRRGELHPVPLLHRPAGVLEGGEAGEEYAGAVGEPWRRIWRSPKRKKGKSWTLMWRVSLV

SEQ ID NO: 241399 - protein, 70 aa, Zea mays
  unsure (1)..(70): unsure at all Xaa locations
  Clone ID: MRT4577_151734C.1.pep
NKSRSASCHFFIFQAYIHISSKERXSPIVGPSFNSLAVDLQLLLLLKPKFILNLNCFTTSSLLKPCLYPT

SEQ ID NO: 241400 - protein, 69 aa, Zea mays
  Clone ID: MRT4577_151735C.1.pep
LKLTLHKRFIVLSYSHRCQPQLPCNPPGIQLASKGMFVWVYNLSGLYNLTTFELTLSSRIVGLYNLGRL

SEQ ID NO: 241401 - protein, 55 aa, Zea mays
  Clone ID: MRT4577_151736C.1.pep
TMHACMYAWSAVTWRSAQALSESTRTSSRPGHASDNHLIWMELYIVFLVMWHFIS

SEQ ID NO: 241402 - protein, 75 aa, Zea mays
  Clone ID: MRT4577_151737C.1.pep
SLLSQVLKGRCSVSPVNLVMIGFSQSTHCVNGVVDIAFMSVHIRHFVRYEVVRNAGSSRPWVQNLFSLPDPVAFV

SEQ ID NO: 241403 - protein, 60 aa, Zea mays
  unsure (1)..(60): unsure at all Xaa locations
  Clone ID: MRT4577_151738C.1.pep
RGGGPGAPFPLGGVPPRGVSNSDPGWKGQGPELGLRXFLFFYPPPKFRCFPFFPLVTGGD

SEQ ID NO: 241404 - protein, 54 aa, Zea mays
  Clone ID: MRT4577_151739C.1.pep
GILRGDFKDEDSIFVDTQVTVPSNGQLPLRKLVFQKVGEQSKPAAEGEKFLPAV

SEQ ID NO: 241405 - protein, 82 aa, Zea mays
  unsure (1)..(82): unsure at all Xaa locations
  Clone ID: MRT4577_15173C.1.pep
MAWWRKKVVSPACRAWAAVSTRVRARNAGSSGSILKLHEDVQTCGYRDVQVMFDILTSELXRQHSAPPSSANTSSSSSASCG

SEQ ID NO: 241406 - protein, 89 aa, Zea mays
  Clone ID: MRT4577_151740C.1.pep
GSRSIPSVNNSGARKFSLLSRKFSHAELLGSSAFQFFLFYVYCYIYSTHIYIFIRLETCNYVYIDVYIGSKAHCNGPKNAELKRSCCRY

SEQ ID NO: 241407 - protein, 104 aa, Zea mays
  Clone ID: MRT4577_151741C.1.pep
GLSPGRWRAWSGTCFIICWVTFVIAELCLLAGSVRNAYHTKYVSLFSNAPPRCAVLRRGVFAAGAAFALLTALLAELHYLFYARARAAAAVPPPIVGGIGMTRM

SEQ ID NO: 241408 - protein, 68 aa, Zea mays
  Clone ID: MRT4577_151742C.1.pep
MWLLFRYWGFGCMKWIPVKEKLVVLKKNAEPYVQKVSTRSVKFYERREDFLSPLFSLESKEAEGDEDE

SEQ ID NO: 241409 - protein, 124 aa, Zea mays
  unsure (1)..(124): unsure at all Xaa locations
  Clone ID: MRT4577_151743C.1.pep
GAQYSCRVVGATAVKSSAATPQRRGNGNGNAKPSGSGHTGTXGIEELQGLYPSLASAVEGITDNESLRPVLKRAFQLISDERARQLDAKVKKQGDMEAQMAVKVTALRNEVLDTLTGYHGLLHQ

SEQ ID NO: 241410 - protein, 154 aa, Zea mays
  Clone ID: MRT4577_151744C.1.pep
GPTFFLRATIFSYAKHYAQQVSLVYSSDLRQPPRNEHIVPQTKVVTMLHELDLDLDLCRRRLSIVRTCLRNERRPSHTRLPSASRNAPPEHSRKVACLTPKRCPPPLECRPPSARAPPETRPLLVEVMARRALNPSPLPSLFYSVYPGRPRGTQ

SEQ ID NO: 241411 - protein, 56 aa, Zea mays
  Clone ID: MRT4577_151745C.1.pep
SKRGGNEKYSSNILLSAVQYYIAVLRSYLRLWSSLINPQGEKEMMKLSLRYLQAAN

SEQ ID NO: 241412 - protein, 115 aa, Zea mays
  unsure (1)..(115): unsure at all Xaa locations
  Clone ID: MRT4577_151746C.1.pep
LLIVVLEHVGDVFVADEVKVKDSKTLLFGEKEVAVLGXCRNPEEIPCGSVGAAXVVEATGAFTDQEKAAAHLXGGANKDVIYAPSKDAPMFDDGVTENDYKSDINIDFNASCTTN

SEQ ID NO: 241413 - protein, 55 aa, Zea mays
  Clone ID: MRT4577_151747C.1.pep
VPNCASSTVLEPKVAVCLEADCQLVLTLVSEYLHYVSWKQRTGACSTYGITCEGY

SEQ ID NO: 241414 - protein, 75 aa, Zea mays
  Clone ID: MRT4577_151748C.1.pep
AGTPAGAGPEVYCRVDALSCRPAPLMVVCRSWSFTTQKGGDHLGAHALLLTKMSMGMPFSPGRVLLVHWKMDARA

SEQ ID NO: 241415 - protein, 108 aa, Zea mays
  Clone ID: MRT4577_151749C.1.pep
GITGLIHREQHHVDLFHPHVQFGGSSLIITCKFSGERSSSIISVARHSLRSFVAYIMSTQVSSHRLQESTYRIPQSDCLQMRPHTSLIKGVISLYQICVPVLGVHIDS

SEQ ID NO: 241416 - protein, 214 aa, Zea mays
  Clone ID: MRT4577_15174C.1.pep
MKEMETSQTANLGIHQELGPEISQNPMGNHVNPEKETNEIPGSEVNQELVEICQGAVVETDTIQENQAVPEAGLEVNEETVETCQETAAESDVNLEKQTSDPGVIYRCRKCRRMLATQEFVVTHEVGAGGKSFRAGKRSNVHEDDEKPECPCIFVEPMKWMQTVEEGYVAKKLFCMGCKARLGQFNWAGMQCSCGAWVIPAFQLTKSKIDQCSM

SEQ ID NO: 241417 - protein, 109 aa, Zea mays
  Clone ID: MRT4577_151750C.1.pep
MARGSSQSQQSTSTGSSTARPGLAAPRGSAAATAGMRRRRLGGGGGVSSGGGSGVGSGSSNMLRFYTDDAPGLKISPTVVLIMSLCFIGFVTALHVFGKLYLHKSGSQA

SEQ ID NO: 241418 - protein, 39 aa, Zea mays
  Clone ID: MRT4577_151751C.1.pep
HILSSTSASSTGSDVSYPVRTLAGMGNINIVFDTLERID

SEQ ID NO: 241419 - protein, 57 aa, Zea mays
  Clone ID: MRT4577_151752C.1.pep
IPPQKNNFFFPVKKNGPLTTLKLFINPLPVFNQKLDSPPLQENHGPLCKLGPPLCGP

SEQ ID NO: 241420 - protein, 91 aa, Zea mays
  Clone ID: MRT4577_151753C.1.pep
KQGKVPLPPPWEKKNRSTLSFGQPDMQNGRARTTDHRVLAFTGGPYALGRTTTACFFEKNVKGREIYRWRRGISLSGCLDEPSCTWGTGVP

SEQ ID NO: 241421 - protein, 126 aa, Zea mays
  Clone ID: MRT4577_151754C.1.pep
MANEGVAAERAVKAPPPETESIVWREDKGRFQTPDGEAFLQYRLLDGRGAPAAAVMDLVHTYVPRSKRGQGLAARLCDAAFAHAQARGMRVLPTCSYISDTYLPRNPALKELVDKDQEPHPKPSSM

SEQ ID NO: 241422 - protein, 76 aa, Zea mays
  Clone ID: MRT4577_151755C.1.pep
GRDAKLGYISTKCHSTKNADFTSGTIVTVLLASSNEEKEVFNGYVDQFGQAHLGHVHITQSSALRQWTDIQNEVSE

SEQ ID NO: 241423 - protein, 38 aa, Zea mays
  Clone ID: MRT4577_151756C.1.pep
VILLRQATSIALWSINDSISSLISKTWTYIHISSFHKS

SEQ ID NO: 241424 - protein, 56 aa, Zea mays
  Clone ID: MRT4577_151757C.1.pep
VETEIHITTWNSLLGLLWSSIKAHQIRSVIWLQRSSSHLIYGQRFFLDCNQLLQKV

SEQ ID NO: 241425 - protein, 93 aa, Zea mays
  Clone ID: MRT4577_151758C.1.pep
CRLVAGCGFPPGFLNNWKPGDLMLLVLSPPHGQGWYFFFSIETRLLLGLGARVRGCGMTLGFMERFFCSGRGVLLIVYINEPPVSCLFSLSGG

SEQ ID NO: 241426 - protein, 188 aa, Zea mays
  unsure (1)..(188): unsure at all Xaa locations
  Clone ID: MRT4577_151759C.1.pep
MDGELELPEFNPRERVKQQTSVPFLWEVKPGAPKRDWVISKPVPVAFACPSPAPTKLVVSVPFQWEEKPGKPLQEASPFHVLPPDHGAFSASSRSLNPFVVESEEEYSLGFELEAFGFPDSSDASGAAAWADGSSSGRRDGWFSFSESEDYSHSSGDTSAHDKEFQFPRAPSEKSWEVXNDEDNPWSP

SEQ ID NO: 241427 - protein, 117 aa, Zea mays
  unsure (1)..(117): unsure at all Xaa locations
  Clone ID: MRT4577_15175C.1.pep
MNTCVRMREPCMERVARNVEHEMAESDRLQPPQPFGMVCKMVMMHDKNQALVQMEDHHAYMSALQDYTSXQPSIRRRNAYMQGSSDQELTTDQSSDGRNVDKECEPNRILVVTIHHV

SEQ ID NO: 241428 - protein, 214 aa, Zea mays
  Clone ID: MRT4577_151760C.1.pep
MDLSQALTSSSDDETRALGTLLDMFSSSFSLDDIADAYIKANGDVNKAGDFLYDLQHSLPHTKDVESSVEANLSHTDKAVEENCMDNSSQPRTLLRTEQAVEENHFENSDHTKMPENLHKSSAAFGTVSSMLRKESIRATTTASRASKKGKPLRVELPEYMRDDFKVTSDESDSAPRRETLNNRDVRSFCFACLVKGFKLRKELIHEVLGSCGY

SEQ ID NO: 241429 - protein, 126 aa, Zea mays
  unsure (1)..(126): unsure at all Xaa locations
  Clone ID: MRT4577_151761C.1.pep
RARRTSPSKHDCSYYDEVVENNNHYVAQPPTDDNRQELSKELFYTLLASLPGRXYEPFWNELDCVKNLCKNMKDLTVDDLDIARLSEDYLYVWVRIDEIDTRGTTLIGYNDYMISTVKVLVYPCDY

SEQ ID NO: 241430 - protein, 94 aa, Zea mays
  Clone ID: MRT4577_151762C.1.pep
RTDDCRITGEGRRNDDPVPSPRKRLSFSLSLSLFFPFPLLTTGQGVTRTHMREWTHHPRSSKVHYTIRVHSSANHPLKPDLFDLVSNATYLGYC

SEQ ID NO: 241431 - protein, 79 aa, Zea mays
  unsure (1)..(79): unsure at all Xaa locations
  Clone ID: MRT4577_151763C.1.pep
HKVIVLTLQDEILTXKFATVAPPXQIEMGMXTILISSEEGETEATNHKKLSEFGIXNGSRLQADDFLQDYTLLINILHR

SEQ ID NO: 241432 - protein, 77 aa, Zea mays
  Clone ID: MRT4577_151764C.1.pep
VGLNVCGENKKRVCVYAPMSPPNDFKIHPGAQSFFYKLSSVVPHVLLFKAPAFSSCVGPQSPDEPSYMPKSWPRGGG

SEQ ID NO: 241433 - protein, 99 aa, Zea mays
  unsure (1)..(99): unsure at all Xaa locations
  Clone ID: MRT4577_151765C.1.pep
KTPQKFSYKNFGPPFEKETHPPKPYKKNFNLWDLPPKKGIFKVPKIIYGVHAEPKAKPFXLELTWIFNKPPPHHQKVPNXLLDQPKTAAQAPLKKMDPP

SEQ ID NO: 241434 - protein, 117 aa, Zea mays
  unsure (1)..(117): unsure at all Xaa locations
  Clone ID: MRT4577_151766C.1.pep
MGPPPGGPPQXGPPPGPQKRGMPPIFWGENPPPPDKNTFFLSPPRPRGPPRNFGPGPGGGPIFPKGGRIKAWGKQGQKCFPGENGIPSQFHTKNEPEAKRGSPGGAMGGPTQLIGGG

SEQ ID NO: 241435 - protein, 55 aa, Zea mays
  Clone ID: MRT4577_151767C.1.pep
GQHLSLSVPCRNSQAKKTITQNPKVRGENQTVIPRAGNPSPWGEAKPRSAGCMRG

SEQ ID NO: 241436 - protein, 64 aa, Zea mays
  Clone ID: MRT4577_151768C.1.pep
RMLSLGPISSYSSMSNQGRTSVDASALVLVGQGSSGLAIERKTPESALKVPGYDCKVPAVASCK

SEQ ID NO: 241437 - protein, 411 aa, Zea mays
  Clone ID: MRT4577_151769C.1.pep
DDVPPGPAAFSRREGWGTSAAAAAATTNSRKTMPRSRGNEPPLRTSQRAPLHLKTTACSEANGAHHRPVADRSSPRVSPRSPLPEKKRAAGTRVAELEGKLGKVQEELKKLREQLASAEAAKKDAQVALEEAKKRVGTKGSPASTTTTTPLSPPSPGVEIAKKTEELKLPQPAAEEESSINAPATDVFEVVRAESGDKENQSAAEDCEVVSCGGGKAALDVAENEETEEEETKKMIGEDNSAAVESDGADKESPEVVELKAKLAEKDTEIAALTAENAELKKQAEEAAEAAKKAEEGPASRAAKAEHELKEGAAREARVGEQLRASEAAREALDGELRRLRVQTEQWRKAAEAAAAVLGGDNHLTGLAGNGNGWGSPATMPDDGDDEGFGGKRKGAGIRVLGDLWKRKGSK

SEQ ID NO: 241438 - protein, 312 aa, Zea mays
  unsure (1)..(312): unsure at all Xaa locations
  Clone ID: MRT4577_15176C.1.pep
ERRGTASGLARRGRGSGPGGSRPRAPASVAAXGRGPSQALWPSGPDGTGTAALAAPARGXPDGSGAAASGPVCSGAALPAAVRAWLRGAQSPGGSASAWAHGAXSRGPGGAAASAWPYRGRLSGAWTSRRAAPTTSAALPQQRGRGRGXRGSWRRGPWSPARARPXAGPGGGNDPIRVRPSTAYPMPRPWRPQQRGCVDSTTRGHCPVARARGTSGARMLPRRLGRQPRRTSTSAVPSSVLARGHGASALPWLGDQASAQAHPNSGYAMAGAAPTVAVHLDANKPGPEGLGSQRWSLMENRCTASAGGRNVH

SEQ ID NO: 241439 - protein, 79 aa, Zea mays
  Clone ID: MRT4577_151770C.1.pep
GQAGFAAGHGGPAGSCSCASELRVIAMMCTSRTHAVCIHSTIANMVMELHTERIRRDACQTVRVRSNLYMHVMCQLIKD

SEQ ID NO: 241440 - protein, 161 aa, Zea mays
  Clone ID: MRT4577_151771C.1.pep
LDQQLVTVSCIAIVVCFSQECSHVASTFLHFISWMYLTVFLEKLPGKYFSFTMKQTVRAVLGLKGSSSTFTFVALSGDLLHGTFQFQFVIGKDGAVVCSNTQSGLERRLALQTLPYSRLSEVMPVAHGRICVASRVKLPLAGRSERDGGKWKARRAAAPGR

SEQ ID NO: 241441 - protein, 85 aa, Zea mays
  Clone ID: MRT4577_151772C.1.pep
SARGAMRFFHYYSPRHYHVPRPTTLCSTLSRCPGIHESSTKKPSEVSARRLVQDRTASIVLPVCISIPTRLYLKDRCHLHNIYYL

SEQ ID NO: 241442 - protein, 87 aa, Zea mays
  Clone ID: MRT4577_151773C.1.pep
GDVSHLPEAQLLSIMLFSIVLVVLVFTRGHHLRHAFLQCIRRTYRSRLRRITPPALCPSYGATGGGGAASPPPRIIKRARRGMTHRP

SEQ ID NO: 241443 - protein, 77 aa, Zea mays
  Clone ID: MRT4577_151774C.1.pep
LGPHDVWWPCIPPHPVWFFARTSVVLLTWGRDCFHISGVSPLRVMNRVLISRRALAHYLLTTLEEVCRVPHIKTKEH

SEQ ID NO: 241444 - protein, 62 aa, Zea mays
  Clone ID: MRT4577_151775C.1.pep
TFFLPNHTFLTFSIIFLYPSPYISSKLFPISFIIFFPPLFLLIISPFFILLTPLFFPFTSLF

SEQ ID NO: 241445 - protein, 59 aa, Zea mays
  Clone ID: MRT4577_151776C.1.pep
SLTQNDHPVLQCLCVLKRGTIFVSQIFIFLFSNELHRLNYTWEAKQAGLTKMVPLFNPK

SEQ ID NO: 241446 - protein, 100 aa, Zea mays
  Clone ID: MRT4577_151777C.1.pep
VWPGTGWRPTSSRSNPSRGSCSCSHRTFSPHRLGHRSLSTGNRLPFPRPSLSREIDPAVGTYDEHPKIAGFNYIPDFVRPRRLERYRGWQATPLNMKGEK

SEQ ID NO: 241447 - protein, 93 aa, Zea mays
  Clone ID: MRT4577_151778C.1.pep
KPKIWGPNHPRGPRGFLGPNGQFTSGGAETPPFGKNSHGGGGGLNPFGGKRLKKGPNQIPWGCVHPFSKSSSLIRKIGPRFPPRLGPKNNRAP

SEQ ID NO: 241448 - protein, 181 aa, Zea mays
  unsure (1)..(181): unsure at all Xaa locations
  Clone ID: MRT4577_151779C.1.pep
EEEKGFRHTMCGTPAYVAXEILSRKGYEPGKVDIWSCGVVLFVLAAGYLPFNDASLVNMYRKIYAGRFRCPGWFSPALRDLLRRVLDPDPSARIDADGIVAHPWFRHGGEEDLGGLVHGGYEEVEEEEEEAKADEDREPTAFDILSFSPGSDLSALFVGAGGGGKERVFVGEPAAAVLGRV

SEQ ID NO: 241449 - protein, 78 aa, Zea mays
  Clone ID: MRT4577_15177C.1.pep
RGPGLLFLFSKKLVPHKRVVSFGVTGKKGKLFLVIFQTKLIFFFSLSVKLRGGKKPEKRIVFCNQGGENWRLRKLFLF

SEQ ID NO: 241450 - protein, 158 aa, Zea mays
  unsure (1)..(158): unsure at all Xaa locations
  Clone ID: MRT4577_151780C.1.pep
DRGVRKRNRETEGESCTEVKACKQNYRGQTREXREKTSWLRSHIKVRIISKDVKGGRLYLKKAVVTDVVGPTSCDIAMDETQELVQGIDQELLETALPRRGGSVLVLSGRHKGVYGRLVEKDLDKETGVVCDADSQEMLHVKLDQVAEYIGDPADIGY

SEQ ID NO: 241451 - protein, 83 aa, Zea mays
  Clone ID: MRT4577_151781C.1.pep
ARPLPHQPGGTNEPGDGRTTGTSGPDGLQQCEPTGTQGARALTACRTNAPEGRQTSKRTNAQTRTQNWADAGRPGWRRRPPGS

SEQ ID NO: 241452 - protein, 65 aa, Zea mays
  Clone ID: MRT4577_151782C.1.pep
SGALWCPFIWMSLSNKHLWSGSHQRGLRVCVVIGGDETCVLYPKLFCSRGGIFRACGQYGKVHCA

SEQ ID NO: 241453 - protein, 73 aa, Zea mays
  Clone ID: MRT4577_151783C.1.pep
AFQAWPNLGINSCVCVLRSVLCADSLSYSLFISALQHLSVVQVIFEVQGILRQDLLFRCNLLEGSFIPLRSGP

SEQ ID NO: 241454 - protein, 1330 aa, Zea mays
  unsure (1)..(1330): unsure at all Xaa locations
  Clone ID: MRT4577_151784C.1.pep
MVFIGYEKGTKGYRVYDPVAKKLHISRDVIFEEAKAWDWIGTDQPSPSTSVIDVEHYSIAGPGTATESAENGTEETTAADDSDPQSPNQSQWQIDTGYSAGSNQNTPQGSPTEQGVDNKTWELAVLPPGHRAIGLKWVFKVKRDPDGKINKHKARLVAKGYAQREGVDFDEVYAPVARIETVRLLIALAAQNGWKVHHMDVKSAFLNGDLIDDVYVHQPPGFVVKNGDGKVLKLKKALYGLRQAPRAWNARLDKELLKLGFIRNPLEHAVYRRTHGTDLLLIGVYVDDLIITGSSNGAIEAFKREMKNSFSMSDLGLLSYYLGIQVEQKNGVTTLCQSSYALKILEQAGMKGCNACCVPMENRLKLSKKDDSPPVDKTNYRSIIGSLRYLVNTRPDIAFAVGIVSRFMEDPRAKHWAAVKQILRYLAGTVNYGCVYKQLGTTETKLLGYSDSDLAGDVDDRKSTSGSVFLLGNSLVTWVSQKQRVVALSSCEAEYVASANAACQGIWLSRLLGELLGIQAPKVRLLVDNKSAIALSKNPVHHDRSKHIDTKYHFVRDCVEKGEVDIEHVSTGKQLADILTKALGRVSVSEADKGLIRFSGEETIPKPENDEVVVFKSFFKAGLRFPLHRMIADVLENFEIYLHQLTPNAIVRLNVYIWALRSQGVEPLTEAFYRVLELHYQTKAREDGLHENFGCYNFAYRKDMKTPVVSYRSKWPMGWKSEWFYVKIDEKKEKLXPQCNMXPDVVYEFRVVSENIGTRDLVQEYLANRVFPMLKEWNMPKLKGEKKKNELVRLPYHFKFKKHFKEPCQEWLEMIEAMCNEILGNYTKKEDQLMTAAFGTRPKRRLNRVMDALKFEYPDYGRLSKGAEGPKRKRVVSVMKRQAARMIEEDEKALKNKKSNPEPKVAVPKKRKASAAEPKATDIEEEIPSTPPAADVEEIXKMTPLXPHLMKLLQKKKEPSATKKSAEPKKRRIITMTEAIEETPLPASASKTPAIESATAAEVAPTEVVSAEGATAEGANLESTFSDIDKILLDMAAEEAATAAEETMAIVPGKEDIAEDTSEEENFNFQNLIGQELSKAEIEKLXDYAISCGYQPGAMLFGGVCXTKLASTQSMLLSKALRMQQDLEDKKHEIIIEGLEGKIKDQATTLEKKDFELQTMEGLLAEAEAKIAKLDKELLSKSESFEQEKQKIDTKFETERLKQVFNSVGTSSEKFSPSVEDLSGTFEHIEGEVDALDEVIAGHGDFCALLASRGTAVAFMKSGCTHGKIVNRPNFSLSPADLIDIPSLARSIGNRFIKQIWTKGGQSLAGDEARSHLKLDDEAEEHRAEA

SEQ ID NO: 241455 - protein, 670 aa, Zea mays
  Clone ID: MRT4577_151785C.1.pep
MVFIGYEKGTKGYRVYDPVAKKLHISRDVIFEEAKAWDWIGTDQPSPSTSVIDVEHYSIAGPGTATESAENGTEETTAADDSDPQSPNQSQWQIDTGYSAGSNQNTPQGSPTEQGVVFATPPTDAASGELRFRTLESVYDDTDEVTDFQYSGLCYLAAEEPRSVDEALEEKCWREAMVTEMNSIQDNKTWELAVLPPGHRAIGLKWVFKVKRDPDGKINKHKARLVAKGYAQREGVDFDEVYAPVARIETVRLLIALAAQNGWKVHHMDVKSAFLNGDLIEDVYVHQPPGFVVKNGDGKVLKLKKALYGLRQAPRAWNARLDKELLKLGFIRNPLEHAVYRRTHGTDLLLIGVYVDDLIITGSSNGAIEAFKREMKNSFSMSDLGLLSYYLGIQVEQKNGVTTLCQSSYALKILEQAGMKGCNACCVPMENRLKLSKKDDSPPVDKTKYRSIIGSLRYLVNTRPDIAFAVGIVSRFMEDPRAKHWAAVKQILRYLAGTVNYGCVYKQLGTTETKLLGYSDSDLAGDVDDRKSTSGSVFLLGNSLVTWVSQKQRVVALSSCEAEYVASANAACQGIWLSRLLGELLGIQAPKVRLLVDNKSAIALSKNPVHHDRSKHIDTKYHFVRDCVEKGEVDIEHVSTGKQLADILTKALGRVRFVELRQQLGVIEVQ

SEQ ID NO: 241456 - protein, 92 aa, Zea mays
  unsure (1)..(92): unsure at all Xaa locations
  Clone ID: MRT4577_151787C.1.pep
MTAGSSDAGSGVIVPRNFTVLEELXERVQKDVKNGTVIYGMDDVHDMYVRTWTDTIIDPHNTIHDDRIYQLKLVCDNDXPDKXPSLRFHPRI

SEQ ID NO: 241457 - protein, 83 aa, Zea mays
  Clone ID: MRT4577_151788C.1.pep
MVMVYMMATEGMNVNDECQHWFMVMKCKKVHRSVVYNIDERSHALLVDTVGGPGDGFEEIVITLICFNCMYTFFEFNFVTVDN

SEQ ID NO: 241458 - protein, 78 aa, Zea mays
  unsure (1)..(78): unsure at all Xaa locations
  Clone ID: MRT4577_151789C.1.pep
NTNPEVSIGVKKIRWSSWTVRSFAMVELYAXRLXYRTTGAELLLMGIIVXGTSGAAGLLRANGATVLKVRVEAKTVLG

SEQ ID NO: 241459 - protein, 75 aa, Zea mays
  unsure (1)..(75): unsure at all Xaa locations
  Clone ID: MRT4577_15178C.1.pep
MVRMNVLAAALKSINNAEKRGKRQXLIRPCSKVIVRFLTVMMKHGYIGEFEIIDENRAGKIVVNLTGRLDKCGVI

SEQ ID NO: 241460 - protein, 58 aa, Zea mays
  Clone ID: MRT4577_151790C.1.pep
ERKISDAFSSDLARHCKRSGKEKSLNAFFELATACCSPSPSLRPSTRQVLKRLEEIAR

SEQ ID NO: 241461 - protein, 81 aa, Zea mays
  unsure (1)..(81): unsure at all Xaa locations
  Clone ID: MRT4577_151791C.1.pep
SGVPCVPSAWRSSALXLPPPRRRCPLGXVCVXVRCGCRRVGAVSAAWLLPPVARGVAGSPAACFLLRPPPPLWGAVLMGCG

SEQ ID NO: 241462 - protein, 142 aa, Zea mays
  unsure (1)..(142): unsure at all Xaa locations
  Clone ID: MRT4577_151792C.1.pep
QRVLAHPSVACFVSHCGWSSXTMEGVQXGVPSIAWPYFTDQFVNQAYICDVCKVGLPTMTDESGVVSKXHIASKVEXHGYSRHIVKGGVTXKRTARASVNREGPSHGNIGMCGHAIKRPESVASQNNVCMCHIDAYRLVVIY

SEQ ID NO: 241463 - protein, 108 aa, Zea mays
  Clone ID: MRT4577_151793C.1.pep
SSNIKLHKDPSHTAAQKTRAQGRGHNTNIKPTEPHPPFMTHKPQMYMGQRLRIYPLTASHTMNHSSLTTTEAGHHLDSALLLDVENSKRCDHLYRCLPRTISPSVPGG

SEQ ID NO: 241464 - protein, 50 aa, Zea mays
  Clone ID: MRT4577_151794C.1.pep
PIRAWSSRSRPPSARPTGYDRITMSYSFARARLDLDDFAVLSDYLGLAST

SEQ ID NO: 241465 - protein, 61 aa, Zea mays
  Clone ID: MRT4577_151795C.1.pep
IKSRFRYIGATYFLKYGCIIHIRVQCLGQLCLISWLEHLFSCGSCAFLINKLGMAPSMMPD

SEQ ID NO: 241466 - protein, 149 aa, Zea mays
  unsure (1)..(149): unsure at all Xaa locations
  Clone ID: MRT4577_151796C.1.pep
GPXSEEEHRARDNRMHNSAPAVQELNRTHTKLKSLKNDNRTGEREAPPEEQHDARTTMQDRSTPLDKGVNNKHPGGPIRASEKTGSRHPNAHGNDGASXGPPTQGERKDEHTAGTNERKGPTQHTGTSDGPMETKLYHNKPQPEGSPPK

SEQ ID NO: 241467 - protein, 250 aa, Zea mays
  unsure (1)..(250): unsure at all Xaa locations
  Clone ID: MRT4577_151797C.1.pep
PPPPWPTPATPPPTPLPRLLRAPXPASPPPAGTSASSTSSPARTSTRSSPSPTTRTSSTSSSSTTASPPKPPQQELQREXPRPQXSASPPPLPQALPPQMQNQQMQQPQVMMKQEAVPVQSPPPAAPMAVPQSVVAAXPRPAPTTSSASTTASXPPPAVKVKDPAGDPPKMRENVPVEIPPKNEDRHPNPNPXAXTTTTPWCLPPSRPPSXPSPDPGPREAPARXTPPSXQPPPAPAPGPGPQAAPAPAP

SEQ ID NO: 241468 - protein, 69 aa, Zea mays
  Clone ID: MRT4577_151798C.1.pep
LPLASTNRPSSLTVKLPDHQRASSSSFPPDSVLVASMASRAHLPGSPASIAVLILSFFQGTYVLALIHF

SEQ ID NO: 241469 - protein, 146 aa, Zea mays
  unsure (1)..(146): unsure at all Xaa locations
  Clone ID: MRT4577_151799C.1.pep
KPQQRRGPPPRKPRRGTPPRGGPGPXGRPPPGGQTRHPGGGRRRSEKGAPGGRNPGQNPPPEKIETPPQPKRGTEPEGKRTKRGGPXGSHPPRKGEGPPPPTKKRNRRGRGEKKKGPPAERGRSRXGGEPRPLRKKRGPRGAGLRG

SEQ ID NO: 241470 - protein, 147 aa, Zea mays
  Clone ID: MRT4577_15179C.1.pep
TPMGDWDPRGRPGHRPSPYDTAHRVRVLSHATDARRRPRRGVRPHVQQRTSYRLGARPVGRADDAACVNLDSSCGSVVTHRHRPPPSGVHRETAKERDWRNCVIQISRRGMCTVHARGGTGPRPGVEVGYVQHASDRGDWRSLAPLN

SEQ ID NO: 241471 - protein, 112 aa, Zea mays
  unsure (1)..(112): unsure at all Xaa locations
  Clone ID: MRT4577_1517C.1.pep
FKKGNQRTPGFNSTKGPFTKKIWFQFNFGRGGKGRLFNCPXPQQEPWFKEILFPPLQKGEVQQQVHPGGGPFQMAGVAQGKLKPGPVVLVGVLSKGAGKKPELGFPPGQCLL

SEQ ID NO: 241472 - protein, 69 aa, Zea mays
  Clone ID: MRT4577_151800C.1.pep
SSCRDLGGGGGGVPVEPDWLNLQTHTSGECGSTGPATRLTRYYDRAHAAQISITPSPHLGVVCLYSYKH

SEQ ID NO: 241473 - protein, 701 aa, Zea mays
  Clone ID: MRT4577_151801C.1.pep
MDPKGKRMVINDKEKETLYVNEPKDDKPTDSSSSHKKRDGKKKRRIKKIIYYDSDASSSSPRDDDDEDSSSKKKTKIHKNSQATTVLLASLCRDEYNKVSGLENAKQIWDTLNISHEGNDATMITKMELVEGELGRFATIRGEEPTQTYNKLKTLVNKIRSYGSTRWTYHDVVRLMLRSFTVIDPHLVNLIRENPTYTKMTPEEILRKFVSGHMMVKEASSKEALPSKVAQVEAVGLNEDKMALIIKRFKTALKGHKEYPNKNKSRGKRSCFKCSKSGHFIAQCLDNDNDQAQEKKGKKERKKYYRKAKGETHIGKEWDSDCSSSNSNDEGLAASDFNKSSLFPNERHTCLMAKEKKVHIRDTPKYTSSSDEESSDDEVDYSDLFKRLERTKVDKINELIDALNEKDRLLEKQEDILFDEHDKFINVQKSLALKIKKNEILSFELFTCHDSISSLKTLNDDLNTKLENLMCVGVLLLRRRSSRQKHLRQDSTKAVVTMASHNNQAVAPSATKLVLPITSGSSSEPANKKQKKEAQIRVQHVGVQGPFIKSKWSHIPITFSQEDLQLKYYPHNDAMVISCVIKGFLVHNVLVDTGSAADIIFANAFRQMQEPEDKIHDATHPLCGFGGRQIVALGKITMSVTFGYVHNTRTEHVVFDIVDMEYPYNAIIGRGTLNAFEEILHLAYLCMKIPSEQGPIAVHGS

SEQ ID NO: 241474 - protein, 81 aa, Zea mays
  Clone ID: MRT4577_151802C.1.pep
GEDLHHREADCLRVDHDELHHLILAANYFNSNGLLRSDRADLTETIEGKTPGETPTTFNTKNDCNLYEAEEIRKENQWAFE

SEQ ID NO: 241475 - protein, 262 aa, Zea mays
  unsure (1)..(262): unsure at all Xaa locations
  Clone ID: MRT4577_151803C.1.pep
RGEKKMFTSYVKNKDFQDSXIFGDGNQGKVKRLGKIAISNEHSISNVFLVESVLDNNLLSVSQLCQMGYXLLFTNVDVSVFRRXSWSLAFKGVLDGNFXFVHFAKEEAGLDAXCLMAKTCMGWLWHRXLAHVGMKNLHKLLKGDXVIGLTXVHFXKDRPCAACQAGXQVVGXHHSKNVMTTSRPLELLHMDLFGPVAYLSIGGSKYGLVIVLDXLFSXRFTWVFFLQDKSEXQGTLKSFLRRAQNEFELKVKKIRSDNGSEF

SEQ ID NO: 241476 - protein, 82 aa, Zea mays
  Clone ID: MRT4577_151804C.1.pep
LTSPPRPLFRAPSFTPHQACRSKTIHPSTAPPLPADERHRLIPLKPGRGRRCISPALCEPTKYHYRKPYNKQPAVAKPILAL

SEQ ID NO: 241477 - protein, 69 aa, Zea mays
  Clone ID: MRT4577_151805C.1.pep
TAGTTPVPLPANLHTYSRTHHIKPWDNTNLLRLKVLHKSCPSYIWTACDPLSPHQKDYISKSCPYLSCN

SEQ ID NO: 241478 - protein, 164 aa, Zea mays
  Clone ID: MRT4577_151806C.1.pep
GGGRNKSKNKNRGGRQIPWVLTRKFKQKPGGPKPYEPKGGDGEPKPGTKREKTLLQRGKTRPKKPHPLRKTNRGKQVGGRRKIKEAAGQANGPFGTHKGGDWGNQGGLENGQPWALTKGGRPIQKPPPIRDGPKGQPSFGAGLRATNRNFRPPIPKAKAGGEDA

SEQ ID NO: 241479 - protein, 50 aa, Zea mays
  Clone ID: MRT4577_151807C.1.pep
GLNYPVMDVNNLDAIKNAQTVNAKKAVRHTPSWGHYYYCLINDLIQHLHN

SEQ ID NO: 241480 - protein, 148 aa, Zea mays
  unsure (1)..(148): unsure at all Xaa locations
  Clone ID: MRT4577_151808C.1.pep
ACVAFVALVVWCWRSGLGVAFCAVGVLPGGSLSVVCVSAVVSCCGRLXSGLGFLLXGXWFGSWASXRGCXCRVLSWGPFRXXXXFCSPRLSFSLWXCWXFAXLRXSXXXAGSXXRXXXXLLSXXVFGXRXXVCFFPLSPCLXXXWGFR

SEQ ID NO: 241481 - protein, 422 aa, Zea mays
  unsure (1)..(422): unsure at all Xaa locations
  Clone ID: MRT4577_151809C.1.pep
XXXXXXXXXXXXXXXXXXXXXXXXXXXXXXXXXXXXXXXXXXXXXXXXXXXXXXXXXXXXVXXXXXXXXXXCXXXXXXXXXXXXXXXXXXXXXXPXXSXXXXXXXXXVXXXXXXXXXXXFXXXPXXXXCXXXXXXXXXXXXXXXXXXFXXXXXXXXXXXXXXXXXXXXXXXXXXXXXXXXXXXXXXXXXXXXXXXXXXGXXXXXXXXXXXXXXXXXXXSXXXXXXXXXCXXXXXXRXXXXXXSXXXXXXXXWXXXXPXXXXXXXXCKXXXPXPLLXXXXXXXGXXXXXXXXXXXXXXXXXGXXXXXXXXXXXXXXXXXXXXXXXXXXXXXXXXXXXXXXXXXXXXXXXVXXXXXHXXXXXXXXXXXXXAXXAPXPXXXXXXXXXXXXXXXXEREITLXXXXXXXXXXXXXXXXXXXXXXXXX

SEQ ID NO: 241482 - protein, 91 aa, Zea mays
  Clone ID: MRT4577_15180C.1.pep
ADASAPCFFHFVKVRPTLNEFYSFWRKNEYILIPEPLAKSGWTAALPLADAWRPATIHGPRCRVKHLRHARGSRRGGRSASSLLRAPSEKE

SEQ ID NO: 241483 - protein, 40 aa, Zea mays
  Clone ID: MRT4577_151810C.1.pep
PLLKLDLMFRQRVCHIRHPVCEIVSNMNSMCVCSILRHQS

SEQ ID NO: 241484 - protein, 199 aa, Zea mays
  unsure (1)..(199): unsure at all Xaa locations
  Clone ID: MRT4577_151811C.1.pep
LDLDPRRDERERSGGRSTGRSTKVDPRRHGKRPLPADEEEEQPPPPPSAPKHEQVEEQPYHPLIARALQQQGAASAGGSPGADVADPSPSPEAYAQYYYSARADHDATAMVSALSHVIRXHRTSNKPTTPPDPPLXGEQQHQHDAAAAAAIAEEQGRKRHYRGVRQRPWGKWAAEIRDPKKAARVWLGTFDTAEDAAIA

SEQ ID NO: 241485 - protein, 62 aa, Zea mays
  Clone ID: MRT4577_151812C.1.pep
VIRCHFHAGNGYVHDSTKSAIIIIEDQRCARGPWGPLSFFYSEKIVFCANVSVQCISLNLSS

SEQ ID NO: 241486 - protein, 70 aa, Zea mays
  Clone ID: MRT4577_151813C.1.pep
MHRTEAHCIAVKDAIVHYELPSHPFYGPILCVNNCPFFSSAATINMCSKCHKEMITNHDQAKLAASSIDS

SEQ ID NO: 241487 - protein, 69 aa, Zea mays
  Clone ID: MRT4577_151814C.1.pep
PTRPPTRALEKGQMKSAGGMCCKGYINQSVCDEQDTHDRYAVSIYRRADDLTGMNNKGGATPGDAYLRD

SEQ ID NO: 241488 - protein, 149 aa, Zea mays
  unsure (1)..(149): unsure at all Xaa locations
  Clone ID: MRT4577_151815C.1.pep
MGQSLMKLFFDDSCQKEVKVXRTVVVMLGLDAAGKTTALYRLHVGEALSTVPTIGXVSHRATLILVVDHGSRXLCVCVCVCVCAGFXVEKVEYKNVAFTVWDVGGQDKLRPLWRQYLSNSDALIYVVDSVDRDRIGVAREEFQRLAQDP

SEQ ID NO: 241489 - protein, 90 aa, Zea mays
  Clone ID: MRT4577_151816C.1.pep
EIFISQPILLELEAPIKICGDIHGQYYDLLRLFEYGGFPPEANYLFLGDYVDRGKQSLETICLLLAYKIKYPENFFILRGNHECASINRI

SEQ ID NO: 241490 - protein, 683 aa, Zea mays
  unsure (1)..(683): unsure at all Xaa locations
  Clone ID: MRT4577_151817C.1.pep
RPGIGTVLCVDDDGILRVGFPGASRGWRADPAEERXVEEYKVGNWVRIRPSLTVAVHGMESITPGSVGIVYSIRPDSSLLLGLCYLSNPWLCEPEEVEHVDPFKSGDQVCVNSSVAEPXYAWGGETRHSVGKIIDIDSDGLLIIDIPNRAAPWQADSSCMEKIENFKVGDWIRVKVTVPSPKYGWEDVTRNSIGIIHSLQDDGDVGVAFCFRSKLFLCSVADIEKAQPFEVGEKVHVSPSISEPRLGWLNETAATIGAISRIDMDGTLNIKVSGRKSLWKVAPGDAERLSAFEVGDWVRPKPSIGSRPTYDWNSVGRINIAVVHSIQDSGYLELAGCFRHGKWLTHNTDIEKVQTVKIGQHVRFRAGISEPRWGWRDANPDSRGIIAGVHADGEVRVAFFGVPGLWRGDPADLEIMDXLRIKFRWRDRLWIGDPADIVLDDVHLLTEASNXGILFIGLWYSFDTISDILHPSILQHFKFSKILTCSXTCKLHITIIASACQGANHSHSSIGTISSIDADGKLRIHTPAGARAWLTDPAEVEKVEDEEEVCIGDWVKVKDSVGTPVYQWGDVNHSSIGVVHRADDGELWIAFCFCERLWLCKAWEVEKVRPFRQGDKVRIRPGLVSPRWGWGMETYASKGEVVGVDANGKLRIKFRWRDRLWIGDPADVVLDDAHLLTEASNGF

SEQ ID NO: 241491 - protein, 151 aa, Zea mays
  unsure (1)..(151): unsure at all Xaa locations
  Clone ID: MRT4577_151818C.1.pep
MAGVNSSVVGLKPAVAVPHAAAASSPAKRVHLAAPDGRRAALLGLAAVFDGTATTXGRPRCTILDEYLEKSTXTRSLNLKMMLPTIGSNFSRAYTVXFGSCHIPYIFTVCLDLATHMKVPFIXTSLNIDCXGKVKFKXCLQLFTWNWVKQH

SEQ ID NO: 241492 - protein, 342 aa, Zea mays
  unsure (1)..(342): unsure at all Xaa locations
  Clone ID: MRT4577_151819C.1.pep
MCTFISEPRLGWLSETAATIGAISRIDMDGTLNIKVSGRKGLWKVAPGDAERLSAFEVGDWVRLKPSIGSRPTYDWNSVGRISIAVVHSIQDSGYLELAGRFRNGKWLTHNTDIEKVQTLKIGQHVRFRAGISKPRWGWRDANPDSRGVIAGVHADGEVRVAFFGVPGLWRGDPADLEIENIFEVGEWVRLTNDVEQWRSLKPGSIDVVHXXVGYQGDAWDGTIHVAFCGEQERWIGPSSQLEGVSKFVVGQRVRIRGCIRQPRFGWSNHNHSSIGTISSIDADGKLRIHTPAGARAWLIDPAEVEEVEEEEVCVGDWVKVKDSVGTPVYQWGDVNHSSIGV

SEQ ID NO: 241493 - protein, 435 aa, Zea mays
  Clone ID: MRT4577_15181C.1.pep
ICQVRLFLSEDSPSQAGLRPQDNLQAKGSWLMHAAGPSSDDSLPPGFESLQPTSDLKIDMSQIALIRWRCPPQILYNPDWCVAAGEESEEVALQNERMFGALEAIYPRPSNIPPNPLVTPDVKDSQYDDSRTQLVPLLPVEEDDASDQFEEPPVGLPSSYHHSDKYDDAISRVPQASDALFTTAQQQPNGSINTTRSGVPAEADVVAAASAAYTAIMQSNQMGNMIDQDLLIKILSDPAQIQRLMKEYGALKHEQSTNSSVASMVQGSPPQMTASVPVSVPDRSNAFHNINPKLPPPPVPNRLPPASVTMNAPASSSQAISFPSGPTRGLNYYQNLIHQHGGERQEPLQQHGMQFAMHHQPLASQASAADVVSSGAMPARDTKQRPTKPCAYFNSARGCRNGANCTFLHDVSAARKEQSKGSKRIKLDSRIAGRY

SEQ ID NO: 241494 - protein, 160 aa, Zea mays
  unsure (1)..(160): unsure at all Xaa locations
  Clone ID: MRT4577_151820C.1.pep
YTIGKEIVDLCLDRIRKLADDCTGLQGLLXINSVSGGTVSGXLGSLLLERLSVDYXTKSKLGFTVYHCGQVTTSAVEPYNSVLYRHSMLEHTDAAILLDNEAIYDIXRRSFDIERPTYTNLNRLVSQVISSLTACLRFDSALNVRCNEFQTNLVPYPRIH

SEQ ID NO: 241495 - protein, 163 aa, Zea mays
  Clone ID: MRT4577_151821C.1.pep
RKRLEYRLSQSITIHTQTHRYSGIEHVKQISLLSSHLPCQQCSSASASMKMSSGRPASSPGLQASGRAATDGLCRLCDCPSVQQAAADGLCVWASDGPGTPGSGLCVRGSGQATVWASGGSGERQSSERRPATEALLERLRFEGKRLGAGPRPASRVPIALWS

SEQ ID NO: 241496 - protein, 72 aa, Zea mays
  unsure (1)..(72): unsure at all Xaa locations
  Clone ID: MRT4577_151822C.1.pep
TKAESILSFGSXSRACVGQKLAVLAISMMIASLLRSYEVXPHSSLSKVNGHNSYSSHLYLPNPNIILTKRMI

SEQ ID NO: 241497 - protein, 31 aa, Zea mays
  Clone ID: MRT4577_151823C.1.pep
DFVTHLNYIMLKTIHFELLVLSKKENIYIFK

SEQ ID NO: 241498 - protein, 66 aa, Zea mays
  Clone ID: MRT4577_151824C.1.pep
KVGSVWTLFCTRREVRGGTIISSARPIASGRSFSIKITLCKFSIVLDIVMRAPEPLDQFPRSINRK

SEQ ID NO: 241499 - protein, 384 aa, Zea mays
  unsure (1)..(384): unsure at all Xaa locations
  Clone ID: MRT4577_151825C.1.pep
MADGEDIQPLVCDNGTGMVKXCFSLQAGFAGDDAPRAVFPSIVGRPRHTGVMVGMGQKDAYVGDEAQSKRGIXLTLKYPIEHGIVNNWDDMEKIWHHTFYNELRVAPEEHPVLLTEAPLNPKANREKMTQIMFETFNAPAMYVAIQAVLSLYASGRTTGIVLDSGDGVTHTVPIYEGYALPHAILRLDLAGRDLTDCLMKILTERGYSFTTTAEREIVRDIKEKLAFVALDYEQELETAKSSSSVEKSYELPDGQVITIRAERFRCPEVLFQPSLIGMEAPGIHETTYNSIMKCDVDIRKDLYGNIVLSGGTTMFPGIADRMSKEITALAPSSMKIKVVAPPERKYSVWIGGSILASLSTFQQMWISKDEYDESGPAIVHRKCF

SEQ ID NO: 241500 - protein, 52 aa, Zea mays
  unsure (1)..(52): unsure at all Xaa locations
  Clone ID: MRT4577_151826C.1.pep
HTIYIKFLIFLLLIYFFLLITYXCKNQIQILYNIIXNLYIIYXLIKKKKKKK

SEQ ID NO: 241501 - protein, 79 aa, Zea mays
  Clone ID: MRT4577_151827C.1.pep
FAPFSTCSVSCKFVISITKIMPSFSIFADCSKNNAGCPPMGAARFRFSAGVRPWRGGHHHRRSWEPLSHRDPSPSSKYA

SEQ ID NO: 241502 - protein, 77 aa, Zea mays
  Clone ID: MRT4577_151828C.1.pep
QVSQQATPQLMVGHHHVQEAAKLTLRPGGFDGLYLVRRYGHQRPRHSVEGALPVIANESRLRGVWHTSSQEGVHSFS

SEQ ID NO: 241503 - protein, 61 aa, Zea mays
  Clone ID: MRT4577_151829C.1.pep
ELNGFRIVHKGKILHDETEEELDSLCQFNSKCAKFASSEFELGPNSKSISLPSFTDIDQEE

SEQ ID NO: 241504 - protein, 57 aa, Zea mays
  Clone ID: MRT4577_15182C.1.pep
SKVLSALLLRRSAVKKIVSSRGFVVTQLNIVEGSICHTDRSEQTEEGVEIDSKPRCG

SEQ ID NO: 241505 - protein, 84 aa, Zea mays
  Clone ID: MRT4577_151830C.1.pep
HFKLICTPCMCIPLLPRRAGCLRPWAHHHIILTSISKVSIYIRLMNPAHAVTDDILTQFNVRTANDYNLVCFFELRPLLLSDTC

SEQ ID NO: 241506 - protein, 54 aa, Zea mays
  Clone ID: MRT4577_151831C.1.pep
VKGLLRSGDVSLGELLRQRKGLYFWTRKGLLPGENPPPRPPPGGETPPPPINVG

SEQ ID NO: 241507 - protein, 99 aa, Zea mays
  Clone ID: MRT4577_151832C.1.pep
GSPAAGIRTRNAGQTCRPADLNSHSATDRPYASLGLFEGVARGCLRGEEEDEGVHLRPIGRPASSRQRVLGTLLLARHPGATARFSSLKASPSPSSIAF

SEQ ID NO: 241508 - protein, 45 aa, Zea mays
  Clone ID: MRT4577_151833C.1.pep
MKRTRAQQSKSEEPQDPSAAIAAANPSPNPKQQQRRTKKTRQPKV

SEQ ID NO: 241509 - protein, 173 aa, Zea mays
  unsure (1)..(173): unsure at all Xaa locations
  Clone ID: MRT4577_151834C.1.pep
PRTSREQSTGRCEATTAGQGEGRMQDLYGTTHSXVGCRQHNRDEMFPPTKGTASRPREYALADTHPILEDAAYNPCANDPINHDHRCEATHGRXRFSAAPVHRDIEVRRFKVIPASGDSPRMVAQNNAGDQKTAXEYMSSMIPRKTRRDRKPLSLLSTIATAVTSAXGYFHDS

SEQ ID NO: 241510 - protein, 35 aa, Zea mays
  Clone ID: MRT4577_151835C.1.pep
LCSHVDFTLAVMMGQHCVTKSPLTEHQFSVTYTTL

SEQ ID NO: 241511 - protein, 67 aa, Zea mays
  Clone ID: MRT4577_151836C.1.pep
LLFFFYFKWSWGGFLENYRGSNRARKDEHKQPTNSAQRSSWTSPNTYGNIIHYITLWESEPHINPAQ

SEQ ID NO: 241512 - protein, 113 aa, Zea mays
  Clone ID: MRT4577_151837C.1.pep
ARNSASPPLGIGGQKRVGFFFLGKLLPRGFSKRGFFPLGLATRPFPPGAPGWGGGFFNPPFFRELARGPLNFVGRGAPFFFSLALGFFYPPRLKQERVPGALEILGLAPTGGG

SEQ ID NO: 241513 - protein, 79 aa, Zea mays
  Clone ID: MRT4577_151838C.1.pep
SISTVAHREATLRRNMASSDRPRNRGGPAPIENSDDYRLAYGRPQDEYRQPTRHLRRARCVNRKTKCSQHDIQLTSHGH

SEQ ID NO: 241514 - protein, 52 aa, Zea mays
  Clone ID: MRT4577_151839C.1.pep
LLMSQDVDATTHAEHPYITDILSDKLLSYFLKRFLTAHTLNTLKICPTAPTA

SEQ ID NO: 241515 - protein, 108 aa, Zea mays
  Clone ID: MRT4577_15183C.1.pep
SAHSVPVDLVFVVPTGLVQLEHDSARGPTSVVPVLPSQIPGLHTFLRALIGFCSCQKPFASSSGSFASLVGGWDISPPPLVCRYSLYLCVSTKIPPPPPSRVPPFSFW

SEQ ID NO: 241516 - protein, 108 aa, Zea mays
  unsure (1)..(108): unsure at all Xaa locations
  Clone ID: MRT4577_151840C.1.pep
APSSPQHPYSEPSILSRSVARTKQTVRKSTGGKAPRKQLATKAARMSAPATGGVKKPHRFRPGTVALRGRRSPXTSSGLLIRSLPFPRLVRGVALGFLTALRFPRAAG

SEQ ID NO: 241517 - protein, 79 aa, Zea mays
  Clone ID: MRT4577_151841C.1.pep
SKLFVIKLGFPTAVLLYHRTLEPGARNEVTCARPYTLAGSGTEQADSLLIYTSCRYFLFSTYIYIFFYIIFFFFFFFFF

SEQ ID NO: 241518 - protein, 37 aa, Zea mays
  Clone ID: MRT4577_151842C.1.pep
TCVINIHLFSSINHPINTQRQYSTAIICSIYNNFILI

SEQ ID NO: 241519 - protein, 122 aa, Zea mays
  unsure (1)..(122): unsure at all Xaa locations
  Clone ID: MRT4577_151843C.1.pep
MVSEQGGVIACHSKADFDSHMTKDQEAWKLEDIDFTAAWRGPCRVIAPLFVXHAKNFTHVAFLXVDADQMKEVTASYXGEAMTTFHFXRTVRRSQTIVGAKKDQLLTQIEKHGAPAPASASV

SEQ ID NO: 241520 - protein, 70 aa, Zea mays
  Clone ID: MRT4577_151844C.1.pep
NRLNQHNHLILQKLLLSLTNKPSYGPDNISELLTLILMIANTLKYTLNYLKTISILKLTHVLIDLKFMTY

SEQ ID NO: 241521 - protein, 176 aa, Zea mays
  Clone ID: MRT4577_151845C.1.pep
RVPSGCDIFRPGQWVPDDDAPYYTNLTCPLIQEHQNCMKYGRPDRGFLRWRWRPDGCDLPRFDAGAFLDAVRDTSTAFVGDKDARNHMQSLMCHVSKVAYPKDVSTTTNPEFRTMRYEAYNFTMAMVLRPDGHPSRYGHWPHENVTLYNDCVHWCLPGPIDVWNDMLLQMLLADPS

SEQ ID NO: 241522 - protein, 120 aa, Zea mays
  unsure (1)..(120): unsure at all Xaa locations
  Clone ID: MRT4577_151846C.1.pep
LYGYGAYGXDLDKSWCSERLSLLSRGWVLAFADVRGGGDLSWHMAGTKANKMHSIQDFAACGRHLIKQGFVHQNRLCAIGCSAGGLLVGAVINMLPDLFSAAVLKVPFFDICNTNVDPTL

SEQ ID NO: 241523 - protein, 32 aa, Zea mays
  Clone ID: MRT4577_151847C.1.pep
KNPFNECGPLDPRTFKGQNGIFLEKILFPPFL

SEQ ID NO: 241524 - protein, 89 aa, Zea mays
  Clone ID: MRT4577_151848C.1.pep
TPVMVRRERRTGFIPTRLENVRGLRPLGGGGEDRNLRKNLGGYMAFLVVENHGLCLSEVVINTRAYNRLVLAELIKVLIGGVLVGDRNS

SEQ ID NO: 241525 - protein, 41 aa, Zea mays
  Clone ID: MRT4577_151849C.1.pep
ALYTRPWSITCDTITTSSWKIVNFLSLSLRNLRRLILAWRR

SEQ ID NO: 241526 - protein, 100 aa, Zea mays
  unsure (1)..(100): unsure at all Xaa locations
  Clone ID: MRT4577_15184C.1.pep
RCCSFQTYLLRPPSXSLLPYYQSCRHLVSHNQNAPCSHRSTSSQLTNVPSGVAAFSLXANCPEPPPRPFEPCIPLDPILSCLNXPSXSSPFSPTPPPLPP

SEQ ID NO: 241527 - protein, 336 aa, Zea mays
  Clone ID: MRT4577_151850C.1.pep
AVALLVLCYRSSSVVTVRPWATGLSGQLQKAFVTGVPSLKRSELEAACEDFSNVIGSLSDYMVYKGTLSTGVEIAVVSTTKNSAKEWSKHCESQFRKKITSLSRVNHKNFVNLLGYCQEEQPFTRMMVFEYAPNGTLFEHLHVREDGYLDWPTRLRVAVGVAYCLEHMHQLSPPEILRALDTSTICLTDDFAAKISDVFFCDEPRRQEGSLSLSALSDRESVVYSYGMVLLETMTGRFTASDGGLLEAWAAAYLRGERQLRDVMDPALRRSFHAATVDRLDGVIRGCTDREPRRRLTIAEVAKRLREITAMSPDAATPKVSPLWWAELEIICAEVN

SEQ ID NO: 241528 - protein, 76 aa, Zea mays
  Clone ID: MRT4577_151851C.1.pep
GGKTKEPLNGPQASALNPQKPRGRGETLSNQQGNNFRPKPPKNQNRVPGALKNLKGDRKNLGAYTGKNANKQIKKP

SEQ ID NO: 241529 - protein, 73 aa, Zea mays
  Clone ID: MRT4577_151852C.1.pep
QKYLLVFTGRQTDRRNTYIHTIEAELYLKKKEQITREFPLHWVVVDEVKLLFHTTVPFPKRNRLIEKKFHPFT

SEQ ID NO: 241530 - protein, 152 aa, Zea mays
  Clone ID: MRT4577_151853C.1.pep
IKGRKGSHRDSPAQEDCPRHQVVHGGAQTTTRNHHGFVASHADLRVAKASPSPCRAPHPHHGSPTATPARIAVAASTILSPSPFFPIRLCSLLSAPRRLSGDGQGRRPGFIKGELSGLSGNPTREKRRICSPRPTMRTPFEGAREEDGGQEL

SEQ ID NO: 241531 - protein, 82 aa, Zea mays
  unsure (1)..(82): unsure at all Xaa locations
  Clone ID: MRT4577_151854C.1.pep
NSVEMSAVTLNTIALKEERNIPFIVRTXNPPPPLLVIKSNHHHLHHQKHCAPKQHLHRKIYSNGSSVSYLSLEKKTTSLTSA

SEQ ID NO: 241532 - protein, 30 aa, Zea mays
  Clone ID: MRT4577_151855C.1.pep
YVRNRKFSHPYFNHTIVFHILNLFQVFHFL

SEQ ID NO: 241533 - protein, 138 aa, Zea mays
  Clone ID: MRT4577_151856C.1.pep
APPSPGRPGQEATGHPQGRKKKQRSNKYAEEWKARADTTSPDLRWSTVSFSPLSPPLLGRGPRPRRMASSRVMASSSPPQHAGAGSSSDLARFKSSGVGSMNMDDIIRNIYGPEAVNAAAAESAGLGPAEPSLAAPEA

SEQ ID NO: 241534 - protein, 87 aa, Zea mays
  unsure (1)..(87): unsure at all Xaa locations
  Clone ID: MRT4577_151857C.1.pep
EKLSYLPPLSTDDLLXQVDYLLRNGWLPCLEFSMVGFVFRENSTSPCYYDGRCWSLWKLPMFGCFGAAQVFMELPEALVSYPVAFLR

SEQ ID NO: 241535 - protein, 908 aa, Zea mays
  Clone ID: MRT4577_151858C.1.pep
MGSSLPPKEANLFKVIVKSYETKQYKKGLKAADSILKKFPEHGETLSMKGLTLNCMDRKSEAYELVRRGLKNDLKSHVCWHVYGLLYRSDREYREAIKCYRNALRIDPDNIEILRDLSLLQAQMRDLSGFVETRQQLLSLKPNHRMNWIGFAVAHHLNSNSSKAVEVLEAYEGTLEDDYPPENERYEHNEMLLYKISLFEECGMLDRALEEMQKKESKIVDKLSFKEQMASVLFKLGRFDESESIYRSLLFMNPDNYKYFIAVQKCLGLYSDNGQYSAADVERLSALYNSLKEKYAWSSAVKRIPLDFLEGEKFQEAADNYVRPLLTKGVPSLFSDLSPLYEHPGKANILEQLFLKLEDSIRDSGCFPGCPQKEPPSTLLWTLFLISQHYDRRGQYDIALNKIDEAISHTPTVIDLYSVKGKILQHAGNFTAAAALADEARSMDLADRYLNSECVMQMLQADQVGLAEKTAVLFTKDGDQHNNLHDMQCMWYELASGESYYRQGDLGRALKNFLAVEKHYADMTEDQFDFHSYCLRKMTLRAYVSMLKFQDRLHAHEYFHKAAAGAIRCYMKLHDSPTKSSKEENDEISKLPPAQRKKLRQKQKKAEARAKREAEEKQEDETASSNSSKSGKKQHARPVDLDPHGEKLIQIEDPLAEATKYLKLLQNNSSDSLETHILSFELSMRKQKVLLAFQAVKQLIKLDEDNPDSHRCLIKFFHKINSLPGPVTDSEKLIWNVLEAERPDMRQLHGKSLVEVNRSFLEKHNASLMHRAAGAEMMYLLEPNKKMEAINLIEDSTNITSSGHSLLGPVKTWQIQDCIDVHKLLETVFGDQNVANRWKARCAEYFPYSTYFEGIKSAISTYAIDHSLESPPENGIASNPHLKSKDGEQGSLNGTLHIVDDLSSLSIR

SEQ ID NO: 241536 - protein, 128 aa, Zea mays
  unsure (1)..(128): unsure at all Xaa locations
  Clone ID: MRT4577_151859C.1.pep
AIRCYMKLHDSPTKSSKEENEEMAKLPPAQRKKLRQKQKKAEARAKRVISDTHIGSLFTXFLILSHIPXEAEEKQEDETASSNSSKSGKKQHARPVDLDPHGEKLIQNEDPLAEATKYLKLLQNNSSD

SEQ ID NO: 241537 - protein, 110 aa, Zea mays
  Clone ID: MRT4577_15185C.1.pep
GRGTTLYEFTSMPKKITHGLQASQGQYCLFHSFLLYKSSTTLTFFFCARSPFGAKADNFSILLRGINVRSKLHSSYFPVCKLLLTKVCFIVVSCCTCPVPLVVARALGSV

SEQ ID NO: 241538 - protein, 39 aa, Zea mays
  Clone ID: MRT4577_151860C.1.pep
LIIRLAWSTYDYIFHNALYIYSLIIHITIILYPLTHKST

SEQ ID NO: 241539 - protein, 91 aa, Zea mays
  Clone ID: MRT4577_151861C.1.pep
IVWNVAKPDNHVVVEQSIPESTSTPDLAGEPSAEGADGQAEIIITKTPIMTIMKGKAEAKKIHTLKENVPSQPVGDALPKLSTGEMEVREG

SEQ ID NO: 241540 - protein, 61 aa, Zea mays
  Clone ID: MRT4577_151862C.1.pep
IYALGVRTILDARWQYPRCYVRTIHRSLECHDICTYRRDSMTMIIGTKTLVAKSMNSCSLK

SEQ ID NO: 241541 - protein, 60 aa, Zea mays
  Clone ID: MRT4577_151863C.1.pep
NGKVVISNLENVEKKDQCAWLKRVGNRKICFGYVWNNVWWYCSFFFVYILGVCVCVCGCV

SEQ ID NO: 241542 - protein, 108 aa, Zea mays
  Clone ID: MRT4577_151864C.1.pep
IPARPTRPRSRHVPTSFLQQLLQHTEAALIQLSVTNPFTYLQQYIPFNQLSTLNPSTYFQQQQLLPFNHLSIFYSHHQQFLTFNQFTLLNPFAYFHHQILLPIFHHNY

SEQ ID NO: 241543 - protein, 83 aa, Zea mays
  Clone ID: MRT4577_151865C.1.pep
KKGKGKQKRAPYFRRAFGPPPKTEERICKKISRGQGNRGSQNSGGVSPYGVCRQTKKRGGRGFRTWVFLEIRVWKKKACENPL

SEQ ID NO: 241544 - protein, 60 aa, Zea mays
  unsure (1)..(60): unsure at all Xaa locations
  Clone ID: MRT4577_151866C.1.pep
ILFVIPTTLINXPHFHHTHNIHKISTIIQTNLLKKNPSFPTLYAYPLNKIINKLIKLYPY

SEQ ID NO: 241545 - protein, 51 aa, Zea mays
  Clone ID: MRT4577_151867C.1.pep
IEGAPLFFFFFFFLAHRKRTVQQIQSAKYYGHLTPSGWPPPSWGRPNLQGP

SEQ ID NO: 241546 - protein, 94 aa, Zea mays
  Clone ID: MRT4577_151868C.1.pep
NPFRFPQTFPVSQIFPIEGPARRPKGIHPLVIFGVCCGPPHFEPPLDPFIRGPRWFIFPNQGLGFGLFMKTGIRTRKHRKTPPHWLKKKSRIIK

SEQ ID NO: 241547 - protein, 96 aa, Zea mays
  unsure (1)..(96): unsure at all Xaa locations
  Clone ID: MRT4577_151869C.1.pep
LIDKPLWRLTGESDXEGTKPKTKRNKDIGGGAYDRHGGAQAAKQRRKRHHGGRREQLSRREETAGAANKGDTEHKKQREKDPADTHATVDDQEGGN

SEQ ID NO: 241548 - protein, 51 aa, Zea mays
  Clone ID: MRT4577_15186C.1.pep
FFFFFFFFFFFFFFFFFFFFFFFFFFFWQKKAGNTQKGGPKAILFSNKKKG

SEQ ID NO: 241549 - protein, 74 aa, Zea mays
  unsure (1)..(74): unsure at all Xaa locations
  Clone ID: MRT4577_151870C.1.pep
FIASPAVQRAPLCLLILAILALSATAAAAKSGFTGSNQMRSVTESSASSLGSTVLAALGGTRXALRVARFIVRY

SEQ ID NO: 241550 - protein, 97 aa, Zea mays
  Clone ID: MRT4577_151871C.1.pep
DTCTGRQSPQKVALLCHDPEPDELVVAFLSKQAMSRVVWALAADHISRVGERSEQVHLGEASSRQCIDKWCAAHMAAILISGSDSGDANHKIMRGPE

SEQ ID NO: 241551 - protein, 77 aa, Zea mays
  Clone ID: MRT4577_151872C.1.pep
TKCTPVVRPTPEQGKPTAEPKDLHDGGYCGRRGYPLRTDMTCNERSMAAIGVSQPCIHTRRTDRLMTRRGYGATTEN

SEQ ID NO: 241552 - protein, 141 aa, Zea mays
  unsure (1)..(141): unsure at all Xaa locations
  Clone ID: MRT4577_151873C.1.pep
VLLGVGIVSNLPAYXCAVSSLLLRVKVRLAHGYLLVGSFVLTGPFRSTPVHGQAGAIGGCGLVGILSVXCLTMYXIASFHEGDPFTESSVTLTGRKKEVDXLQTADGWDEYTGGFFIGGICGALWDYFXLLYVLDLTYFFK

SEQ ID NO: 241553 - protein, 76 aa, Zea mays
  Clone ID: MRT4577_151874C.1.pep
VPLCLRNADRDRDRHVMHLAYVQNPTGVRQCALRSGVQIELVSDQIAYLFLLLDRKRTIYRKQVLHTTACEDYPLL

SEQ ID NO: 241554 - protein, 95 aa, Zea mays
  Clone ID: MRT4577_151875C.1.pep
VCAKDPVWVYPFVGAFGFTCYFVGLSWVGVGFFISSRYGVPVGFCPRVSSRSPFGLGVGTLLFALVAPPLKRPHKKIPPFFFPSIFCPINFLFCS

SEQ ID NO: 241555 - protein, 110 aa, Zea mays
  unsure (1)..(110): unsure at all Xaa locations
  Clone ID: MRT4577_151876C.1.pep
RGNXNXILRRRXDGXPGGGRADIYPAVRAAPAGSGPCMTIXLATYAWIVTDLHVLPTATXYYLSEXKNPLRARAGLCXVCVXERERRRRAGHVLLAVWFIFEFMRSLFIS

SEQ ID NO: 241556 - protein, 193 aa, Zea mays
  Clone ID: MRT4577_151877C.1.pep
KKKKKKKRGGGGEKKKKKKKKKKKKKKKKKKKKKKRGLFFISGGAGFGGSQFSVPFLANFFGFGGGAPNFISLAVVFPRGAGETPGVPHFIRFAPLPLFPGWVFCEGARPVPLSQRLATLIGDWAPPFTGPLTPGVVGFPPRVPVPFAGPFAPVLLAFFLSFFPPLAGFPRQVLIGGLLLGFRFLVFRPLNPK

SEQ ID NO: 241557 - protein, 224 aa, Zea mays
  unsure (1)..(224): unsure at all Xaa locations
  Clone ID: MRT4577_151878C.1.pep
RQAGSRRGRPRRGKGCRTRWRGPPARRYPAGPSSGRRLTRWPGRRRRSRPRRRGSGTRRRPARGTGPRRATIGPPSPXRCRRPRRGRRRLRGPRAGRARCSSAGAAPTAAPAWTASRRAQRPPPAGRTRSLAPPRAPRTXRAVGLLPRRRGAQPSSAPPGGPTLVRAAGAAARSRTATEAGAKGRVRRGAGLPKTLAGRRWKASRASRNRRHRGRIGGAGLVPN

SEQ ID NO: 241558 - protein, 84 aa, Zea mays
  Clone ID: MRT4577_151879C.1.pep
PHPLLFGAIALALVPAVQQQCWSVVRGRRTPCSPPGPSPSCPRTASSRSCPAHSSPRRRRRRLSSSLPMLSAGHKLGSGVARRE

SEQ ID NO: 241559 - protein, 175 aa, Zea mays
  Clone ID: MRT4577_15187C.1.pep
MDRESAMQGSSGGNPGAATQEEWLYPGGWQPEQAVVDGAFLMELLEDAPVADQPPEDVDRLSRVIRSLEAEIDGGGQPPSAVADAGTAEQVLGDVHIGALEDYRLLPYLGSIPSPCVAEAPLELWTEVPAAVGHGMGGWYLDGDGVMVGYEFREQCFYGYSESPHVEQVYSPLWE

SEQ ID NO: 241560 - protein, 155 aa, Zea mays
  unsure (1)..(155): unsure at all Xaa locations
  Clone ID: MRT4577_151880C.1.pep
LGGLCLYNPEILNNLCKYVNEQVSSRIYNLNASLSLLPSYRCDAERMHHTDCAPILINDLMAMCXPDSTTGLLLIPGNAPTPSPFRALIPLSPYLETATXNKYWDEYDNNRHISTERTXSNERCTHSAIHGLTLTYHKCTRDYSCGGSTHLYAAL

SEQ ID NO: 241561 - protein, 87 aa, Zea mays
  Clone ID: MRT4577_151881C.1.pep
GSFVQTHLLFMWEHLVVWSQRILRPFMTNTPMRWLYRRDRLGVLSSRWHRFTCLTQALLPLKILQLLQLKKQRPMLTQEIEKFSTTH

SEQ ID NO: 241562 - protein, 90 aa, Zea mays
  Clone ID: MRT4577_151882C.1.pep
NDRMDPKSIFFVLSHFVSMIMVFVLVLQMTWDQKKKKKKKKKKKKNRQSVSATVCMYLSMYLRIVFVSHPWPYATIIYIQYYKKKKKKAA

SEQ ID NO: 241563 - protein, 83 aa, Zea mays
  unsure (1)..(83): unsure at all Xaa locations
  Clone ID: MRT4577_151883C.1.pep
QTPRAYVYTPYXISPAQSSIFKNPIIQPYRIQHAITTCISPLSPLLLQQPXALLQQLPFIHLVSPIIRAQQLPQLVLTNLAVY

SEQ ID NO: 241564 - protein, 138 aa, Zea mays
  unsure (1)..(138): unsure at all Xaa locations
  Clone ID: MRT4577_151884C.1.pep
NTGATHASHHEHLSTSKRIATANEXANQEHLHLHLLLLTLSAISXIQPAAXLQQHNLLASSTLAVGNATTYLHQHLLEHTTPALTELAGANPIAYSXQVLPLYQVTMMQXLTQLQQRSHLLKPQPLANQQADAILQQL

SEQ ID NO: 241565 - protein, 94 aa, Zea mays
  Clone ID: MRT4577_151885C.1.pep
TRFTTPNAAKAPKRARAAVPPTPTHGPTAHARTGVRPCRSYASSLRGASAGGGAGCPRSPRRRLRRPPLAAAASPACTDTARRRRTMCRSSTST

SEQ ID NO: 241566 - protein, 118 aa, Zea mays
  unsure (1)..(118): unsure at all Xaa locations
  Clone ID: MRT4577_151886C.1.pep
HFPKTQQKKDRRGTRQRQRAHRTHPEPEEDRPNQPNKQKDRAQEHNRDTRQRNRERNRKKNNKRRRQKQTRKGRTERRSERHQGHKRXKGRHRQERKPRERRRRAAAATRAQPPAATH

SEQ ID NO: 241567 - protein, 50 aa, Zea mays
  Clone ID: MRT4577_151887C.1.pep
TEGRAGLPTRYWISGRYFALGNWAFTGGMINASPLRTTTWSETELNTTSL

SEQ ID NO: 241568 - protein, 94 aa, Zea mays
  Clone ID: MRT4577_151888C.1.pep
INQIGTQNLEINEVTDSSYIKCCSLKFCSVMMLLHKESAGLQEPKHAAGAPFCITCSCIIHILNPKGLPHSIFFALRILTRGPLLLKKRKIQDN

SEQ ID NO: 241569 - protein, 38 aa, Zea mays
  Clone ID: MRT4577_151889C.1.pep
SCAGSDDTAWVLVPVKGNEVVVAGTLFDTTHQEPDTTK

SEQ ID NO: 241570 - protein, 127 aa, Zea mays
  Clone ID: MRT4577_15188C.1.pep
MPPDLPPHALFSPTCLDAGGKARQIEGSTPGDAVASAGSCASSSMLVLTSVWSNSTSSHFLVTPLGTEHRSVSKMLEDQNNNEKSDLTKLSNMDNIIHPATRYLSTSRQRSFAAWWRRRMLLAWGLL

SEQ ID NO: 241571 - protein, 384 aa, Zea mays
  Clone ID: MRT4577_151890C.1.pep
MEFMEPKDIDWSRVVSRYVRDETYEDIEAPHWADLTDPNAGRAAVDDEAWFCRPDCQHPKTADDFFKLSPSPKGKLLRSVSAMLPFAERDANATSLRDGSSNLKWRGGGAVAASTPPKPKAAPKKRFQEDSENHDPALATPPPRQAPSRPPFGAPRWNKNAKEAIKSSAEKRPDNAEKEALLNKHVPPRQLKSTLSARNLFSGKDILGQISEFYDELKRMVGGGVGRPVTDTQEEHSSDPVNPSYLMEKVAPDETVKEEARQETVKKSPSPMKGKKVGLKVEPGKQRSPSVLKEVRATPPTPQRFLSPSPNRIKNVKPGGITAGSPLKKAPKEKGTPSKDLESKKDAVRQPFGVKDMNNTRACDAEGSSSSMFWFLKPCTFLVE

SEQ ID NO: 241572 - protein, 496 aa, Zea mays
  unsure (1)..(496): unsure at all Xaa locations
  Clone ID: MRT4577_151891C.1.pep
ALGVFASTAVVLQVLQERGESTSRHGRATFSVLLFQDLAVVVLLILIPLISPNSSKGGVGFQAIAEAMGMAAVKAVAAITAIIAGGRLLLRPIYKQIAENQNAEIFSANTLLVIFGTSLLTARAGLSMALGAFLAGLLLAETEFSLQVESDIAPYRGLLLGLFFMTVGMSIDPKLLLSNFPMISMILGLLIIGKTLLVTFVGRVFGVSTIAAIRVGLLLAPGGEFAFVAFGEAVNCYEYIAHYXQGLLSPQLSSLLFLVVGISMALTPWLAAGGQFLASKFEQHDVRSLLPVESETDDLHDHIIILGFGRVGQIVAQLLSERLIPFVALDVRSDRVAVGRALDLPVYFGDAGSREVLHKVGAERACAAAITLDTPGANYRAVWALNKYFPNVKTFVRAHDVDHGVNLEKAGATAVVPETLEPSLQLAAAVLAQAKLPMSEIQESINEFRNRHLSELTELCATSGNSLGYGFSRVMSKSKSISSDDESETVDGALAI

SEQ ID NO: 241573 - protein, 62 aa, Zea mays
  Clone ID: MRT4577_151892C.1.pep
QGGSLVQRASAMGQEKVGILGPKMRLLRSLPYFRGLPFEPPHPFFLTLGPDWVGTGGARPRA

SEQ ID NO: 241574 - protein, 401 aa, Zea mays
  unsure (1)..(401): unsure at all Xaa locations
  Clone ID: MRT4577_151893C.1.pep
SXLLRXFYKQXAENQNAEIFSANTLLVIFGTSLLTARAGLSMALGAFLAGLLLAETEFSLQVESDIAPYRGLLLGLFFMTVGMSIDPKLLLSNFPMISMILGLLIIGKTLLVTFVGRVFGVSTIAAIRVGLLLAPGGEFAFVAFGEAVNQGLLSPQLSSLLFLVVGISMALTPWLAAGGQFLASKLEQHDVRSLLPVESETDDLHDHIIILGFGRVGQIVAQLLSERLIPFVALDVRSDRVAVGRALDLPVYFGDAGSREVLHKVGAERACAAAITLDTPGANYRAVWALNKYFPNVKTFVRAHDVDHGVNLEKAGATAVVPETLEPSLQLAAAVLAQAKLPMSEIQETINEFRNRHLSELTELCATSGSSLGYGCSRATSKSKSFTSDDENQTVDGTLAI

SEQ ID NO: 241575 - protein, 39 aa, Zea mays
  Clone ID: MRT4577_151894C.1.pep
MALPPNFNMPTLHHLIPLSITSAPLGTHAYNNYTVSYYN

SEQ ID NO: 241576 - protein, 80 aa, Zea mays
  unsure (1)..(80): unsure at all Xaa locations
  Clone ID: MRT4577_151895C.1.pep
SHTGLGRASRRTGLRERPSLHLXGHGGVQDRYACWELYCLEHGIHADGQMPGDKTIGGGDDAFNTFFSETGAEKHAPRAG

SEQ ID NO: 241577 - protein, 128 aa, Zea mays
  Clone ID: MRT4577_151896C.1.pep
GGKKRELDLTTCPWKKYKNRGGAQTNFKNYPLAKGWEKKKTIFETQGGGKKRGKWQKGPPSKGGREKPFYPSKLLKGGPRLKRNPRGLFQGRKNLGDQDLGPPPDKGTRRGLGPSGGGPLELTKVRSC

SEQ ID NO: 241578 - protein, 41 aa, Zea mays
  Clone ID: MRT4577_151897C.1.pep
MIVLASVCVLLPRDLIISCFDLFSLVPFYYTSRYIVHYLSR

SEQ ID NO: 241579 - protein, 153 aa, Zea mays
  Clone ID: MRT4577_151898C.1.pep
TKQPAKQRESEPSGASQAGGNHAAVNPTGTAAALAACKRCAARRCDAAWRNDSADCLLARGQQHREQLQPSGAQERSGGTARSRRVPMPRSLLPWLVAAPHSGRRRGQLAARTTQVTGPELVLKTCVNGSMRSRGTRTGPGLGIESSARSLNT

SEQ ID NO: 241580 - protein, 81 aa, Zea mays
  Clone ID: MRT4577_151899C.1.pep
MQQQQPSVRAVTIPFADLKDRGKDLGGFIEEGFGPQGLGIVSIAGVPGYPELRKRLLRLAPRIVSLPDDVKKQLEDPDSRS

SEQ ID NO: 241581 - protein, 100 aa, Zea mays
  Clone ID: MRT4577_15189C.1.pep
PCQCHAQRVRRSDCSAGCWPGARNVPAALTPTEVETCGSLKSRCVSSVCSVHNSRWIMDPHPPMRFFQSDDPPRPHSLRWEFISGCSVVSADFAGRVVSN

SEQ ID NO: 241582 - protein, 74 aa, Zea mays
  Clone ID: MRT4577_1518C.1.pep
KHLTLFSSLGDNYSCSMCSTQLYVCVCDLRLLCLPCVASFRSTRTWPQCVVLSPSPLTRDSITSPVVPLVWGRK

SEQ ID NO: 241583 - protein, 321 aa, Zea mays
  unsure (1)..(321): unsure at all Xaa locations
  Clone ID: MRT4577_151900C.1.pep
LGTSRPAGFSGRELKRATGNFSRDXLLGAGGYGEVYRGVLGDGTVVAVKCAKLGNTKSTDQVLNEVRVLSQVNHRSLVRLLGCCVDLDQPLMVYEFVPNGTLADHLHGATSLSRPPTLGWRQRLAIARQTAEGVAYLHSAAVPPIYHRDIKSSNILLDARLDAKVSDFGLSRLAEPGLSHVSTCAQGTLGYLDPEYYRNYQLTDKSDVYSFGVVLLELLTSKRAIDFARGADDVNLAVHVQRAADEERLMDVVDPAIKDGATQLQLDTMKALGFLALGCLEERRQNRPSMKEVAEEIEYIINIEAAGHPIEQQRTCLDSSE

SEQ ID NO: 241584 - protein, 230 aa, Zea mays
  unsure (1)..(230): unsure at all Xaa locations
  Clone ID: MRT4577_151901C.1.pep
MGAAAADLEARQLRILGRISDLELAAQQHXSGRSPSPPRPXKGEADAGATEVHLAALLAARGVRDFAFRRVPADYYDRSLEERRGLLRADSVAQLCKSIVMVNTQAAVDVVDCSNPKNSKYYVVVVQYMARLNAENIKNFLYELNEKQIPKKRFNMRLAPEEESHKLTGFVHNAVTCIGMETNIPVIIDEAITKLDEDFFWLGGGEVDLKLGMRTSQFLSVFSPFVVKCS

SEQ ID NO: 241585 - protein, 68 aa, Zea mays
  Clone ID: MRT4577_151902C.1.pep
MRRSIISSGGGRANMHRVSLLLVANVCALAAPVAEDFTDGLFPNGNSKVGPPKSALINGPVVSAPNPF

SEQ ID NO: 241586 - protein, 116 aa, Zea mays
  Clone ID: MRT4577_151903C.1.pep
KPKNFFLNLGAPPRFYKIVKSFSFPSKSFCFQKGGLGFFLKIINPKKTRLQRLFFFLIKPFEISPGFSGRFLGGFPFSFLGVFLKAGVKMGNSCFLGEIVIPVQIPQKYSGREIIR

SEQ ID NO: 241587 - protein, 37 aa, Zea mays
  Clone ID: MRT4577_151904C.1.pep
SIVRVSFDMHGSTDQRGVDETMRAWTPLFLSSRCRDS

SEQ ID NO: 241588 - protein, 41 aa, Zea mays
  Clone ID: MRT4577_151905C.1.pep
YVVVSLCHYVIVCKSVFGIASYICLDIHLVGDIGFLTSLVA

SEQ ID NO: 241589 - protein, 111 aa, Zea mays
  Clone ID: MRT4577_151906C.1.pep
GNQTQGKRAPKKKGSRPHRGVLFHTLFRGGNDKKTPKPNKKGTTLKTRSLALGKRSPPLPLGGKRGGNLPKLCPTAKGGKKKGGRPPWGKDPTPPPGSKRTMQGKNFPLGG

SEQ ID NO: 241590 - protein, 392 aa, Zea mays
  unsure (1)..(392): unsure at all Xaa locations
  Clone ID: MRT4577_151907C.1.pep
GKLTKXQVAPADGLLDVQRDGESKXNNIKNWLRGIRDSGYNVLGLAATLGEAFFRCIEGSSVTLAIMENVQVMEFRHLRQLIHLVIIPFVKYCPADLWLWLVNLLQPLFVHCQQALNYSWSSLLHEGRAKVPDSIGNLSGSELKVEVMEEKLLRDLTREVCSVLWALSSPGLNNGLPSLEQLGPSNRMDSVLKNLESFASSSLTGFLMLHIGTALPALRISVEVFTWTDSDAVTKVIPFCGALIHLAVASNQAELRQFVAKDLFSSIIHGLSVESNSVISAELVGLCREIYVYLSDRDPAPRQVLLSLPHIKQEDLLAFNDSLSKTASPKEQKQHMRSLLLLATGNKLRALAAQKTTNVITNVTTRNRSSTAHHGSSAEEDGHIGLATLSSI

SEQ ID NO: 241591 - protein, 77 aa, Zea mays
  unsure (1)..(77): unsure at all Xaa locations
  Clone ID: MRT4577_151908C.1.pep
XXHXRIFHHEXKQPNAPMNXTPKPANDALPLIRGKACVHAPGQGSPGSRAISISPGAPHEASTQSARAXPXPHPQXT

SEQ ID NO: 241592 - protein, 68 aa, Zea mays
  unsure (1)..(68): unsure at all Xaa locations
  Clone ID: MRT4577_151909C.1.pep
IREIGGWLCGYFEVCDSVIVSFIXGXMRFEXLSLYFFFGXMEXEFWGGVICWLWLKSXNLGVCVLXXS

SEQ ID NO: 241593 - protein, 154 aa, Zea mays
  Clone ID: MRT4577_15190C.1.pep
LGTFGLIYVLGVLLLLLAWVALVVVDACAVGWVVVVVVVDALVVAWIVGACAVAWLVVVVIGDAFVVACVVVVLVIMEDWCTACGRTSRRARCNSPSSFYGCASSTARLIISLRNDAPSSVRARAFTSEESRLIIVPSSRRQFGVARTPVLGMK

SEQ ID NO: 241594 - protein, 69 aa, Zea mays
  Clone ID: MRT4577_151910C.1.pep
SGLCVPPALCHMSDSPCGRSSGISIKWCSCSSGGASLSCSAYGSMSRFRCGTVISSVQFVDSCSTCDAL

SEQ ID NO: 241595 - protein, 133 aa, Zea mays
  Clone ID: MRT4577_151911C.1.pep
KWTPSWGPPGPGSSFRALLTLKQAGGVFIFYGKQPPKLKGFPGGEPKTPGLPKGEKNLGRGEPFRGPTALFFSKGGGPPQKGGPFLGGGGWPPISEKGPGIGPPPKICLGPKFWGSPLWKREKTPGGAPGASP

SEQ ID NO: 241596 - protein, 69 aa, Zea mays
  Clone ID: MRT4577_151912C.1.pep
HASAPSSWAVVEWAIDQPVSDGGQSLRVFSVGIMYWENGLSLLCRVFLVLIFAVELYIVPEVSRFLAFN

SEQ ID NO: 241597 - protein, 80 aa, Zea mays
  Clone ID: MRT4577_151913C.1.pep
FIFFFFLFFFFFFFFFFFFFFSAVHKMLVHDYDTYITIHQRRVNGTQTRNSSSRFQNRERRCQDADGSHVRRDTPVQLLL

SEQ ID NO: 241598 - protein, 58 aa, Zea mays
  Clone ID: MRT4577_151914C.1.pep
YYWNEIVPTFPERNERSRNEERGQVPGSRLLRSRSSQQPQQLFRIFDQCCKSEWSWRS

SEQ ID NO: 241599 - protein, 139 aa, Zea mays
  unsure (1)..(139): unsure at all Xaa locations
  Clone ID: MRT4577_151915C.1.pep
PEERGKTQQETDRGSPTSERAKATLSDAPHEGADAXARPGKARGTAPPKETDEKERSGAAHATRTKQRGDGNNGAPTTLPDASTRAVTKTPERALVDERMSTDGTGLSLGFNNSMLRGMLSGVIEHVCPFYAEYTLHDR

SEQ ID NO: 241600 - protein, 76 aa, Zea mays
  Clone ID: MRT4577_151916C.1.pep
IYASSASSSTWYYVLTACPYSNACISPYCYYEIRSLLLAVCIEALRGHVLVRSVLCILSGLIVTSSVSKRKKRKNK

SEQ ID NO: 241601 - protein, 62 aa, Zea mays
  unsure (1)..(62): unsure at all Xaa locations
  Clone ID: MRT4577_151917C.1.pep
FKETWDFQTSKRAKKTRSIKGRMAPLTVKPIHPLIKVIIGDXRVPVKALKIGEPLXGKPPRF

SEQ ID NO: 241602 - protein, 110 aa, Zea mays
  Clone ID: MRT4577_151918C.1.pep
WERTRLTGSCFCYITLGNKTGKKGRGAPPTTGEREPPPPRGHKKRGRKTKKKNNTPPPGGPKKEQTRFSIYYPPAEATKKRVTGGPPQTREAPLPGHEDRTPPLTPGTHG

SEQ ID NO: 241603 - protein, 49 aa, Zea mays
  Clone ID: MRT4577_151919C.1.pep
HLNAPAPDLTQTRGRNQNRRYAHSSTVKKRGPRDTPSARSLVQAPTVHQ

SEQ ID NO: 241604 - protein, 45 aa, Zea mays
  Clone ID: MRT4577_15191C.1.pep
YALAAAKRRGMIGYLIRIDDLPVAANMPATSKLTGRLGSTRVCRY

SEQ ID NO: 241605 - protein, 130 aa, Zea mays
  Clone ID: MRT4577_151920C.1.pep
APNRDDAYTQRRKSYERNPHDIEPAMFLATSYDKTSEAWTKQSPSKSVLKRVAAYAKSSAELLTNLMLHGPSGEYTWECLFRTPMSNYDAVILLHQEKLCCPHHVLFPAENPDGKLVVWGKPSKDFLPYM

SEQ ID NO: 241606 - protein, 49 aa, Zea mays
  Clone ID: MRT4577_151921C.1.pep
YRILSLSSLTALLRLAGNHGCSGDMPPNGTLSHPYGTDGHAIARRNLPS

SEQ ID NO: 241607 - protein, 62 aa, Zea mays
  Clone ID: MRT4577_151922C.1.pep
GGVKVASNYSLERADTGYKSLKHRLIQNFFLQCYNTGRPSLFSGITISCSWPRTVLLQPQSQ

SEQ ID NO: 241608 - protein, 95 aa, Zea mays
  unsure (1)..(95): unsure at all Xaa locations
  Clone ID: MRT4577_151923C.1.pep
MHPAAIMASVPAPATTTAALIIXLCVLLSCAAAXYLKLPDYVIQGLVYCDTCRAGFVTNVTDXIAGASVMLECMHFGTGKLERAIDGVTDATGTY

SEQ ID NO: 241609 - protein, 284 aa, Zea mays
  Clone ID: MRT4577_151924C.1.pep
MARRQQWNRGGLAAVAVLAVLCVLCSGHPVPGGHGSGGFVTLQPHFYDHACPQMQAIVGSVVAKAHAEDPRMAASLLRMHFHDCFVQGCDASVLLDADGSGRFVTEKRSNPNKDSLRGFEVIDEIKAALEHACPRTVSCADIVAVAARDSVVLTGGPGWEVPLGRRDSLTASLSGSNNLIPAPNDSLPTIIGKFANQGLDIVDLVALSGGHTIGDSRCVSFRQRLYGPTRGSSSTTSPSPWSRWATSRHSPGAPARSGTTAGGSTTSNSKEGCIYTAIRVVHIL

SEQ ID NO: 241610 - protein, 340 aa, Zea mays
  Clone ID: MRT4577_151925C.1.pep
MARQQWSSGGLAVAVLAVLSSVLICSGHPVPGGLPLLPHFYGHACPQMEAIVGSLVAKAHAEDPRMAASLLRMHFHDCFVQGCDASVLLDADGSGRFVTEKRSNPNKDSLRGFEVIDEIKAALEHACPHTVSCADIVAVAARDSVVLTGGPGWEVPLGRRDSLTASLSGSNNLIPAPNDSLPTIIGKFANQGLDIVDLVALSGGHTIGDSRCVSFRQRLYGQNNNGQVDRTLNPAYAAELRGRCPRSGGDQNLFALDPASQFRLDNQYYHNILAMDGLLSSDEILLTQSRQTMGLVHRYAADQGLFFDHFAKSMVKMGNISPLTGSAGEIRHNCRRVNHF

SEQ ID NO: 241611 - protein, 650 aa, Zea mays
  unsure (1)..(650): unsure at all Xaa locations
  Clone ID: MRT4577_151926C.1.pep
MDKTVSLPCSNGDGGVPEETGMEKVLSDLRALKKLYGLLQRFCSSSLQRFSHSFPCSIFEMELPEEAETTEEISSDLQALTRLYMLLHKGVAADEDLDEASRALLMKVLGDATQDAVRRQAKTATPSQYYLLVKCQRQPKLRFVFLQMLSGSLVSPALERELSMRSDCRTGHADPRLRPVASPSPRPSLLASERSRQLNLQHSTVSSRSGLHADGLHHAAEEPEEPTLALARLPFNRSSRTTLPAARHRPSQEQRHSNLSLHWFSVAGTSRHGTVTGSTPFANRRDSIYRSSGRGDQWALESSSRRRSVSRELSLGQSSRLHGRATIPRHVGADSSSSVPLFERLDSGLSVSMASLHGVERAGRGVATPERSSSSNTVATIRSRIRTSSTPFTERSLRRSAVQGRTPRSRGRQQGSDDVSSEDMYRSMYSGSRSSSCAASRSPTPPAPAPAPRAFANPYYYSPPVVTRGVAPPVYAPEQVSRSTRRRRRQEVLDKRVARLRMLKDKIGAVFHHRHDHHHHHHLGGGQEEGPSSRSRSVVRGAGHNSPWQFLTSMFHRAMEGKDKSTRIRTAVGVPAEKRRGGGGNMRALFDAVRRHLKGKRRAXGRHKAEEEXSLSRVRAKKMHWWQRLRRRRGMAGLTAGSRPRRRLGH

SEQ ID NO: 241612 - protein, 202 aa, Zea mays
  Clone ID: MRT4577_151927C.1.pep
PSPPLAGLVRDLRMAQFHLLDPHYDEHHRGRLTAEGEVLPVLRVRTHDRFLEEMRYDERYTPLLQRAGLDVVSYQRVSRRLRRAAARCGCRSLAGVDVQLPVPRMQQDVQPPICAVGPSTAGLSSSRSTRDTFEDVAHEDEDKDDDTGAGAAGQEEIGPSQLQDAPTTQPSQLTPRRRRPRDPYTPGTDALGAKGKGKTRRK

SEQ ID NO: 241613 - protein, 164 aa, Zea mays
  Clone ID: MRT4577_151928C.1.pep
TSERCSSDLTFSTYTGLVRVLRMAQFHLLDPHYDEHHRGRLTAEGEVLPVLRVRTHDRFLEEMRYDERYTPLLQRAGLDVLSYQVRRGLPTFNPAALTALVDRFDRQRQKKVTDFETHHRDYIDEWEQQGDLNYENDQAHTNYNFRRGYHVVFVEQRLGVDAVL

SEQ ID NO: 241614 - protein, 98 aa, Zea mays
  Clone ID: MRT4577_151929C.1.pep
IGNPCKQFFDYEDPPGFVVLPKSKKLVRGLKPRQPVVAPTGVACRVVLSHSAASLQSGFEVLYLLGRCFTQFLHQCECIPLCSKGQCPRGCFYEKMYS

SEQ ID NO: 241615 - protein, 133 aa, Zea mays
  unsure (1)..(133): unsure at all Xaa locations
  Clone ID: MRT4577_15192C.1.pep
HTKCAEAAVVGIAHEVKGQGTYSLATMVDGVTYTDDXRTSPVTTARTQIGSSAALDTIHWTPALTKTLMXKTMPILSRKISSRQLNYLGYTSTLCDPGAVDQMIALTDRYCIGSRSGGSYMITVMTILIQKLA

SEQ ID NO: 241616 - protein, 97 aa, Zea mays
  Clone ID: MRT4577_151930C.1.pep
SKINCASRSDRRETRATGKSCTLMMFELDVSNDLFISTNDMTYMVKYHSTARTTNSTETSFSENHTMFSLSEDSSTAFGIKYPVYIPWDVCVDDYDE

SEQ ID NO: 241617 - protein, 85 aa, Zea mays
  unsure (1)..(85): unsure at all Xaa locations
  Clone ID: MRT4577_151931C.1.pep
MGLVVSKLLDRLWGKKEMRILMVGLDAAGKTTILYKLKLGEIVTTIPTIGFNVETVEYKNIQFTVWDVGGXDKIRPLWRHYSRNT

SEQ ID NO: 241618 - protein, 70 aa, Zea mays
  Clone ID: MRT4577_151932C.1.pep
FKPLGPKPGGTPVFPPMRYGHIIWAKNVKRLTGLGSRPILLFPRNQDQWTTGTICPHPRFLLFKPPALLV

SEQ ID NO: 241619 - protein, 493 aa, Zea mays
  unsure (1)..(493): unsure at all Xaa locations
  Clone ID: MRT4577_151933C.1.pep
MMAAAAWLCGLLSLLALAGAASAADGAEGEWEPLIRMPTAKGSDAASAPAAEDDEVGTRWAVLVAGSFGYGNYRHQADVCHAYQILQKGGVKKENIVVFMYDDIAHNILNPRPGVIXTILKEQMFMMVFQRITQVIRSLXENFFAVLLGNRSATTGGSKKVIDSKPNDHIFIYYSDHGGPGVLGMPNLPYLYAGDFIKVLKKKHASNSYSKMVIYVEACESGSIFEGLMPEDLNIYVTTASNPVENSWGTYCPGMEPSPPPEYITCLGDLYSVSWMEDSETHNLKKETIKDQYEVVKTRTSNSNKYKEGSHVMEYGDKTFKDEKLSFYQGFDPANANIANMLLWPGPKGAVNQRDADLLFMWKRYEQLNGGTEEKLRALIEIKETVQHRKHLDSSIDFVGRLVFGFEKGPSMLEAVRTSGQPLVDDWDCLKRMVRIFESQCGSLTQYGMKYMRAFANICNSGISEMKMRESSISACSSYNSARWSPMARGHSA

SEQ ID NO: 241620 - protein, 63 aa, Zea mays
  Clone ID: MRT4577_151934C.1.pep
TRRGAARVPPQVLPHSSEFGVCQGQIAISHLFFCSRCVGLNLNQSSSIFIYKCGKKIVFSVFS

SEQ ID NO: 241621 - protein, 190 aa, Zea mays
  unsure (1)..(190): unsure at all Xaa locations
  Clone ID: MRT4577_151935C.1.pep
IGYLEAGRDPRSLQPATAHVAWRQRASPQSPPEPPGSTSRTPDSGSPAASRTPGLPPGPPCHSSHAPQAPTAPRRXREPNDTNLYAGNNSAVHXPYAEXIVKAISGLEESNGSSSXGISNHXKGKHAGKLPTNFRRPLTVQLIRLAGASKLTTVKNSCSVPSTNSTSNAAXSRASTAATKTWRSPKAKAK

SEQ ID NO: 241622 - protein, 527 aa, Zea mays
  Clone ID: MRT4577_151936C.1.pep
TADLRGVAVSGHGGRRSEHRWGSVRRWAAVYKNQLQELAQRSCFNLPSYTCLREGPDHAPRFKAAVNFNGEQFESPGFFSTLRQAEHAAAEVALAALARRGPSYSLAARILDETGVYKNLLQEVAQRVGAPLPLYTTERSGVGHLPVFTCTVELAGITFTVVREEVNSSNETENIDEQEQIRIARALLNYRLKEKMAMANCPHVSPFPKKFPMQQERKPCFGQSSQSSHSKILPLFRPKPNSRPKSPASTDGVSKTPGRTPVDSLDQSARSRFPAAEAAPYVPVGHYRRIPCHNMAPSVTIRTAVPVFSAPPLPPPPARLQQLPPLMSHPPPIRMASPVRMRPAPASPMFASSSPVQVPKPVMPVQLKDVQDHSRKEAVPPVIPVQVKDAQCRPRKSSMSPVIPVPVKDAQRRPAAIPVQMKDVQTQAPKEPLAAPIPAARPSVKTDTPAQVKEASAGATSEAPSSATGNDAAVECSASSESGLARQSGAADGDTLVLMRKLSMRPEAQAAAEAEAEAATTMRLETN

SEQ ID NO: 241623 - protein, 119 aa, Zea mays
  Clone ID: MRT4577_151937C.1.pep
FWAFAPRIYGFSWMFFFISPSSGRLVPVAFFFLGLRQMMALFSPSFFLALVPCSPLVLFFFACSPLSLAPCSAPPLLCSVPPFLFFFGLLNLIEPFFPLLLPGPPSFLFFPRVPVPRYV

SEQ ID NO: 241624 - protein, 182 aa, Zea mays
  unsure (1)..(182): unsure at all Xaa locations
  Clone ID: MRT4577_151938C.1.pep
MNLNIANPSTERPKKVDIHDAKKLRAFYDRRISQEVSGDALGAVCTGYXFNIIGGXDKQRFPMIQGXVYTSGRVPLLLNRGTXCLPVTIGRRNGHGTRKSVRGCIWSQDLSVINLEIANKGENDLPGLTDTENPMMRGPKRASKIRKLFNLNKDDDGRKYVNTXYRRTFTTKSGKKVRKAPK

SEQ ID NO: 241625 - protein, 49 aa, Zea mays
  Clone ID: MRT4577_151939C.1.pep
SRIVLCISSRSRAPDIRIVCHLSNLVLSTVEYIHSSAALESAPSTTPPS

SEQ ID NO: 241626 - protein, 108 aa, Zea mays
  Clone ID: MRT4577_15193C.1.pep
MWVSPLIGAPRFYTLSSGFLFWVELERRKNFPREKIFPKKTPNWVPTPKPKKTAPNFLESPLLKGRPGGKKKKKKKKKKKKKKKKKKKKKKKKKNKKKKKKKKKKSLY

SEQ ID NO: 241627 - protein, 73 aa, Zea mays
  unsure (1)..(73): unsure at all Xaa locations
  Clone ID: MRT4577_151940C.1.pep
GGVAFGGTHRFVDRYFVGHHLLIIPMMWGSFFLLXLYWLXGETRGLCICFSVASYIKVYKIMYSIYTKNRSRL

SEQ ID NO: 241628 - protein, 91 aa, Zea mays
  unsure (1)..(91): unsure at all Xaa locations
  Clone ID: MRT4577_151941C.1.pep
ARKTFLFTSLVLEXGHPDXLCDQVSGAGLYGCLAPDPDRKVDWETCTKTNLVMRFGEITTQATVDYKKIVXDTCAEIGFTSDDMGLDTRPY

SEQ ID NO: 241629 - protein, 40 aa, Zea mays
  Clone ID: MRT4577_151942C.1.pep
RSGAFKIQRSFAKVCCLTYSLIWIYRVWDSFLTYAPCMDE

SEQ ID NO: 241630 - protein, 60 aa, Zea mays
  Clone ID: MRT4577_151943C.1.pep
TSRTTYLPTIWIWTIDCRSYESRTLSTDLIWHIITTSHSPLLSIDYRLNSLYKHHRSVIG

SEQ ID NO: 241631 - protein, 87 aa, Zea mays
  unsure (1)..(87): unsure at all Xaa locations
  Clone ID: MRT4577_151944C.1.pep
VTASRVAQRSPRVXKKKKKKKKKKKKKKKKKKKKKKKKKKKKKKKKKKKKKKKKKKKKGGLFFFLNPPFSPTFAPTFSRSTPGNSFP

SEQ ID NO: 241632 - protein, 47 aa, Zea mays
  Clone ID: MRT4577_151945C.1.pep
GCMESRECAHGIYYGDDDYDVTTSTVSDSSTILMYFDNPNQLVSTRT

SEQ ID NO: 241633 - protein, 44 aa, Zea mays
  Clone ID: MRT4577_151946C.1.pep
FFHPLIPSKPVPFTVVPLNSTQAQFESSLSHHATSAIDTRHLGT

SEQ ID NO: 241634 - protein, 65 aa, Zea mays
  Clone ID: MRT4577_151947C.1.pep
VSRPHRRRRRAAVPGRRLAFPLSASPISNRLSALCACEQYPHRRPAAPKEQGSPALPMRCAGTDP

SEQ ID NO: 241635 - protein, 88 aa, Zea mays
  Clone ID: MRT4577_151948C.1.pep
DRARPKANQGGQTPGKQRGEGLNGRKPADERGKRGKPSKGGKERGSPNRDADTPGQRRAKRRKIGPPPPPRRMLEKNQVRGKSEKITL

SEQ ID NO: 241636 - protein, 155 aa, Zea mays
  Clone ID: MRT4577_151949C.1.pep
MSVDLAHKIVSTLRRSERCKNTRVIYNDDSEEDSETEIIYSEEVASPSPSEINVASVDDNSGEQDSRSVSRKDRRTRSKVKNKKAPKTISQGSGTKDQSQCGGLGVERSNEEVDLDEPLIALKQKKEKIPPSKAKRKTGASSSPHATKLDTSTKR

SEQ ID NO: 241637 - protein, 67 aa, Zea mays
  Clone ID: MRT4577_15194C.1.pep
VRPTSVHAGPLRERRPMGRALPPVAEREDDLREEPSSAPAALLLPRRDVDVAPRVVPGRAAVAGSSA

SEQ ID NO: 241638 - protein, 97 aa, Zea mays
  Clone ID: MRT4577_151950C.1.pep
QTAAAPANEGVVKMQTRVFNQHITLLNAVTHDKKKSYTWMAVQPTQQQRSSPRGNKKVAENSPDGHHAQMKPGPKHLPSEAQQRKRAARPPKGKHSR

SEQ ID NO: 241639 - protein, 61 aa, Zea mays
  Clone ID: MRT4577_151951C.1.pep
QHTDTTTELAIITKRAYAKKKGSSQPPYLLIHPLKQNNSGSESKYDYHIDHNFAQTATILA

SEQ ID NO: 241640 - protein, 294 aa, Zea mays
  unsure (1)..(294): unsure at all Xaa locations
  Clone ID: MRT4577_151952C.1.pep
PRVRPRVRFVKGLELLILLVVYLVYGSSYRSSNIYLFVTCSIWFLVASWLFAPFIFNPSCFEWQKTVEDWTDWRKWMDNRGGIGMSVEQSWEAWWVTEQDHLRKTSIRAFVLEIILSLRFLIYQYGIVYHLNIADHHKSIMVYGVSWVVMLLVLVVLKMVSIGRQKFGTDLQLMFRILKGLLFLGFVSVMAVLFVVLHLTISDVFASILGYLPTXVSSSDWTSMLTIDXEDPAVGLHHGARKVIREYNGSRPLPANWFPVVVPLRLXIPDTATVXPGIXPGPPDLKDPCWSEGC

SEQ ID NO: 241641 - protein, 93 aa, Zea mays
  Clone ID: MRT4577_151953C.1.pep
LEGQEPIRYPFKTLMAYPIPILPTASTIYSSQRTQEMLFSSPTTSNQAILKFSYTLNLNKLSRTAIGAAYQAVFVALQAAAGSPLFLHEHLAG

SEQ ID NO: 241642 - protein, 131 aa, Zea mays
  unsure (1)..(131): unsure at all Xaa locations
  Clone ID: MRT4577_151954C.1.pep
PPPAQTPPRPAQKKITAATTXKXPXTPAPDSPPPPTEKKPTPPTPDNTPPPPEKRPTTQAPKDTTPTPKKTPTXQPHPTTTPTPPEKTPPPPAPVTPPTPPEKKPPTPEPGSKTPPPKTARTPPPKAKTPT

SEQ ID NO: 241643 - protein, 193 aa, Zea mays
  Clone ID: MRT4577_151955C.1.pep
MKYSTVLLFAIGASAQSITSTSGSSAPMPTGLSSAVQCAMACNAGDVNCQAACLGNARPNASQVIETNECAAKCDQGDGSPAATEAYSKCVDTCITNHFPSSQTAFVDSPAGAGAAAPSAAPSSGAAAGTGANSAKPTATGEPQSPSGSGSPSGSHSGSAGAPSSTAAAGAADKTSVQFFGAGLAGLLAVFAL

SEQ ID NO: 241644 - protein, 74 aa, Zea mays
  Clone ID: MRT4577_151956C.1.pep
DIAASHTHILQFAARVVGSDNAVVVLDHNVDHLLVSDLVQQLLVLGGSLLVHHQAYACRSPEVFPPPRGRILIR

SEQ ID NO: 241645 - protein, 77 aa, Zea mays
  unsure (1)..(77): unsure at all Xaa locations
  Clone ID: MRT4577_151957C.1.pep
FGIVLAIERIPFSALLYIQITWMNHVPQSVWFFCFFMLQIFELLVGGGSGYWVVTKSYLSFNIAPIIGDVQSPYRXS

SEQ ID NO: 241646 - protein, 80 aa, Zea mays
  Clone ID: MRT4577_151958C.1.pep
LFSPFSYTMKIQLSPPNTFYLPCASYHLEITYEVPHENLISQSQIFLNQMVLHNWKDLLATFETSHDLLPHAEHLQILNI

SEQ ID NO: 241647 - protein, 109 aa, Zea mays
  Clone ID: MRT4577_151959C.1.pep
MLYNYCGGGFFFFWAFRPRKKTPFFLFPPIKTPWVSSAAHTLLVSFNFLDIIHLYTHQACSVIGKLRSQYYKPSRRLLARDPITRTKTLLVKKIKVCFSSAGGPWGTPP

SEQ ID NO: 241648 - protein, 73 aa, Zea mays
  Clone ID: MRT4577_15195C.1.pep
PTRPGKIGCSSEWNPKMRGTSLIGPNTLILSDGNADEEFLLLDVTLCLFVIFTSWVLCLIVTFHDRMELKFMV

SEQ ID NO: 241649 - protein, 237 aa, Zea mays
  unsure (1)..(237): unsure at all Xaa locations
  Clone ID: MRT4577_151960C.1.pep
MGDSSGSVSIDVERIYFGGKEHPVRTRYGPVSVSVYGDEDKPALITYPDVALNYMSCFQGLFFCPEAASLLLHSFCIYHITPQGHELGAAPIPSDVPELSVDNLADQVADVLDFFGLGSVMCMGVTAGAYVLTLFAAKYRERVLGLMLVSPLCKAPSWSEWLYNKVLLNLLYYCGTSGLVNECFLQRYFSTEXVRGSGQEPESEIVQPCRXLLDQRQGVNVCRFPXAINERHXDLTE

SEQ ID NO: 241650 - protein, 70 aa, Zea mays
  Clone ID: MRT4577_151961C.1.pep
LDNTKITLCISKKKKKKTKKKKKKKKKKKKKKKKKKKKKKKKKKKKKKKKKKKGGAFLGDQSLVPGVGKL

SEQ ID NO: 241651 - protein, 74 aa, Zea mays
  Clone ID: MRT4577_151962C.1.pep
RMMCSCFYRFILQSVYLQGWIVFLTISFLYPYTGTTTNLVLSPVPTRSMLLLSSTMYNTSSPLAAIRCSTIHDP

SEQ ID NO: 241652 - protein, 109 aa, Zea mays
  Clone ID: MRT4577_151963C.1.pep
AQAARLPELIEESPGSEHIDQAIKDAMVSFKHEKSDPVVAYVSKMVSIPESELPENKRRAGTQMSGEEARELARKKRAEAARAQAAAGENGIDSMADSMDAINLDDYAP

SEQ ID NO: 241653 - protein, 276 aa, Zea mays
  unsure (1)..(276): unsure at all Xaa locations
  Clone ID: MRT4577_151964C.1.pep
ASACRALRAAVTAVTARRAGDAARGLEPLPIPFRNYVDSKPYAYFLYTPFSLXPAGSXPPPPXRQPWGAAWTRPPRPTWPRPNLDGLPSAVYGCACAAAECGGTQCACXRCGGRCSGLGLGGRDXSLTECGDVCACAPSCGNRRTQRGVAVRLCVVRHLHKGWGLHAAEALSCGQFVCEYAGEFLTTEEARRRHKVYDELASGGKLCPALIVIREHLPSGKACLRVNIDATRVGNVARFINHSCDGGNLHPVLVRSSGLLLPRLCFFAARDIVEGE

SEQ ID NO: 241654 - protein, 132 aa, Zea mays
  Clone ID: MRT4577_151965C.1.pep
APPGEFLTTEEARRRHKVYDELASGGKLCPALIVIREHLPSGKACLRVNIDATRVGNVARFINHSCDGGNLHPVLVRSSGLLLPRLCFFAARDIVEGEELTFSYGDARVRPKGLPCFCGSSGCSGVLPSEET

SEQ ID NO: 241655 - protein, 144 aa, Zea mays
  unsure (1)..(144): unsure at all Xaa locations
  Clone ID: MRT4577_151966C.1.pep
RTYSHCCFLLWSSLYLNCREFLTTEEARRQHKLYDELASGGKLCPAQIVIREHIPSSKACLRVNIDATIVGNVARFIIQLPSCDGGNLHPMLVRSSDSLLPRLCFFAAKDIVEGEELTFXVAAKGLPCFCGSSGCSGVLPSEET

SEQ ID NO: 241656 - protein, 74 aa, Zea mays
  Clone ID: MRT4577_151967C.1.pep
TPKRGNPGSWPWLLKGPGIFSDRGKFLHSPFQGSLYQVVVLKAARVALSAFVVFHRGCSLFFPQKMRSNKTQKK

SEQ ID NO: 241657 - protein, 103 aa, Zea mays
  unsure (1)..(103): unsure at all Xaa locations
  Clone ID: MRT4577_151968C.1.pep
PFSQQCWSAISALHIPGHLPPVMPLXTMNIFGGGSMXQQVIASLMACPSLMLQELLALPLQTMPVMMPQMMTPNMMSPXMMPSMMLTMVLPSMMSQMMMPQWP

SEQ ID NO: 241658 - protein, 109 aa, Zea mays
  Clone ID: MRT4577_15196C.1.pep
MSGLAGAFRGPLPWVGGGFRFWGRTAFSGRVCYGPFSIWGGSWFPPPFRGVRFPPPPRGLKDRGCPSTPVGVLVFLDWFAPGGCFRWRGLGSGLRVDAEYKKKNTTPPP

SEQ ID NO: 241659 - protein, 200 aa, Zea mays
  unsure (1)..(200): unsure at all Xaa locations
  Clone ID: MRT4577_151970C.1.pep
MRPLPASVASRLAAVLADPVGVPLPVFNSLLSAPAXRGPFPRAXLPLYLFRRRLLPLRRPDAFTLSVLTSALPSAAATLHALALRLGLLHADPVLANSLLRLYIXHRSPVRXARRLFEEMPARTASSYNTLISHSHDDVWGLVRRMVADGCAPDRFTMSAVLPVCTSARWGRELHCYAVRDWMCRDDDFHVSSGLVSNDC

SEQ ID NO: 241660 - protein, 96 aa, Zea mays
  unsure (1)..(96): unsure at all Xaa locations
  Clone ID: MRT4577_151971C.1.pep
GSRIFNGPFVKLNKASINMLKLVEPYIRWGYPXLQSLNELIYKRGSGTINKKRIALTDNALIARSLGKYGIICMEDLIPEIYTVGKRIQEANNLLW

SEQ ID NO: 241661 - protein, 60 aa, Zea mays
  Clone ID: MRT4577_151972C.1.pep
EIPKCIIKTHHQNVAKLGQKYACLSSMLKNSGPKKAPKLIYYTYWVNNNLKQAHFTQIGK

SEQ ID NO: 241662 - protein, 53 aa, Zea mays
  Clone ID: MRT4577_151973C.1.pep
VFVSKLVWSLHKAGSARFSPKKKKKKKKKKKKKKKKKKKKKKKKKKKKKKKGP

SEQ ID NO: 241663 - protein, 120 aa, Zea mays
  unsure (1)..(120): unsure at all Xaa locations
  Clone ID: MRT4577_151974C.1.pep
MWRIKLACLLLIFVQVQRVVLGTHDVYIVVMEGDPVVSYRGGVDGFPATAVDLDEEMDVTSEAVTSYALHLRRHHDKLLDSHLIXGTYEKLYSYHHLINGFAIXHFSSLQAEFLKKXPRI

SEQ ID NO: 241664 - protein, 71 aa, Zea mays
  unsure (1)..(71): unsure at all Xaa locations
  Clone ID: MRT4577_151975C.1.pep
NWGPPGFSHPPVCKSAPRALIFWALKKKKNAKNKGGKICFFIKARPRIKRGGQKKKTGKLCCCXXXWXHHN

SEQ ID NO: 241665 - protein, 389 aa, Zea mays
  unsure (1)..(389): unsure at all Xaa locations
  Clone ID: MRT4577_151976C.1.pep
MAYTSSLNLPKHLLLPSPRRTRHRPSSFVPAAAAKVNGDAPERPAPNGKARINGQGKKGVNGHADRIHLSVSTGGGGQDGSGLRVAFQGAPGAYSEFAAKTALPGCDTVPCRAFADALAAVERGGADRAILPVESTMEGTALRNYDLLLRHGLVVVQEINLFVHYCLLAMPGVRAAEVRRVISHPMALAHCGRALARLGVDREPVEDTAGAVEMLRSKRMLDTAAIASPRAADLYGLQVLAHGLQDESWNVTRFLLLSRPPSPXVALGVDADAKTSMVVAHRGGSMVVVLKVLSAFSSRNINLTKLEVINNEGAGSGPGSGERPPVVILDTSARGAPTLRAFPHVLYVDCEGAAHDPRVREAIQEMERFAVFVRVLGCYAADSTVYDLQ

SEQ ID NO: 241666 - protein, 55 aa, Zea mays
  Clone ID: MRT4577_151977C.1.pep
LNYRLRCAASSSQPNASWTKRRALLRLKAKQWLSCLHWSSALSRLETKSGLKPGH

SEQ ID NO: 241667 - protein, 129 aa, Zea mays
  unsure (1)..(129): unsure at all Xaa locations
  Clone ID: MRT4577_151978C.1.pep
MAAAAGPSSSVKETLPPALGSTSQPPPVFDGTTXGLQDKMELVAIDLQDKPAWYKDKVYAQGTVLFLGCSCLASYHYHPEHLREHCTTVSRQQVPSLEHDSEVRGESLDLIRYIDSNFDGPALLPEDAA

SEQ ID NO: 241668 - protein, 168 aa, Zea mays
  Clone ID: MRT4577_151979C.1.pep
MLVYQDKLSGDELLSDSFPYRELENGVLWEVDGHWVVQGAVDVDIGANPSAEGGGDDEGVDDQAVKVVDIVDTFRLQEQPAFDKKQFISHMKRYIKNLSAKLEGDDLDVFKKNVESATKYLLSKLKDLQFFVGESMHDDGGVVFAYYKEGAADPTFLYFAHGLKEVKC

SEQ ID NO: 241669 - protein, 86 aa, Zea mays
  Clone ID: MRT4577_15197C.1.pep
LQVDMVSQHLNFMHACLKHYNRFPGGRTHMACPFGCWAKLTADLTCAVMLTSYATALATITELFGIPAPGCLEDDPKNVNLFLDET

SEQ ID NO: 241670 - protein, 112 aa, Zea mays
  Clone ID: MRT4577_151980C.1.pep
MAAAAGPSSSVKETLPPALGSTSQPPPVFDGTTRLYICYFCPFAQRAWVTRNLKGLQDKMELVAIDLQDKPAWYKDKVPSLEHDSEVRGESLDLIRYIHSYFDGPALLPKDA

SEQ ID NO: 241671 - protein, 66 aa, Zea mays
  Clone ID: MRT4577_151981C.1.pep
FPVPLPPHRDDLFISLFQKKKKKKKKKKKKKKKKNKKKKKNKRKKKHKKKIIKRTKKKKKGGPPKS

SEQ ID NO: 241672 - protein, 224 aa, Zea mays
  unsure (1)..(224): unsure at all Xaa locations
  Clone ID: MRT4577_151982C.1.pep
MAAAAGPSSSVKETLPPALGSTSQPPPVFDGTTRLYICYFCPFAQRAWVTRNLKGLQDKMELVAIDLQDKPAWYKDKVYAQGTVPSLEHDSEVRGESLDLIRYIDSNFDGPALLPEDAAKRQFADELFASANAFTKALYSPLLSHAAVSDEVVAALDKLEADLSKFDDGPFFLGQFSLXNYDIAQGRSNLQEFIDEMNKIEAYAQTKNDPLFLLDLAKNHLKIA

SEQ ID NO: 241673 - protein, 243 aa, Zea mays
  Clone ID: MRT4577_151983C.1.pep
MAAAAGPSSSVKETLPPALGSTSQPPPVFDGTTRLYICYFCPFAQRAWVTRNLKGLQDKMELVAIDLQDKPAWYKDKVYAQGTVPSLEHDSEVRGESLDLIRYIDSNFDGPALLPEDAAKRQFADELFASANAFTKALYSPLLSHAAVSDEVVAALDKLEADLSKFDDGPFFLGQFSLADVAYVTILERVQIYYSHLRNYDIAQGRPSLEEFIDEMNKIEAYAQTKNDPLFLLDLAKNHLKIA

SEQ ID NO: 241674 - protein, 482 aa, Zea mays
  unsure (1)..(482): unsure at all Xaa locations
  Clone ID: MRT4577_151984C.1.pep
HYGVPPPPGPYKEDXHRWNVXQSWQQNAPPAPPPEHVVKVHPSPPPASSNRSPNRPAPPPPAMLNSSGGSGSNYSGGEILPPPSPGAVLGFSKSTFTYEELLRATDGFSDANLLGQGGFGYVHRGLLPNGKEIAVKQLKLGSGQGEREFQAEVEIISRVHHKHLVSLVGYCISGGKRLLVYEFVPNNTLEFHLHAKGRPTMEWPARLKISLGAAKGLAYLHEDCHPKIIHRDIKASNILLDFQFEAKVADFGLAKFTTDNNTHVSTRVMGTFGYLAPEYASSGKLTEKSDVFSFGVMLLELITGRRPVDTTQTYMDDSLVDWARPLLMRALEDGEYDALVDPRLGKDFNPNEMARMIACAAACVRHSARRRPRMSQVVRALEGNVSLEDLNEGVRPGHSRFFGSYSSSDYDSGQYNEDMKKFKKMAFNNNYTSSQYSAPTSEYGQIPSASSSEGHQTQEMESGAMKKGGYSGGYSSGYSGAS

SEQ ID NO: 241675 - protein, 56 aa, Zea mays
  Clone ID: MRT4577_151985C.1.pep
AYTMPLLTAITHTRTNLTAKTLSDTLRCIVSPQTLSPFILLLVLSLDTSSCCPSLS

SEQ ID NO: 241676 - protein, 223 aa, Zea mays
  unsure (1)..(223): unsure at all Xaa locations
  Clone ID: MRT4577_151986C.1.pep
MRRQVVALHEEKDLMKEKFAKLLLGEDMSGSGKXVPSALALSNAVTNLAXASHLLPVEFDRCTGHDSFCLVFFXKKFHARPVXASVFGEQRKLEPMAPDRKGRWKKEVXGWILSIADHIVEFVAKKQVMDNDTEMEVLIGLHLLHLRAAVTLSSARHTQLMGTQQRRDLQANIPALRKLDTMLLVSTTTPCIPRERASLPFCCVLAYPPSRASAASHRTTWKT

SEQ ID NO: 241677 - protein, 247 aa, Zea mays
  unsure (1)..(247): unsure at all Xaa locations
  Clone ID: MRT4577_151987C.1.pep
MTRHRPWPPSHPPPPHPLPLRVVAAAPQATGSGAGKKMARLSPGAAAPQVDTGKYVRYTPEQVEALERVYNECPKPSSLRRQQIIRDCPILCNIEPKQIKVWFQNRRCREKQRKESSRMQTVNRKLTAMNKLLMEENDRLQKQVSRLVYENASVKSLKTKIHKASAATTDTSCESVVTSGQQQALAAPRPQRDANNPAGLLAIGEETLTAFLSKATGTAVEWVQMMGMKPGPDSXGIIAXSHNCIGV

SEQ ID NO: 241678 - protein, 134 aa, Zea mays
  Clone ID: MRT4577_151988C.1.pep
AKQTSGLFLLKQTSKKGQHLQEEGPLPPRKKGPHYLNLLKGPLGHRALGRKKGVAKITKNGRNFSLFHFTGPGLPPLKRIFRNPTPSMKNAQVAKPFQLKYGPRPATGRGINRPGKIGGSFQTYPPNQRGNWKA

SEQ ID NO: 241679 - protein, 89 aa, Zea mays
  Clone ID: MRT4577_151989C.1.pep
PLTSGTTPECPEASGTPQGPRELCPLFLFVSFQEPLFLLSCPFTTPSDMLRAFNVDHSSKIIFQKIGSIVFQKKKKKKKKKVLCVVTTA

SEQ ID NO: 241680 - protein, 103 aa, Zea mays
  Clone ID: MRT4577_15198C.1.pep
FLRAGHLSLFLSRGPSNLNTKSHPGFHAAGSFGQGPPPHLFLSKTNTLLDWDQRAPVTSGPWQAERRAFSTPPGPHPVGDPGVHPEFSDPLLGGPQLALGRGS

SEQ ID NO: 241681 - protein, 99 aa, Zea mays
  Clone ID: MRT4577_151990C.1.pep
HLPPPTATLEKRGRAPARETALYKHRLGAKWCSGSPTETCHSYAMQAEQDPRLQDPCRETGVPRHQEARERREVPSDRLQEPQPSTPSVLLRTPSSLWT

SEQ ID NO: 241682 - protein, 99 aa, Zea mays
  Clone ID: MRT4577_151991C.1.pep
ELKPREHCVILGVAVAPGRAYLDSLGVYMGQPCFPFDLHQSREILDEPHRHGHAACWKGAADVVPLVRRRHGSEIRPPLGIRARPDMCSTGPLPRCMKI

SEQ ID NO: 241683 - protein, 59 aa, Zea mays
  Clone ID: MRT4577_151992C.1.pep
RPNRRRHASMGLLISGLGRVLHLWQNYICVPWACGSDLSLELYELTIIQQEAYNLLYNE

SEQ ID NO: 241684 - protein, 217 aa, Zea mays
  Clone ID: MRT4577_151993C.1.pep
VRFIGSCTKPPQFYIITECMSRGSLFDFLHNEHNVLDLPTLLKFALDVCQGMSYLHQKGIIHRDLKSGNLLLDKNDVVKVADFGLARFQDGGGDMTAETGTYRWMAPEVINHQPYDSKADVYSFALVLWELMTSKIPYNTMTPLQAAVGVRQGLRPQIPENTHPRLINLMQRCWEATPTDRPSFEEIIPELEDIQAQAQRTSGETSQTEEDHSCSKD

SEQ ID NO: 241685 - protein, 136 aa, Zea mays
  unsure (1)..(136): unsure at all Xaa locations
  Clone ID: MRT4577_151994C.1.pep
HGIPADGLMPVDTTVGGGDDAXHTFFSDTGAAKLVHRADIGDLVPSALTEVRTGTYRXVFHPDHLHXRRRMMQGTYCHRGLYALVEDTGALCLDRILKLADLCSGLHSFLLFNAAXGGTFSCAVPLLLLDRLSVDY

SEQ ID NO: 241686 - protein, 83 aa, Zea mays
  unsure (1)..(83): unsure at all Xaa locations
  Clone ID: MRT4577_151995C.1.pep
DDEPPDKKXMDKLDTGFYCPFCNHHRTGGRRRGMNNLLGEGSCKNCQENLRTTVNALTEPIDIYREWIDECERVNTVEGDDDA

SEQ ID NO: 241687 - protein, 117 aa, Zea mays
  Clone ID: MRT4577_151996C.1.pep
MAAEAACCDDSACSTPFVSAPSSPARDRDRERDTYPSHFFFSAPTSPTRGKDAAVPDLDFDFDFDFSSRFPSPSAGAMCSADELFHNGQIRLAAALLLQPDGDADPDPDPAAGAQHE

SEQ ID NO: 241688 - protein, 79 aa, Zea mays
  Clone ID: MRT4577_151997C.1.pep
LEQGQEGGQPRGPEHQQVQEELHVARADELVLVHVRVPVRVGLHGAAAAAASRDGVSRAARGRRLLGPHGDVLGVAIAS

SEQ ID NO: 241689 - protein, 61 aa, Zea mays
  Clone ID: MRT4577_151998C.1.pep
AITIVVLYPGADSYYVWKPVSASEENSRRGGNETRGTGLDRLAASSEFELVRASRRYSRNL

SEQ ID NO: 241690 - protein, 174 aa, Zea mays
  unsure (1)..(174): unsure at all Xaa locations
  Clone ID: MRT4577_151999C.1.pep
MAKVAALTITLLGLLVSVTCQGSTYPASSSSSSPGCILRGWIPFLPPCHDDQPPTPNPLPPPSGLTVGYYKNCPGAEGIVRKVVEKAMDNGNRGIGAGLVRIFFHDCFVRGCDASVLLRXTPAAPXQTEMFGLPNINKPRGFQVIDDAKAELEKACPXTVSCADIVVFAVRDAT

SEQ ID NO: 241691 - protein, 66 aa, Zea mays
  Clone ID: MRT4577_15199C.1.pep
FLIFEPRFGQFRRSILRNLLFGLFSPPPINLYKIDLNFLGLLDLSTHVVISHRRFLLSIKGCWSYM

SEQ ID NO: 241692 - protein, 114 aa, Zea mays
  Clone ID: MRT4577_1519C.1.pep
GKTTLARLIFLDQGEGWDFDLRIWISLNRKLNIKMIASDIISQCNHREEKLLDVRTDMEIQENFQLLKRCLQEALHEKHCLIVLDDLSSTDKNQLDELKEMLKGTNESIKVLVT

SEQ ID NO: 241693 - protein, 139 aa, Zea mays
  Clone ID: MRT4577_151C.1.pep
LHPTDSTSRLPRILPSVAQAPSPSLSSRTLLSMAIFEPCRQPAASSSRCHCSIECLLCRGYITALLYFALLSSREYISHTAGPSSAHIRVPPCYNRIAVVPREKISPSEWHAVLESISSGSSCIVPSQMMMKLFAPGDD

SEQ ID NO: 241694 - protein, 39 aa, Zea mays
  Clone ID: MRT4577_152000C.1.pep
PVEIVYEARLAFLNEPFKKVPMNSGTFKTKKNLGGFSRV

SEQ ID NO: 241695 - protein, 80 aa, Zea mays
  Clone ID: MRT4577_152001C.1.pep
PWRRKNGSVLLFLCESRFMPSLGLAATLHEPTCVNYTKGPHDDFLSNLTPTKEDTGMYLLTCKISEAKRSQMYWLSLTQK

SEQ ID NO: 241696 - protein, 46 aa, Zea mays
  Clone ID: MRT4577_152002C.1.pep
ALKGTIKTLNYMYEGLNVYIKYSVVPLYKAGPEIDNVHKKEVSLDN

SEQ ID NO: 241697 - protein, 70 aa, Zea mays
  Clone ID: MRT4577_152003C.1.pep
TFYSPWLQTCPLFWLKYSWPATKLYMGLHNMFTPRFIAQQLANPPVPKTRVFPMIPHQNNRGVERTPPKT

SEQ ID NO: 241698 - protein, 58 aa, Zea mays
  Clone ID: MRT4577_152004C.1.pep
ASPSVFRILWWPTSSSWWLGFFFIAGLPQVLKILFGKSFNRPCLGRLSNTLCKKTARW

SEQ ID NO: 241699 - protein, 44 aa, Zea mays
  Clone ID: MRT4577_152005C.1.pep
CSLRTTGLGSKGGADYPLPARLSSKGAQCLPGAGAVLHRGAKCL

SEQ ID NO: 241700 - protein, 93 aa, Zea mays
  Clone ID: MRT4577_152006C.1.pep
SVLLAYIGQAAYLRIYPENVANTFYKSIPGPLYWPTFVVAVAAAIIASQAMISGAFAIIAQSQVLGCFPRVRVTHTSTKFEGQVYIPEINYVL

SEQ ID NO: 241701 - protein, 34 aa, Zea mays
  Clone ID: MRT4577_152007C.1.pep
PRVRSLYGCSVDIQMQAYGFLELDTVSIQSSFQL

SEQ ID NO: 241702 - protein, 53 aa, Zea mays
  Clone ID: MRT4577_152008C.1.pep
WQVIGTGRSVVDKIPGRNRRSRGHVCSDKYPCLIRRREIESRRVLVMRSRAQF

SEQ ID NO: 241703 - protein, 196 aa, Zea mays
  Clone ID: MRT4577_152009C.1.pep
MSDPEKAPRSLVYPSEWDAMTADEQMLWFLKHLSAQMDSMKSKLAAARVGAGDPAEATSRVNPVASPATASATSTSALVASHTDRATTAAPPTIAEEVHCTATAFDPNPAIGTNNAIATLRTNGVEIQEENQVVATAIQAVSINIGGKFTTPAPPLVASSPEVSTEPAVLPDVSSSTGQAEEILHHVSSDTSLRRS

SEQ ID NO: 241704 - protein, 147 aa, Zea mays
  unsure (1)..(147): unsure at all Xaa locations
  Clone ID: MRT4577_15200C.1.pep
RGRASKGWEPQAGPPPFPRPVPKANCFKGAGGTQVNQPTAFKKLGGQVQPGXIIFEGVGPRKIGPSVEFYKGRLATGIYRTQSXWGPXMFVTGGIMVPVMEPPLWVKALVEKGGRNFMSDFMMGGVQGVVQKTVVAPMEGGKLFIEN

SEQ ID NO: 241705 - protein, 87 aa, Zea mays
  Clone ID: MRT4577_152010C.1.pep
KCVYEFEASGRFDHISLKVRETSLNVRFVSFKRLSTFNSHFRHFRVLGLSKAHHCEAHHLPSQATSLQLPERRWPPQSASPPGAASS

SEQ ID NO: 241706 - protein, 73 aa, Zea mays
  Clone ID: MRT4577_152011C.1.pep
LNPDIVVHLFFRFISAPYTKMAIFFSLLGKGHECFFLHPKNFGGAIFLGFLKKNHPLGKKFLGGARRNLFHNC

SEQ ID NO: 241707 - protein, 81 aa, Zea mays
  Clone ID: MRT4577_152012C.1.pep
RIRPHNRLSNIGLQCASPFDSVSAAKSLSGMGNPGPTAISMWDGSGLRFERKMSSDNLLSTVECFKLCECQHFVNVCAVCP

SEQ ID NO: 241708 - protein, 198 aa, Zea mays
  Clone ID: MRT4577_152013C.1.pep
MQQDLRNSERRNPEQAHPVMSASSTNSAASPAVSGLDYDDTALTLALPGSSAEPAADRKRAHADHDKPPSPKARAVGWPPVRAYRRNALRDEARLVKVAVDGAPYLRKVDLAAHDGYAALLRALHGMFASCLVAGAGADGAGRIDTAAEYMPTYEDKDGDWMLVGDVPFKMFVDSCKRIRLMKSSEAVNLSPRTSSRQ

SEQ ID NO: 241709 - protein, 139 aa, Zea mays
  Clone ID: MRT4577_152014C.1.pep
MQRCRRARPTPRLPRPSPASTTTTRSSPSRSRAPPPSPPPIASAPYLRKVDLAAHDGYAALFRALHGMFASCLVAGAGADGAGRIDTAAEYVPTYEDKDGDWMLVGDVPFKMFVDSCKRIRLMKSSEAVNLSPRTSSRQ

SEQ ID NO: 241710 - protein, 53 aa, Zea mays
  Clone ID: MRT4577_152015C.1.pep
KKTKDSSKKTGSTTNWGGPSRGATLTTRTTDATTLYSAPRHQQDGLLLQGVQG

SEQ ID NO: 241711 - protein, 101 aa, Zea mays
  Clone ID: MRT4577_152016C.1.pep
MSNTLLRVYPSDLKMPFELRKQNSACLELVNKTDRWVAFKVKTTNPRKYSVRSASGVVPPRGSCGITITMQAPKEMPPDYHCKDKFLVQSIAVEEGTTQKD

SEQ ID NO: 241712 - protein, 216 aa, Zea mays
  Clone ID: MRT4577_152017C.1.pep
MGLDANNALLHIKSALRSSARLACQSASEYPVALGVGTLLLFLHRLCPALLALLLSSSPVFLLTALLLGALLSYGEPGDGAPATGDGEGSSPPDAVAVAVAVAVSTPSVAESCPAVAVEVQRVAAVAHMPRSSSASPVVRAEETTSGTTFFHEAHRDEGSIVASVSADDALRRAEVVVEREEQPATKEICENVQLRQFRSSAGEGCSIEVDSASGA

SEQ ID NO: 241713 - protein, 263 aa, Zea mays
  Clone ID: MRT4577_152018C.1.pep
MSNTLLRVYPSDLKMPFELRKQNSACLELVNKTDRWVAFKVKTTNPRKYSVRSASGVVPPRGSCGITITMQAPKEMPPDYHCKDKFLVQSVAAAEGTTHKDIVPGMFSKAPGKLVEEFKLRVVYVPANPPSPVPEETEEDDGSLDSDVDHEVGTPSTSNCAAGQGHTCRSQASDDEGDSTSKLGLESRYAEENKMVQKDLIQDASISELELESRYAEENKKIQKELDLLRKTHASPGDFSATSVLLVFLLSSLVGYLMFGSKT

SEQ ID NO: 241714 - protein, 89 aa, Zea mays
  Clone ID: MRT4577_152019C.1.pep
VNQLTHSPSSRREFNTCNEPQPPSCRCNQPLPVSVPSARVRHGRCRQLTRKKPELMWLVEKKRDRSHKYLRDHRFSSQFVFDLTPSVRL

SEQ ID NO: 241715 - protein, 156 aa, Zea mays
  Clone ID: MRT4577_15201C.1.pep
PSLFKCSSYWHRHPSLSSSGLDLASLHWPQSGRETRPVCIKMTISRPLDYRKRTRVDNNITKMDSDRDTTNKANRSSSLHLFVLMSLSSLWWPHLSFISSQKHLTVPLSLKTSGHFTLYHSKVSKHALTHAVCHLKNIPVDVVSGTLQWLHWNAAP

SEQ ID NO: 241716 - protein, 75 aa, Zea mays
  unsure (1)..(75): unsure at all Xaa locations
  Clone ID: MRT4577_152020C.1.pep
QLGRFSVYNSRHHGGLVSSPVSTTLPEIGSRLFLMXGIFWSFPETQSHLLATALIISWSVTEIIRYSFFAMKEAF

SEQ ID NO: 241717 - protein, 100 aa, Zea mays
  Clone ID: MRT4577_152021C.1.pep
GDHPPDAPVKGRIPLREIIQQRLHSTRSGARYFRQGCSPPLCSRREGGVGSAQIRDLSCPRQGGPDDRSCLVVPVACSPPCRALDAEGAEAISRGSWRGK

SEQ ID NO: 241718 - protein, 31 aa, Zea mays
  Clone ID: MRT4577_152022C.1.pep
GLYCLWMIMEIHGLVRAVEVKLEAFLVGLWQ

SEQ ID NO: 241719 - protein, 100 aa, Zea mays
  unsure (1)..(100): unsure at all Xaa locations
  Clone ID: MRT4577_152023C.1.pep
PFPXLHFFIFXFTPLTSGISEHYLTLTFPYLTHHILDSNNIICASNPHHGHYLTASSXFLRNIITKEFDXHILNFQNNNSSYYIDGTPNNFNSNIVYIPP

SEQ ID NO: 241720 - protein, 46 aa, Zea mays
  Clone ID: MRT4577_152024C.1.pep
VIINLPHLLEGHGLKRLVGVSYYKKSLIIKLASTNIPTVMDIHAFS

SEQ ID NO: 241721 - protein, 70 aa, Zea mays
  unsure (1)..(70): unsure at all Xaa locations
  Clone ID: MRT4577_152025C.1.pep
TGAGAAARLDKIRCESAGIRXAPPGPARAGSRPAAGTAHAAPVRTGNTRAGARGPRPSEVSQPCARAHAS

SEQ ID NO: 241722 - protein, 129 aa, Zea mays
  Clone ID: MRT4577_152026C.1.pep
PGAQCSASSHTILCSRSFSSSTYTLWCSWIDQQEPQPRIHDSIPMASLNQHRSMATDRELFRTVRQAALNHARQLYHRLVRRLPHLLAVTLVVGAVQLVPPSSAPLPPLGALLREAAARARADAGLVAA

SEQ ID NO: 241723 - protein, 55 aa, Zea mays
  Clone ID: MRT4577_152027C.1.pep
KKHILLAGEYIYMFSFTRLYAKGERYIAVLLELHAPPPDRTQLSVSVTLLRGDRA

SEQ ID NO: 241724 - protein, 99 aa, Zea mays
  unsure (1)..(99): unsure at all Xaa locations
  Clone ID: MRT4577_152028C.1.pep
MHCHRHGCVTCEGRSQDTLPSLHQAAMRDARCQRSTXMVILKLSIQRLARXIAHYFNTDLRFQSYDVCVLEEVDXAYLAMIFKDTNLCAIHAKHVTMMP

SEQ ID NO: 241725 - protein, 68 aa, Zea mays
  Clone ID: MRT4577_152029C.1.pep
MNWFQKHSERKRKPPGLIQTGGTLTKRHVELLEWTYCDENTTDGPYNKAAFYEWEMGGRGWCQKTPEG

SEQ ID NO: 241726 - protein, 58 aa, Zea mays
  Clone ID: MRT4577_15202C.1.pep
RNIDQRTLLLITLQQQLLPYSLIADLSPDTFMTQYQLIAALPSRSRLTNCTTFTHCNN

SEQ ID NO: 241727 - protein, 131 aa, Zea mays
  Clone ID: MRT4577_152030C.1.pep
KSRLHFQFLRPNPVGLVHLPFFIPHPLGVGAAFPCRGVPPPLFPKGGFSGLLRAPRSSHPLVPAVPPVRFFKVAFRVREKKWGGESCFSPPFQSLHTCPFPFVCFPFPWGAKGGIFGPPKAPFFFFSGWGV

SEQ ID NO: 241728 - protein, 74 aa, Zea mays
  Clone ID: MRT4577_152031C.1.pep
TEPILVKKSLVSEEGKKKCGAQKQSQHPTLHAGGQQPITNKWLGQYMDQARWQRTILQKTRMNRAQCPGGQREV

SEQ ID NO: 241729 - protein, 99 aa, Zea mays
  Clone ID: MRT4577_152032C.1.pep
SGVPMLSWPFFAEQQTNCRYKCVEWGVAMKVGDDVRRKAVEATIREAMGGDKGKEMARRAAEWKEVAAGAAARSIANLDTLINDVLLSPARLGGSLKTT

SEQ ID NO: 241730 - protein, 39 aa, Zea mays
  Clone ID: MRT4577_152033C.1.pep
HRSIYPAVLPWYHRVNEGSYGLQLAQRHPPTPVSNLTCN

SEQ ID NO: 241731 - protein, 55 aa, Zea mays
  Clone ID: MRT4577_152034C.1.pep
FYLLFFQLTLPNTFFVGLTTCLNCLFIQTNIQKHKKWNWREKNIHSMIINTKFKP

SEQ ID NO: 241732 - protein, 5 aa, Zea mays
  Clone ID: MRT4577_152035C.1.pep
LGTVA

SEQ ID NO: 241733 - protein, 41 aa, Zea mays
  Clone ID: MRT4577_152036C.1.pep
AVLTCSINFWPIKTLINGRFSIRYEILDHVGHIGMNSGKPS

SEQ ID NO: 241734 - protein, 150 aa, Zea mays
  unsure (1)..(150): unsure at all Xaa locations
  Clone ID: MRT4577_152037C.1.pep
MLCHRVDRGCDGALYTWDALIEVANKLPXFGGHLGTSHTRRPLXAGLLVATRHETTAVWRTVPGGPFVCGFCLLKEQNPTDPPYYGRGPIQVTHEYNYRLLGQALNLNLMGNPDLLASDPLVSFITGIWFWMTPQTPKPYCHTTMTCAWT

SEQ ID NO: 241735 - protein, 162 aa, Zea mays
  unsure (1)..(162): unsure at all Xaa locations
  Clone ID: MRT4577_152038C.1.pep
EIGPKGGLAWNQVRLALGSPGAAPGDWGGHPGGKNLFLISGKGNKGPLNPLPAAWGGDKGMAPRQKGKARPQKKIKPSVIGPQAQPGGCKGGVFQVLQNKCGGVCNPXKGRIKGFPTLGPXGKEGCGPWPKVGKATKSLVLKPGGKGFNLRKVLSNGGCHRW

SEQ ID NO: 241736 - protein, 105 aa, Zea mays
  Clone ID: MRT4577_152039C.1.pep
DLAGIFWDRPASLGRHQHSLAPALGGSRPVPGAPGSPPPPCAPPPPPPLSPPPPRGVPPPPPPCLLSLLVGASRVSVLLFLPVSLSGAAAPLFWGASPFTVCHGS

SEQ ID NO: 241737 - protein, 85 aa, Zea mays
  Clone ID: MRT4577_15203C.1.pep
AAPPFFYFFFFSLSKSVFFKEGSGPTPNQNLVRFVLYEATFPRPLTRIMVHHHQAFISHKQCLQGTPTLPGWHFLCCRKKGSIPR

SEQ ID NO: 241738 - protein, 49 aa, Zea mays
  Clone ID: MRT4577_152040C.1.pep
RNRIGPRPYAPELHPSRLDRDRPRRLLPLWPLHPLRGACRGLRTAAVSV

SEQ ID NO: 241739 - protein, 76 aa, Zea mays
  Clone ID: MRT4577_152041C.1.pep
SSCAPPTRRRAPTLRLSLVPCLCRPEPSGLRPADLPGTVLVPTAHPTFVWDYDHRGYDLRLNPARTADGRTADRSH

SEQ ID NO: 241740 - protein, 72 aa, Zea mays
  Clone ID: MRT4577_152042C.1.pep
INILEIATKPVLNHARVVLRLGYTGILLNKPNLGIQDETDPASHHKTIYRLQAMCLQRTSHSRRKAPLKHPS

SEQ ID NO: 241741 - protein, 463 aa, Zea mays
  unsure (1)..(463): unsure at all Xaa locations
  Clone ID: MRT4577_152043C.1.pep
MSQQQGVEEPPPAPLPAAEGEAQPAADIPMSEAAAVEDEEEEPVVGEGEDGADGAADAVDSVNASAKPEAEGAEEGGSDREERNGGPTADLVGEVVKLENGDGPVTVGGSVDEGRGGDGGDDKGLAGQNQPAVNQLLLAPAEEDLALSKISDNSFMFDYTTGGDDSGTEEEQAAFMKELERFHREKMLEFKPPKFYGEGLNCLKLWRQVTGLGGYDQVTSCKLWRQVGESFKPPKPCTTVSWNFRNFYQKALLEYGVHKIDTRKYLVAPFHLPRLLGGWGLFGGSMRSESGSPTIANXRALLXKPSRRFRANAXVSSXSLVDXSVCMRDRTPKSSGSAKKERTPCVEDDIGIPYKSYKLQKDSMDIDMGPLADWVKINVRKTKDCYEVYALVPGLLREEVHVQSDPAGRLIVTGEPEQLDNPWGVTPFKKVIRLPSRIDPHQTSAVVTLHGQLFVRAPFEQSK

SEQ ID NO: 241742 - protein, 74 aa, Zea mays
  Clone ID: MRT4577_152044C.1.pep
CRAWSKADLLKYTCYLLISSHTVTFGRPIIGLQPFKLCPSASQRAYRHPLLRVPCHHPHSSSFHAMQIKQIQRG

SEQ ID NO: 241743 - protein, 48 aa, Zea mays
  Clone ID: MRT4577_152045C.1.pep
WRLVSLRLSTLIGLSEKAQNVVWMIMETSLTLAQHLLCFPEMAHYYQA

SEQ ID NO: 241744 - protein, 67 aa, Zea mays
  Clone ID: MRT4577_152046C.1.pep
FGSSLVFHLNFLIPLSIFIMGGLKTLFWGVLHHLLQMLVRAPVQCSIHVIQLLKTHCHPRLHWLTPQ

SEQ ID NO: 241745 - protein, 128 aa, Zea mays
  Clone ID: MRT4577_152047C.1.pep
RTRGRTPGPACLSFITTTKLNNSQLEKIMKSRSIGIIGRALGASPRASGGHRPTGSGGKEEYSRGQQPGGGSQQDPGPPLLDAVRRQERDGPGRVLRVLHSLPGGQPGAVQQDPVQGQAHRAERHHGA

SEQ ID NO: 241746 - protein, 158 aa, Zea mays
  Clone ID: MRT4577_152048C.1.pep
MVSAKRLVQMAKKWQRMAATARRRIALAPPAKGAAEGSSPPCSTSRVAVAGKGHCVVYSADGRRFEVPLPYLDTAVFGVLLGMSREEFGFAGGDGRITVPCDAAVMEYVMCLLRRDASEEVVRAFLSSVVSRPCSHCGNGSLVQSTTGVRQQAAVSSF

SEQ ID NO: 241747 - protein, 57 aa, Zea mays
  Clone ID: MRT4577_152049C.1.pep
FSVCWMVYNLDSNNYFLRTSPLYSQPCAIPSNKPYTNGRAAPLAVTLTAVLTTTTTS

SEQ ID NO: 241748 - protein, 171 aa, Zea mays
  Clone ID: MRT4577_15204C.1.pep
MAKWNGYWYWWSDGHTHFTKLLCLDAPFVMAPRGGIGYEYRQVTIYRSAPYIGVRRIPAATYGRPRWPTRWSTRFPPLCECSSNHDSSTRSQPRAFVLHFGWHNTKLTLLSFRDIYYKNTAKQHDTYCVRSSSSSTANHIETGRVVSFCNDNEERRRRLLAHERVEIWRPC

SEQ ID NO: 241749 - protein, 71 aa, Zea mays
  Clone ID: MRT4577_152050C.1.pep
QPTLLFFFFRGASREDHLGFDDRVPAYYVKRCATSITSSGGRPPSGRQLALVTETAVLAPPADCYYDTTSP

SEQ ID NO: 241750 - protein, 253 aa, Zea mays
  Clone ID: MRT4577_152051C.1.pep
TSTPTPTTPSQESGKSTCRPPIKSTEQSRAAAEVPRRRRSVGLRYTMAAPYYGGPPAAPAPVAVVSPQFCAPYVVPLTVTKKAISLSDGDFTVTDANGATVLQVKGAVFSIRHRRVLLDAAGQPILTMLEKVFSMHNRWEVFRGDSSNESDLLFTAKKSSIFQLKTEMDIFLASNTAQQVCDFKIKGSYFERSCAFYLGNSSSMIAQMNRQFTVTNVLLGRDTFGVTVFPHVDYVFVAALVVILDEIHRERSD

SEQ ID NO: 241751 - protein, 95 aa, Zea mays
  Clone ID: MRT4577_152052C.1.pep
PQLNSPYCMITICPTILSHLLLIHHSLSLILPSFSIHISILHFFFFNHIYILLITIPTYLNQTSYLFQLSTSNKPFFTPSTSLISTLYSFLNLTY

SEQ ID NO: 241752 - protein, 145 aa, Zea mays
  unsure (1)..(145): unsure at all Xaa locations
  Clone ID: MRT4577_152053C.1.pep
ARGAREGRGXRRGARGGERRAADEREDAVRRERLRVARHALPRRRRAMRHPHHPPRPHRHELEGTKAVERPRPPAARISPPGLGLEIAGFTLFAAVNSLFAVCRDVTRPPRSFLLWAHCTGVTSPQSDPAVGLRYNRTETAIPAG

SEQ ID NO: 241753 - protein, 72 aa, Zea mays
  Clone ID: MRT4577_152054C.1.pep
GRERTEQASHRKLVSPTTTRMVSGDRTGDPLICFLRHLGSGCFCRLVAMARDPTATYLPNLRPWLVDLLPLL

SEQ ID NO: 241754 - protein, 151 aa, Zea mays
  Clone ID: MRT4577_152055C.1.pep
LEAGRAGKKNPFPKLPSLLSLIRNFLPHLSSAHLPPSWPPPPLPTPEHPAPSTPLHPDSPRPSRPRWRRPWHRLRGDRSGRKCWSTWRRTTSNNGGRSYARASPTPAVSSRSLSGVVGTTPPPRPLGHRTRTCLLSTSLKSLGNFQICLAL

SEQ ID NO: 241755 - protein, 60 aa, Zea mays
  Clone ID: MRT4577_152056C.1.pep
TQYTPYAATFHLKMLEDLFLELTMFQIFKKNDTVILTCRSTKPIYNTIFLLELFKPHISH

SEQ ID NO: 241756 - protein, 276 aa, Zea mays
  Clone ID: MRT4577_152057C.1.pep
RLVGLDLSYNSFSGRIPSRLGDLAQLQKLDLSSNNLTGGVPPAITRLRALTFLALSNIVLRGRLPAGLSGLRDLQYLIMENNPMGVPLPPELGNIARLQELRLANSGYSGSIPDTFALLSSLTTLSLENNSLTGRIPAGLSRLKRMYHLNLSKNGLDGVVPFDSAFLRQLGRNLDLSGNPGLCVTDRAVVPDVGVGVCGGDVACERSAAAESSLVGRVVRREVTRGRWPDRAAQARRGSAVQLRPFALSSDHLVWVHCVACILCHISNSLYVVFLL

SEQ ID NO: 241757 - protein, 216 aa, Zea mays
  Clone ID: MRT4577_152058C.1.pep
SWHSNDGATGSEEGDKSPCAILDDDNSRTPDDSVKDTHASRVACSSHTNEKGVGETKVGTPFSPMNALIEIKYSEASHSQQAGDDTAMNLLASVAGEISKSELVSPASSPRSSSVKKLARDSDNIGKVKVESDTGPSHPGQADAKKGAMGKEVKIDACLVAKEEQRQTMPSPELPDSKAVVSSAKIEIYEVEAKIANKCNSQHASIDSKGESDACT

SEQ ID NO: 241758 - protein, 65 aa, Zea mays
  Clone ID: MRT4577_152059C.1.pep
DRSSERCAELAKVLGIEGREPLLAFIRAQESGGAESRVVCAPATFTPWYGGMGDQSKVHKRVHSH

SEQ ID NO: 241759 - protein, 44 aa, Zea mays
  Clone ID: MRT4577_15205C.1.pep
FGSRYGGQLILEPDLSLLSTDGFELITVYCRRVLNRAHRDMGTH

SEQ ID NO: 241760 - protein, 108 aa, Zea mays
  Clone ID: MRT4577_152060C.1.pep
SSLPPLNFEFSGPFPISLFRPWLLFSKSSLGSYSPNFPSGANVPPGFVVPINFPVTHRFFYPLKILASFNSFPLLPWFSFNPLFPFLAWVPSFKKGFSSPLGFPNPFL

SEQ ID NO: 241761 - protein, 62 aa, Zea mays
  Clone ID: MRT4577_152061C.1.pep
ACGGYLGTSFSRHGSPISVTDARLDVLCARIRKYYFLRQSWVETGRAPEEGNPAHDARMFHY

SEQ ID NO: 241762 - protein, 76 aa, Zea mays
  Clone ID: MRT4577_152062C.1.pep
KRNSGTCFCSLAFIKLLIKLHQFDVWSSSPVRISPYSSLFSMITAVYSYCDARPVICHDRRWIPLVALVVQCRCPD

SEQ ID NO: 241763 - protein, 64 aa, Zea mays
  Clone ID: MRT4577_152063C.1.pep
RPGSRKRGKKKKELKKKKKNPKKKKKNAPKGLAPLWTYWDPPLMKNLDIQVVDTNQTQALYTPP

SEQ ID NO: 241764 - protein, 117 aa, Zea mays
  Clone ID: MRT4577_152064C.1.pep
VIDKHAHHAKAKVSAEPSVWTSTHQAAGSQASACSLQPSRRAPPPPSGEAWWCSSLGPTSTSAPTTGGRTSPSSPPSESAAPAPSPWWAPAAGTAAAAGSAGAAGGALAPVSCCYWA

SEQ ID NO: 241765 - protein, 137 aa, Zea mays
  Clone ID: MRT4577_152065C.1.pep
CQWCHQKNQGEEQGVVMAEHGGLGRGRKGDRRGADTGKAGTGRRWGEGAGQPWGWRRLCWEGWRAAAAGQGSGTMLVHRMQHQTLATVTSTKYRTLMGQHTYGPYTLTSKNQIKNPNMIEETGRLKITNEKVSARGD

SEQ ID NO: 241766 - protein, 101 aa, Zea mays
  Clone ID: MRT4577_152066C.1.pep
ISQKPSCATATLGLPQSLDPSSQLIEIWQLWVHVSAPRTIGLKRGGPSRSLLASSPGPGQQIHEIALPVLTSSIELGATHLVTPSSCPPWGTGGRQNDANA

SEQ ID NO: 241767 - protein, 500 aa, Zea mays
  unsure (1)..(500): unsure at all Xaa locations
  Clone ID: MRT4577_152067C.1.pep
MDNGGSNGSATASACCNGKINRGPHVAMLATPGMGHLIPLAELAKRLASRHGATATLITFASTASPTQRAFLASLPPAVSSLSLPPVDLSDLPRAAAIETRMSEECARSVPALTAVLADLXEHGRAPXAFVADLFGADSLDAARAAGVRRRCIFFPSNLHVLTLILHLPDLDAAVPGAFRDMPEPLRLPGCVPVPGPDVLMPLQDKADPCYRWMVHHGAKYRDAHAILVNSFDAVEPGPAKVLRQPXGRPQPPVXAVYPIGPLIHADAGRKDGASSSPCLEWLDRQPPRSVVFVSFGSGGALPAEQMRELALGLELSGQRFLWVVRSPSDGGAVNDNYYDAESKRDPFAYLPPRVRDRTCAAGVGLVVPSWAPQTQVLAHAATGAFLTHCGWNSVLESLVYGVPMVAWPLYAEQRQNAVLLSDGVGAALRVPESSKRREIIADTVREVMRGEGKGAAVRAKVAELQKAAAEGLRDGGAAAAALAEVVQGWTTTTGGGEKD

SEQ ID NO: 241768 - protein, 196 aa, Zea mays
  Clone ID: MRT4577_152068C.1.pep
RAWPVCSASSAVPCSRLVSSLFAKAKTLRNKDLIEIYLSPLITCIPGLISNAPDDSKGYLLEVFTDSFRDCKVDCKLMLPYLDAVGGMLFPEKTSIWLAENDSGVLGYHDTWIHELPGILLQSIDKAPLVTKVALELLLRIGQYFPAVDCGRLRPFMKLFGVESLPGAVDLGPCVKLPRDFQELAISCLYYFPSLP

SEQ ID NO: 241769 - protein, 78 aa, Zea mays
  Clone ID: MRT4577_152069C.1.pep
YGAPVSLRENMRRDVIHWRVRLGRPRSYVLVYWFIAHSLYIRSIFPLLSSKECLAMDERKECSHSINFAFSGIWAFNF

SEQ ID NO: 241770 - protein, 93 aa, Zea mays
  unsure (1)..(93): unsure at all Xaa locations
  Clone ID: MRT4577_15206C.1.pep
MAPPVDVVGPSPRLGEVEAPPRSRSSQSSEAEVESGPLGRARRRPSAEARAESEPWGWTKRSSSSFGAEPESEPXVGRSGVCRLLGLSPSPSP

SEQ ID NO: 241771 - protein, 68 aa, Zea mays
  Clone ID: MRT4577_152070C.1.pep
MSQRKFQHPRHGSLGFLPRKRSSRHRGKGKSFPKDDPKKPWHFTGFLGFQAGMTYNGPEGGKPGSQPH

SEQ ID NO: 241772 - protein, 163 aa, Zea mays
  Clone ID: MRT4577_152071C.1.pep
GPDPRSPRVRPLPHGLLLSSCLLLQNNAILLPLLLRLLCSVAPFPRLAEDAGRGADSSSGARAGGGGVGSPVRLCFHITQNGLPGVSCTNEVVRDQLYEIGVPYRGAVAQTDGVGTIGGVVLGPVVNAPGRRGRAPRAGAGGLGSHDPGEWLNALLRTPRAHY

SEQ ID NO: 241773 - protein, 72 aa, Zea mays
  Clone ID: MRT4577_152072C.1.pep
MGAGRRMTEKEPEKQEQLARATGGAPMQRSPVVKPSFTLGQGQNVHPPHFFKRSVLKAFSYVVQDPVIAQAL

SEQ ID NO: 241774 - protein, 192 aa, Zea mays
  unsure (1)..(192): unsure at all Xaa locations
  Clone ID: MRT4577_152073C.1.pep
CLRRRSRRQPRRDAASPRPRAFHRPAWRVSDTYDSLGYIVCNPITEQWVAVPSSGWXSDSSXEIVDEHXGPASXIIFDPSLSSNFDIVQFWQDGTVDDVEGVHTYSSVTGLWNDRSSEWMRWEQGGGWGKWGGYAEIIKPPYGRAFVNGMLHFLVFLFRTEEYVIVAVDGQGNTCRVLPWPKKNKKKKKKAA

SEQ ID NO: 241775 - protein, 59 aa, Zea mays
  Clone ID: MRT4577_152074C.1.pep
CTSHSPPCAGRAVPGSYASAFSLHWLVQHLWLIGFLHAGFVLSLSHVIRALYLSFFCLS

SEQ ID NO: 241776 - protein, 122 aa, Zea mays
  Clone ID: MRT4577_152075C.1.pep
RGTIRLDELLFTADKYATADSSMKTELRVDASGKVLALIPKTSAGESSRRPHQNDHKRKAPLPPSTNRQVATVEDEQPEGRPAPKKQKGGRPAWHPAFSYEQALDASCSPHIFFKPPHHTTR

SEQ ID NO: 241777 - protein, 96 aa, Zea mays
  Clone ID: MRT4577_152076C.1.pep
PENQSPHRDESKQQGGAGNSHPTPRTGTLQQSRQAPPPHQLAWTNPAGSASDPRCQTHWRSQELKFHNSGRKGWPAHEPQGRFLQNPHRLPHTPAR

SEQ ID NO: 241778 - protein, 92 aa, Zea mays
  unsure (1)..(92): unsure at all Xaa locations
  Clone ID: MRT4577_152077C.1.pep
NSGYPLFLSLSPSPHYLPQTTVAIKVPGLLLLGSLCFSLSLSLQTDTXSFLCKPYHYFYEMFLYLTHSSHGLFMLLXLFTHYLFDDSVCNYL

SEQ ID NO: 241779 - protein, 97 aa, Zea mays
  unsure (1)..(97): unsure at all Xaa locations
  Clone ID: MRT4577_152078C.1.pep
SQNRTRDHISRIPIXDIEKAVYYALVWINRLLAVGHVIFIKTDRKVIFFPNYICSYLFLFSIVQKMILILWLVSFVGMLFNFLTLIYIAFLCSKLLA

SEQ ID NO: 241780 - protein, 145 aa, Zea mays
  Clone ID: MRT4577_152079C.1.pep
MWALNLKAGGSCLTPRHPQPAARSSLAAGIGSLAVGMRWMRQPVRWPRLAVSASGRKGNNGREDGDEPKNKAASSGKSDASTPSGDASNETNQNQGEPKSSDTMYIPSNLSYWRDVRASFVIPKLVRPNFLVFAISSVLSFGKRF

SEQ ID NO: 241781 - protein, 106 aa, Zea mays
  unsure (1)..(106): unsure at all Xaa locations
  Clone ID: MRT4577_15207C.1.pep
ARNSARADILAGVYNDRQNEEGAFLQSLRREHRPYLGMAEAFPVFLNLTGVADTDLLSPILCRTAXLESHPELMGALLLGLMNIGRMLGXGLDMDRYERKLVFMIR

SEQ ID NO: 241782 - protein, 80 aa, Zea mays
  Clone ID: MRT4577_152080C.1.pep
YTGSRVGSMDRADSQQFRAIHLESSAQSCPPSKRRRSWPICVYCICRSDRDGAVVGPSLVHLSRSQVKKFAAWGLFKQAT

SEQ ID NO: 241783 - protein, 78 aa, Zea mays
  Clone ID: MRT4577_152081C.1.pep
YVGYSAWDHDQLLSEIDAGYWVVTSCSTGLIADALTTTDPSCLWTEVLQLMGGQYSELSQKPKAGWDVDLVRLRPPRS

SEQ ID NO: 241784 - protein, 53 aa, Zea mays
  Clone ID: MRT4577_152082C.1.pep
YYVKLQKAGFFYYMFIFTPVHTVYYIQDNPQKDFPFPINLKLKRAPIPKIVRA

SEQ ID NO: 241785 - protein, 226 aa, Zea mays
  Clone ID: MRT4577_152083C.1.pep
EQTLDANSPVQTGQDGAAYRLPRKWAHSIPMPESGCVLVATEELDGNGTFERTVILLLRLGSRDAYDGPFGIILNRPLYTKMRHVNPSLGDQATPFVDCSLLFGGPVDMSIFLMSAGDGRPIKGFEEVVPGICFGFRTDLEKAGALIKKGAVKPEDLKFYVGYSAWDHDQLLSEIDAGYWVVTSCSTGLIADALTTTDPSCLWTEVLQLMGGQYSELSQKPKQDGM

SEQ ID NO: 241786 - protein, 109 aa, Zea mays
  Clone ID: MRT4577_152084C.1.pep
NIEVNNFTPTPDLLEETEPLKTPYERRSNPMDKITETIQSHLKLHFDTPGVPQSESLSHLAHGMTKARAARLFYQIAVLATCDYIKVTQLERKGDELYGDILISRGLKM

SEQ ID NO: 241787 - protein, 62 aa, Zea mays
  Clone ID: MRT4577_152085C.1.pep
LPGKKGKNGRQFKVPLNSAGKALQKRKQDYATKPISITNGAAPGDNFRGPGKNQNLTYKERM

SEQ ID NO: 241788 - protein, 119 aa, Zea mays
  unsure (1)..(119): unsure at all Xaa locations
  Clone ID: MRT4577_152086C.1.pep
SPLSKNGRGWGPPGSWGQXGPPSPPSSMGPEKSGGGASGDPRPGPSPGPGKGRPPRGXPRGPLNCPPRGPPRGLPGKTXPELGFPEPGFKGFXPSPGFPPPPPGFPGFRGGPGPRRLCF

SEQ ID NO: 241789 - protein, 144 aa, Zea mays
  Clone ID: MRT4577_152087C.1.pep
PEEKNPPPRKPFDIISFPPGWALSGLFEDFNKRGESKFPFSTPSWPIFWKMEDFPKNFGLNLPKKEGGFLKREASNPGRKGVMGFDPEVFGVTPTFPFGGKKKTNGPPLGFQKALTQKKGPPPKEKVGACQGGPSNQNRGPPWG

SEQ ID NO: 241790 - protein, 118 aa, Zea mays
  Clone ID: MRT4577_152088C.1.pep
ESTFSKKKKKKKKKKKKKKKKIFYNKKKHSLKGILLYILLTRALFPAPLVGAPTPPLFGGRVFSFSAARFSHKGGSLFKTLFAPSNKHLFYQTSAFFPPLLIFEGGALSCALSPICAH

SEQ ID NO: 241791 - protein, 236 aa, Zea mays
  Clone ID: MRT4577_152089C.1.pep
AARGGGPDLPVMLTFLEFYETLLGFVNFELYHSINVNYPPILDPRLEALAAELYALSRYMSSGRLPGNPESNGLIEDKETENNKESSKTDESELRLAQLQHQLPANEPGALMHLVEESTADDTEEESVKECRTLFKDLKFYLSREVPRESLLFIIPAFGGTVSWEGEGAPFDETDQDITHQIVDRPTQSHVFLSRHYVQPQWIFDCVNILKVIPTDDYIVGRVPPPHISPFVDNDK

SEQ ID NO: 241792 - protein, 58 aa, Zea mays
  Clone ID: MRT4577_15208C.1.pep
NKHIEQNEALDVVDPLGTHSRTTNLLELSEDGRRTRPTPAANWVSPLGHPPRLPLQSD

SEQ ID NO: 241793 - protein, 44 aa, Zea mays
  Clone ID: MRT4577_152090C.1.pep
ARNAKVKASFFPFAPASDRESPPGNRTMALNHGRAPLFFGRVGG

SEQ ID NO: 241794 - protein, 105 aa, Zea mays
  Clone ID: MRT4577_152091C.1.pep
VNCIRISMLLALLSGIDARLSTLRRCLCIVNKANVDEVEFDVFCCHEKDIYIFRINRTMLVVGARFFFYRFHSQPLLFYGVVYTLLSIIISPSCDQKKKKKRRPV

SEQ ID NO: 241795 - protein, 77 aa, Zea mays
  Clone ID: MRT4577_152092C.1.pep
TQVAPEAFWRRARLPGRHAFATERGRKARPNLKVGICGEHGGEPSSVAFFAKAGLDYVSCSPFRVPIARLAAAQVLV

SEQ ID NO: 241796 - protein, 122 aa, Zea mays
  Clone ID: MRT4577_152096C.1.pep
NRGRLPEPLNLEGYCASAIRVRRPCAVARVPDLRRRGRPRDHRRGGRARSHQGRARSHRGRKHDFSSEGGEEHARLLPAGRTTARPPMRRTGAQPPGTQARQLIERRRRARASAARWTDDRA

SEQ ID NO: 241797 - protein, 245 aa, Zea mays
  unsure (1)..(245): unsure at all Xaa locations
  Clone ID: MRT4577_152097C.1.pep
LRAPPEFLSEGNIEDIVSELCAEFFSFGTNDLTQMTFGYSRDDXGKFIPVYLALARIEKLSEVNPMLGFRGCRLGISYPELTEMQARAIFEAAIAMTNQGVQVFPEIMVPLVGTPXQELGHQVTLIRQVAEKVFANVGKTIGYKVGTMIEIPRAALVADEIAEQAEFFXQHDPFEVLDQRGVGELVKFATERGRKARPNLKVGICGEHGGEPSSVAFFAKAGLDYVSCSPFRVPIARLAAAQVLV

SEQ ID NO: 241798 - protein, 130 aa, Zea mays
  unsure (1)..(130): unsure at all Xaa locations
  Clone ID: MRT4577_152098C.1.pep
MDPKVALFLALSLLIAGTAHACEPNCSGPIGPTPPVATTPTSNRHRRWPIDTIKINARRQRVIDSPRPLLPQYEQCCPXLQRLPQLYAELXLCTAIKDKGLCIHLKEPLKLNFILNXCGRKXPEDFNCPN

SEQ ID NO: 241799 - protein, 563 aa, Zea mays
  unsure (1)..(563): unsure at all Xaa locations
  Clone ID: MRT4577_152099C.1.pep
PAGDQVIATGLPASPGAAVGQVVFTAEDAEAWHSQGKAAILVRAETSPEDVGGMHAAVGILTERGGMTSHAAVVARGWGKCCVSGCSGIRVNDAEKLVTIGGHVLREGEWLSLNGSTGEVILGKQPLSPPALSGDLGTFMAWVDDVRKLKVLANADTPDDALTARNNGAQGIGLCRTEHMFFASDERIKAVRQMIMAPTLELRQQALDRLLPYQRSDFEGIFRAMDGLPVTIRLLDPPLHEFLPEGNIEDIVSELCAETGANQEDALARIEKLSEVNPMLGFRGCRLDFCYSIHSQKKTLVMPDXDFGTAEISRLGISYPELTEMQARAIFEAAIAMTNQGVQVFPEIMVPLVGTPQXCLFTFYILMCDVHTVSAVQKKKXQIHLMPKRTNKQLILIADVWYFQELGHQVTLIRQXAEKVFANVGKTIGYKVGTMIEIPRAALVADEIAEQAEFFSFGTNDLTQMTFGYSRDDVGKFIPVYLAQGILQHDPFEVLDQRGVGELVKFATERGRKARPNLKVGICGEHGGEPSSVAFFAKAGLDYVSCSPFRVPIARLAAAQVLV

SEQ ID NO: 241800 - protein, 126 aa, Zea mays
  Clone ID: MRT4577_15209C.1.pep
RGRTNSGAKTSVRSGRLEKAGWPVMLPAYSVSKMVINLYTRIMARRYPDMRINCVRPGFVKTDINWNLGVLTPEQGARGPVMLALLPDDGPTGCYFDQTEMGDKWAAYYFSKWSILRDFVVFHFRS

SEQ ID NO: 241801 - protein, 73 aa, Zea mays
  Clone ID: MRT4577_1520C.1.pep
NKQGTYIFRARFTKRAGADYILKRNTYPYAHRSSVNKQNNLFNKIEAGIHILYYCVPTILAETFIFKRVGRRR

SEQ ID NO: 241802 - protein, 50 aa, Zea mays
  Clone ID: MRT4577_152100C.1.pep
TMNACMYYYYCHVAMVFFPISMHFTAPPEIPSAPTVLQLGSFHRLSRVEP

SEQ ID NO: 241803 - protein, 106 aa, Zea mays
  Clone ID: MRT4577_152102C.1.pep
MGVADLLLIRWLVQKGLQRWLNRGIIDNPLGPMVPSIIVSLNSEGGIKILLRTEKNKVVSFKNAAELDQNLSQVRPLDITHPKPTVLHKVFSNHIPHRRESNLMVR

SEQ ID NO: 241804 - protein, 132 aa, Zea mays
  unsure (1)..(132): unsure at all Xaa locations
  Clone ID: MRT4577_152103C.1.pep
HASAHASANFREFMNYLKNRNVDLTNVKLSLSEGEEDEWFRHRASSLSQLNNTESSHPTSAEDSKSHSHPAGAADKGNGTTPGTPPSTSHDKTTTSAATAGTPAMKRSSSGSKLQRKRPXRLAVSKSRLGKG

SEQ ID NO: 241805 - protein, 179 aa, Zea mays
  unsure (1)..(179): unsure at all Xaa locations
  Clone ID: MRT4577_152104C.1.pep
MLARFSVQVVEEPKDVAKKGRRTPPPXTKALQLRGGLLAEYXPGALVQLYDHDHLAYSHTSEVLVRPSALAGKDDVLXSRSRGCIDTLGRVVRTSVHADAGXSEVLLLLEVYEXLAHRARYPHDLMLRQPLRSEAXFVLFQKXTNSLVVASDPEVTVPIFCGLHPDGCLXYSRHIHMLK

SEQ ID NO: 241806 - protein, 88 aa, Zea mays
  unsure (1)..(88): unsure at all Xaa locations
  Clone ID: MRT4577_152105C.1.pep
SSSGDYHEEKNASSVDLTAEPLTDRIXRLFGRERPPHSVLRDAHRADLIVFTNTKTSRSALTGPPTIWLLFEAMQNHLLTMVCHCLLL

SEQ ID NO: 241807 - protein, 48 aa, Zea mays
  unsure (1)..(48): unsure at all Xaa locations
  Clone ID: MRT4577_152106C.1.pep
SAHSSCHTHYSHSTHIHIERGXVXLKRALNLLTNWLTSSNRIANLKLQ

SEQ ID NO: 241808 - protein, 175 aa, Zea mays
  unsure (1)..(175): unsure at all Xaa locations
  Clone ID: MRT4577_152107C.1.pep
PTRPKPGXKCTRHREAISFARRXSGAAPXRPPYAKACGVMRSDCGAGRGQHCSPMQAXVVDAGAAHSMTTXKRVVPFNXGKSEGNKDMNELRXGKGANLVDMASITLSVPAEFTVSTEASHQYQDAVCTLPAGLWPEIYYRLQWXEEYMGATLVDTQKQADALRTLRQPSCACSE

SEQ ID NO: 241809 - protein, 63 aa, Zea mays
  Clone ID: MRT4577_152108C.1.pep
QFSHRSQQALCPHGYGISATVQNIEAYGSCKCLPTNEDVYCLSRTHRSTPLEHPGSRRRASSS

SEQ ID NO: 241810 - protein, 76 aa, Zea mays
  Clone ID: MRT4577_152109C.1.pep
FVHQKKKKSRCFDRTKYTKGAGRSTNTPSATRTSCLTYQQMHAYTTHEPCTLNTPYDYASRSSASTNYQTITCPYF

SEQ ID NO: 241811 - protein, 317 aa, Zea mays
  Clone ID: MRT4577_15210C.1.pep
MELRRGSSCAGALPPPSTSPPPTPTTRSRAPLPRTRSLRPRPRSSLRGRPDHRSSTWSCFSRQKSTSTTLTYRLLPPQGTSSPRSPATTRCPWWRTNSGGARIVNASSLASELKRMPNEKLRNDLSNIDIWDEDRIQAVLNTFLEDLRSGRLEEAGWPVMLPAYSLSKMVINLYTRIIARRYPEMRINCVRPGFVTTDISWNLGVLTPKQGARGPVMLALLPDDGPTGWYRDEMGDKMGSLLFFKMVKYSSLVEGFCGVQFSFPNIQLCKSWSQELATNTESHLLPEMLEAANGYICHELHLMLTSIGVTHMIDCVK

SEQ ID NO: 241812 - protein, 69 aa, Zea mays
  Clone ID: MRT4577_152110C.1.pep
TACIRKLQFSNQSNFSLIVEQSHRLKSGSEFTEGGHQCWGLVLKCYELRTRQHKMLNVNVLHPSKHYFP

SEQ ID NO: 241813 - protein, 56 aa, Zea mays
  Clone ID: MRT4577_152111C.1.pep
PRVRKKKKKKKKKKKKKKKKKREKKKKKKKKKKKKKKNKKKKKKKKKRAPFIKNQS

SEQ ID NO: 241814 - protein, 89 aa, Zea mays
  unsure (1)..(89): unsure at all Xaa locations
  Clone ID: MRT4577_152112C.1.pep
MRDKGAARAMAEQQQPLPQPRSSMQEALEKEDKEKAAAAAVPKNGNAPHNGGGXSSGNRAAPPQSGEXTAREIQAVRRXYRRERAETPY

SEQ ID NO: 241815 - protein, 205 aa, Zea mays
  Clone ID: MRT4577_152113C.1.pep
GQPRVRPRVRVKSLKGGKEMRMDVLLMENLLFERDVTTLYDLKGSARSRYNPDSNGSDKVLLDQNLIEAMPTSPIFVGNKAKRLLERAVWNDTSFLASIDVMDYSLLVGVDEKRHELVMGIIDFIRQYTWDKHLETWVKASGILGGPKNVSPTVISPKQYKKRFRKAMSAYFLVVPDQWSPPVVIPSKQAESGQDRDEQVVLTEL

SEQ ID NO: 241816 - protein, 77 aa, Zea mays
  Clone ID: MRT4577_152114C.1.pep
PNSPVTLSSWRSKKMSPSHPRLDFARSTQNQTEKFSRHISEVHPFSPIWEVLPFNPMTQNNPKPFYFLKFLYKTNSP

SEQ ID NO: 241817 - protein, 169 aa, Zea mays
  Clone ID: MRT4577_152115C.1.pep
LSSCAVAITISANAWSDAGHAVNHLYDMLYMMGRDDIPVGVGGDGGISYAGDVQRDVGGYLPLIDQGMSTDGGCRYRQAIPLSGRLDVDTNSGVRKGFLPRGSRAYRPLRQPTAQRVMADALSAGPTSVLLLGTHTNLALLLMSRPRLRRNVERVYVSGGAVKGGGQPV

SEQ ID NO: 241818 - protein, 32 aa, Zea mays
  Clone ID: MRT4577_152116C.1.pep
IERYIILCVDLLVPDVHNMHHLTIPAHMHGNS

SEQ ID NO: 241819 - protein, 56 aa, Zea mays
  Clone ID: MRT4577_152117C.1.pep
PKLLLSYQAKHTPASVSIIRLYALNLPILSQITTDFALIHKFVLPVKIYSHIVTNI

SEQ ID NO: 241820 - protein, 64 aa, Zea mays
  unsure (1)..(64): unsure at all Xaa locations
  Clone ID: MRT4577_152118C.1.pep
LXCFYKGRGIRKGSXXXFFFMGVTNPSKRTNKSLLVGIWFNKGTQKLIPYFKIPRLLFGHQTVF

SEQ ID NO: 241821 - protein, 224 aa, Zea mays
  Clone ID: MRT4577_152119C.1.pep
MAEAEATVGRLMLYSYWRSSCSHRARIALNLKGVDYEYKAVNLLKGEQSDPEFVKLNPMKFVPALVDGSSVIGDSYAITLYLEDKYPEPPLLPQDLQKKALNHQIASIVASGIQPLHNLTVLRFIDQKVGAGESVLWTQQQIERGFTAIENLIQLKGCAGKYATGDEVQLADVFLAPQIYAAIERTKIDMSNYPTLARLHSEYMSHPAFEAALPGKQPDAPSSS

SEQ ID NO: 241822 - protein, 112 aa, Zea mays
  unsure (1)..(112): unsure at all Xaa locations
  Clone ID: MRT4577_15211C.1.pep
AGGPAASVATPILCTRVELARXLYCTPTAXPYCSPKCLSLREQCCQQLTHVEPQHRYQAILGLVLQSILQHHTESGQVPPLVAVHIAHQLTAMCGLQQTTTCPYAAGGGVPH

SEQ ID NO: 241823 - protein, 52 aa, Zea mays
  Clone ID: MRT4577_152120C.1.pep
RRLGPLPLPDEQLQPERELQREFFVIVVMMLLDSLLLATDWRRVTLRLGLGL

SEQ ID NO: 241824 - protein, 93 aa, Zea mays
  Clone ID: MRT4577_152121C.1.pep
PDFAGVLPGAGLKAGVGAAAVVDGEVPPVSLVQVGACPPRLSPCSRARPFGCTCLVKVGLVCSAGPISALAGFSSALFPCAFALLRGFCFLAS

SEQ ID NO: 241825 - protein, 68 aa, Zea mays
  Clone ID: MRT4577_152122C.1.pep
EARSLFLALTCHAVDVSVERRTDYFIDRSCGRCPGIVCRIYKYFITPCIEGIVSGCSCHPTERSPKRA

SEQ ID NO: 241826 - protein, 52 aa, Zea mays
  Clone ID: MRT4577_152123C.1.pep
KKKKKKKKNKKKKKKKKKRVKIKTRVGRSLGSKLTSPYLPRLNFSIPSPTLN

SEQ ID NO: 241827 - protein, 35 aa, Zea mays
  Clone ID: MRT4577_152124C.1.pep
SINSIYGNRCMLSHAIYLNLVRTPPRSIAYRVEYK

SEQ ID NO: 241828 - protein, 86 aa, Zea mays
  Clone ID: MRT4577_152125C.1.pep
IWHGTLLDSMYMCKYVCSEYIYASIYTRMHVRIFDIGDVLIDFHRPAMVVDGYLNHHDLEQLVVCSRPNEGGLRALGGRGEVLGRR

SEQ ID NO: 241829 - protein, 68 aa, Zea mays
  Clone ID: MRT4577_152126C.1.pep
FHLAPPFGPPGFPVYVLGWLCAGIVFAQQFPTGIISPRFFPRLGPLVGSPSVVGLGLELALRAGRPGS

SEQ ID NO: 241830 - protein, 97 aa, Zea mays
  Clone ID: MRT4577_152127C.1.pep
PPQREKLKLDFLGPLEYLEKTRTPTNFLTGGPRGFLENALNKRKVPLYIKRAPVGGPPAFKKRKGGKRAESPNESLAPGRVKTSLAPPSFGHRGPAQ

SEQ ID NO: 241831 - protein, 339 aa, Zea mays
  Clone ID: MRT4577_152128C.1.pep
MVSMNTTPNPLDSAAGSAAVAGGSVDEGGGGGGRKKRMRGAVAAAMVPPPMAVPLPAAAPAAGEEVRKVRKPYTITKSRESWTEPEHDKFLEALQLFDRDWKKIEAYVGSKTVIQIRSHAQKYFLKVQKNGTGEHLPPPRPKRKAAHPYPQKSSKNVSQTILLQEQPTQREQGSVMPMDTATVRNTNANVAVPSWDNTLAQPFSAGHVQGAAATNNCSSSMESPSGTWPTSEAVEQENMVPPLRAMPDFAQVYNFLGSIFDPDTSGHLQRLKAMDPVDIETALLLMRNLSMNLRSPDFEQHRRLLSSYSYGGADHVKSEAMENLGSPQSGHLPSLVTSE

SEQ ID NO: 241832 - protein, 120 aa, Zea mays
  unsure (1)..(120): unsure at all Xaa locations
  Clone ID: MRT4577_152129C.1.pep
GEGGFAPFLGPEGNPAVXGENLEKLKKVLEVVKGRVAPWTVLXGGFFSLAGLRPFPIKACLMAPEDAAFGHGVPPVRAWGEGPPGGPGGKKGGQFIPVGAGGPQEQEWRLNGLNALGWWA

SEQ ID NO: 241833 - protein, 34 aa, Zea mays
  Clone ID: MRT4577_15212C.1.pep
CLSLAPMTCLDMNYDSCYVWSWLDAPELPFSILL

SEQ ID NO: 241834 - protein, 83 aa, Zea mays
  Clone ID: MRT4577_152130C.1.pep
CRFVGSSQTTTRFVSSYIAPVLPTPISLFDYFEILVVELASSYSALVFPHIGEKKKIRSTYFTTKQLRIVRAAQLCSIGTDAW

SEQ ID NO: 241835 - protein, 101 aa, Zea mays
  Clone ID: MRT4577_152131C.1.pep
AREPLHVYTTPPPPVVPSSQAPSRTTRLHHVPPVPSASAEHPPTVLLAAISQSGSPRLPARQLARRQHGLASPRHCAVASSPSLNSSSTDWPRRGTGERSS

SEQ ID NO: 241836 - protein, 68 aa, Zea mays
  Clone ID: MRT4577_152132C.1.pep
GREHTEKAHMTKLTNKPIIENTRKPTRKLAALRMESISIQTWATRVSSVGSLRSSLVLPSEVRRLTNP

SEQ ID NO: 241837 - protein, 65 aa, Zea mays
  Clone ID: MRT4577_152133C.1.pep
GGSPGWFGPVARIFGGRLIYPARTPFLAAWEARFRPPQVAKGVVPHALDRMLGFLQPLRVFNSPK

SEQ ID NO: 241838 - protein, 81 aa, Zea mays
  unsure (1)..(81): unsure at all Xaa locations
  Clone ID: MRT4577_152134C.1.pep
FHDQQLNQVMVVAGEGTEGRDLLTCRMEPLNRRRPQQRQTGVLAMSTAEPRECAGCTRESTPPPPCWNRPRRLEVPNRXPP

SEQ ID NO: 241839 - protein, 48 aa, Zea mays
  Clone ID: MRT4577_152135C.1.pep
HYTVYKSHYFKYKNYTILIDMTSSCCADTSHAKMNDKPHHVPYTTHLS

SEQ ID NO: 241840 - protein, 87 aa, Zea mays
  Clone ID: MRT4577_152136C.1.pep
MRAVAQVLGGEADPPFVPAARPSMSLSSANNQQLLLSLQDSVSDYNAMLGLALSDSSSDSLSSSSLTSTLRRGGHDIGFSSTAGDAR

SEQ ID NO: 241841 - protein, 135 aa, Zea mays
  unsure (1)..(135): unsure at all Xaa locations
  Clone ID: MRT4577_152137C.1.pep
PRAGVFEFSPADSPTQNRGSPGIRGSTHRTRKRAVVVTTGPRGAGTGPICPYMPMNSTNPPYNLTPKRVNPXIKEHIKNRXRAKTRMTAXPTYEEPTRPGRALGNXGLIFAYELFQDPAFSNVLLGHPKTGGGGP

SEQ ID NO: 241842 - protein, 43 aa, Zea mays
  Clone ID: MRT4577_152138C.1.pep
MALVTVSIYVYREVMFIFIKLSVHIISLCIVKSRIFCMSPCIA

SEQ ID NO: 241843 - protein, 58 aa, Zea mays
  Clone ID: MRT4577_152139C.1.pep
HMNISKCILPLHTSKIYYVVCEKTGQASDTECSPLAICTAGCECLSGVHALRVPFKIK

SEQ ID NO: 241844 - protein, 63 aa, Zea mays
  Clone ID: MRT4577_15213C.1.pep
KLRFREPPHPPRLIDRYKACSTSHQDFAAVRYEYLVGPILNYHKCVKEDVHRIYSHGLRQGFS

SEQ ID NO: 241845 - protein, 806 aa, Zea mays
  Clone ID: MRT4577_152140C.1.pep
MFHGSLLSDCFIHPLTPPLLYCACMLSSCIHPASVAVSPRRRPDGLSLVSPDAPPRPAPPRLASLLPLPVPAPAPPAPPAARLRTMRRVGGDLQGDGTTPRSAAAGQAMMELQANGSAAVGGAMVVGLSPLSEALWRDSKALPPGAGPAALIGDVSARLTWKDLCVTVALGPGKTQTVLDELTGYAEPGSLTALMGPSGSGKSTLLDALAGRLAANAFLSGNVLLNGRKAKLSFGAAAYVTQDDNLIGTLTVRETIGYSALLRLPDKMPREDKRALVEGTIVEMGLQDCADTVIGNWHLRGVSGGEKRRVSIALELLMRPRLLFLDEPTSGLDSSSAFFVTQTLRGLARDGRTVIASIHQPSSEVFELFDMLFLLSGGKTVYFGQASQACEFFAQAGFPCPALRNPSDHFLRCVNSDFDKVKATLKGSMKARVERSDDPLDRMTTSEAIRKLVASYSRSQYYYAAREKVNDISRMKGTVLDSGGSQASFLMQACTLTKRSFINMSRDFGYYWLRLLIYLLVTVCIGTIYLDVGTKYTSILARAACSAFVFGFVTFMSIGGFPSFVEEMKVFQRERLNGHYGVAAFVISNTISATPFLILICFLSGTICYFMVRLHPGFEHYIFFVLNLYASVTVVESLMMAIASVIPNFLMGIIIGAGIQGIFMLVSGYFRLPYDIPKPFWRYPMQYISFHYWALQGQCQNDMKGLVFDNQYPDQPKIPGDFILKYIFQINVDRSKWIDLSVIFSMIFIYRILFFLMIKINEDALPWIRGHIARKRMQKKGPTPTMGKTPSLRGYVVDPELGSNEG

SEQ ID NO: 241846 - protein, 290 aa, Zea mays
  Clone ID: MRT4577_152141C.1.pep
FSNLAICKAVGGGGRKKVHIVDYGDHYYGLQWPSLLGYWGSLEAGPPEVRITAIDFPEPGFRPDARLQATGRRLTCFARRHGVPLRFHGIAARWDAVSVDELSIERDEVLVVNGLFSLGRMQEQEQDDVDRDSRPSPRDTVLGNVRKMRPDVFVLCVENSSYGAPLFVTRFREALFYYSALFDMMDAVAARDDDDRVLVEQHLFGQRALNAIACEGSDRVERPETYRQWQVRNERAGLRQLPLDPDAVRAIRRKVKDKYHRDLFIDEDQQWLLQGWKGRVLYAMSAWAAK

SEQ ID NO: 241847 - protein, 39 aa, Zea mays
  Clone ID: MRT4577_152142C.1.pep
IYVCYYPSTSKTFVLPSWPSELVSRVAFNMVQVSPYHNG

SEQ ID NO: 241848 - protein, 240 aa, Zea mays
  Clone ID: MRT4577_152143C.1.pep
CATVRSYLHVVRVDQPPLRVERVPPLPARSLIFSDGDAGRSGDGRGAWRCPMYIESRYRLRSSSAHVVYGCMPMWRAPPPRTSSGWWLTAAASQARLAGGRSLPRGVLLAHPPISSSGPLFWRLSATSLARGVAVVVKTKSRRDGEPDRVSALIRWLFGSGLGASYGVRRPAGSITSSYMLAEGRPFYFFLPAKMPKGRQLIFCTESMAWCHGSLVVPSGNVPGDGEVTAVQKMSRTRLL

SEQ ID NO: 241849 - protein, 107 aa, Zea mays
  Clone ID: MRT4577_152144C.1.pep
TRFSKTEMRRMVEAAAACVRHSAAKRPRMVQVWRSLDVGECSSDLTSGVKLGQSMAYDSSRYSADIELFRRMAFANDLCTAELGVVDEDDHRYHNSSKASSSSRRYK

SEQ ID NO: 241850 - protein, 63 aa, Zea mays
  Clone ID: MRT4577_152145C.1.pep
APFVKECQGPRSGEHGRGGLNLCIPRPVRWKKPKASVFFIRYRSLSDKLQKKIVWNQFLTKWA

SEQ ID NO: 241851 - protein, 85 aa, Zea mays
  Clone ID: MRT4577_152146C.1.pep
QAHHPHPAERCHCSSKKKRARQGMLSRRTVRVPAAAAGSQPPHPHAPASSDIPADDYSWRKYGQKPIKGSPYPRGYYRCSSARAA

SEQ ID NO: 241852 - protein, 117 aa, Zea mays
  Clone ID: MRT4577_152147C.1.pep
MAPRIGQKTQKEETVVQLGPQVQEGENVFGVAHIYASFNDTFVHVTDLSGKETIVRVTGGMKVKADRDEASPYAAMLAAQDVAEKCKYCGITALHIRLRATGSTMTKTPRPRAQSAV

SEQ ID NO: 241853 - protein, 81 aa, Zea mays
  Clone ID: MRT4577_152148C.1.pep
VPPQFGEGIKMNNSTSPAVDWGDHPAGEMDSEDAAPSSSMGISIAIGSKMEVNANNRQPSPTPDTDLFNAFPDDFDYQNLD

SEQ ID NO: 241854 - protein, 96 aa, Zea mays
  Clone ID: MRT4577_152149C.1.pep
LPVSPPPRAPPQLPPCCYGVTFSTTTAATTASCSRDAMATTTSCSRDAMGEPKPGPAPHPATGPRLGRPEAGAIAGPGAGKPVEGRALLCGRNGTV

SEQ ID NO: 241855 - protein, 115 aa, Zea mays
  Clone ID: MRT4577_15214C.1.pep
WANQTAFNFFFANFYMFGLFLVGKPFFKGCTFFPLPFFLFRIFAAPFCFFTYMTGCPHWRVFPHFKWVCKPFWKTNFFELITRVGHFGAFSPFQKGFWLPSGFLYRKSVNWSPFW

SEQ ID NO: 241856 - protein, 113 aa, Zea mays
  Clone ID: MRT4577_152150C.1.pep
LTAGLYFVFLVRGLVFFVVSLYISSGFFFFFFFFFFFFLKSTTKERTSNQHVGWYGLQLHCNYDGASNKRVDRRPLHSKATKQTPLHHSTCNLEPNSELTYACMRRHSSSIVS

SEQ ID NO: 241857 - protein, 77 aa, Zea mays
  Clone ID: MRT4577_152151C.1.pep
DRGAKAQKVVKKRLSGPGFNPRDLARVFKNPQRVRGGFPRIGGWFSPKGEIHLAFISLFPLDKMPPQQKHCFVSWKR

SEQ ID NO: 241858 - protein, 238 aa, Zea mays
  Clone ID: MRT4577_152152C.1.pep
MAMATSTFSPRPASLRPLRAGGKPVGLLPFPRRLACATAAGEAPPVEQRDEAEPAPAAASNGAAVKSEAPPPPAPAPVPAFRDARWVNGTWDLAKFDKGSGVDWDAVIDAEARRRRWLEDYPEATNTDEAVVFDTSIIPWWAWMKRFHLPEAEKLNGRAAMVGFFMAYFVDSLTGAGLVDQMGNFFCKTLLFAAVAGVLLVRKNEDVESLKKLVDETTFYDRQWQATWQDDSAGGPNN

SEQ ID NO: 241859 - protein, 252 aa, Zea mays
  Clone ID: MRT4577_152153C.1.pep
MATSTFSPRPATLKPLRARAKPAGLQLHLLPFPRLRVACATAAGEAPPVEQRDEVEPASAAASNGTAVKVEAPAAKPESPPAPAPAPAPAPVPAFRDARWVNGTWDLTKFDKGGGVDWDAVIDAEARRRKWLEDYPEATSTDDAVVFDTSIIPWWAWMKRFHLPEAEKLNGRAAMVGFFMAYFVDSLTGVGLVDQMGNFFCKTLLFVAVAGVLLVRKNEDVESLKKLIDETTFYDRQWQATWQDDPTEGPKN

SEQ ID NO: 241860 - protein, 140 aa, Zea mays
  Clone ID: MRT4577_152154C.1.pep
VVMQTGDAELEMRGRCSAGQKFLASLIIRLALAETFCLNCGILALDEPTTNLDGPNAESLAAALLRIMEARKGQENFQLIVITHDERFAHLIGQRQLAEKYYRVSKDEKYLRVRWNTTACFCVVGAVGFASTFVRLSLNV

SEQ ID NO: 241861 - protein, 258 aa, Zea mays
  unsure (1)..(258): unsure at all Xaa locations
  Clone ID: MRT4577_152155C.1.pep
MAPAMRPLAAANVLSQVQQAGRRTFTTNRPSLIASRARWTPRPTQNQIVLRQSVRQQSTGSAPKPKRFRLLRWSYRLTQLSALAGLAYIGYGIYETRNPADQPPPDPNKKTLVVLGTGWGSVSLLKKLDTENYNVVVVSPRNYFLFTPLLPSCTVGTIEHRSIMEPIRNFLRHKKAQVKYYEAEATKIDYEKKVVYISDDSDTKGDVSKTEVPFDMLXXGVGAENATFGIPGVKEHGLFFEEVGDAQRIRNRIMDCCE

SEQ ID NO: 241862 - protein, 226 aa, Zea mays
  Clone ID: MRT4577_152156C.1.pep
QRRLRGQSNISKHKQELKLSQYKDIEKRYTNQFLQLKTTEMANKDLDRYYTALDKALMRFHSMKMEEINKIIKELWQQTYRGQDIDYISINSDSEGAGTRSYSYRVVMQTGDAELEMRGRCSAGQKVLASLIIRLALAETFCLNCGILALDEPTTNLDGPNAESLAAALLRIMEARKGQENFQLIVITHDERFAHLIGQRQLAEKYYRVSKDENQHSIIESQEIFD

SEQ ID NO: 241863 - protein, 118 aa, Zea mays
  Clone ID: MRT4577_152157C.1.pep
LKGPCMFYMGISLDGNRLCTGYLSAFYRNWIEIENVKNLLMNRHCSIYGHVALVWSKNQFHRSYNCKILPYSLLLDLVTNVQILRMTLLNSNFFHLNIFECNNYLIDKLTVNVISDSS

SEQ ID NO: 241864 - protein, 39 aa, Zea mays
  Clone ID: MRT4577_152158C.1.pep
LCRFHCRYFLIMLTHSSCHQYKRATFTINDAEIINLSLI

SEQ ID NO: 241865 - protein, 67 aa, Zea mays
  Clone ID: MRT4577_152159C.1.pep
NYYLMVSRDTLGANQLQHKCPSATICPVFFVYALVYRITYITLSQSPYAVGHSSGKPHRCSPHADRP

SEQ ID NO: 241866 - protein, 247 aa, Zea mays
  Clone ID: MRT4577_15215C.1.pep
LGTSRPAGVALACSPATRSAPLSSSSSRSSLERKKGERRREINPDTRNRRAKSNKARAADTISRSCSKRQAASQQAPPSRHRAAERGRTKGGNRLPACRGGLVGAASASCCSVPQPTPIYLAWNPALFFSTPRADPPPARRARRDPVEEVHTGGGGACTGTASVSSPCFRPKPGLTSSRACTASWWCGRSSRGRRRAGEAGARKRWPGRGSAMLWVARLSGFLSAAMVMVVLSSSLQSFPPAEAIPS

SEQ ID NO: 241867 - protein, 58 aa, Zea mays
  Clone ID: MRT4577_152160C.1.pep
AIVISVQDSQGAFSVEAQYARLVSQCQKANVTCDSANHTIRSSDRWIRASPLGIISLL

SEQ ID NO: 241868 - protein, 144 aa, Zea mays
  unsure (1)..(144): unsure at all Xaa locations
  Clone ID: MRT4577_152161C.1.pep
MSDSEEHHFESKAXDAGASKTYPQQAGTERKNGFIDIKNRGGKGKNVFTSKTGKHGHAKCHFVAIDIFNGKKLKDIXELNHTXDIPHENRTEXQLIDITEEGLESLLTSDGNTKDDLRLVAQIKEXFESGKDLGVTVQSAMGEE

SEQ ID NO: 241869 - protein, 94 aa, Zea mays
  unsure (1)..(94): unsure at all Xaa locations
  Clone ID: MRT4577_152162C.1.pep
IQDHAARLRFAXGHTRRRHYRSLVGAAEAAAAQRVKEKEAEASEAARGPADLEDRVARLRAEAAAWHAKDAADQSTAAALHAQLQKAAAAHARG

SEQ ID NO: 241870 - protein, 309 aa, Zea mays
  Clone ID: MRT4577_152163C.1.pep
MEISLEFDTDASVRPEDTWHHGANQQRGEFEASLEFDPDTSELAPDITEYTLKLKQSHERARKLRADLAVEEQREQELSRMLKGIVTDPNFTETHKKRPRRKSSIERLKVSRRLAEEAMNYFEECVSISTMDSTDFSSPEDPQPNSVVNVPPKSNSRFFHKGRSIFQEPHTLADQHGYHVESDKQTQCSISATGSDVSDSVIFSHTNGAGLKIRSVSSDDPDGFDTPRSRSSCFSFNHEPVKKLENCDVRQYLGNFGRGNNTELKQTRSSYFADDYASQKVDPDLLKDMVTFQNRIEYGGLVICNIRTF

SEQ ID NO: 241871 - protein, 241 aa, Zea mays
  unsure (1)..(241): unsure at all Xaa locations
  Clone ID: MRT4577_152164C.1.pep
VYPTYKSYPPNTKQSQSLKNCYLVVGNXRGCTQPFISIMLKRTXXEFGHYVRLATHVNFRTFVKSAGIDFYPLGGDPXRVMAQYMTKNKGFFLAAPTEIAIQRKQLKEIIFSLLPACTEPDLDTGTPFRAQAIIANPPAYGHLHIAEALGAPLHIFFTFPWTPTNEFPHPLARMPQSATYRLSYLILDLIVWWGSRGFINDFRKKLNLPPIAYFSTYHGSISHLPTGYMWSPHLCXKPKDW

SEQ ID NO: 241872 - protein, 157 aa, Zea mays
  unsure (1)..(157): unsure at all Xaa locations
  Clone ID: MRT4577_152165C.1.pep
PFTAGLQSHERARKLRADLAVEEQREQELSRMLKGIVTDPNFTETHKKRPRRKSSIERLKVSRRLAEEAMNYFEECVSISTMDSTDFSSPEDPQPNSVVNVPPKSNSRFFHKGRSIFQEPHTLADQHXYHVESDKQTQCSISATGSDVSDSVIFSHT

SEQ ID NO: 241873 - protein, 219 aa, Zea mays
  unsure (1)..(219): unsure at all Xaa locations
  Clone ID: MRT4577_152166C.1.pep
SWHHKNASFTFEAHEIKGGSDQSLNDLFSNREGTPKICKWTIKLSWYHIVFESRNLINSQVLANFIVAXTWSSPSRHPDSEKHWTIHYDGTXCYAGAGVTELITAPSGAKYRHVAQLSFALEIDKCTNNIAARQGQTTSRMKKAHQKREVHTSTTQLLLCIVPVDEDAAAGAEEERKARSSDVTMVSAGGSCDPGLRPPTAMMTPTKRGCRMGKLLVVD

SEQ ID NO: 241874 - protein, 125 aa, Zea mays
  Clone ID: MRT4577_152167C.1.pep
MASSLATAPAAVREMQSDLESQANALSKIQKDISKNHEVRKQFTIQVGENELVLKELELLNEGANVYKLIGPVLVKQDNAEAKANIKKRIEYITAELERMDRALKDLEEKQNSKKESIIKLQQKM

SEQ ID NO: 241875 - protein, 56 aa, Zea mays
  Clone ID: MRT4577_152168C.1.pep
SVFCAFVVAIGVCARIKEVRLIKMCKYGVGDGKDRGIIYIIRQGNVYNITWWFWAS

SEQ ID NO: 241876 - protein, 173 aa, Zea mays
  Clone ID: MRT4577_152169C.1.pep
QKSQEKAVAAASKSSLVSKKSKDDDDSDEDETDDSDSDDTDDSDEGEGLSPEEGDDDDSSDEDDTSDDEEEETPTPKKKPEAGKKRPAENSLTPLSDKKAKVATPSAQKTGGKKGAVHVATPHPAKGKTPANNDKSKEKSPKSGGSVPCKSCTKTFNSEMALQAHSKAKHGAK

SEQ ID NO: 241877 - protein, 78 aa, Zea mays
  Clone ID: MRT4577_15216C.1.pep
HMKVRVFRVPDCDTRITRNKYGFCKLLPEIPEQNSDFGYFGLRGFLSSPTKTEGALAGLDRSLNSVHGRVFYGFQVGY

SEQ ID NO: 241878 - protein, 69 aa, Zea mays
  Clone ID: MRT4577_152171C.1.pep
PFIKGGGSLQFKKKNRGGKPLRSFFNKTQNKIPHRCLKKKKIHPLEGPNRKKPSPSLPPCFSGPPGNNW

SEQ ID NO: 241879 - protein, 56 aa, Zea mays
  Clone ID: MRT4577_152172C.1.pep
VITAAAAAVAAHSASGVVGQRRSLSSPDCSRSRSRTRTRRERARRTARPRPARRTV

SEQ ID NO: 241880 - protein, 86 aa, Zea mays
  unsure (1)..(86): unsure at all Xaa locations
  Clone ID: MRT4577_152173C.1.pep
TXXXFXLGXPQRALPCGVASAXAPRCSARVRTACMAASPLPSARCRGVLLLRHGFFFLLLLFLRSFMSCXYPLANSYFGPWLAPDN

SEQ ID NO: 241881 - protein, 172 aa, Zea mays
  unsure (1)..(172): unsure at all Xaa locations
  Clone ID: MRT4577_152174C.1.pep
ESWYPRQVPSRISRSTQAFRWIGFKSGPLDHLWVPRNFCTWEGERKEKSGSLASNRFLKDLKALQKDPPTFCTPALVAKNFFYCQATILGPSNTPYPVGVFWAIINFPPTYHFKPPKVAFKTKVYHPIFTSTGTFCLDFLKDQXTPALTVPKALLSIGPLLTNPNPDNPLVP

SEQ ID NO: 241882 - protein, 82 aa, Zea mays
  Clone ID: MRT4577_152175C.1.pep
YTHITPTAPIYIYQFFSINTGTFNINDCIPHTKPILSISINIFNTSNTNKSHSILYYTYHHSINTLNYPTLIHTTTITNYIH

SEQ ID NO: 241883 - protein, 49 aa, Zea mays
  unsure (1)..(49): unsure at all Xaa locations
  Clone ID: MRT4577_152176C.1.pep
MFLQLTRIRDTSAAEARAGKDIQGIPWERIHIARADYRKSXVEQYKNYE

SEQ ID NO: 241884 - protein, 149 aa, Zea mays
  unsure (1)..(149): unsure at all Xaa locations
  Clone ID: MRT4577_152178C.1.pep
VASLCXFTTLLNTSLVEEPVTAFGDDLKARLATETLFTIANKYGHYIRTGWRNVLDCILRLHKLGLLPARVASDAADDSEVSAETVQGKPVPSSISTSHIPVMGTPRKSSGLMGRFSQLLSLDSEEPRSPPTEQQLAAHHRTLPTIQKC

SEQ ID NO: 241885 - protein, 61 aa, Zea mays
  Clone ID: MRT4577_152179C.1.pep
EIESKTGDMDTYCYSALWVATMSLHGCYVLKNSTEKKPRPLFYRNIKSTSPRKKMNFLKII

SEQ ID NO: 241886 - protein, 138 aa, Zea mays
  Clone ID: MRT4577_15217C.1.pep
RPEFAVSRRTSAQLPRIARGSPPHTPAASLLATRNSAVGTGAEGAREQRPSSVLAVVFAPISSVVRLVSDAHRSAAEEIFVPSDDGFFYDLESTYEEVKMFHILAMNFYMSPSANHVDSVAEILPGVVSIDEKMFVTL

SEQ ID NO: 241887 - protein, 70 aa, Zea mays
  unsure (1)..(70): unsure at all Xaa locations
  Clone ID: MRT4577_152180C.1.pep
LRYGSQAVMSSFQQQQQVPVVIQVGVALQLPLVCMAARVRQHVMAIRASGRMYIQIDSTAAGPAXPRAGR

SEQ ID NO: 241888 - protein, 79 aa, Zea mays
  Clone ID: MRT4577_152181C.1.pep
EGRVNIITPNHSPHHICPACIPSTTTINHTLNTPKPIINLPTHPSTATITFTTSQPSSSTTTTPPPTLFIIHTICTPSC

SEQ ID NO: 241889 - protein, 113 aa, Zea mays
  unsure (1)..(113): unsure at all Xaa locations
  Clone ID: MRT4577_152182C.1.pep
HVTQXSPFGNQNEIYDSGKNMNKLMAHPVLVEIGKKHGKTGAQVALAWGIAMGHSVIPKSKTESRIKANLEGDFELPSEDVEEIAKIDKKLRFNDPSANFGWNFYSDLDGKKK

SEQ ID NO: 241890 - protein, 80 aa, Zea mays
  unsure (1)..(80): unsure at all Xaa locations
  Clone ID: MRT4577_152183C.1.pep
PLSLVLPPVFPPVFRFSPPRFAPLPALMKAKSQXLKXVVPKAPGVALCSALGVFGGPDPPKRRAGVVFLSVAGLLAGFKN

SEQ ID NO: 241891 - protein, 115 aa, Zea mays
  unsure (1)..(115): unsure at all Xaa locations
  Clone ID: MRT4577_152184C.1.pep
EHHTSRNRVHWHLIGALQEKSPGVIGDRSEFNLWALSGAEEGVTVIRRVFKAVGEPQFFIGVRDWYEXPCARALPTSCLSAHGGWSRMIARSCASSSCSRREERVTFSSQIVHRC

SEQ ID NO: 241892 - protein, 190 aa, Zea mays
  unsure (1)..(190): unsure at all Xaa locations
  Clone ID: MRT4577_152185C.1.pep
MAVPEVESDGVVFPPXTAPPGSAVLALPRGGRRARSPDLSXYFIKITDIGVYLEDEAVTALGKKWXGRRADEVNSDDGFFRDDAXGDFXKFARWRMILPLTCXQYADKVTENCXTFWKAAGLYTDCEGASAXKITEVIKPXTFASGASIIFTHSAAGVLTDDFSSAPPGQRTSRPTIKNKRLLRGQSWSP

SEQ ID NO: 241893 - protein, 162 aa, Zea mays
  Clone ID: MRT4577_152186C.1.pep
MARCNLLVLVATAAFVSLALAVVRAEASGGIGFNLRHRFSPVVRQWMEARGHASAGSSWSLPEEAVPQGSPEYYSALLRHDDRALSARRRRGLANADGRQSTLTFADGNATHLDTYEYLHYAEVEVGTPSSKFLVELDTGSDLFWLTCECKQCANTVNASTD

SEQ ID NO: 241894 - protein, 51 aa, Zea mays
  Clone ID: MRT4577_152187C.1.pep
IMHDDKEDSSGINATASESAGSFKITTLGTSGNSKTESTKAVQEAWASAYG

SEQ ID NO: 241895 - protein, 57 aa, Zea mays
  Clone ID: MRT4577_152188C.1.pep
GLGECRCAGGWRHALFRLRAGARRLLGRDGRPLKAAAPQDFGYDSVSYKQNFDDGEA

SEQ ID NO: 241896 - protein, 107 aa, Zea mays
  unsure (1)..(107): unsure at all Xaa locations
  Clone ID: MRT4577_152189C.1.pep
QGKPEXTGGTKHFMAFEGGLRFCVGTDLSRVLMATFIHHLVTKYXPFVASDYSGISWYIYPSEYEEISXSVFCRPIXSWRTVKGGNVVRTPGLGFPDGFHIQLFPRN

SEQ ID NO: 241897 - protein, 116 aa, Zea mays
  unsure (1)..(116): unsure at all Xaa locations
  Clone ID: MRT4577_15218C.1.pep
PRTTSSPPPDHHLHHSLSHDTRKPLEPYLAAGGGGGSGTTRRSSHCSHTRHNSRTCPKRGDKIIGVHHTDGSAIRKSASMGNLSLLSAGSTSGXASPREEPEXSPTTAXGYASDHF

SEQ ID NO: 241898 - protein, 98 aa, Zea mays
  Clone ID: MRT4577_152190C.1.pep
LWVGFFGKPVLPKTGMVITRYSDEVPKLNPQFFGLLDYSATNHADMPPDDLPLCHASVSCGYATNLSSSPVSFRLRLVALVATRRDNRDFLIQQYRLI

SEQ ID NO: 241899 - protein, 28 aa, Zea mays
  Clone ID: MRT4577_152191C.1.pep
PPLKKNSCAEHLCILINVYESLDAINFS

SEQ ID NO: 241900 - protein, 85 aa, Zea mays
  Clone ID: MRT4577_152192C.1.pep
RVKGRGKVFFWVPRQPLCAPGRHLLSTIPPTSWFYLGSNKGEGTHCTDKTIRFRTNRRESRTERITCDSDDAQSPEESPATATEG

SEQ ID NO: 241901 - protein, 269 aa, Zea mays
  unsure (1)..(269): unsure at all Xaa locations
  Clone ID: MRT4577_152193C.1.pep
GRLRFRSGIPGSTHASENHPLFKIINHSFIDLPAPSNISSXXNFGSLLGVCLIVQIITGLFLAIHYTSDTITAFSSVTHICRDVNYGXLIRYIHANGASIFFICLFLHVGRGLYYGSYTFIETXNIGVLLLFAVIATAFIGYVLPXGQISFXGATVITNLLSAIPYIGTTLVEXLXGGFSVDKATLTRFFAFHFILPFIIAALAIVHLLFLHETGSNNPTGLNSDADKIPFHPYYXIKDILGILIIFLILITLVLFFPDILGDPDXYIP

SEQ ID NO: 241902 - protein, 160 aa, Zea mays
  unsure (1)..(160): unsure at all Xaa locations
  Clone ID: MRT4577_152194C.1.pep
DGSLSDVEYRXFAGXGLSWAXTDDDSLHNVFSTYGEALXPQSILDRXTQRLGGFGFVTFSTEXEAMQNDIEEMNGKDLDXRNITINEVQFRNCAVRGXGARYGGGRARAWYSAGASSDAGGESWVGAAYRAGRSCGGAAGGYDPVHRDAGYANSRGNWWN

SEQ ID NO: 241903 - protein, 151 aa, Zea mays
  Clone ID: MRT4577_152195C.1.pep
MAGQNLRLFVEPTVAMVGVVEGRLGRATRGHAVLNKKCRRADGTSSAPSSRVSSAPKSPWARRCAPPPSPSTRPGTSLVDGVRLVILLCGRAASDRVLLRMRRTWPAYKLPKVTHFSRCRRGLLRPLPRMTESHRSGPQTDSTMASAAPHT

SEQ ID NO: 241904 - protein, 57 aa, Zea mays
  Clone ID: MRT4577_152196C.1.pep
FLYELHISKTALWGCSIQIGQEILSHSICRAVCGVTVDLLLFLLVILKPTVLNSLNS

SEQ ID NO: 241905 - protein, 137 aa, Zea mays
  unsure (1)..(137): unsure at all Xaa locations
  Clone ID: MRT4577_152197C.1.pep
THACHHDIIATVSILHANTDXMKPGILFTRLPYYLTTDVQSSXIHHDAIQYSLPPDNFSFNLXKLSLKDLNRYYTTSNSKHYPTKDTSSLNSNVIIINYNRHIGNYYPTDINLHTLHITYKHTNLITNIYYPYPNDL

SEQ ID NO: 241906 - protein, 172 aa, Zea mays
  unsure (1)..(172): unsure at all Xaa locations
  Clone ID: MRT4577_152198C.1.pep
MAAVQPRVAPRRHPPPPPPLRPLPAAPPAARPQLPCKRSRADAAVAHCKKERVAESCCLSRPDQVELVLVDDDSGEEDDGCGSCVDGAGGGQAEEEDEEEEGSGGVAAAWWSEXAAAAVPSGRAGGEXDEEGGRQLRADDSESDDEDPAAAAARRQEEDRKFWEACLASGYP

SEQ ID NO: 241907 - protein, 234 aa, Zea mays
  unsure (1)..(234): unsure at all Xaa locations
  Clone ID: MRT4577_152199C.1.pep
RIHHCRNPEPELYYAQTLWHGRNYRADRSIRRRCTLHCTSKATPARRRPRSPRRCRTGRSRWRRXHGRGLLDGXVSSRSSPCARRTRSASPGTPGCRTPPRPCRXKVSWPGPRRRLHRPXTPSRRPPSPPRRMSRRSSNSNPPAWRQRLPSQCRQPAARRRAAPGAPASPPTAPSPCWXPRQRPAPRPLPQRRPGLDSLGGLHTPSSPVRGPPRPVARDGRDLERWWRRCEGDW

SEQ ID NO: 241908 - protein, 84 aa, Zea mays
  unsure (1)..(84): unsure at all Xaa locations
  Clone ID: MRT4577_15219C.1.pep
MPNGAETLFQYNANNDAAWKVLSDYLFPEIQXHGRINLANSLSIEPTNIVTTILIDGDSIPYTNATNKYYFAVSQDATFIKVTL

SEQ ID NO: 241909 - protein, 227 aa, Zea mays
  Clone ID: MRT4577_1521C.1.pep
MAARRSTSPARHGVLPALLLILCSSLPSLAAAYRPGDIVPMLRSGQYHGSRSVWFDVVGRHCPAFAVNREVLMPIPKPTGFTGADPYKITFQIGHEKFHVPWLYVINRKTSEVPLIDFHLKYSGNDILGVTAKVVDMPHHYVEVHPDIKKNFWDPQNWPKYVLVRYTWEEQSEIDVTGGFYVLFGSGLVLSFILAIYVLQSSQEKLTRFVREAVADSSLPDGVAKVE

SEQ ID NO: 241910 - protein, 59 aa, Zea mays
  Clone ID: MRT4577_152200C.1.pep
SYTLGVATLLEVSRRSAYGELDAPLHGARDRLFFGPTPSPHLDNVYLTTFAPRVRPRVR

SEQ ID NO: 241911 - protein, 72 aa, Zea mays
  Clone ID: MRT4577_152201C.1.pep
HDSWILFVCAVPCRGEVAFCSQECREKQIEYDDLDERMEQTCSVTSMKEAPSVSGASGSDQSGSGGETVAAA

SEQ ID NO: 241912 - protein, 83 aa, Zea mays
  unsure (1)..(83): unsure at all Xaa locations
  Clone ID: MRT4577_152202C.1.pep
FSDGLFMAVAAAPGVSAXRAQGVWSIITRPMFQSMLSHRGDSGCQGAFYTSDSPIEAAXXFPASDTATRERSRTRASWQRPRN

SEQ ID NO: 241913 - protein, 53 aa, Zea mays
  Clone ID: MRT4577_152203C.1.pep
VTCCSLTLPASKACTGPRHSRTSDMNSFLALAFISTWITAHTRTSSHVSKLLP

SEQ ID NO: 241914 - protein, 43 aa, Zea mays
  Clone ID: MRT4577_152204C.1.pep
RCSLKLIAFELLLFCSSLYFYFVFNKNIQYGSVPNFPGIPIFP

SEQ ID NO: 241915 - protein, 59 aa, Zea mays
  Clone ID: MRT4577_152205C.1.pep
IRHKYSVTDGHKTFKHHKQKCGLNKDEETRSAKHYTEDRNTEVVFNINHTSHSSKANCP

SEQ ID NO: 241916 - protein, 98 aa, Zea mays
  Clone ID: MRT4577_152206C.1.pep
KGKPTGFFFRNKRAATFPPTEGPSQLSPKTPKQEKKKKRDQSFWKPKSHNVQKTTKNANWGETNRNAGKGFPARGYFFFFFPPLIKGKRNLACQGPGL

SEQ ID NO: 241917 - protein, 101 aa, Zea mays
  unsure (1)..(101): unsure at all Xaa locations
  Clone ID: MRT4577_152207C.1.pep
MRIPAHTTARARAPRSFLFFRXPXPAPLPSLPSPSLTPCPTLPITLPIPISTSTTPPQTIPTPPSADPPPASLPTQPLPSPTPIPPLAQTTTIPNPAPSDY

SEQ ID NO: 241918 - protein, 82 aa, Zea mays
  Clone ID: MRT4577_152208C.1.pep
GSKTELHTFFRALYHRSYTSTCIHTRIHTIDSVPTPIRASHERIHSYTRTKWGAPDITLTRKRSKRGGPTTPEVQTPEEGGL

SEQ ID NO: 241919 - protein, 58 aa, Zea mays
  Clone ID: MRT4577_152209C.1.pep
ICASLRLSHSHPVKVQGACSSEPELTSSPGGRRLGAATKGGSRLASPDACLCGGDGGG

SEQ ID NO: 241920 - protein, 80 aa, Zea mays
  Clone ID: MRT4577_15220C.1.pep
LSGSCCIRREWPRYDSSRESLITCSISRWWRSSSRLAVAHGRAVRLPFEKCVASASHLSPAASAISSSRTSPSRLQVIRF

SEQ ID NO: 241921 - protein, 45 aa, Zea mays
  Clone ID: MRT4577_152210C.1.pep
AVHQCHTLSNHLRNCKEIEVLVKQQDSFRLIIIWLTHQCFIAFLN

SEQ ID NO: 241922 - protein, 102 aa, Zea mays
  Clone ID: MRT4577_152211C.1.pep
QTIRCKPPFWSNHQNPLKHIHRSFQSFEMTHIHSASIDVYIDAKANIQNLFLKIDMKITNFRSVCARRQSQELCLLVFSYEFLYIEFAPQFLQQCTSIHVFI

SEQ ID NO: 241923 - protein, 151 aa, Zea mays
  Clone ID: MRT4577_152212C.1.pep
KPPKKPLLGTKTPKPTKRGPPPRGGGGKNPGGLAKPGGPKGPNGGRGKRGPPLAPGGGKNGNKGGGAKKAGGPTEPTGQKGKKGGGGDPPRGPPRRGNPRPRGAVLRGPELGPKRGENRAKSGSRGERVPAPNSPQKRSGKQKGKTRGGPR

SEQ ID NO: 241924 - protein, 145 aa, Zea mays
  unsure (1)..(145): unsure at all Xaa locations
  Clone ID: MRT4577_152213C.1.pep
TSQCKTHELSGLKKKAXGFPRQHRTXGQGSTQGSPHSLSKHLFKRSASRADGHPVGDAGRIWPPPSRRCGLLVRPVCSDTGWVDWGFRQPRPFPAGSWRKAGRAPTRARMRCGVGVASPAVAAWPSPEPRGGFSLRGWTSLKGKG

SEQ ID NO: 241925 - protein, 70 aa, Zea mays
  Clone ID: MRT4577_152214C.1.pep
KYNFVRKLVYELDQFLPEVAIIIGKFINQISTLKHFPKFLSQKTTQNSLKNSGEETKTTQERNPLYFDMS

SEQ ID NO: 241926 - protein, 73 aa, Zea mays
  Clone ID: MRT4577_152215C.1.pep
QYIFFTFYFIILLTFFGSRLILLLIHSFTNYYNHIHYYLTNSHFLHYSTLINIYHTHHHIFPSFYYHIILYII

SEQ ID NO: 241927 - protein, 214 aa, Zea mays
  unsure (1)..(214): unsure at all Xaa locations
  Clone ID: MRT4577_152216C.1.pep
YANPQDDGILVIPTALGCPPKLNAKLLTSEIYNSQTLRLLSLASMSGCCQVSIPLGTHDKCPISVSFIAKHGGDRFLLDTTQTMYTTIQEQVEILAKSSVSSKQAMNEEAAEASGVXGNAAFKEKQWQKAVNYYTEAIKLNGKLATYYSNRAAAFLELTSYRQAEADCTSAVDLDPKSVKAYLRRGTAREMLGYYKEVVDDFNHALVLDVRLPV

SEQ ID NO: 241928 - protein, 188 aa, Zea mays
  Clone ID: MRT4577_152217C.1.pep
MEDSNMSNCIHVSDNLVFADEGIADRVHGNEETADGAGENEQSLMENENVNVAVAAEFIAKRIHENELGRDQRALEDGSAQLYEGVITPFSARYVESEQSFQQDEPIPDATEEKEDDFMEDGNMANCIQESMAAVARFSSLPNKRNQSKLASFNKNKEQMTYRSRGSQLRQGRALDSEDFGSIQNFMG

SEQ ID NO: 241929 - protein, 76 aa, Zea mays
  Clone ID: MRT4577_152218C.1.pep
TFGLIYVLVYVLGIIWRKRVGRRLRLTWLNLVSLLSLRLLSSSTKLLRRGSRPLMLSTLLLMRIWRFVILVERSFV

SEQ ID NO: 241930 - protein, 47 aa, Zea mays
  Clone ID: MRT4577_152219C.1.pep
HGIRSFQGDRSPAAGRIRGAERRLDLFSGSFRTVNKSSLAFGWDQLE

SEQ ID NO: 241931 - protein, 109 aa, Zea mays
  Clone ID: MRT4577_15221C.1.pep
NYTCTCGAKRAPQSRRSWATTPFPELDSFPAFQDPAIIITVPKKEQVDGFSPKNGNLFVGLSFGDIQGMYNGLDILPPPGEEFYSSLFGSPRVKGNQPPGTPGLGQFLA

SEQ ID NO: 241932 - protein, 147 aa, Zea mays
  unsure (1)..(147): unsure at all Xaa locations
  Clone ID: MRT4577_152220C.1.pep
PGPPSFAAPAPARAVVSKRSFTVRASLXKATGTGGAAMAASALLAGGAMASEVLLGARDGGLVFEPSQFTVKAGDTITFKNNAGFPHNDFFHKDQVPSGVDSTNISHEEYLNAPCETYSVTLTVPGTYRLYCEPNXRAGMVSKITGK

SEQ ID NO: 241933 - protein, 659 aa, Zea mays
  Clone ID: MRT4577_152221C.1.pep
MVKVEDQAEDGGADADARGLRESALDPLPVSVHASLKEEEGQPSSSSGKLRSQFIGMGFSSKLVDKVLQRHGDDDSNTILESLLSYSDLQQSGSESSDSFGSFFDNDNEENNSPSESRKGIYQDIKPELDSFSEKWSFLLRTMNFSQQEVDLAFKQLGDEAPLEQLVDFIVSAQSGVPSGGLQTGDATNEGKTELLYGVMEKTLSLLQMGFTEEEVSSAIDNFDQRATVQELADSILARRIANSIEQKEIKVESDFLDEAETDYSSYQPSYSDVSYYDDDNNNTRVKRAKHIFIDDIGASSSHLGDPWSMGQRAGTNDMSVKVELEAMTPGRRANVQGDLAKPPFFLYGNVVEVPKDTWHQLKQFLYNVEPEFVNSQSFSALTRREGYIHNLPVEKRSVVVPKSPMTIEEALPFTRQWWPSWDTRKHISVITTEAAGIEQTCERLGGMVRESRGVLSQARQMQIIHQCRVSNLIWVGRDRLGPLEPRQVEKILGYPYNHTNLFELNQPDRLAAMKYAFQTDTLSYLLSVLKGKYQDGIRVLSIYSGIGGAEVALHRLGIPLKCVISVEESEVNRKILRRWWLKTEQTGVLRQHAGIWKLKTHVIEDLVKEFGGFDLIIGGNYTSCKGGTTVNTTMGMDSNRFYEYNRVVKRVRTAVGLS

SEQ ID NO: 241934 - protein, 69 aa, Zea mays
  Clone ID: MRT4577_152222C.1.pep
SWRSGIRPDQDLHGLCRGPSRPPGVCVQKTRMDHASCSLARYDNIWQLLRALGDIAGHSYLLYYLSIQG

SEQ ID NO: 241935 - protein, 161 aa, Zea mays
  Clone ID: MRT4577_152223C.1.pep
RCLPHVDGPAFVRVGAHYITRHAQPLALATHCACGPMGAQGEPRGARRRASFPSVSIGSLHGEAYSGRPPFPLGCFAPHALLVTSEFALCARWEWALAGQIAHRRPCVPARDSSYASYVGTATVYARPPAAQARAAGSRARLSASMVTLDHQLHRCVLCIE

SEQ ID NO: 241936 - protein, 60 aa, Zea mays
  Clone ID: MRT4577_152224C.1.pep
MAATLKLRILIVAAAVAASLVGTASAAEGPAPAPTSAAASMAAPAVAAASFTALVFGYLF

SEQ ID NO: 241937 - protein, 59 aa, Zea mays
  Clone ID: MRT4577_152225C.1.pep
MAATLKLRILIVAAAVAASLVGTASAAEGPAPAPTSAASMAAPAVAAASFTALVFGYLF

SEQ ID NO: 241938 - protein, 85 aa, Zea mays
  Clone ID: MRT4577_152226C.1.pep
FGVPPGFPPPARCITTARGFHLGPPKKKQYSRNPAGVNLDPLNGPPPPYLNFCLFNTRPPFFFFFFFSFFLFFFFFFHCLYRREK

SEQ ID NO: 241939 - protein, 61 aa, Zea mays
  Clone ID: MRT4577_152227C.1.pep
LLVTLIQLNPDYRTVFHVSVPRWSKWLSSLCWQWCAILLGELESYRAEFAVGSRSKLWPGG

SEQ ID NO: 241940 - protein, 146 aa, Zea mays
  unsure (1)..(146): unsure at all Xaa locations
  Clone ID: MRT4577_152228C.1.pep
IFINKAGANPGENPGKSGRGGEREPPSQKGRRKKARQKKGKRGAQRKNXPHKNAKKKKTRKKKKKSPGGXKKKKPKQMGKPQRPIFKKKKLRRHRKKKNRQPPGKSGFGKKPKGGLTLHKEKGQKGFALHPPALKKNETSGPTWFA

SEQ ID NO: 241941 - protein, 50 aa, Zea mays
  unsure (1)..(50): unsure at all Xaa locations
  Clone ID: MRT4577_152229C.1.pep
GQVISAAYLMATVLKSXSAHFSFVVFVVYDLYLILSPPNTWGGGEKNFFF

SEQ ID NO: 241942 - protein, 80 aa, Zea mays
  Clone ID: MRT4577_15222C.1.pep
WRGRTNDHLFPSPDLTGASGFEISGGGGFLGGGDQLIQVWDATPDSLVFERPLGRHRAKPLGRGHPHRPPIARRAQLVAG

SEQ ID NO: 241943 - protein, 93 aa, Zea mays
  Clone ID: MRT4577_152230C.1.pep
FGLIYVLGRPDATHVVRAGTFQPRQTRAAAGPTRRGPTNRIRPRPVHTRGRTRASTPSRLSPRSPNAAEPTQKPSYTTLHSQRPGYYGPIRNA

SEQ ID NO: 241944 - protein, 122 aa, Zea mays
  Clone ID: MRT4577_152231C.1.pep
MSGALDVLQMKEEDVLKFLAAGTHLGGTNLDFQMEQYIYKRKSDGIYIINLKRTWEKLLLAARAIVAIENPADVSVISSRNTGQRAVLKFAAATGATPIAGRFTPGTFTNQIQAAFREPRLL

SEQ ID NO: 241945 - protein, 610 aa, Zea mays
  Clone ID: MRT4577_152232C.1.pep
GGNFPASSNGVLYSGKRIIGECDATRISAYKTRSSISLKDGDDDPYSGNQSLASERKPRRGRPPGSGRDGSNGKLKRPKPTYKNFVAGKELVFLSSTSDPRDIVESVHMTFEALRRRHLQMDETQDASRRADLKAGAIMMASNIRANSGKRVGTVPGVEIGDIFYFRMELCVIGLHAPSMGGIDYMTTKFGKDEDSVAICIVSAGGYENEDDDTDVLVYSGQGGNNRNTEERHDQKLERGNLALERSLHRKNEIRVVRGFKDPFCLTGKIYIYDGLKIHESWKERTKYGVNVLLQVLLREPGQRDGAALWKMVTRRWDNPATRGRVLLADLSSKAEILPVCLVNEVDHEKGPVHFTYTNQVKYLRPLSSMKKLQGCGCQSVCLPGDASCACGQHNGGDLPFSSSGLLSCRKPIVYECGESCNCSTNCRNRVTQKGSRLHFEVFRTTNRGWGLRCWEPIRAGSFICEYAGEVIDELKFNLNDSEDDYIFQTVCPGEKTLKWNYGPELIGEVSTYVSPDEFEPLPVKISAKNMGNVSRFMNHSCSPNVFWQPVQYDHGDDGHPHIMFFALKHIPPMTELTYDYGVAGAESSGSGSRRTKNCVCGSQNCRGLF

SEQ ID NO: 241946 - protein, 86 aa, Zea mays
  unsure (1)..(86): unsure at all Xaa locations
  Clone ID: MRT4577_152233C.1.pep
EDERRLALPFISHSPRGQGQISNTPAAANAENVSFFFLSAALEGAGRGEERWLVDPRMGGGTKGIFSXQLNRLVLLXWWEFLLLIC

SEQ ID NO: 241947 - protein, 260 aa, Zea mays
  unsure (1)..(260): unsure at all Xaa locations
  Clone ID: MRT4577_152234C.1.pep
MYRASNFIPDPNQVLLDANPLRSLAPMFPAPMGVNVNQSSTPPLVCVTPVGQFPTGFGAGNLPAFGSFTTFSATTNGVSYTGTSGNGAIDATPISAYKTRSSISLDDDDDEPYSGNQGLASERKARRGRPPGSGRDGSNGKLKRPKPTYKNFVAGKELVFLSSTSNPREIVESVHMTFEALRRRHLQMDETQXXASRRADXLKAGAIMMASNIRAXSGKRVGTVPGVEIGDIFYFKMELGIIXLHAPXSMGGIDYMTTKF

SEQ ID NO: 241948 - protein, 511 aa, Zea mays
  unsure (1)..(511): unsure at all Xaa locations
  Clone ID: MRT4577_152235C.1.pep
MYRASXFIPDPNQVLLDAKPLRSLAPMFPAPMGVNVNQSSTPPLVCVTPVGQFSAGFGAGNLPAFGSFTTFSATSNGVSYAGIDYMTSKFGNDEDSVAICIVSAGGYENDDDDTDVLVYSGQGGNSRNTEERHDQKLERGNLALERSLHRKNGIRVVRGFKDPAMVAGKIYIYDGLYKIQESWTERTKFGVNCFKYRLQREPGQRDGAAIWKMTQRWIDDPATRGRVILADLSSEAESIPVCLVNEVDHEKGPGQFTYTNQVKYVRPLSSMTPLQGCGCQSVCLPGDASCACGQHNGGDLPYSSLGLLSCRKPMIYECGESCNCSTNCRNRVTQKGPRLHFEVFRTTNRGWGLRCWEPVRAGSFICEYAGEVIDELKVNLNDTEDDYIFQTVCPGEKTLKWNCGPELLGEASTYVSADEFEPLPIKISAKNMGNVSRFMNHSCSPNVFWQPVQYDHGDDGHPHIMFFALKHIPPMTELTYDYGVAGAESSGSGSRRTKNCMCGSQNCRGLF

SEQ ID NO: 241949 - protein, 83 aa, Zea mays
  Clone ID: MRT4577_152236C.1.pep
RQKVIQQGRGFFLCGPTKNHPRFSFYWFLSRTPWGKPAMPTRCLEGHLFSLLGVDFGLGVNKANHDTRAKLLFGYNCPQNPPR

SEQ ID NO: 241950 - protein, 70 aa, Zea mays
  Clone ID: MRT4577_152237C.1.pep
EHIFKAKCSPLFILQHGCHFQTETLCRWYLNRDPNKRGGKGPLLVAKKEKKSKIHAPLCFKKKTLKTLQP

SEQ ID NO: 241951 - protein, 97 aa, Zea mays
  Clone ID: MRT4577_152238C.1.pep
YHLSSVLLGWGHMVALELVEALCTAYNREQVGCLQAHLVMEGATHLQVLVSGARTLKVECLLLVQVAGLLLCIPTCHLISKVFIYTAKKKKKKPTRP

SEQ ID NO: 241952 - protein, 79 aa, Zea mays
  Clone ID: MRT4577_152239C.1.pep
PGLFFFFFFFFFFLGGGGERGEDYHYHISYYWAIKTRATRWNGPSYLHMTQKGGVARELRTSILPPYAGGGGGQQSQGC

SEQ ID NO: 241953 - protein, 52 aa, Zea mays
  unsure (1)..(52): unsure at all Xaa locations
  Clone ID: MRT4577_15223C.1.pep
TTKYNRGGDXRPTIKFLLXNVPKVILSSHLGRSKGGTPKYSLKPLAPRLSEL

SEQ ID NO: 241954 - protein, 69 aa, Zea mays
  Clone ID: MRT4577_152240C.1.pep
KWSKLGLPPQGNFFLTPLKCPIGSLQVFAPHASPCGFFEIEWSPEKYPTPPPQKLVFYICFMNLIFFPP

SEQ ID NO: 241955 - protein, 31 aa, Zea mays
  Clone ID: MRT4577_152241C.1.pep
LGRKCRPYSYLMRLWSLLCLVNIQGKTFLPG

SEQ ID NO: 241956 - protein, 130 aa, Zea mays
  Clone ID: MRT4577_152242C.1.pep
MGTLIVLNDALKSMHNAEKIGKRQAMIRPASKVIIKFLTVMQRHGYIAEFEHVDDHRAGKIVEELNGTLNKCGVITPRFDASVKDIDGCTAMLLPSRQVGYIALTTSAGIMHHDEARRNNVGVKDLSIFY

SEQ ID NO: 241957 - protein, 39 aa, Zea mays
  unsure (1)..(39): unsure at all Xaa locations
  Clone ID: MRT4577_152243C.1.pep
ALSAAGGLGRHFVYDYVXALEDVEVEERADRQSDRVKAP

SEQ ID NO: 241958 - protein, 38 aa, Zea mays
  unsure (1)..(38): unsure at all Xaa locations
  Clone ID: MRT4577_152244C.1.pep
XSDWXTLLPHFDDFEDLEIRKMQAAATAVRVHGRDSRQ

SEQ ID NO: 241959 - protein, 242 aa, Zea mays
  Clone ID: MRT4577_152245C.1.pep
SPTPNLQSTHPLLIHSAVATAARPLRLVASRSARAIRLVARAGGVDDLPLVGNKAPDFEAEAVFDQEFINVKLSDYIGKKYVVLFFYPLDFTFVCPTEITAFSDRYEEFEKLNTEVLGVSIDSVFSHLAWVQTDRKSGGLGDLKYPLISDVTKSISKAFGVLIPDQGIALRGLFIIDKEGVIQHSTINNLAIGRSVDETMRTLQAWRYVQENPDEVCPAGWKPGERSMKPDPKGSKEYFAAV

SEQ ID NO: 241960 - protein, 108 aa, Zea mays
  Clone ID: MRT4577_152246C.1.pep
LPGVSFLFPPHMCAFFLISCNCHPVVTCFEFRSFLLVLFTMKRSLVLVLLHGLMVLFNFPPSNLFAAWVSPPRFLSRVFCRCRSAPPSFLRSSPHVCPFVAWTVLCNP

SEQ ID NO: 241961 - protein, 64 aa, Zea mays
  unsure (1)..(64): unsure at all Xaa locations
  Clone ID: MRT4577_152247C.1.pep
MACTNKAXMRTLGLLVVFCIVHRENEESNGIDAKAYGPAGYFYITSLGTFGTGKTHSTNAEHEV

SEQ ID NO: 241962 - protein, 259 aa, Zea mays
  unsure (1)..(259): unsure at all Xaa locations
  Clone ID: MRT4577_152248C.1.pep
MACSFAAATVVSSAPTPAARPLAAAPQSVXFPAPRXTAARPLRLVASRSARAIRLVARAGGVDDLPLVGNKAPDFEAEAVFDQEFINVKLSDYIGKKYVVLFFYPLDFTFVCPTEITAFSDRYEEFEKLNTEVLGVSIDSVFSHLAWVQTDRKSGGLGDLKYPLISDVTKSISKAFGVLIPDQGIALRGLFIIDKEGVIQHSTINNLAIGRSVDETMRTLQALQYVQENPDEVCPAGWKPGERSMKPDPKGSKEYFAAV

SEQ ID NO: 241963 - protein, 259 aa, Zea mays
  unsure (1)..(259): unsure at all Xaa locations
  Clone ID: MRT4577_152249C.1.pep
MACSFAAATVVSSAPTPAARPLAAAPQSVXFPAPRXTAARPLRLVASRSARAIRLVARAGGVDDLPLVGNKAPDFEAEAVFDQEFINVKLSDYIGKKYVVLFFYPLDFTFVCPTEITAFSDRYEEFEKVNTEVLGVSIDSVFSHLAWVQTEQKSGGLTLVKYRVVSDVTKSISKAFGVLIPDXGIALRGLFIIDKEGVIQHSTINNLAIGRSVDETMRTLQALQYVQENPDEVCPAGWKPGERSMKPDPKGSKEYFAAI

SEQ ID NO: 241964 - protein, 29 aa, Zea mays
  Clone ID: MRT4577_15224C.1.pep
LGLIYFKRPAFVQKNVGTCYEKTCVKLYR

SEQ ID NO: 241965 - protein, 260 aa, Zea mays
  Clone ID: MRT4577_152250C.1.pep
MACSFSAAITVSSAPTPAARPLAAATQSVCIARSAVATTARPLRLAASRSARATRLVARASVVDDLPLVGNKAPDFEAEAVFDQEFINVKLSDYIGKKYVILFFYPLDFTFVCPTEITAFSDRYEEFEKLNTEVLGVSIDSVFSHLAWVQTDRKSGGLGDLKYPLVSDVTKSISKAFGVLIPDQGIALRGLFIIDKEGVIQHSTINNLAIGRSVDETMRTLQALQYVQENPDEVCPAGWKPGERSMKPDPKGSKEYFAAI

SEQ ID NO: 241966 - protein, 50 aa, Zea mays
  Clone ID: MRT4577_152251C.1.pep
AYPQFFFLQPTDTWGLVLLQGNNYYHLPSIRVSPPTYLTQPHLFALYQHS

SEQ ID NO: 241967 - protein, 43 aa, Zea mays
  Clone ID: MRT4577_152252C.1.pep
KPEPKKDDATTAAPKAAPAPAAAPAAAREPARAKDAAFDASKI

SEQ ID NO: 241968 - protein, 127 aa, Zea mays
  Clone ID: MRT4577_152253C.1.pep
SIRSFCVCHRGHHFLQFGPYRGNAPSYVGPAQKRALGLGGSLVPDLRSKGQSLNVGLTHPKKGGGYFQVARLKAFQPSIYFFFRCSIEILLWKICLCSGRFGSIVVNFPSVTPQDIVSIVHILNVCG

SEQ ID NO: 241969 - protein, 56 aa, Zea mays
  Clone ID: MRT4577_152254C.1.pep
GRHFFFFFFFFFSSRQIISLTNIQQCIGFHKPLGDYGPTGDCTPLSSPTLPMGGGG

SEQ ID NO: 241970 - protein, 305 aa, Zea mays
  Clone ID: MRT4577_152255C.1.pep
ISNLEMELASAKATQESMLHGGAGAPVPEPTGKRKHFMVVGVNTAFSSRKRRDSVRATWMPQGEKRRKMEEEKGIVIRFVIGHSATPGGILDRAIDAEDRKHEDFMRLEHVEGYLELAAKTKAYFVAAVSTWDAEYYVKVDDDVHVNIATLGNTLARHRSKPRAYVGCMKSGPVLAQKGVRYHEPEYWKFGEWGNRYFRHASGQLYAISKDLASYIALNQHVLHKYANEDVSLGSWFIGLDVEHVDDRRLCCGTPPDCEWKAQAGNACVASFDWSCSGICKSADRIKEVHQRCGESENAIWNAEF

SEQ ID NO: 241971 - protein, 50 aa, Zea mays
  Clone ID: MRT4577_152256C.1.pep
LTGLTTMSKTKARNKVFSMIGGVSIRPSSRPHVLIFITTGPDHIDLPSCH

SEQ ID NO: 241972 - protein, 607 aa, Zea mays
  unsure (1)..(607): unsure at all Xaa locations
  Clone ID: MRT4577_152257C.1.pep
MLGRAAALSAPRWRGGVPDLRAALRSGGNLLFALFVAAVLAFTLLAAFHSPDDPLLHPSSHQLTDFLTSATSTSTFLTDDSVLRTGEDFNSSSTGAAGEVAAGGVEVVAEAVPFIKLSEVGAEAEKTEPETERAVTVDTDAATGEGAAVAEETAVAEAVSCDTEAPVDCTGDRELFNLLMRAAIERFPDLHFYRFGRPVAVPGSPMECDLAWRFRPAADAIGTGRTTYYKDYRRFTLTRDVNTCSLVVDTVGEYHSGVGASWTRTRGRNEAAGAEEDAPVTDFVPVKTQIRLDENTARYQXGKYLIYIGGGERCKTMNHFMWVLLCALGEAQFLNRTLVMDLNVCLNARYTSSGKDEERDFRLYFDFEHLKQSASVIDQSQFWQDWGQWHKKDRLKNFYTEDIRMTPMKLRDIKDTLIMRKFGNVEPDNYWSRVCEGETEGIIKRPWHFLWKSRRLMEIVSAIASRMNWDFDSVHVVRGEKAQNTQLWPNLDRDTSPDSLLMALNDKVGAGRYLYIATNEPDKSFFNPLKEKYKTHFLDDFKYLWDENSEWFTETKELSNGQPVEFDGYMRIAVDTEVFLRGKRHVETFNELTRDCKDGVNTCSASS

SEQ ID NO: 241973 - protein, 35 aa, Zea mays
  Clone ID: MRT4577_15225C.1.pep
MSSVFSGDETAPFFGFLGAAAALVFSCMSALYGTC

SEQ ID NO: 241974 - protein, 124 aa, Zea mays
  Clone ID: MRT4577_152262C.1.pep
YCAVLFSWHLWPLKIHGHVQYQYMILHSSKKIKIKTKKKKKKKKKKKKQVIKKRYKRITKTMNHDSAINYIWQAPLNCLFKLHREDRQHWCCICPIRGTCNAKRTLWYCETSSLDQSKVWCNTC

SEQ ID NO: 241975 - protein, 72 aa, Zea mays
  unsure (1)..(72): unsure at all Xaa locations
  Clone ID: MRT4577_152263C.1.pep
MATTMFSLLMLLALATCVANVIIFPQCSEVPIASLLASYLXPSIIASVCGNPAXLQPYRLQXAIGASHISLS

SEQ ID NO: 241976 - protein, 49 aa, Zea mays
  Clone ID: MRT4577_152264C.1.pep
MHAYVSSEFGSRRIAVDTEVFLRGKRHVETFNELTRDCKDGVNTCSASS

SEQ ID NO: 241977 - protein, 77 aa, Zea mays
  Clone ID: MRT4577_152265C.1.pep
LSMLDPEQHLIQHVEQIHGHRIDHLDLLNVLPVPHMYSIAFISQYLVHNVYAVIFVMPMYASAIIDCRIIFVRYVCI

SEQ ID NO: 241978 - protein, 258 aa, Zea mays
  unsure (1)..(258): unsure at all Xaa locations
  Clone ID: MRT4577_152266C.1.pep
MVGPEMLVAATVNQVVRKINEIIGVAQGEAKLCCSFSDDLEGIKDTLVYLEGLLKNAESNSFGSDRANLRHWLGQIKSLAYDIEDIVDGYYSSKEQYEGSNYAQKGSLLCSLSNPMLSKVSMVHKMKSKRELLQTRQNLPTQYHFISHINSVVNYDEKQTTSYRNCDIRIVGRGPDLEHLMYMLMQINLKELTIISIVGPVGLGKTTLAQLIFNDARAETFRFRIWXHVSMGNVSLQKMGENSFATTEKMREHADAVN

SEQ ID NO: 241979 - protein, 113 aa, Zea mays
  Clone ID: MRT4577_152267C.1.pep
MCSSFAPRRPLVARLEVAAYLLAVLGGNNSPSADVIKEILGSVGVEADEDRIESCSSEVKGKDIVELIAAGREKLATVPSGGGGAVAVAAAPGGGAAAAAPAAEAKKEEKVEE

SEQ ID NO: 241980 - protein, 101 aa, Zea mays
  Clone ID: MRT4577_152268C.1.pep
RAGGVVVVVVQNERRRAQVLGPAEPLPVAVHVLRPAHPALGGRARAAAGHGDAWLRWRGAVCRPRGSSHLDEMVLLSSLCYVVTTDTGQKSALVRIPSARG

SEQ ID NO: 241981 - protein, 115 aa, Zea mays
  Clone ID: MRT4577_152269C.1.pep
PKLFLDLCPPSRASPGAFFGLFPVTWACPICSPVRILPLFLIPPNINGKICPFSWPGPIIPRPLLWPPPLILMIPPRGFLVPLKLRGCLLFNPLVALLSPPPNPMWWGLPGWANF

SEQ ID NO: 241982 - protein, 53 aa, Zea mays
  Clone ID: MRT4577_15226C.1.pep
RIGFPPNPLIQRVVFKKKKKKKKKKKKKKKKKKKKKKKKKKKKKKSEGGTRVP

SEQ ID NO: 241983 - protein, 98 aa, Zea mays
  unsure (1)..(98): unsure at all Xaa locations
  Clone ID: MRT4577_152270C.1.pep
ALLLLXPLXSPXCPLCSXXVLXXXXXXXPFFXXXXXVXPXXXLLVFXXFVXPLRLLGXLGXXXXLLPLLLLLRRRSPPXPSPWAGVPLSSPSXXXXRA

SEQ ID NO: 241984 - protein, 72 aa, Zea mays
  Clone ID: MRT4577_152271C.1.pep
SSVLHERVGYTGTYHCILHGGTHGKTDWWGLSSALRHDTCFAFKETVSQPQRPRTASMRSWNVAEHAALHDE

SEQ ID NO: 241985 - protein, 161 aa, Zea mays
  Clone ID: MRT4577_152272C.1.pep
GYTQSSQIFFPPIHKYIHLHTYMNGPKRKILGKENPQKNPFSRKKHAPNVPVKKLTQDCNRKVLKLLGEAPPFGRERAKLLEKGVKFPPREGKAVHRAPFLKVVGAGGHRGRRARVYGLFACPPFCRVNCAVPNQRPCRRNNGHLREPVFCLHLVGICLKA

SEQ ID NO: 241986 - protein, 52 aa, Zea mays
  Clone ID: MRT4577_152273C.1.pep
KKTSWKTTETSFGRASPEQDTFTMREQTLKSCIIYQPEAVTLCFDGSELHMS

SEQ ID NO: 241987 - protein, 96 aa, Zea mays
  Clone ID: MRT4577_152274C.1.pep
AADDAERVAARWPPKRRPARPDAKGDAGLGRGLGVGRAGGDEEEGAASAAGLEIAAAIATPRAEEPPVVERERRELVRGGMAAVQKRTRGCDGPGR

SEQ ID NO: 241988 - protein, 346 aa, Zea mays
  Clone ID: MRT4577_152275C.1.pep
TSQGDNRAKAVREKMRIVVAGGDGTVGWVLGCLSDLYKMKREPVPPTGIIPLGTGNDLARSFGWGGSFPFGWRSAVKRYLSKASRSPICRLDSWQTVIQMPEGEIEELPYALKKVEPVDRLEISQENGTELSEKASFYKGVFYNYLSIGMDAQVAYGFHHLRDEKPYLAQGPVANKLIYAGYSCTQGWFCTPCTASPQLRGLKNILRPSIKKANCSKWEQVKMPSSVRSLVVLNLTISGSGSHPWGDLRPEYLKKKGFVEAHSQDGLLEIFGLKEGWHASFVMAELIKAKHIAQAAAIKFEMRGGEWNRAYVQMDGEPWKQPLLQEHSTIVEINKVPYHSLMINGE

SEQ ID NO: 241989 - protein, 69 aa, Zea mays
  Clone ID: MRT4577_152276C.1.pep
HASFAMAELIKAKHIAQAAAIKFEVRGGEWNRAYVQMDGEPWKQPLLQEHSTIVEINKVPYHSLMINGE

SEQ ID NO: 241990 - protein, 414 aa, Zea mays
  Clone ID: MRT4577_152277C.1.pep
VVYPAVRDADGPAVAPVVVFVNSRSGGRHGPELKVRLHELITEEQVFDLSVVKPSDFVHHGLSCLERLADQGDNRAKAVREKMRIVVAGGDGTVGWVLGCLSDLYKMKREPVPPTGIIPLGTGNDLARSFGWGGSFPFGWRSAVKRYLSKASRSPICRLDSWQTVIQMPEGEIEELPYALKKVEPVDRLEISQENGTELSEKASFYKGVFYNYLSIGMDAQVAYGFHHLRDEKPYLAQGPVANKLIYAGYSCTQGWFCTPCTASPQLRGLKNILRLSIKKANCSEWEQVKMPSSVRSLVVLNLYNYGSGRHPWGDLRPEYLEKKGFVEAHSDDGLLEIFGLKEGWHASFVMAELIKAKHIAQAAAIKFEMRGGEWNRAYVQMDGEPWKQPLLQEHSTIVEINKVPYHSLMINGE

SEQ ID NO: 241991 - protein, 731 aa, Zea mays
  Clone ID: MRT4577_152278C.1.pep
MESRWRKAKMSLGLNLCVYVPRTLEGDDAASSPDTASSTAALVSPVASSSSAATSTNTTPTAASADQSSASGKVLMPTTPTPTSAGLRLSKSGSKSFKKTCAICLTTMKPGQGHALFTAECSHTFHFHCISANVKHGSSSCPVCRIKWKELPFRGPLPAELPQGNARINPVNGYQNGGHMNILRPLPRARSSGRLHHLATLLPDTDPSTFNDDEPLDLSSEEANDNHQGCLRTVEIKTYPEFTEVPENTSERNFTVLIHLKAPVAQHLQPSSNLGDGNGLSTARAPVDLITVLDVSGSMAGTKLALLKRAMGFVIQNLGSSDRLSVIAFSSSARRLFPLRRMTESGRQQSLLAVNSLTSNGGTNIAEALRKGSKVIEERQAKNPVCSIILLSDGQDTYTVSPTAGVHKGAPEYCALLPSTNGNQQVPVHVFGFGADHDSVSLHSISQTSGGTFSFIETEATIQDAFAQCIGGLLSVVAQGLHVKVESLHPDVHFGSIRSGSYSSRVSDDKRNGSIDVGDLYAEEERDFLVSVNVPPGYGETALLNAGGVYKDPLMKETVNMADVQVKISRPAFVSVQSVSIEVDRQKNRLHAAEVMAEARFSAERGDLTTAVSLLEDCRRMIMGSASGQSGDRLCQALDAELKEMQDRMANRQRYEASGRAYVLSGLSSHSWQRATARGDSTDSESLIQAYQTSSMVDMLLRSQTMSRSSTPRPTPQMRHAKSFPARPQPR

SEQ ID NO: 241992 - protein, 132 aa, Zea mays
  Clone ID: MRT4577_152279C.1.pep
KITVNQPSQLLSGERMLKSSDRVLSDPPDNRDSNHNLTDTAPVSLDEAEYDGNASDDGLSGEAENYNSAAEMTAERLHGIPSRISRFTLTKNGQPSMSRSKSKDAKTPSNAKAPSSQLTGGSSARGSKRWQK

SEQ ID NO: 241993 - protein, 44 aa, Zea mays
  Clone ID: MRT4577_15227C.1.pep
NLLTPRPNNFSFLRTLTSLPSRAFHTMPRPHLSSNTPRNTLNSS

SEQ ID NO: 241994 - protein, 51 aa, Zea mays
  Clone ID: MRT4577_152280C.1.pep
TGHLVTRSYFARLHSLASVVPPSLSPIVGGNSGENIKGFCLQKTINKKKKK

SEQ ID NO: 241995 - protein, 126 aa, Zea mays
  unsure (1)..(126): unsure at all Xaa locations
  Clone ID: MRT4577_152281C.1.pep
HASAHASGQXSGKMCGTWGGANLXGRGYSTSTGTLTTALINDLSNYGSCYELCYDIHCHNYLPCTMTVTITNMCTNNYRLNNDHRSYYNPSCNHSHMDXHIFLPILHYIAHIRPVIFTIVSSIKKG

SEQ ID NO: 241996 - protein, 30 aa, Zea mays
  Clone ID: MRT4577_152282C.1.pep
YLFFVFFKKAVNFPSKIIKVLLYNLVKSIH

SEQ ID NO: 241997 - protein, 98 aa, Zea mays
  Clone ID: MRT4577_152283C.1.pep
KNTPTTHLKIQDHTTKPPPPLKTTNNAQDPPPKKPHPSHKKTSPTPTLNANYKPPPTFPMTLPTTQEPPFLNPQSLTKQNQKPSLKNPSPGQALHPKT

SEQ ID NO: 241998 - protein, 82 aa, Zea mays
  Clone ID: MRT4577_152284C.1.pep
KKKKKKKKKKKKKKKKKKKKKKKKKKKFKKKKKKKKNFFPLAATPLRGIFGIFLPIGGVLTFFLGGPFPLLGVFFKFNWPFF

SEQ ID NO: 241999 - protein, 75 aa, Zea mays
  Clone ID: MRT4577_152285C.1.pep
RPTRNAGRVGLACTKLSVSRPMWGRVHDALQARTETDCSPALIHSASHTDMRHHTHLGRRQAGGLRGRDGTCGRM

SEQ ID NO: 242000 - protein, 409 aa, Zea mays
  Clone ID: MRT4577_152286C.1.pep
MAKHKQRRVYQVWKGKNIILCGGRLIFGPDAKATLISFALIAIPVLVFCVFVARHLIHIFPAYNAGYAILAATIGLTIYVLLLLFLTSSQDPGIVPRNSHPPVEEFSYDASAPHALQFPRVKEVMVNGVHVKMKYCETCMIYRPPRCSHCSKCDNCVKRFDHHCPWVGQCIGERNYRYFFCFGASAAVLCIYVCAMCGLYIRLLMNRGHYSVGKAIKESPASLAVMAYCFICFWFVGGLTGFHSYLIVTNKTTYENIKYKYSNQPNVYDHGCVLNCHEVLCKKRKPSKINLRAIVQEEQEVARPQTSSSNIREDEAPHRPRAKVEDDLEMGLDILKTTGRRTDKFSDEELEPATGSNGIEYRTPDSETEIPVTRTKTEIFNEVRDLDLSVSNGAQSSSPEQEQHPDKLC

SEQ ID NO: 242001 - protein, 88 aa, Zea mays
  Clone ID: MRT4577_152287C.1.pep
SSCIFTMAGASVSTALLSSLAKLPMSPPPHALSGPCRLQPSSSNRKKQATGNFGERAGVRDPRVPSESAAVSPNHAEAKKTRAAWVDP

SEQ ID NO: 242002 - protein, 245 aa, Zea mays
  Clone ID: MRT4577_152288C.1.pep
WVPRGRPGCSLSSLLGTKASYSRTPSSGTRGSLRAHPLRSSPSSPSQCISMAAPLPVYLLGELPASSIAAPAPAALRLPSPAARSFFPSHGSSPRRAHPSAPLRRRPARVCPGGRCLGADSTAPCIFHGRAPEVPPWRSLPSSPSLSRSVSCARRPELSQASQFARPRTSMALLCSSVSVTVFLAPEFFCGLSLSHGRVPISLPSARRLPRTVRPAQHHALGLLPARSARLASLCSGRAQRHERL

SEQ ID NO: 242003 - protein, 110 aa, Zea mays
  unsure (1)..(110): unsure at all Xaa locations
  Clone ID: MRT4577_152289C.1.pep
LQCQHGGDAEHHCARAPRQESGETAFYLSLCTSHFLLAFSALNHLVTVRSIVGMMCALCVVKFFPAVDCIADTSLWPDDTLMLILGHSNXXXXLLKXXKPNXXQLMVCLV

SEQ ID NO: 242004 - protein, 51 aa, Zea mays
  Clone ID: MRT4577_15228C.1.pep
IELLFSRRYRQKWMRYIKILMVNPCLSGLVFLQGWGHYATHIGDQLPKNWG

SEQ ID NO: 242005 - protein, 97 aa, Zea mays
  Clone ID: MRT4577_152290C.1.pep
LSSPSRSKLVSSCPPLLSVRASSTSTTPSHHRGRAQPSPLTHCRRDLPRIRDGERHRRHYRGRLKMKLCFICRLSGGCRLSANVQVTVDFQNYRSSD

SEQ ID NO: 242006 - protein, 102 aa, Zea mays
  Clone ID: MRT4577_152291C.1.pep
SEPCDVSRKCKEPLIHDASVRAGLFHLRGAEAGGNCAEACCCGVRGTQSHSSRVYWIRLSNDVLSRHEDAMTLATNNGGYRISDYMERHAEVAHKILEVVSI

SEQ ID NO: 242007 - protein, 462 aa, Zea mays
  unsure (1)..(462): unsure at all Xaa locations
  Clone ID: MRT4577_152292C.1.pep
MEKAIDRQRVLLAHLLPSPSAASSQPQLAASACAAGDSAAYQRSSSFGDDVVVVAAYRTPICKAKRGGFKDTYPEDLLTVVLKAVLDNTRINPADIGDIVVGTVLGPGSQRANECRMAALFAGFPETVPVRTVNRQCSSGLQAVADVAAAIKAGYYDIGIGAGLESMSINSIAWEGQVNPKISAFQKAQDCLLPMGITSENVAHRYGVTRQEQDQAAAESHRRAAAATASGKFKDEIVPVPTKIVDPKTGEEKEVVISVDDGIRPGTTASGLAKLKPVFKKDGTTTAGNSSQVSDGAGAVLLMKRSVALKKGLPILGIFRSFAAVGVDPAVMGVGPAVAIPAAVKSAGLEIGDIDLFELNEAFASQFVYCCNKLGLDRSKVNVNGGAIALGHPLGATGARCVATLLNEMKRRGRDCRFGXVVTMCIGSGMGAAAVFERGDAVDGLSNVRDIQAHNFLSKDAK

SEQ ID NO: 242008 - protein, 66 aa, Zea mays
  unsure (1)..(66): unsure at all Xaa locations
  Clone ID: MRT4577_152293C.1.pep
MGRGLNKHLXRLYAPKHSMLDXLGRAFASKPYSGPYKSRECLTMILIITNTLKYALSYREVISILM

SEQ ID NO: 242009 - protein, 63 aa, Zea mays
  Clone ID: MRT4577_152294C.1.pep
GRVGGRFGIKFAVFLLSCTGFPTLNLFQGLQDMTGILLQTFIQSLHQMMDHEARMLLTTGYSH

SEQ ID NO: 242010 - protein, 116 aa, Zea mays
  Clone ID: MRT4577_152295C.1.pep
QKSRIAKAQIPRRNPINKSKTVHGNRSQQVARYQQRSQTTLEMMKTRHCHRKRMIASSLLDRRPRHHGAGRTFILHTLDNSNSFRLPHDTLRKPYQGNDTVTNVSTPTGLAGILST

SEQ ID NO: 242011 - protein, 58 aa, Zea mays
  Clone ID: MRT4577_152296C.1.pep
PYNTSGLQILIDKLDYLQSRSCRNMLVVRGSRRRPGWAPTGAPNRVGRQETAGEKPGR

SEQ ID NO: 242012 - protein, 92 aa, Zea mays
  Clone ID: MRT4577_152297C.1.pep
RLPSESAADLEGGSGYGEPKVGGESVWGPFLGAQLPLLQEIQLLAFPGASAFISGFSCSVASILLAAAKALFFLEVWGLQALKDHLGNLPIP

SEQ ID NO: 242013 - protein, 79 aa, Zea mays
  Clone ID: MRT4577_152298C.1.pep
LSPGHADGATGPTDTGPPGPPRQRPTGTRPQEASVARSTRRPTAPAAHEVNRGGAAQRKGRNARWAARDERRSKQDHTN

SEQ ID NO: 242014 - protein, 113 aa, Zea mays
  Clone ID: MRT4577_152299C.1.pep
WRRQIFMDGRSKKSYISFQLISVQHLNLLFFLSLSTSPSLTSLKEILGRKVDQTAETLSRAQGEGEYGPDSGGRRERLKSLLVQYRRGTRLGGDGASEGERCQREPDGPEGTP

SEQ ID NO: 242015 - protein, 63 aa, Zea mays
  Clone ID: MRT4577_15229C.1.pep
IEHLLLLRRVTTQPPQPPHRPFSPAQPSPTPFTGKPQLKPLFTHPKLRPKPLQSPLMLPLINK

SEQ ID NO: 242016 - protein, 87 aa, Zea mays
  Clone ID: MRT4577_1522C.1.pep
NLILSPARISMTSALWNKVLLKSQGSLAAQRMYAMDPCAAGCGWQRFFSFIGEVLVAVFVASDDGILASSVPSFRLQPWGKGRVKVW

SEQ ID NO: 242017 - protein, 70 aa, Zea mays
  Clone ID: MRT4577_152300C.1.pep
TLFPIVPLKIDQTYFKLEQAILWLEPTSSLKSIPRGRQRTPSLSWSIFSFSLHCCRLCTCSVCYCYIRIE

SEQ ID NO: 242018 - protein, 69 aa, Zea mays
  Clone ID: MRT4577_152301C.1.pep
WPRPTISYSDGSSFILQARTVNEPDPLVKPKQDKYALRTSPRWLGPQYEVIRAVPKYIEPEVHFFNDNP

SEQ ID NO: 242019 - protein, 92 aa, Zea mays
  Clone ID: MRT4577_152302C.1.pep
TKTRLKKNGGVHDNNNITAYAERKICQCHQSPRKKENQLSLFFTGKACGSVANLLDIYRRQKKEARLHVLYSFLLVRFGFWWKAYALCVVIE

SEQ ID NO: 242020 - protein, 412 aa, Zea mays
  Clone ID: MRT4577_152303C.1.pep
MARYVAWCRVGGNPLRAGEVVHGQQQRRHLDARVWRGGGAVDCGALRTSKFKMSEALQKDKEIGEEEEEEEYVLLELDNCLYSDISPGAQFVLSGLDTLTPTLIVGDNLKMVGEYEETIGTCYLFSESETEPKPTSDEMAPSKENTEINSSKEAPLKEVRAFKQHSRAILPSGVVYSSGGSSWVLNTGCINHMTGKNDMFHSLQLTEELQDIVFGDSNKSEVIDIGDILISNHQSLSNVLLVDSLSYNFLKNWALIEVARPMIYEYKTLDNYWTEIVNTACHAINRVYLHKKVKSSNFASKVDEDFLLGYASNAHGYRVFNNVTDLVEIAVDVTFDKYNGLQRQVSSDVTDNEAPPYEAINKLAVGELRPQEKDEDERRIWMTNEVVNENTRVVGCQPSIQVNPLTSSHPTQ

SEQ ID NO: 242021 - protein, 45 aa, Zea mays
  Clone ID: MRT4577_152304C.1.pep
KHWRIFVNTPLQKWGTFFYVYKKKILSPTGWDSTNYCAHRKIKDP

SEQ ID NO: 242022 - protein, 76 aa, Zea mays
  Clone ID: MRT4577_152305C.1.pep
SSGATRQYAAIVRVWEPSLCWVVCGHINICVGSLNNVSYYVSDMTREYAQMGVLHVMMAYLDVGPRFILVMPLCSL

SEQ ID NO: 242023 - protein, 67 aa, Zea mays
  unsure (1)..(67): unsure at all Xaa locations
  Clone ID: MRT4577_152306C.1.pep
RKRPNAPPGKEGDRPKSGTGPDGAGKLAXGLYRIGKXDVPVYDGSWTEWEAQPGGCDYPKVPAPGTA

SEQ ID NO: 242024 - protein, 80 aa, Zea mays
  unsure (1)..(80): unsure at all Xaa locations
  Clone ID: MRT4577_152307C.1.pep
ENTSPPXKSFQDRQYQVYSAIVRIIKTRKVLSPPLFITELFPQLXVPCXPADIKKRIESFIARESLERARGNPQIFNYLA

SEQ ID NO: 242025 - protein, 158 aa, Zea mays
  Clone ID: MRT4577_152308C.1.pep
MSAVAAMATSSLNPNAPLFIPAAYRQVEEFSPEWYELVNTTAWFRDHWFRQHQHHEAAFAAADAELDVAALLPDDSVDLLDTDDLFYAPDVHHPHNAKPALLPGYDLDMLRALSLSSPRAAAAPSPSPLLRAQQQRHADRPAHHARGAARRVIIHQPR

SEQ ID NO: 242026 - protein, 54 aa, Zea mays
  Clone ID: MRT4577_152309C.1.pep
SVAYGATWQFDTECAAQRTSSRRRAGRGAVEGTGKLEAQPCKELAPNCPSTGFL

SEQ ID NO: 242027 - protein, 218 aa, Zea mays
  Clone ID: MRT4577_15230C.1.pep
MKARQFLNVVMERYGTGGAGGSLYTVSRINAKEHLFYRSTAEAQAAEKSRFDMECPSSAVVPPWMETISRMPPSKLRFERSTSDNKRLDFLPFHERGSGAASKILCVDAAGHTALYDMDAGSVQPIPCLNSPKGSRPISFSTTNPEASDRERADAFYVMGRFPSSYDPYNFEVLMYSNPSNGRTMKGWDWLKLPTPPAYADNCIVNSHALLEIEVDSF

SEQ ID NO: 242028 - protein, 166 aa, Zea mays
  Clone ID: MRT4577_152310C.1.pep
MLLKNILVWYLPTLKKKKKKKKKKGHDSRHTGSAATTRNHPLPVPDRAEAEKRMSTTTASSLNPNAPLFIPAAYRQVEDFSPEWWELVNTTAWFRDHCFRQRQLHEAACDDVAALLPDDLLDTNDLFYAPDVVHHQPATALLPGYDVLDVLGALSLSTPRAIRQPR

SEQ ID NO: 242029 - protein, 54 aa, Zea mays
  Clone ID: MRT4577_152311C.1.pep
LNNFPPPFFSFKTSTPSSYNFTILSPLRQDPPTLFPHNSDHFFFLPLGPPLIVC

SEQ ID NO: 242030 - protein, 110 aa, Zea mays
  Clone ID: MRT4577_152312C.1.pep
MQRSEQQHKGVNLKSPRRKGGKNATAIPNWKVDPRCPNASNPFHMCAQYCFDHLSETAQTSAAKSDKRRGKGVSEDEGRGETKTNPGCANASNPYHKCGDQCKRKGGGDR

SEQ ID NO: 242031 - protein, 66 aa, Zea mays
  Clone ID: MRT4577_152313C.1.pep
GGTVRFSIRPSSAHSTDMHPRVISYDHRAVYVVPVITVPCVSRHNMNHSSIWGSIRVSIVQPWARA

SEQ ID NO: 242032 - protein, 221 aa, Zea mays
  Clone ID: MRT4577_152314C.1.pep
SGVPHASGGLPLYVFLREGSDGDGKKVDPRCPNAPNPFHVCTDHCLAKISEAGRSSEGAKSPISLFSRHSRRSSSSSEDGSVKSAGSKKVDPRCPNAGNLFHECGEHCAAKMQRSEQQHKGVNLKSPRRKVGKNATAIPNWKVDPRCPNASNPFHMCAQYCFDHLSETAQTSAAKSDKRRGKGVSEDEGRGETKTNPGCANASNPYHKCGDQCKRKGGGDR

SEQ ID NO: 242033 - protein, 98 aa, Zea mays
  Clone ID: MRT4577_152315C.1.pep
LHFYSVLSAVNPEGGPGGSQPFICTPPRGHLSSCICKLYRYTIYNKFVSWQMKLGYRRRREITGYIIHGVITRRRLRTGTTPTDGLHMCGVAPIRFRI

SEQ ID NO: 242034 - protein, 76 aa, Zea mays
  Clone ID: MRT4577_152316C.1.pep
FKTRNLHTPSTRLINQCTQYLPSSKDTILSASFILSILRPQHYTLRTAMQEFFNNLTYKSSCSKYTNLSIIIRIFH

SEQ ID NO: 242035 - protein, 167 aa, Zea mays
  Clone ID: MRT4577_152317C.1.pep
MGSEGRAWNGAGMAAGSGYGGGGEAKATTTAVSAAAPAEVPTSAASVDISLPLLKMSPRIIALCKELVEGWSSIDSSLFSIETVSGGITNLLLKVSVKEDNGNESSVTVRLYGPNTDLVIDRKRELQAIPYLSAAGFGARLLGIFENGVVQSFIYARTLSPADMKEP

SEQ ID NO: 242036 - protein, 54 aa, Zea mays
  Clone ID: MRT4577_152318C.1.pep
PKNNKFLIGGQYYSMLYKLAFWLHWHLQSPFVADFGRKAAVSSKDVSLWPIFEA

SEQ ID NO: 242037 - protein, 159 aa, Zea mays
  Clone ID: MRT4577_152319C.1.pep
DLLDILHAPVVYAHNDLLSGNLMLNDLEGKLYFIDFEYGSYSYRGYDIANHFNEYAGFDCDFNLYPDKDAQYHFFRNYLHPDRPSEVQAQDMEVLYVETNTFRLASHIYWALWALIQAKVSPIDFDYLGYFFLRYGEYKKQRDSCFALAQSFLSGLRNG

SEQ ID NO: 242038 - protein, 211 aa, Zea mays
  unsure (1)..(211): unsure at all Xaa locations
  Clone ID: MRT4577_15231C.1.pep
VRADFEFDPTPGGGGYDLAVTFGRPLPPSEETCYPCSAPSTSYDAPQTQEEQQLRPFELEVERGAAFTLGLLAVKPEHQQFIVDAGALPPLVKLLKRQRSTANSRMVNSVIKRAADAITNLAHENSNIKTRVRMEGGIPPLVELLESQDLKVQRAAAGALRTLAFKNDENKTQIVQCNALPTLILMLGSEDAAIHYEAXRPCAILQFVLRA

SEQ ID NO: 242039 - protein, 128 aa, Zea mays
  Clone ID: MRT4577_152320C.1.pep
GRFFFFFFRIINCISLRYIGPKWAVLGHNVVVLVRAWQNCDTNPCVTRTREVRYINISMVHNFLGRDLVEVGGGGTNLVEHGGNRTVQANEEITSVGDPINGVVQANLAALCLENVESPLRVIAFVTQ

SEQ ID NO: 242040 - protein, 349 aa, Zea mays
  unsure (1)..(349): unsure at all Xaa locations
  Clone ID: MRT4577_152321C.1.pep
AIPYLSAAGFGARLLGIFENGVVQSFIYGRTLSPARTNRSRLDYTYLVLYFSPKGNSGNDFFFSFRLYGXNINXVINGKSLSLWSPFFTGGGLGAGVLGVFEKGVVQXHLXARILSPADMKEPKIAAEIAKELRKFHQVEIPGSKEHQLWNDIFKLLKKAAALKFEDNKKQKRYEKISFREIQDEVQELKDLLDILHAPVVYAHNDLLSGNLMLNDLEGKLYFIDFEYGSYSYRGYDIANHFNEYAGFDCDYNLYPDKDAQYHFFRNYLHTDRPSEVDAQDMEVLYVETNTFRLASHIYWALWALIQAKVSPIDFDYLGYFFLRYGEYKKQRESCFSLAQSFLSELKNG

SEQ ID NO: 242041 - protein, 53 aa, Zea mays
  Clone ID: MRT4577_152322C.1.pep
KRSFRAPFGKGETKKKVNRFEENVRHTKVAHTNFFFLNWGQDQTPFFKKRGDT

SEQ ID NO: 242042 - protein, 54 aa, Zea mays
  Clone ID: MRT4577_152323C.1.pep
AGACLCQRLVAWTTTIALYNRASAVYFATEALVGLVCYVLMVTIVLHHLHMIDR

SEQ ID NO: 242043 - protein, 108 aa, Zea mays
  Clone ID: MRT4577_152324C.1.pep
VSSAPTRYPRSSRRSAPRDTAIGLSIAGVAVLHHVADAASRFSGAARLAITGRGTVARARCSGLRSPLRTRLVARSSSPAPAFAAPTGIHGPWRQEAWAGGTVALLCC

SEQ ID NO: 242044 - protein, 277 aa, Zea mays
  unsure (1)..(277): unsure at all Xaa locations
  Clone ID: MRT4577_152325C.1.pep
ALLKDSHSKSRSGGDQHSYLXVDSLGRVSFSSIRRPRPLLEVDIPASGDGHKSSTRPLEKEPMLAARITVEDGICLLLDVNDIDRVXQSSQAQDSSFQLRRRRQVLLEGLATSLELVDPFGPNKPGNSSGLAPTDDLIFLRIVSLPKGRKLLARYLRLLAPGSELTRIVCMAIFRHLRSLFGGLPSDSGAAETTVSLAKTVSSCVHHMELSALSACLAAVVCSSQQPPLRPLGSSAGDGAALIIKSVLDRATELLADPHSAANYSRSTRSLWQASFD

SEQ ID NO: 242045 - protein, 87 aa, Zea mays
  unsure (1)..(87): unsure at all Xaa locations
  Clone ID: MRT4577_152326C.1.pep
ITCKGVALRPNTVMIGGWIVFRGKPPKPHLDNYGTPRTXGLSNSPEARPITPDTITSVXTPTKTLYATTATLVTKVTLCAQSLGLAL

SEQ ID NO: 242046 - protein, 33 aa, Zea mays
  Clone ID: MRT4577_152327C.1.pep
PTRPNILIKLMAVESLVFAPFFAAHGGIIFKWL

SEQ ID NO: 242047 - protein, 87 aa, Zea mays
  Clone ID: MRT4577_152328C.1.pep
PGLACIGTVAPCVKFPVYVGLKHQDTGGIIFFLLCLGRAASLVWGRSGSWAGARGPPACCPSWGPQGVNFEHPCVFWPLSGHVQWVF

SEQ ID NO: 242048 - protein, 97 aa, Zea mays
  Clone ID: MRT4577_152329C.1.pep
PRPCALCHWPERRPNFVDAYPSEVQTPLSMCTAPGAFLRAYIFHAMPSLVLCGAVKAHRIPSPPIRSRYQVGRQMKSRKFARILLVTKTGRRLRFGT

SEQ ID NO: 242049 - protein, 72 aa, Zea mays
  Clone ID: MRT4577_15232C.1.pep
SPGRKPCVRTGSLIRAPVVDSASTRMATSPPASHNPPTSALKLRLTILKDIGSTPLFVTTARATQWLTSPVN

SEQ ID NO: 242050 - protein, 62 aa, Zea mays
  Clone ID: MRT4577_152330C.1.pep
NHQHIISEATKRKPNSFPQDLSNDIKERSTTIIYIFIENCYLLFNTDHVKSGELWFHSDTNS

SEQ ID NO: 242051 - protein, 70 aa, Zea mays
  Clone ID: MRT4577_152331C.1.pep
HASKGPCWETDSRRAFKGRHRIWRVPDQPHESHERVNWSLKNCMVSGAFYTLAHRTPVALTQAIADLNMR

SEQ ID NO: 242052 - protein, 98 aa, Zea mays
  unsure (1)..(98): unsure at all Xaa locations
  Clone ID: MRT4577_152332C.1.pep
TGTRGLRGQDKFKHXXSELGNLSQANLVAFQGYYWSSSMQLLLTEFAASSSLYDHLHGSHPHALSXTSTYNAGGKQSWEHMIHLXLXTHTALAYLHHY

SEQ ID NO: 242053 - protein, 37 aa, Zea mays
  Clone ID: MRT4577_152333C.1.pep
SLNIQSLTILIHRRIQVYNNPYNTRTCFQTKSVQNLV

SEQ ID NO: 242054 - protein, 196 aa, Zea mays
  Clone ID: MRT4577_152334C.1.pep
ACVQKIKTSFAKSGAYSNEDNFVLGDPDGPIEWINGETEAFEEVLSGRGDVCAFSGARGIAAILEKTGCEHVKVLAQAKAAFSIEDTKDPSAEASLVGGKFFTDIWENGGRGMAHEIIKKSEGDTHDAREAAKAAEKTAELERRIAELSPPPEPFESLVDPEAKKEDEITKMAEAIMDEVVTQLLNEATKEVLKEE

SEQ ID NO: 242055 - protein, 100 aa, Zea mays
  Clone ID: MRT4577_152335C.1.pep
ELPPVDGKEVPVGNTVPWRGDIESEQHRRDSAVTALARLGARAGCLPRYSLDRVVVRRGGGPQPWRRTRRAQRRRPGDGGGGLAAKEVCHSQVMGFGRAG

SEQ ID NO: 242056 - protein, 75 aa, Zea mays
  Clone ID: MRT4577_152336C.1.pep
IAVLSRVIRFISQEFLPFTIIRGSRHRSETSKSDSLPRTRPNPRSRLLSGRRAAAATRGGNSLATRSVRLPAGSR

SEQ ID NO: 242057 - protein, 422 aa, Zea mays
  unsure (1)..(422): unsure at all Xaa locations
  Clone ID: MRT4577_152337C.1.pep
MGCCGAAMSARPRGIHEETLLRVPGASVHLLAGSSDGPVELARGDLAVVRLTKDDVAVATAVRVGRDLGWPLARDEPVVRLDPLHYLFTLPAADKDGTFLNYGVSFNAGAGADASALASLDGLLRSNACFSAPSSGAVVPPSKGSSRARPQPGPVVASGDGYWNEFAPRVEGYNGVLAKAIAAGTGQLVKGIFMCSEAYASQVLXSVRCPVPLPCSVASDKSIQWRIXCCASCLTSRTIVGCLQVQRGADLFRPQAAGSARSRFGDAAGGANRNTKPGAVNKSLKRVRKLSEMTEKMSQSLLDTVISVTGSMAAPLIRSKQGRAFLATVPGEVILASLDAINKVMDAVENAEKKSLAATSNVVAGAVSRRYGENAGEATQDAFATAGHAVGTAWNLFKIRKAVTPSSSMPGNMVKSAIKNRN

SEQ ID NO: 242058 - protein, 103 aa, Zea mays
  Clone ID: MRT4577_152338C.1.pep
SPPRARGMSWWLPFFFTWRGPLPFPQGWKGSAGPLGSPRGAAPFPPPGGVPSRLCPRWPPLWPSWPGSIRGRLAPRFRHFFVPPRLFFFGWRLWFRFFGWVVF

SEQ ID NO: 242059 - protein, 53 aa, Zea mays
  Clone ID: MRT4577_152339C.1.pep
PKPPQKGGWIFSPKKAPLKRGQKTPGGFILGANPGFKSPWTPERGPSEGPAKL

SEQ ID NO: 242060 - protein, 53 aa, Zea mays
  Clone ID: MRT4577_15233C.1.pep
STRSTTSFSTLSSRLSCTLPFGRSATRSFTLPPTRSTTRTSRLLYISSSLSIS

SEQ ID NO: 242061 - protein, 98 aa, Zea mays
  Clone ID: MRT4577_152340C.1.pep
LEQFRVQSDRNEGLRNESSLRRPGAKVEFCVASRPNLLAACSGPPFSRVRRRRRRNVRLPYTPVKSFLRCVALRRLSSSLRASGLSYSILSYHIIYSV

SEQ ID NO: 242062 - protein, 144 aa, Zea mays
  unsure (1)..(144): unsure at all Xaa locations
  Clone ID: MRT4577_152341C.1.pep
YFFRKGGGLYILHGWQVGSINPAYSGKPRGPLLRKLSGEGRNIPVLFALKTETSGAGSCSSVVQSDPEAGELSNTTDVSHFGYYQRNVDRENIVFTVHTGVYXTQTGQRXTVQREXYTGHSHNRNGLCAAAFRDDHYPVRRALS

SEQ ID NO: 242063 - protein, 188 aa, Zea mays
  Clone ID: MRT4577_152342C.1.pep
FIFFRKGSRCPVAHVGRPPLENPDRSWRVHIAGRGRHDLLPCAGGSRCAWPTGSCSDPTRFGPGERASGGGATADAEPGGRGAPAAFSCCCMPAEISDQEPHMPPTPASRPKLNALDSIDREQSSGSSSRSVQGRPVPSRQPARNSLVRFSRKIAGWGQRVRVTTRRWVGRETPPHLVLNPDGFRPGR

SEQ ID NO: 242064 - protein, 62 aa, Zea mays
  Clone ID: MRT4577_152343C.1.pep
YACQHFFIAEKKMGYIQERIYTSTHRDRDVLPLAFPTFEEGPSLPSRKGGRPCSWTPIQHSW

SEQ ID NO: 242065 - protein, 147 aa, Zea mays
  unsure (1)..(147): unsure at all Xaa locations
  Clone ID: MRT4577_152344C.1.pep
AAAAAAAESDSEDGYNNNDYDDDEGSQXSPSRSVSSGFGGGGGGAPPAVGSKRKMSSGSGGFGELARAIETFADMYERMEAAKQQHAEEMERQRIKFLKDLELKRMQAFVDMQLQLARTKHARKGDASSDTLMSLAALPFLSSPAYL

SEQ ID NO: 242066 - protein, 73 aa, Zea mays
  Clone ID: MRT4577_152345C.1.pep
IAWRSPTLISDSNRYRKRGTHRDQLHCTRPFCFIRTQGPGPAFENRRRAALHLKKLEKMCSSSEAYKLEVTIR

SEQ ID NO: 242067 - protein, 265 aa, Zea mays
  Clone ID: MRT4577_152346C.1.pep
FADAVNSRPGASARGRPLRTDIQCKNRVDTLKEKYKAERARGGPSPWSFYGQLDILVGPTLNGTKKPSPPRAALPVFRRRQTPPRSPSPQSPPPLPVALPLHNYRRGSDLPSANFIHKAAAAAAAAAAAAESDSEDGYNNNEYDDDEGSQQSPSRSVSSRSGGAPAVGTKRKRRSGSGGFGELARAIETFADMYERMEAAKQRHAEEMERQRIKFLKDLELKRMRSFVDMQLQLSRAKHARKGDASSEMLMSLAALPFLSSPAYL

SEQ ID NO: 242068 - protein, 277 aa, Zea mays
  unsure (1)..(277): unsure at all Xaa locations
  Clone ID: MRT4577_152347C.1.pep
MEKKSDDRPARRRDGKEERMGRAGVVLIVCLCTLPFLVFLFRAPAVWHNAAKLTATAGGLVNVSRPSVAGGGADELFGGLLAPGSDRRACLSRYQSPRYYKHSPYAPSPHLLQKLRDYEARHKKCGPGTPPYAKSVDHLSSGSSSTEDDECNYVVWIPYNGLGNRMLSLLSTFLYALLTGRVLLVHSTDDFTDLFCEPFPGGTWALPPDFPVADMSRLGARSNESYGNLLDGKKISNDPARXDARSXPPYVYLHLAHDLRRSDRLFYCXDDQLVLAR

SEQ ID NO: 242069 - protein, 58 aa, Zea mays
  Clone ID: MRT4577_152348C.1.pep
GPRFNFWPEMQFLAQNSHEGPKFKTDLIRQINLTKSKLNNYIKLLELCNDYLVYKSFC

SEQ ID NO: 242070 - protein, 76 aa, Zea mays
  Clone ID: MRT4577_152349C.1.pep
CSQAAIDVLRNPYLLLSMYQLCENQLFILIHHPYGKPSVHITFIILVPPTIIMPTTAHTYASLIDTNNQGTSTTTT

SEQ ID NO: 242071 - protein, 74 aa, Zea mays
  Clone ID: MRT4577_15234C.1.pep
VKRSCCHGQWISAPILCGCCFMGCRRCYGSRSNDDQQMGTGSFLLFGAFFLCTVSMWVFVVGLGCLADLLIIGE

SEQ ID NO: 242072 - protein, 70 aa, Zea mays
  Clone ID: MRT4577_152350C.1.pep
HLCLPSALQRYKVNIGSERMGTQQAMELNRPTLKNTDDLGPTADTCKDTFLTCELLDYLLVGTRPEEPPA

SEQ ID NO: 242073 - protein, 39 aa, Zea mays
  Clone ID: MRT4577_152351C.1.pep
NNLAIFAQRVIRSVNLVFFNVPCNICSFRVWSAWTDHYS

SEQ ID NO: 242074 - protein, 564 aa, Zea mays
  unsure (1)..(564): unsure at all Xaa locations
  Clone ID: MRT4577_152352C.1.pep
MAEPTIKDVMEALQSITTEMSTLKAEMAVMKEKSSPSLADSRGARQEGPHDLECPPRFQKLGFPRYDGKSDPMIFINKCESYFHQQRTMAVERVWMASYNLEDVAQLXAPLFELECRRTGXVEDYSNRFQALLPRVGRLEEGQRVQLYTGGLLPPMSHAVRIHNLETLAGAMSLARQAIAGVPICKSLQLRVSLGASTLVALLDTGSTHNFIAEAAARCTGLQIQPRPRLTVTVANGERVTCPXVIRRASLIIEGDRFSVDLFVMPLAGSXLVCWSDIAERPRPLVAAATSTEGLLDDLLHAFEGAFVEPAKLPPQRTRDHAIVLKPGAAPVAVRPYRYPAAHKDRLERQCAAMLAQGIVRLNDSAFFSPVLLVKKXRLDLRSRXHQIRMRPADVQKTAFRTHXHDDLYKFLVIPFGLSNAPATFQALMDDVLRPILRRFVLVFFDDILIYSKTWADHLRHIRAVLDELRRHVHFIKRSKYTFGSPSVAYLGHIISAQRVAMDPTKVQAIHDWPAPRSARAVRGFLGLAEYYRKFVHDYDKIAAPLTSLLKEGFFWNDDAQAAF

SEQ ID NO: 242075 - protein, 634 aa, Zea mays
  unsure (1)..(634): unsure at all Xaa locations
  Clone ID: MRT4577_152353C.1.pep
MAEPTIKDVMEALQSITTEMSTLKAEMAVMKEKSSPSLADSRGARQEGPHDLECPPRFQKLGFPRYDGKSDPMIFINKCESYFHQQRTMAVERVWMASYNLEDVAQLXAPLFELECRRTGXVEDYSNRFQALLPRVGRLEEGQRVQLYTGGLLPPMSHAVRIHNLETLAGAMSLARQVKMMGLAQLAQPLALDAPRALLAAPSAHGPRPPLPAPPAXAIAGVPICKSLQLRVSLGASTLVALLDTGSTHNFIAEAAARCTGLQIQPRPRLTVTVANGERVTCPXVIRRASLIIEGDRFSVDLFVMPLAGYALVLGTQWMVTLGRISWDFIGRTISFTHQGRLVCWSDIAERPRPLVAAATSTEGLLDDLLHAFEGAFVEPAKLPPQRTRDHAIVLKPGAAPVAVRPYRYPAAHKDRLERQCAAMLAQGIVRLNDSAFFSPVLLVKKXRLDLRSRXHQIRMRPADVQKTAFRTHXHDDLYKFLVIPFGLSNAPATFQALMDDVLRPILRRFVLVFFDDILIYSKTWADHLRHIRAVLDELRRHVHFIKRSKYTFGSPSVAYLGHIISAQRVAMDPTKVQAIHDWPAPRSARAVRGFLGLAEYYRKFVHDYDKIAAPLTSLLKEGFFWNDDAQAAF

SEQ ID NO: 242076 - protein, 133 aa, Zea mays
  unsure (1)..(133): unsure at all Xaa locations
  Clone ID: MRT4577_152354C.1.pep
YKQGAQPTLLLAHKKGGGRAWQWQAPCSCSAGLGPPLFSPPFYPPSSGALNQCVAVLNPVKTWFSYKPVVPGMACPRPGFYSTPLMPGPVIKPTRPFGPFMARCPPFYKTLGQCFFPKKKKKKKXKKKKKKKK

SEQ ID NO: 242077 - protein, 95 aa, Zea mays
  Clone ID: MRT4577_152355C.1.pep
WERVCNKESSVPLTISLCLSKKSCKVSAKCHSPLPVWWNSLLEVGSQDVDVLNESYLARLKSATSKSCTVLPIAPVILFSSSRNIFLEVNNALRM

SEQ ID NO: 242078 - protein, 55 aa, Zea mays
  Clone ID: MRT4577_152356C.1.pep
SVHASVAVRLFTSSAVIVASCDSIESNLFSVYNGFSMYSICQKKPKFVRGVLKQL

SEQ ID NO: 242079 - protein, 96 aa, Zea mays
  Clone ID: MRT4577_152357C.1.pep
FRYTCYPRDSDNRHIVTIQISVPHAEMNYQEFVNLSGQQDSCGSARNRRIYRRGDHREESISVRPEPCRGVRPCIYSAVAARPSAVAVLRAGSRSV

SEQ ID NO: 242080 - protein, 137 aa, Zea mays
  unsure (1)..(137): unsure at all Xaa locations
  Clone ID: MRT4577_152358C.1.pep
FGSSEPSTDIFLKRYTVDLREPAGTNITWXNLFIQALYQAAILLMFDFDQARILRLQIECRSLAETITNTIIFNTCVSCQIFNDLNAQKPEEQNVLKGDTMNHLFMGIIGLTTVFQMLIIQILGKCFKIMRLDGRLW

SEQ ID NO: 242081 - protein, 59 aa, Zea mays
  Clone ID: MRT4577_152359C.1.pep
FGPLMFFFAPRGGFIWANPFPGFWMGLFILPKKKVVPPCCRLGLCAHFHPPNDKRALAP

SEQ ID NO: 242082 - protein, 61 aa, Zea mays
  Clone ID: MRT4577_15235C.1.pep
EIKKTITANLITEWQSGGIKSYNVSREPHSVGSIRTDRDISRSEPLRADHRIAVAHKPDDA

SEQ ID NO: 242083 - protein, 60 aa, Zea mays
  unsure (1)..(60): unsure at all Xaa locations
  Clone ID: MRT4577_152360C.1.pep
NELLPGFVVSQESIGNGRSTFLTCLNKLNCPDILVWSIPAQEFKAKHCTIMXXLLESFWS

SEQ ID NO: 242084 - protein, 82 aa, Zea mays
  Clone ID: MRT4577_152361C.1.pep
SASVLGELGIGKTSRSSVSITSISYTFHAGVFGSCIPYTAICARNPACRDLVLSVEHANLSSSMLKGFSKSFSLWYSHLSRT

SEQ ID NO: 242085 - protein, 88 aa, Zea mays
  Clone ID: MRT4577_152362C.1.pep
TFGLLYVLVYVHGYVHVHMPVDVRVVLCLRVSCFFSVCLLDSCRSSVPALDGRLLFVRLYLVIAWFRCGDRDSSCLMRVISNWRGGHS

SEQ ID NO: 242086 - protein, 196 aa, Zea mays
  Clone ID: MRT4577_152363C.1.pep
FTYSYNYITGEPPVCMHVKALDDRRNCIPNRPDQRSTEQCQFFNSNHVNCDAFRCKKFVLPSPPPPPPSPPPPTPSPPPPSPPPPSPPPPTPSPPPPSPSPPPPYYEVSPEERYLSPPPPAYQEPTTPPHYEVPAPYYEVSPEDRYHSPPPAAYQESPPPPYYEVSPEDRYLSPPPPEYEEPTTPPHYDLPAPPNY

SEQ ID NO: 242087 - protein, 1313 aa, Zea mays
  Clone ID: MRT4577_152364C.1.pep
MPCGKAQVRAAMRGARLEGYLTGATKMPDEETVDNKGKKSPNPAFEEWEAKDQQILSYLLSSISREVQIQVTSAKTAAEAWHSIEAMFASQTRARAVNLRLALSTTKKGSMTVAEYYTKMKGYGDEMAAAGRPLQDEEMVEYILTGLEEEFLPMVSALVTRVDPISLEDLYSQLLNFETKLDLMRGGGEQHQGSANMAGRGGRGNQRGGSGGRGQRGGRGSSRGGRASWSGGRQSNQGGYIRRSNNSSDERPVCQVCFKKGHTAARCWHRFEEDFVPDEKLAGAATNSYHVDTNWYTDTGATDHITGELEKLSIREKYAGGDQIHTASGSDNSAFIEFHPNFFVIKDKDTKNILLKGRCHKGLYPIPATSTIKNALGAVKPSMSRWHNRLGHPSSFIVRQYKSEVFQKFHEFQSLVERLFDRKILAVQTDWGGEYQRLNTFFNKIGISHLVSCPHAHQQNGSAERKHRHIVEVGLSLLAHASMPLKFWDEAFLAAAYLINRTPTKILNLDTPFERLFHKQPDYSVLRIFGCVCWPNLRPYNSHKLQFRSKQCVFLGYSSLHKGFKCLDVSTGRVYVSRDVTFDENFFPFASLHSNAGARLRSEIQLLSPDLLNPATFNSGVDSLIDHAADMSTDPNQISGDNSVQDQAEHTPNMDVLAPSVPNTAPEADAVHIPGSASHSGSAPAAPSTAAPSPTCRGDSRVATHPSASHDYVASVDMSRGIAGREESFLTAPTTATSPASSEPSGSLPATAADAQVPEPILGGVSSMDPASTRPRTRLQQGVRKPKVYTDGTIRYGCFTSSGEPYDLNEALGDVNWKDAMDIEYSALMKNKTWHLVPPKKGRNVIGCKWVYKIKRKADGSLDRYKARLVAKGYKQQYGIDYDDTFSPVVKHATIRIILSIAVSRGWSLCQLDVQNAFLHGVLEEEVYMQQPPGYEDSTKLNYVCKLDKALYGLKQAPRAWYSRLSNKLLSLGFQASKADTSLFFYNKGSVTIFVLVYVDDIIVASSTHKATEALLSDLNKEFALKDLGDLNYFLGIEVNKVRDGIILTQDKYASDLLKKVGMSDCKPISTPLSTSEKLSIHEGSPLGEKDITQYRSIVGALQYLTLTRPDIAFSVNKVCQFLHAPTTLHWAAVKRILRYIKQCTNLGLHIHRSDSTLVSAFSDADWAGSVDDRKSTGGFAVFLGSNLVSWSARKQPTVSRSSTESEYKALANATAELIWVQILLTEISIKSPRAAKLWCDNLGAKYLSANPIFHARTKHIEVDYHFVRDRVAKKLLDIEYVPTGDQVADGFTKPLSVRLLENFKVNLNLTRL

SEQ ID NO: 242088 - protein, 77 aa, Zea mays
  Clone ID: MRT4577_152365C.1.pep
HRRDSGSGSCSSRDHKGVSHIVPSRIHSHHGRRDAAAYEAACGPFQLRAFQENLLCNYRRLVGSVLQCQSFSFTKFS

SEQ ID NO: 242089 - protein, 103 aa, Zea mays
  unsure (1)..(103): unsure at all Xaa locations
  Clone ID: MRT4577_152366C.1.pep
VQAFTIPQVQVQFQTSCLFSSFIWRQAQQGISPPRTMCFPPLSVGERDYEVFACWLQHQLRLPGQAQPQIRXAGLPPWMLSRLNAYRRCEQMACEVIDCLTVD

SEQ ID NO: 242090 - protein, 82 aa, Zea mays
  Clone ID: MRT4577_152367C.1.pep
VQTLNPVLNGSIYSFIACLTRKRHGFSLHSLACSPITKHVDQNHIFYARPTYVHLWTTTTKVHPSTGLEYAHTSNAAVDVQS

SEQ ID NO: 242091 - protein, 71 aa, Zea mays
  Clone ID: MRT4577_152368C.1.pep
MKYYTWYWAHKILLFKVFCFPGKFLMGQVWNKFFEEIGVKELFFPPYFCFPILKSTYLYLIICTNWRFILR

SEQ ID NO: 242092 - protein, 68 aa, Zea mays
  Clone ID: MRT4577_15236C.1.pep
PGINTRLVLLSGDHLASILWLGTRSNYPSSCSSISIILWISPRLGSTWIIFRFTRLFIVPHEMHDAHV

SEQ ID NO: 242093 - protein, 73 aa, Zea mays
  Clone ID: MRT4577_152370C.1.pep
KKARELKLSSYVEAVNHAKQGNLSHRPLEPPPRYIKTCIILMCAAMLLFFFLFFVFFFFFCFFMNFFFLDFFV

SEQ ID NO: 242094 - protein, 105 aa, Zea mays
  unsure (1)..(105): unsure at all Xaa locations
  Clone ID: MRT4577_152371C.1.pep
HGQGGGSVDVSLLTIEEGIFEVKATAGGXHLGGGDFDNRMVNHLXGEFKRKNKKDITGNPRAHREGMTAKKKAKRTLSSTAQTTIEIDSLYESIDFYSTITRARF

SEQ ID NO: 242095 - protein, 115 aa, Zea mays
  Clone ID: MRT4577_152372C.1.pep
VTLATNPDGGGEASHQGDALSLQMPGWQQRTPTLRLLELPRHGGESSAAWSPWSWSSSKREARSALDLDLCPKGKNQRKVQRFFLSACFGSSHIYPSSLFFLINPLYPLIIEART

SEQ ID NO: 242096 - protein, 133 aa, Zea mays
  Clone ID: MRT4577_152374C.1.pep
MANKSAAAAILLAAAVLGCLVSASLADQGTATYYTVYTPSACYGNQDEGTLIAAASDALWNGGAACGTMYTVTCVGGTNETPNPCNPGASVTVKIVDRCPSPGCQATLDLSQQAFATIGNLGAGKIVIDYSQA

SEQ ID NO: 242097 - protein, 64 aa, Zea mays
  Clone ID: MRT4577_152375C.1.pep
IIVCVLSLHTYTFVCVQNTVLCVPGCFCCTWIQTSYSSRMMFVCKAHLMVLPYFCCFIHGKVSV

SEQ ID NO: 242098 - protein, 133 aa, Zea mays; identical to SEQ ID NO: 242096
  Clone ID: MRT4577_152376C.1.pep

SEQ ID NO: 242099 - protein, 371 aa, Zea mays
  Clone ID: MRT4577_152377C.1.pep
MPLAEPPQWRRKATDFFSTSSVKLKQAGQSAGDNIADVAGKVGSAVKSRWVVFQEARQQQQQRPPHETVQERIITAAATTGLLFRKGISETKEKVAVGKVKVEEVAKKTADKSKNILNNIERWQKGVASTDVFGVPIEATVQREQSGKAVPLVLVRCADYLVISGLNNEYLFKSEGDKKVLQQLVSLYNEDSGASLPEGVNPIDVGALVKCYLASIPEPLTTFSLYDELRAARVSIPDLRDILKKLPNVNYMTIEFVTALLLRVSHKSSLNKMDSRSLAVEFAPLIMWRQGDAGTDLRNHLKLTLKPPPKIVDTTSNTATWDLFDEDGEDASSQIPLDDASPPDYNSIEVIQCLIEHHNAIFTDANETVWR

SEQ ID NO: 242100 - protein, 64 aa, Zea mays
  Clone ID: MRT4577_152378C.1.pep
EDNDGVATDDFNVLRADGESLQGVLQEAHPSSVSPASDACALLISMTGFHGLAARMLWLVHLDA

SEQ ID NO: 242101 - protein, 174 aa, Zea mays
  Clone ID: MRT4577_152379C.1.pep
MPLVESPQWRRKATDFFSSSSFKLKQAGQSAGDNIADVAGKVGTVVKSRWAIFQDARQRPPQPGDTVQERFISAAANTGVILRKGISETKEKVAVGKVKVEEAAKKTADKSKTILNNIERWQKGVASNDVFGVPVEATVQREQSGKAVPLILVRCAGPGVKSGLVSCCKRKNDV

SEQ ID NO: 242102 - protein, 50 aa, Zea mays
  Clone ID: MRT4577_15237C.1.pep
RCKIIACRRTYMRRDRGLLKRSIYELSCDLAERVEVVHALIIGAQRDGSL

SEQ ID NO: 242103 - protein, 67 aa, Zea mays
  unsure (1)..(67): unsure at all Xaa locations
  Clone ID: MRT4577_152380C.1.pep
PVGLGGHPXKKEGFHLGEFKQGGLPMVPFLGFPVRAPPPGKGPFNIWAPPLRDPFPIPFFDRLGGSF

SEQ ID NO: 242104 - protein, 133 aa, Zea mays; identical to SEQ ID NO: 242096
  Clone ID: MRT4577_152381C.1.pep

SEQ ID NO: 242105 - protein, 147 aa, Zea mays
  Clone ID: MRT4577_152382C.1.pep
MPLAESPPWRRKATDFFSTSSVKLKQAGQSAGDNIVDVAGKVGSVVKSRWAVFQEARQQQQQQQRPPHETVQERIITAAASTGLLFRKGISETKEKVAVGKVKVEEAAKKTADKSKSILNNIERWQKGVASTDVFGVPIAAGRPGEH

SEQ ID NO: 242106 - protein, 156 aa, Zea mays
  unsure (1)..(156): unsure at all Xaa locations
  Clone ID: MRT4577_152383C.1.pep
PDSLPRSAVLDLFVATQQAPVIIPAIYWARACAWSVSGLQTGERGVTQPRGLLSYGAPVLYELRIDEPVAGHYCXLRDDDRYLRIHREGDRPTTTDSILIVLMNQVEKDMKTMTLPADYNLYLEAVAFNGSATADEPDRAVRAGINTVKTLYAGSI

SEQ ID NO: 242107 - protein, 168 aa, Zea mays
  unsure (1)..(168): unsure at all Xaa locations
  Clone ID: MRT4577_152384C.1.pep
PGQNPTINQCTPPSLSRRVGYTFVMTKPDRXQRGLIAETMSRAENKGFYLHAPNLVNDQRSIAEKHYTGLAFKPFLXGLGDYIIYRPVAAMVWEGKSFTTTGRKIIGPTNPLASEXPGTIRGDFADDIXRNVIHGIDSIESANKEIALWFPDGPADCAQHQHPWIYDK

SEQ ID NO: 242108 - protein, 70 aa, Zea mays
  Clone ID: MRT4577_152385C.1.pep
KMWVNIKGLTPRALLFQSPSRKRVYPYPLWPIARVLNCTTNQPISVSNWKNSRALLTCYVGLLKTRRERK

SEQ ID NO: 242109 - protein, 162 aa, Zea mays
  unsure (1)..(162): unsure at all Xaa locations
  Clone ID: MRT4577_152386C.1.pep
PSRAHYANKNAPFLYHLLKKPTKGRYMVLAMDDAADEHAXGACRRVAGLEPQXATKLGVTLDETKNKKKXMKEKLEDMCKIMNXIINDVVDNEVENDRVADPPGYLPTCHDTCADSLTSNMKRLIMAHSLMDSNMSSYMTIEMTLEIPLMNQLLDHLHAHTN

SEQ ID NO: 242110 - protein, 91 aa, Zea mays
  Clone ID: MRT4577_152387C.1.pep
VVASRGSDAWMRGREAGQFADDLHSGVEGVPHKQTSTVSAVAKHTMPHGTSNYPLLARSCSVSLTLCHQRGANHHRGTSFKPPTMIHSSAR

SEQ ID NO: 242111 - protein, 138 aa, Zea mays
  unsure (1)..(138): unsure at all Xaa locations
  Clone ID: MRT4577_152388C.1.pep
VRQVQAGRSSFGMRAAAYPNKAIWMPDSTPTSRIHGSLPGEFCFDPWGLESDPSETAXNVHEQLAHCRGKMLGAAGILIHEFLTKIGVLNTPLWYTVXEQQYFTDTTTLFIIEVILIRCADGRRWVDIINAGSVTPTT

SEQ ID NO: 242112 - protein, 55 aa, Zea mays
  unsure (1)..(55): unsure at all Xaa locations
  Clone ID: MRT4577_152389C.1.pep
DAPCTGALSPAVFGVTPRGTVXLARALGPVLFVFFPSFLATLAGFPGKVLNGGFP

SEQ ID NO: 242113 - protein, 95 aa, Zea mays
  unsure (1)..(95): unsure at all Xaa locations
  Clone ID: MRT4577_15238C.1.pep
FFTWAPXEEELVHPGFRGLLTHNGRNSIQXAISQVLPKVCWPRDWDHSSNMRYVCDKWXRARRLVGEHLERGHMKAAIDRLSGTNDWGEIKERMK

SEQ ID NO: 242114 - protein, 77 aa, Zea mays
  unsure (1)..(77): unsure at all Xaa locations
  Clone ID: MRT4577_152390C.1.pep
MDGGGAHGXGTTYKGYTIPHNKRGHTVSGKGLRAVMWYWVFYRAKHDGATLLRLRQTWDGQEHHSHGHGHGNEASRH

SEQ ID NO: 242115 - protein, 416 aa, Zea mays
  Clone ID: MRT4577_152391C.1.pep
WVEIYSVAPPVRAQAIASKRPQFIMMADELFEQLQKFNIGSQYPYENEMDLALERALCSLLVGDICNCRMWLGIDNESSSYRDPKIIEFVVNNSSMNEENDLLPGLCKLLETWLVSEVFPRSRDTRGTQFRLGDYYDDPKVLSYLERMEGGGASHLAAAAAIAKLGAQATAALGTVKSSALQAFSKVFPLIEQLDMSGKDIPSDDLDKSLEKLAQGSVAGDAIHDSRNDALKIISAGTLLALFAVLGLKCLPRNKSLPALRGEYGSVAVVDSIDGPAADEEPLEIPRMDAKLAEDIVRRWQSIKSKALGPEHTVTALQEVLGGNMLKVWTDRAAEIERHGWFWEYALSGVTIDSITVSVDGRRAAVEATIEEVGRLTDVTDPKNDDAYDTKYTARYEMTYSRPAGWRITEGAVLKS

SEQ ID NO: 242116 - protein, 99 aa, Zea mays
  Clone ID: MRT4577_152392C.1.pep
VVVTEALEVVVTEVLRGLTLPGKQETRHAQAGEDPPQDRAGPPWRAHKLLISQVVRGWRLFIVPKDRSSQDSQIALWGRAISFKRKISERMTTSTPALP

SEQ ID NO: 242117 - protein, 354 aa, Zea mays
  unsure (1)..(354): unsure at all Xaa locations
  Clone ID: MRT4577_152393C.1.pep
ESHRQGRGRRASHFCDEDGYDLPSSAYDATPRQNEESSEDNDDTSDATAEDEPERDTEAGEQDQWQGSMPSKFHLYQLSVQXTEWIRTDARRTAIGLDLDLESLEWCLENNLSKIGADGYSRMLLFHGNVLQPMESRLVKQKFTNLVHGLDLNSNNGTGSNSCKQMGLADSKCLANLTMSEADFPARDIICAFNYSCCCLHSRKDLVLYFRHVCSVLSERGGIFVMDVYGGISSERKLRLQRKFPSFTYFWEQDEFDIISRQTRISLHFQGGKKQMLRYAFTYHWRLWSIPEIKDCLEEAGFKWVHVWMREMPNTQSGGNAKEYNANRDVKYEESQHFNQGDAWNAYVVGVANV

SEQ ID NO: 242118 - protein, 60 aa, Zea mays
  Clone ID: MRT4577_152394C.1.pep
KLPHRPRKRAKNVDKTLRFVFQGMWLSDFTTERYQVRDKKCVKNQRKGLKGMKSMDSYLK

SEQ ID NO: 242119 - protein, 398 aa, Zea mays
  Clone ID: MRT4577_152395C.1.pep
MGKSGKKPRESHRQGRGRRASHFCDEDGYDLPSSAYDATPRQNEESSEDNDDTSEATAEDEPERDTEAGEQDQWQGSMPSKFHLYQLSVQSPKGDISYLQKFFLMYVGGRAPLHLQEDFCGTALLSTEWIRTDARRTAIGLDLDLESLEWCLENNLSKIGADGYSRMLLFHGNVLQPMESRLVKQKFTNLVHGLDLNSNNGTGSNSCKQMGLADSKCLANLTMSEADFPARDIICAFNYSCCCLHSRKDLVLYFRHVRSVLSERGGIFVMDVYGGISSERKLRLQRKFPSFTYFWEQDEFDIISRQTRISLHFQGGKKQMLRYAFTYHWRLWSIPEIKDCLEEAGFKWVHVWMREMPNTQSGGNAKEYNANRDVKYEESQHFNQGDAWNAYVVGVANV

SEQ ID NO: 242120 - protein, 131 aa, Zea mays
  unsure (1)..(131): unsure at all Xaa locations
  Clone ID: MRT4577_152396C.1.pep
SKQQRDEATRTEGTQGPXQAAISPTTRQKDSRGRGTTTTDQQXQQLGRPGSQRDDKAKGSRGFRNEQVRQSATTQRKNDSEQGETGPRNPRKRARQREKNMQRPNEERRTERQDTTSDRQKHAHSMDTLSV

SEQ ID NO: 242121 - protein, 64 aa, Zea mays
  Clone ID: MRT4577_152397C.1.pep
LSYHTGWVNLLGGAHNSAQMPSTMNCQTTDTRCSNINNFNLTYFEHVKMRKGCPMKLRTKLSTY

SEQ ID NO: 242122 - protein, 323 aa, Zea mays
  unsure (1)..(323): unsure at all Xaa locations
  Clone ID: MRT4577_152398C.1.pep
IGYLEAGRDHIPTSRTRTNCYPLASPSPPPXSSPPPTAAAARLRMAAAPSSXVLPSLPPRRAQRVVAMAGSGKFFVGGNWKCNGTKDSVSKLVSELNAATLETDVDVVVAPPFIYIDQVKNSLTGRIEVSAQNVWIGKGGAYTGEISAEQLVDIGCQWVILGHSERRHIIGENDEFIGKKAAYALSQNVKVIACIGELLEEREAGITFEVCFEQMKAFADSISNWADVVIAYEPVWAIGTGKVATPEQAQEVHAAVRDWLTTNISPDVASSTRIIYGGSVNAANCAELAKKEDIDGFLVGGASLKAPDFATIINSVTAKKVAA

SEQ ID NO: 242123 - protein, 65 aa, Zea mays
  Clone ID: MRT4577_152399C.1.pep
FVFCVRKFFLVNLLCFFFSRVFYVFVMSERGRLDGGCLICVVFFTGFGFLWLFGGLCFHKTEKKK

SEQ ID NO: 242124 - protein, 114 aa, Zea mays
  Clone ID: MRT4577_15239C.1.pep
LGVGDVGREARRPLREAGPGCAAAQLRPLRAISAPSRRSKREDNFQLLICNHSWTLSRGAICRLNSFLLGRPMCELNFVYMTCQIDCHCCGQQFVTENYDLYIWSRQSMRTGFA

SEQ ID NO: 242125 - protein, 81 aa, Zea mays
  Clone ID: MRT4577_1523C.1.pep
IFFLLGGGGGGGYKEIKRSVGGDAFLMNYHGMVAKARCLKGRQGDNAFIELNIQHGSLQTNQQINHRKQLTNKQQQIGYCS

SEQ ID NO: 242126 - protein, 172 aa, Zea mays
  unsure (1)..(172): unsure at all Xaa locations
  Clone ID: MRT4577_152400C.1.pep
MTCDENVVYDSFSVRXHIIGENDEFIGKKAAYALSQNVKVIACIGELXXXXXXXXXFDVCFRQMKAFADSISNWADVGIAYEPVWAIGTGKVATPEQAQEVHAAVRNWLTTNISPDVASSTRIIYGGSVNAANCAELAKKEDIXXXXXXXXSLKAPDFATIINSVTAKKVAA

SEQ ID NO: 242127 - protein, 305 aa, Zea mays
  unsure (1)..(305): unsure at all Xaa locations
  Clone ID: MRT4577_152401C.1.pep
EWPRRRRPSCPPISLASPXPPPRGGAGHSHRPTAXASAARAAAXQRVVAMAGSGKFFVGGNWKCNGTKDSVSKLVSELNAATLETDVDVVVAPPFIYIDQVKNSLTGRIEVSAQNVWIGKGGAYTGEISAEQLVDIGCQWVILGHSERRHIIGENDEFIGKKAAYALSQNVKVIACIGELLEEREAGKTFEVCFEQMKAFADSISNWADVVIAYEPVWAIGTGKVATPEQAQEVHAAVRDWLTTNISPDVASSTRIIYGGSVNAANCAELAKKEDIDGFLVGGASLKAPDFATIINSVTAKKVAA

SEQ ID NO: 242128 - protein, 587 aa, Zea mays
  unsure (1)..(587): unsure at all Xaa locations
  Clone ID: MRT4577_152402C.1.pep
IGCRVSNVLVGFFYRRDPRVRPRVRTIEKELNRRAAETASKQQLEGIRKVAKLQAECRRLQAAAQRRASSVNVELRRSPSSXASSRSRIXSDCSDSWASALVTELDQFKKDKSGASTRTASLVAADIDVMDDFLEMEKLASANGSSKGDAVEDASGQVEKALHEAQRELRTCRRRVMVAEERSAELQRQLNHANGDKHAMEAEAEAAEAKGRELEGKLELARADIAGLLDKGRILEERLESEKALTLELAAKYQDMETLEAEKRELNAQLETSRSEAKKLSDKIALMERKLEVEKALSIRLATKCHGVDALEAKKKGVELELESAREEIASLRNKASSLELHVMVEKASSAGLAMRCQELEELRSQLVSSNSRIVELNEKVKTLEDVIEKQRPVTAELESQLQSRHDEISSLKEDISLLQKKLESQKNLSSAYISALGASETEKKELATRFELGEKEAEELRGKTSLLEEQIHEERARSSEFAVKCRKMEEQFSRRSLLGHQPVKSSAIKDIQIRKETELAKAAGKLADCQKTIASLSSQLKSLADFDEFLPETETSGADSADAWDGDLKLLHPASYPTQIGCLAVT

SEQ ID NO: 242129 - protein, 304 aa, Zea mays
  unsure (1)..(304): unsure at all Xaa locations
  Clone ID: MRT4577_152403C.1.pep
EWPRRRRPSCPPISPXRRPPPRGGAGHSHRPTAXASASRAAAXQRVVAMAGSGKFFVGGNWKCNGTKDSVSKLVSELNAATLETDVDVVVAPPFIYIDQVKNSLTGRIEVSAQNVWIGKGGAYTGEISAEQLVDIGCQWVILGHSERRHIIGENDEFIGKKAAYALSQNVKVIACIGELLEEREAGKTFEVCFEQMKAFADSISNWADVVIAYEPVWAIGTGKVATPEQAQEVHAAVRDWLTTNISPDVASSTRIIYGGSVNAANCAELAKKEDIDGFLVGGASLRXPDFATIINSVTAKKVAA

SEQ ID NO: 242130 - protein, 192 aa, Zea mays
  Clone ID: MRT4577_152404C.1.pep
LLWAIGILEAGRDTRSAGNAGGGGHDDEAGGAGGATVALPGLLPAAFSFSSRAPESTMHNAPVTKPLYHHHHEHDECGADVQDDRRYDFTGRRLATTIDDELRHFDDPIQVNIAKENGGRLTLRLSRTCANCTRLIIYRACSRKHIYCQEALLPCLSMVYSNECLFLELKHSITAVTTYYRISRTPLRTFTS

SEQ ID NO: 242131 - protein, 263 aa, Zea mays
  unsure (1)..(263): unsure at all Xaa locations
  Clone ID: MRT4577_152405C.1.pep
EWPRRRRPSCPPISPXRRPPPRGGAGHSHRPTAXASASRAAAXQRVVAMAGSGKFFVGGNWKCNGTKDSVSKLVSELNAATLETDVDVVVAPPFIYIDQVKNSLTGRIEVSAQNVWIGKGGAYTGEISAEQLVDIGCQWVILGHSERRHIIGENDEFIGKKAAYALSQNVKVIACIGELLEEREAGKTFEVCFEQMKAFADSISNWADVVIAYEPVWAIGTGKVATPEQAQEVHAAVRDWLTTNISPDVASSTRIIYGGSVQG

SEQ ID NO: 242132 - protein, 406 aa, Zea mays
  unsure (1)..(406): unsure at all Xaa locations
  Clone ID: MRT4577_152406C.1.pep
MASSRGPLAALLLLAACAAFFPAAGAAGTPDGSEEWGYVEVRPKAHMFWWLYHSPQRVDNGKTPWPTVLWLQGGPGASGVGYGNFMEIGPLDEKLKPRATTWLAKADLLFVDNPVGTGFSYVDGGDKSLMXVHLAGVALGDSWISPLDFVLSWGPLLYQVSRVDEKGLQQCNSVAAKIKEQLEKGQFADAEASWSELEGVVLASSNSVNFYNFLKDEASGDATATATAAVSTLASFRRRGGYSGYLSSMAASSSSSAGGFDGLMNTVIKKKLGIIPKDLKWGEQSDDVFDALAGDFMKPRIQEVDQLLKLGVNVTIYSGQLDLICATKGTMDWVQKLKWDDLNSFLSSPRTPIYCDKEGQSGTQAFVKSYKNLNFYWILEAGHMVPLDNPCPALKMLADITRSPAE

SEQ ID NO: 242133 - protein, 464 aa, Zea mays
  unsure (1)..(464): unsure at all Xaa locations
  Clone ID: MRT4577_152407C.1.pep
MASSRGPLAALLLLAACAAFFPAAGAAGTPDGSEEWGYVEVRPKAHMFWWLYHSPQRVDNGKTPWPTVLWLQGGPGASGVGYGNFMEIGPLDEKLKPRATTWLAKADLLFVDNPVGTGFSYVDGGDKSLMAHTDAEAARDLVTLLCALYRDSPRLRASPLYIVAESYGGKFAVTTALAALRAVDQGRLGVHLAGVALGDSWISPLDFVLSWGPLLYQVSRVDEKGLQQCNSVAAKIKEQLEKGQFAGAEASWXSLNRFLSSPXNSVIFYNFLRNQASGDATATATAAVSTLASFRRRGGYSGYLSSMAASSSSSAGGFDGLMNTVIKKKLGIIPKDLKWGEQSDDVFDALAGDFMKPRIQEVDQLLKLGVNVTIYSGQLDLICATKGTMDWVQKLKWDDLNSFLSSPRTPIYCDKEGQSGTQAFVKSYKNLNFYWILEAGHMVPLDNPCPALKMLADITRSPAE

SEQ ID NO: 242134 - protein, 81 aa, Zea mays
  Clone ID: MRT4577_152408C.1.pep
RTGVRPFHSIALFASSCYSAGDRVMSASILSAGQGVVERYHVSGFEYPVEIEVLVGLDESLGAGLPLLVAEMGVLESSGNC

SEQ ID NO: 242135 - protein, 90 aa, Zea mays
  Clone ID: MRT4577_152409C.1.pep
WLGIPTRRSMGEKPLESNRESKITPTTASAGGQRSQDRQGGPRAPPTRRRGPRAHRQRHAGATRPGLGRRDHPTAETPEIKARSREGPMK

SEQ ID NO: 242136 - protein, 55 aa, Zea mays
  Clone ID: MRT4577_15240C.1.pep
SFRLNCTLNGLGLILALLRGQHLMLSPQYLLRSPSILQYSCFIYVIKRVSCRVPD

SEQ ID NO: 242137 - protein, 102 aa, Zea mays
  unsure (1)..(102): unsure at all Xaa locations
  Clone ID: MRT4577_152410C.1.pep
RREEEGGGKGKGPGEREKEKVRRERXEKEMEEERXRXRVEKERKDSERQEIERKESEREEDERMEEEEECSWMDHELHRRIDNEVELLAPRREVEEREWLVE

SEQ ID NO: 242138 - protein, 152 aa, Zea mays
  unsure (1)..(152): unsure at all Xaa locations
  Clone ID: MRT4577_152411C.1.pep
MSLPTTHHRRRPLLYGWTSIDQDSRCAEEGRGCPKRRKDPPGRTLDEGELQPTGRRKPLLQRMRPLVVSAEQLAEAGGFMFGVPSRLGIMAAHFKAFFDAAHRIWETQALAGEPAGIFWSTGPHGGGQELTAXSALTQLLFSLQPIHSNYIC

SEQ ID NO: 242139 - protein, 347 aa, Zea mays
  Clone ID: MRT4577_152412C.1.pep
MAGGGFAVADGPSVDYGGRVTFSVVVTCLMAASGGLIFGYDIGISGGVTAMESFLSAFFPGVLRRMAAARRDEYCVYDSHVLTAFTSSLYLAGLAASLVASRVTRAIGRQAVMLAGGALFFAGAAVNAAAVNVAMLIVGRMLLGFGIGFTNQAAPVYLAETAPAKWRGAFTTGFQLFLSIGNLTANLVNYGTSRIPAWGWRLSLGLAAAPAAVILAGALLIPDTPSSLLVRGRAEEARAALRRVRGAKADVDAELEDVARAVEAARAHEQGAFRRILRREHRHHLAVAVAVPLFQQLTGVIVIAFFSPVLFQTAGFGSNAALMGAVILGAVNLASTLLSIVTVDRYG

SEQ ID NO: 242140 - protein, 188 aa, Zea mays
  Clone ID: MRT4577_152413C.1.pep
FVSEHGGQSEIVLRVKQGENPTFGFLMPDHHLHSYFRYLVDHPQLLKDGADTVGTNKGNTESEHASSGGALSLLGTTYDSGDENEGTLPRSSEGMNPENSMTLDVQGHVKSASIMPDKKEIGKNQNAPPPAVKRKTILMKKNQILTGNSMVAVQHEKVNDAIIASSTSKSHTNLGLLRIKEMILEPPS

SEQ ID NO: 242141 - protein, 256 aa, Zea mays
  unsure (1)..(256): unsure at all Xaa locations
  Clone ID: MRT4577_152414C.1.pep
PRPRVRTKLILVSTKATQTSKLSQCPRPRRRHSFGEEELACLPHRRRDIVLDGESNDLFVAMEGFDETFEVSSKGENKNRKGLLNWFKLRKHDGGSNAPSLGGDQSSLRKALAAPWTPVEIGLNSQTEQEMSNSXPRIYQLTXSIDHEEFHSDGLYGEEASLVTRKTSDHVDLLREQLKILSEEVALHKSVLKRLVEGAGRSTMNGHVEIEMKKVSDEIKDKQQQIAHLERQIKGELDQLEHTPSHATLLEQVNEK

SEQ ID NO: 242142 - protein, 43 aa, Zea mays
  Clone ID: MRT4577_152415C.1.pep
RVILSFHTCGQSEHVERRAYNSKLSLVRSRIKERFLMNVAFNT

SEQ ID NO: 242143 - protein, 65 aa, Zea mays
  Clone ID: MRT4577_152416C.1.pep
NASMHFSSILCLSAAFILSCGYQGCSIRTMLGLGLDLEARIGSLTLLDLADRSLVCLHLLSVLLS

SEQ ID NO: 242144 - protein, 99 aa, Zea mays
  Clone ID: MRT4577_152417C.1.pep
MILLVFLYLGTAALQRRAQRLETLHAFPNKISTKKHGESSSARLHINKPSPTKQIPTTNGDGPAFDGHYSLTDLTLSTMTTDMTIFCRRIHNHKLYKQL

SEQ ID NO: 242145 - protein, 370 aa, Zea mays
  unsure (1)..(370): unsure at all Xaa locations
  Clone ID: MRT4577_152418C.1.pep
MPSQSTHTSSSLSSSTAPILPCSSAAALFRSVMAAVATETPFHVLAVDDSLPDRKLIERLLKTSSFQVTTVDSGSKALQFLGLHDQDSTVPPVHTHQLDVAANQDVAVNLIITDYCMPGMTGYDLLKKIKESSSLRDIPVVIMSSENIPSRINRXSQLALYYLSCGSKQQFLRKKNLILKIGEKITLVRXDLSRVQARKQLYHLXIFLAAGLFLLRKSHHVQKTIRQSLXFFFLSLSMHGDINKXKFXLNIKYTSCKSCLLTAYIXALYMINGRERKLTILPGFEILNXCLEEGADEFFLKPVRLSDMNKLKPHILKSRCNQEQHQQSDSHSGERRNPPISSSDSINNRKRKGAGTEEILPQLANRSRHS

SEQ ID NO: 242146 - protein, 374 aa, Zea mays
  unsure (1)..(374): unsure at all Xaa locations
  Clone ID: MRT4577_152419C.1.pep
MPSQSTHTSSSLSSSTTPILPCSSAAALFRSVMAAVATETPFHVLAVDDSLPDRKLIERLLKTSSFQVTTVDSGSKALQFLGLHDQDSTVPPVHTHQLVRRRWLPLPSSYELVGQPCCATLCIVFSXSLASPQEEVSDVXDVAGNQDVAVNLIITDYCMPGMTGYDLLKKIKESSSLRDIPVVIMSSENIPSRINRCLEEGADEFFLKPXRSLAPLTNSCVARYTGGRALKSKKESNDIIAVLSNKKRRNQKICIXKHKLQELSFNSIYMMLYIXNGRERKLTILPGFEILNQVPGGRSXEFFLKPVRLSDMNKLKPHILKSRCNQEQHQQSDSHSGERRNPTISSSDSINNRKRKGAGTEEILPQLANRSRHS

SEQ ID NO: 242147 - protein, 39 aa, Zea mays
  Clone ID: MRT4577_15241C.1.pep
SKRQRKIRKKEKMSRRSGSSSWYDNTELSDTELNPVYAL

SEQ ID NO: 242148 - protein, 94 aa, Zea mays
  Clone ID: MRT4577_152420C.1.pep
PNRPGYLAPYKGERYHMPEWHRGMEPRTPKEKFNRVHSSIRNVIERSFGVLKMKWQILYNMPPYSMYKQKMIVVATMVLHNFIREHRIEDLNFA

SEQ ID NO: 242149 - protein, 134 aa, Zea mays
  unsure (1)..(134): unsure at all Xaa locations
  Clone ID: MRT4577_152421C.1.pep
KGSPPLKRRAALVGPTSTAARPNPPPPXRPQGPHGGLPREGPNTIRFKGVLPQPPFVPQPAHPGPEKIHFSPPXPIFPSPSKRXVPPFPLPCQPPAQVNPGPLQLPPVPAPPLCICPPLCPVIQPKMFKNPLWV

SEQ ID NO: 242150 - protein, 65 aa, Zea mays
  Clone ID: MRT4577_152423C.1.pep
MKRSLMESVNSPFSGIKPYELNRTTANRRIGGECIGMGWSPRLCTKLKHGQDTCEHHTNIYYYNY

SEQ ID NO: 242151 - protein, 55 aa, Zea mays
  Clone ID: MRT4577_152424C.1.pep
PCGEWLLARDHVFHMNWIVWEVKLCSAAPNYSLSVYSLPQSCTLSKNAWCFPVSI

SEQ ID NO: 242152 - protein, 245 aa, Zea mays
  unsure (1)..(245): unsure at all Xaa locations
  Clone ID: MRT4577_152425C.1.pep
MERSAAGASYQRFPRVRIRELKDEYAKFELKDTDASMANALRRVMIAEVPTVAIDLVEIESNSSVLNDEFLAHRLGLIPLTSSAAMSMRFSRDCDACDGDGSCEYCSVEFHLAARATDSGQTLEVTSTKDLRSTDPKVCPVDQQREYQQALGNVDAYEPDAAGDHRGILIVKLRRGQELRLRAIARKGIGKDHAKWSPAATVTFMYEPDICINQELMETLTLEEKQSWVESSPTKXFDIDPVTNR

SEQ ID NO: 242153 - protein, 84 aa, Zea mays
  Clone ID: MRT4577_152426C.1.pep
IKELKAKLWDEEATASFTSGKAEPAASDGPPPVGVGAFESDSSAVLNYADPPLAEAPVPDVRGTLLDSPGADAGNHWGVFFPGE

SEQ ID NO: 242154 - protein, 85 aa, Zea mays
  Clone ID: MRT4577_152427C.1.pep
RPGSKSNKMKFIVVFMMMMMLALGVSAQKTWICSCFRPKYDFGCCDVVKGKMDNGNVCNVPGRGTPTNLKYEECCTSIGGKYKCK

SEQ ID NO: 242155 - protein, 256 aa, Zea mays
  Clone ID: MRT4577_152428C.1.pep
MASAPAAVPRVKLGSQGMEVSAQGLGCMGMSAFYGAPKPEPDMVALIRHAVAAGVTFLDTSDMYGPHTNEMLLGKALQGDMREKVDLATKFGISFADNKWNIRGDPAYVRAACEGSLKRLGVDCIDLYYQHRIDKNVPIEVTIGELKKLVEEGKIKYIGLSEASASTIRRAHAVHPITAVQLEWSLWSRDVEEDIIPTCRELGIGIVPYSPLGRGFSSGGAKLIDSLSDQDYRKHMPRFQPENLEKIPLIFERVNA

SEQ ID NO: 242156 - protein, 127 aa, Zea mays
  unsure (1)..(127): unsure at all Xaa locations
  Clone ID: MRT4577_152429C.1.pep
GTRGANLWRPPCCSSRPPAHCWLQLNAPEGAGTSARGRLSFLHPRPSLFLPLFPLPLDFSPHRLDFSRKEAAANLGSRWFDQTPEDGRGAGRLRREDTNTRRLASRSTQKTGIGLAXATASGQKISK

SEQ ID NO: 242157 - protein, 162 aa, Zea mays
  unsure (1)..(162): unsure at all Xaa locations
  Clone ID: MRT4577_15242C.1.pep
QCLGTGLNRGQRRGRPGRGGTKARRGGGAGTDGPKKNPGXPEGPPPPEKTAGTPQKPRPARPPPQNAANPTGXPPRARARAGGGAGGGRPGGPDGHPRADPPAPAGGPIEPRGSQERTXPPGRNLGPGGNPETNQTHTKKEPGGKTREPGDPKEGANTEGPP

SEQ ID NO: 242158 - protein, 344 aa, Zea mays
  unsure (1)..(344): unsure at all Xaa locations
  Clone ID: MRT4577_152430C.1.pep
MSDALINGLAGAGGGIIAQLLTYPLQTVNARQQTERDPSKPAFKDGAARQLYLVVKNEGWERLYGGLMPSLVGTAASQGVYYYFYQIFRNRAXARALERSRRGLGDGSVGMLQSLTVAALSGCVNVLLTNPSXVIRVRXKLCWMETNIIHVKXLNCALEESHESARAENAPYKTXNVFQELYKESGVLGFWKGVIPALIMVSNPAIQFMLYETLLKKLKKRRASNFKGADGLTALEIFLLGAVAKLGATVVTYPLLVVKARLQAKHMINDDKRHRYKGTLDAFTKMVRYEGLSGMYKGMGTKIVQSVFASALLFMIKEELVKGARLLVTGNTSLVKKLPSKSSR

SEQ ID NO: 242159 - protein, 243 aa, Zea mays
  unsure (1)..(243): unsure at all Xaa locations
  Clone ID: MRT4577_152431C.1.pep
PSSLPRLQSLRASAQKLSDADCPGANPPPSPLXSSSPAPAPCVPVSAAPSLRSPRCRRARPPXPPXSSPPPCQPPXPSAPPRRPPAPWHHTPIAASARQRLLCCPAPLPPPPHPLPPSALXPHGRLWREESPXRELSSPHSPDDRXPPHPPPAPPLPMRXPPQPRSPPTXAPPRHPLPPGMATASPPWSTRRRPLTGSPAPPNGWLWWPSLTSLRSSGRRPLFVAASRRGLKSWRLTRTIWMA

SEQ ID NO: 242160 - protein, 71 aa, Zea mays
  unsure (1)..(71): unsure at all Xaa locations
  Clone ID: MRT4577_152432C.1.pep
MANAHRILALRLLLALLCAAAXGTGRAQNCRCQPNFCCSTFGYCGTTDDYCXDWCQSGPCCSGGGGGRCGG

SEQ ID NO: 242161 - protein, 118 aa, Zea mays
  Clone ID: MRT4577_152433C.1.pep
LGFCRFYSSGCLFPPFFSFVISFSSCLPFRAFALPCFLFLGLGFLHVSCSRSLSLARFFFRLASCFLLLGRLCPVGIVHVFPLVCCGLLGGAGSGTVLRPPVGCSPVLPRVPRLPFCS

SEQ ID NO: 242162 - protein, 48 aa, Zea mays
  Clone ID: MRT4577_152434C.1.pep
VYPIRRYFSPAGTWLNLWKRSLTFGCRSTLFARFVKVSRSVYLQCFCK

SEQ ID NO: 242163 - protein, 62 aa, Zea mays
  Clone ID: MRT4577_152435C.1.pep
RLGEVFPPFVLLAPPCFLAPPRPSPRFFIKACFVKKKKKKKKKKKKKKKKKKKKKKKKKKKK

SEQ ID NO: 242164 - protein, 326 aa, Zea mays
  unsure (1)..(326): unsure at all Xaa locations
  Clone ID: MRT4577_152436C.1.pep
CSLPVPAIVPSAPLXFFDVDFSNASTFSLADFTTAGDAAFHGQRFDLTANAYRAGISDSVGRVAYAHPVPLRDNATGQVASFTTSFTFAINITDMNNXKGDGMAFFLGNYPSGLPPRSEGGALGLCTDYCGNRTAGRDRFVAVEFDTFDDSWDPHLTYDHMGINVNSVVSVANISLPSFSLNGQMSARVDYNSSTSVMGVDLRFDRSPKFGSATPIFNVSAKVDLSSALPEQVAIGFSAATGASIELHQLLSWSFSSVAPGTGSPTDPGALASSNPRTGLKVALGITSSISILLCAAVVALLRALRRKHLALAEIQLESDARGRLC

SEQ ID NO: 242165 - protein, 118 aa, Zea mays
  Clone ID: MRT4577_152437C.1.pep
PRPGAGPLPPEPCRFGQWPPWSPRPGALPSSCGFFDGARPGCFRGKTVHAGSVFEGFIAPPPAIVPRPVHVCSVCMCVCYSAVGSAFFEASVVVCSSPSCAIVFWDVFAPPPPPSFSS

SEQ ID NO: 242166 - protein, 88 aa, Zea mays
  Clone ID: MRT4577_152438C.1.pep
VPSLRRLLLTHRYDELLATSSTTAAALNDLLGHLDQTTYVCDHSSTNDDYYWPLRSQPRGRPLIYQMLPSSTRLLLRLHHHDHLLSFL

SEQ ID NO: 242167 - protein, 377 aa, Zea mays
  Clone ID: MRT4577_152439C.1.pep
APSPLLCRRRAQARPLPASRLPPPTRVAVQPPAAPVATRIGSFDKVLEALIGGTDFSEEDAEATLKLLLDEKDEARISAFLVLLRAKGETFEEIVGLAKAMLSCCIRVDGLDDAVDIVGTGGDGADTVNISTGSTILAAAAGAKVAKQGSRASSSACGSADVLEALGVNIELGPEGIKQCVNEVGVGFMMSANYHPAMKIVRPVRKKLKIKTVFNILGPLLNPARVPHAVIGVYHENIVTKMAKAAQKFGMKRALVVHSKGLDEISPLGPGYILDVTPEKIEKMFFDPLDFGIPRCTLEDLKGGDPAFNAKVLQDVLAGQRGAIADALVLNAAASLLVSGKVKNLHDGVALAQETQRSGKAINTLESWIKKSNSSRD

SEQ ID NO: 242168 - protein, 52 aa, Zea mays
  Clone ID: MRT4577_15243C.1.pep
TGRQWMLISLVLQTYSIRWDPRHSVFRQNGYRAIVHSTSAYRTNYLIIRLLI

SEQ ID NO: 242169 - protein, 114 aa, Zea mays
  Clone ID: MRT4577_152440C.1.pep
VPRGRPGGYILDVTPEKIEKMFFDPLDFGIPRCTLEDLKGGDPAFNAKVLQDVLAGQRGAIADALVLNAAASLLVSGKVKNLHDGVALAQETQRSGKAINTLESWIKKSNSSRD

SEQ ID NO: 242170 - protein, 38 aa, Zea mays
  Clone ID: MRT4577_152441C.1.pep
YMGLHDVNVSLIFCLLEIAHDFRIMLILEFYFFWPFKY

SEQ ID NO: 242171 - protein, 393 aa, Zea mays
  Clone ID: MRT4577_152442C.1.pep
MAAASLKFASPKPLASAPSALLCGRRAQARPLPASRLPPPTRVAVQPPAAPVATRIGSFDKVLEALIGGTDFSEEDAEATLKLLLDEKDEARISAFLVLLRAKGETFEEIVGLAKAMLSCCIRVDGLDDAVDIVGTGGDGADTVNISTGSTILAAAAGAKVAKQGSRASSSACGSADVLEALGVNIELGPEGIKQCVNEVGVGFMMSANYHPAMKIVRPVRKKLKIKTVFNILGPLLNPARVPHAVIGVYHENIVTKMAKAAQKFGMKRALVVHSKGLDEISPLGPGYILDVTPEKIEKMFFDPLDFGIPRCTLEDLKGGDPAFNAKVLQDVLAGQRGAIADALVLNAAASLLVSGKVKNLHDGVALAQETQRSGKAINTLESWIKKSNSSRD

SEQ ID NO: 242172 - protein, 82 aa, Zea mays
  Clone ID: MRT4577_152443C.1.pep
KYSGDGTPVVAYQSIPCTAIAIMKAFHGPWSRVNKLAACMRFTVGDWMSSTPAIDSLVNSHADRIPRFMMHRVRPLSHTVKP

SEQ ID NO: 242173 - protein, 59 aa, Zea mays
  Clone ID: MRT4577_152444C.1.pep
PDKVVPIFQFGWANFWNCNWCGPFLFYASLRKGGFFDGGLIWLTPGFFSSDVFKRTPVN

SEQ ID NO: 242174 - protein, 66 aa, Zea mays
  Clone ID: MRT4577_152445C.1.pep
MAMAMASFVAQLKDMFLGLVDRVTGCRGCGGDKQDVPEATKIASLQPVEIRSRDPVVGGGSVAGAN

SEQ ID NO: 242175 - protein, 195 aa, Zea mays
  unsure (1)..(195): unsure at all Xaa locations
  Clone ID: MRT4577_152446C.1.pep
NPEGPLPGTRSPHCRGAAGGAREAAVLTDPSRRRXPNEPVQERXGPAPPQRRCRAWRPSCRRPRPPCRGRWESAAAHSRRPSPPSRRRRXSPGAPXWWLRRRRFCPKPPPRRSXSSAPLPRDDDSXSTLSCWGSACSPARTTAPTASSPSPPARTASFRLRWGPQPRSAGHRIAPPSSTESHIISRPRPGQTRGY

SEQ ID NO: 242176 - protein, 85 aa, Zea mays
  Clone ID: MRT4577_152447C.1.pep
RKSREESDTLQFVHFLRCKRVTFLQTDRQTEKKKIQQLTCQGSKHTPTEDGTEEGRIMHPTSAVRPRRRGGGGRRLLPGAGARGS

SEQ ID NO: 242177 - protein, 114 aa, Zea mays
  unsure (1)..(114): unsure at all Xaa locations
  Clone ID: MRT4577_152448C.1.pep
RPPTRGQTHGFGDIMKLLIFVDQNSGESGGACFKTFGCXSVIASLGRATDRVMGTTMGDVLTIXHRGVLYDSSLPPVKLHCNMFAEDAIKAAXVKDYEAQKFKMGHKGEDSPSV

SEQ ID NO: 242178 - protein, 95 aa, Zea mays
  Clone ID: MRT4577_152449C.1.pep
SIIKAECLSGPPKKWATWKHGQLAVSYVCYKAAAMTCIAVVSILHVWLVLAQQGECASAALMYHQVMQISDWSGFHVQKANTCLFIICDLEMETD

SEQ ID NO: 242179 - protein, 559 aa, Zea mays
  Clone ID: MRT4577_15244C.1.pep
FLLGGALRAEDGGASGARPATKVMSVSGSGKRGRYVRQVTGRHNDTDLHVAARGGDAAALRRALLDAAAAVAATGEAPEDLEAARRAVAAEPNEAGETPLVAAAERGHLGVVVELLRHLDAEGLAAKNRSGYDALHVAAREGRHAVVQEMLHHDRMLAKTFGPANTTPLISAAMRGHIEVVELLLEQDDFGLVEMARDNGKNALHFAARQGHTGIVKALLEKDPQLARRNDKKGQTALHMAVKGTSCDVLRALVDADPAIVMLPDKNGNTALHVATRKKRAEIVSVLLRLPDTHVNALTRDHKTAFDIAEGLPVCEESCEIKDILSQHGALRSRELNQPRDELRKTVTEIKKDVHTQLEQTRKTNKNVHGIAKELRKLHREGINNATNSVTVVAVLFATVAFAAIFTVPGGNDNNGLAVVVQTTSFKIFFIFNAVALFTSLAVVVVQITVVRGETKSERRVVEVINKLMWIASVCTTISFIASCYIVLGRHFQWAAILVSLIGGVTMAGVLGTMTYYVVKSKRQRKIRKKEKMSRRSGSSSWYDNTELSDTELNPVYAL

SEQ ID NO: 242180 - protein, 55 aa, Zea mays
  Clone ID: MRT4577_152450C.1.pep
SVIYVTVYISLVMGLGLQHSTIYIHSQAWLGLGFHSPTHSVHHNKRYNYQKKVCA

SEQ ID NO: 242181 - protein, 161 aa, Zea mays
  Clone ID: MRT4577_152451C.1.pep
MSGGGIARGRLAEERKAWRKNHPHGFVAKPETVADGSVNLMIWNCTIPGKQGTDWESGYYPLTLHFSEDYPSKPPKCKFPQGFFHPNVYPSGTVCLSILNEDSGWRPAITVKQILVGIQDLLDQPNPADPAQTDGYHLFIQDPAEYKRRIRLQAKQYPALV

SEQ ID NO: 242182 - protein, 134 aa, Zea mays
  unsure (1)..(134): unsure at all Xaa locations
  Clone ID: MRT4577_152452C.1.pep
RVSTHAVXKKKKKKKKKKKKKKKKKKKKKKKKKQNIKKKXKKINKDNIKKKAVARLMFQVFTSGLTCGVPGAFFFLGSNFTFLAAGFFKGLFLGGPLLFPTLAPFLHHPVWALRGCFQRGRPWGALPFCPLSFL

SEQ ID NO: 242183 - protein, 89 aa, Zea mays
  Clone ID: MRT4577_152453C.1.pep
CKKRMPNQREQYEDTVHLFIGTGCSPCKITPMPFTFANNSIVILRGLICLFIFKSVPLFCCHVEAFPAHSFVITLSFVIITFRLAQASS

SEQ ID NO: 242184 - protein, 139 aa, Zea mays
  Clone ID: MRT4577_152454C.1.pep
MEGVSSLNQPLINDDRQPVPSSIAKGDQIQGLLSGEWTNERHSSYISSMEASFVEQLRSGSKAIQEGLCQSMRIPRDDARSHDVPESPWVVVRRFRPRGVHHGDGMEVEPLVDGYGSGTDTAREKVRTHARVAKASAII

SEQ ID NO: 242185 - protein, 54 aa, Zea mays
  Clone ID: MRT4577_152455C.1.pep
QPKQQLQHPNWLYLTIQTIGTYNQQLRLPKGRCAITIQKPSMLLAILIEYIQPN

SEQ ID NO: 242186 - protein, 60 aa, Zea mays
  Clone ID: MRT4577_152456C.1.pep
VFLFTIRCPKINLYAPWCIASNNEHRLICFFVYPCVIHVIFTVLPVFSVNQKKVMVYRSQ

SEQ ID NO: 242187 - protein, 79 aa, Zea mays
  Clone ID: MRT4577_152457C.1.pep
GPRFPPALGCRIPPPPLLVVGVPAGFKFLGSLLAGRTGHLAWAPLWPGGPGPFLFWFLGSLQPPMPNRWPCCFPRFSGL

SEQ ID NO: 242188 - protein, 212 aa, Zea mays
  Clone ID: MRT4577_152458C.1.pep
LQKNSSTPCSRHARALPCSCAQLQRRYVAPLEASSSCCEGMTPLSPPPCSPLLALRNRSILSVPRRCFRSRSGPSRSPHGVHPAPSPSSLSAPRCSPVCVMAVGQSHPTNPVATLFPGEASVISSPKAFPMAGEPLGAPCFARARRSLHGRRDLLLADLLSLRSQLRPRKKKVVVRLQKKQRENHPHSPALGSLSARRRCSAICPCASRAWC

SEQ ID NO: 242189 - protein, 72 aa, Zea mays
  Clone ID: MRT4577_15245C.1.pep
FPRLPTLPSTHIPTPSISIPHHHHPLSDWLPNNTILLILLLHSIHTPIQSHDSITLLLPYLILYNHQTLIHS

SEQ ID NO: 242190 - protein, 58 aa, Zea mays
  Clone ID: MRT4577_152460C.1.pep
QTGTGGGYYLAMKTAPDGADLPELHHALLNLDLHAFVLGGRLLFNHPFLIWLGLLFGT

SEQ ID NO: 242191 - protein, 69 aa, Zea mays
  unsure (1)..(69): unsure at all Xaa locations
  Clone ID: MRT4577_152462C.1.pep
YMVTADAIGSTNMQVDTRTFMSTKTDAKHAGRDXKLKNSVSFFFTHTXQXLCXGASLALFIIGQPPXQA

SEQ ID NO: 242192 - protein, 104 aa, Zea mays
  Clone ID: MRT4577_152463C.1.pep
SGHQQNQIVTKSIARPMSRGGHPFVSACAASYRRGAGLAGAGGWSGPPPSAVCLPPATTRSGRATPASATRPPVLEVPAPSAFSPPRCSGGGPRVRQARRGRTL

SEQ ID NO: 242193 - protein, 105 aa, Zea mays
  unsure (1)..(105): unsure at all Xaa locations
  Clone ID: MRT4577_152464C.1.pep
VDLPKXLFEINQDKVFGLTINPAILQAIRKTRAKTLGFDGRQSNYAEMDHVRQELVHANQIFAQNPSWPVIAVTGKAIEETAAVILGILHDRKQKCSMPRISKRY

SEQ ID NO: 242194 - protein, 426 aa, Zea mays
  Clone ID: MRT4577_152465C.1.pep
MIGCAKPLAAPLQAWARPPSPAGRRLPPSFCAPDTSPALTRAVESPGQSQSDDAPPPRSGEAASSLAPRASSHLDRWSRSRALRSGHRPALNRAALSSASVSAPPVIKSPRPEDAAVAVEDGEDDDVCEAERDAAAGKAIYIVSDGTGWTAEHSVNAALGQFENCLADRGCAVNTHLFSLIDDMDRLIEVIKQAAKEGALVLYTLADPSMAEATKKACDFWGVPCTDVLRPTVEAIASHIGVAPSGIPRSSPSRNGRLSEDYFQRIDAIDFTIKQDDGALPQNLYRADIVLAGVSRTGKTPLSIYLAQKGYKVANVPIVMGVDLPKSLFEINQDKVFGLTINPAILQAIRKTRAKTLGFDGRQSNYAEMDHVRQELVHANQIFAQNPSWPVIAVTGKAIEETAAVILGILHDRKQKCSMPRISKRY

SEQ ID NO: 242195 - protein, 70 aa, Zea mays
  Clone ID: MRT4577_152466C.1.pep
QSCEIMLGEHHPTKWQLLDKLQPISGPLNNMAFLTGTITSRNQRQTGIHMLTYWSPNITGETFIFTMAGR

SEQ ID NO: 242196 - protein, 61 aa, Zea mays
  Clone ID: MRT4577_152467C.1.pep
FLCWLHPILRLLLTFGAFAYLAALKLVHNIRRGGHQTKSQPPLRRMNAFHETQSEMKECIH

SEQ ID NO: 242197 - protein, 118 aa, Zea mays
  Clone ID: MRT4577_152468C.1.pep
PALPFWVGRLPPPLGGNFFPPLFVVPRPLPFFLTFVPLFFYIFSLFPFWLTLYFWVFSPRFFLFGFFFILGSLFFYPFFLGVFSPLVFFLGPSLSLAPTWAICLSSTITLLKGVEKPE

SEQ ID NO: 242198 - protein, 237 aa, Zea mays
  unsure (1)..(237): unsure at all Xaa locations
  Clone ID: MRT4577_152469C.1.pep
MPAAMGTPILTLPAPDGNGTGGGDANQQLLQAPPKPPPPGAKTDPPATVATHTRTIGIIHPPPDIRVIIEKTATFVAKNGPEFERRIISLNQGNAKFNFLQPSDPYHAYYQHRVSEIAATPPSADGLSGAETDTAPAEAPASTPADGAAAVPADGAAVDTKADHSAPFRVVPPPKVLVPPKAELYTVRLPEGITGEELDIIKLTAQFVARNGXKNFLTSLAQRESNNMQFHFIRPTH

SEQ ID NO: 242199 - protein, 177 aa, Zea mays
  Clone ID: MRT4577_15246C.1.pep
MEGHVFGGGNWGSSPYPGPNANINASVNENQFMFDAKAAPQQLQLFGSNAVGTSGYYNYNGNDNPYVTNQPRKTSNCAADEKKLKLQMSLNNLHAGDADRLACTGNSSVVSTGLKLSYEDNEHNSSFTSGTGSMSSLTSTTPFGHDIMTEMEKGKQEIDYYLRSQLETLSRRVKEMK

SEQ ID NO: 242200 - protein, 183 aa, Zea mays
  Clone ID: MRT4577_152470C.1.pep
MAAAMGNPILTLPAPEGNGTGGGDADQQLQQAPPKPPPPGAKTDPPATVATHTRTIGIIHPPPDIRVIIEKTATFVAKNGPEFERRIISLNQGNAKFNFLQPSDPYHAYYQHRVSEIAAAPPGADGPSGADTGAAPDESPASAPADGAAAAPVDGAAADAKADHSAPFRVGPAPKVLVPPKAE

SEQ ID NO: 242201 - protein, 120 aa, Zea mays
  Clone ID: MRT4577_152471C.1.pep
ERRPKGKLGVEVAPELQLNRIRITLSSKNVKNLEKVCADLVKGAKDKHLRVKGPVRIPTKVLHITTRKSPCGEGTNTWDWFEFRIHKRVIDLISSPDVVKQITSITIEPGVEVEVTIADV

SEQ ID NO: 242202 - protein, 89 aa, Zea mays
  Clone ID: MRT4577_152472C.1.pep
IQKSLSPLRQKQCQQMLSHLMRLQQSHSSHHLPYGSHLTRYSLIQHRHIQGGIGRQFDHHSTHQPFTLCPSFAYSTAPSLSLSICLGYT

SEQ ID NO: 242203 - protein, 126 aa, Zea mays
  Clone ID: MRT4577_152473C.1.pep
MAAAAVYGGLKGKLGVEDAPELQLNRIRITLSSKNVKNLEKVCADLVKGAKDKHLRVKGPVRIPTKVLHITTRKSPCGEGTNTWDRFEFRIHKRVIDLISSPDVVKQITSITIEPGVEVEVTIADV

SEQ ID NO: 242204 - protein, 105 aa, Zea mays
  Clone ID: MRT4577_152474C.1.pep
PAGSEHRSPSAPELHCIHTVIIDNIIRYLAGNGAAGFRTCSPDLHTCTPYRATRGCTLSLSTWVCCLMMRVCLFYTSMNDVDTLLLLPHHSHRCDEHSHGHAHEL

SEQ ID NO: 242205 - protein, 88 aa, Zea mays
  Clone ID: MRT4577_152475C.1.pep
MAAAAVYGGLKGKLGVEDAPELQLNRIRITLSSKNVKNLEKGTNTWDRFEFRIHKRVIDLISSPDVVKQITSITIEPGVEVEVTVADV

SEQ ID NO: 242206 - protein, 34 aa, Zea mays
  unsure (1)..(34): unsure at all Xaa locations
  Clone ID: MRT4577_152476C.1.pep
AHVVSAILNFSENCTPEFLTPXLDEMVNKLLVLL

SEQ ID NO: 242207 - protein, 126 aa, Zea mays
  Clone ID: MRT4577_152477C.1.pep
MAAAAVYGGFKGKLGVEDAPELQLNRIRITLSSKNVKNLEKVCADLVKGAKDKHLRVKGPVRIPTKVLHITTRKSPCGEGTNTWDRFEFRIHKRVIDLISSPDVVKQITSITIEPGVEVEVTIADV

SEQ ID NO: 242208 - protein, 56 aa, Zea mays
  Clone ID: MRT4577_152478C.1.pep
RYMNGANCLYGNQTWSRIKLPTNNNQSKQKKKDGKMTQHLLALYTEEAGPIVLRLT

SEQ ID NO: 242209 - protein, 47 aa, Zea mays
  Clone ID: MRT4577_152479C.1.pep
MGMRIGDTRVIRDPLTGGACTACAAVGRMNGFYMLASQIGAALMVCA

SEQ ID NO: 242210 - protein, 80 aa, Zea mays
  unsure (1)..(80): unsure at all Xaa locations
  Clone ID: MRT4577_15247C.1.pep
NNPSHLTATHINRRLHHPRPPLTTVTCSRSVAPSIICNFTRNFPYEQRARTAEPPISQPDHAASYPSHHTPHAHAXAXAW

SEQ ID NO: 242211 - protein, 126 aa, Zea mays; identical to SEQ ID NO: 242203
  Clone ID: MRT4577_152480C.1.pep

SEQ ID NO: 242212 - protein, 114 aa, Zea mays
  unsure (1)..(114): unsure at all Xaa locations
  Clone ID: MRT4577_152481C.1.pep
XXFFFFFFFFFFFFYFFCCICFVYLQFLQYKRSGATQKNKVWGTGEHFKSNGRENSPPRETTVKRGRQEEGSIKGGTLVGEPTHPMGKKGPQGGGPPPTGAPLTRPKNASTGPF

SEQ ID NO: 242213 - protein, 126 aa, Zea mays; identical to SEQ ID NO: 242207
  Clone ID: MRT4577_152482C.1.pep

SEQ ID NO: 242214 - protein, 41 aa, Zea mays
  Clone ID: MRT4577_152483C.1.pep
RRRSGQDAVGVALTCAFHLPLCLTRGSPSAVQRSSTPTIGG

SEQ ID NO: 242215 - protein, 59 aa, Zea mays
  Clone ID: MRT4577_152484C.1.pep
KKKWPLEKLNWGLKKFFQKPMGKTLFRVGKQVFWGPMPFCRRKSKKTGQGGGFLGPPLA

SEQ ID NO: 242216 - protein, 92 aa, Zea mays
  Clone ID: MRT4577_152485C.1.pep
LSGDRRAGNDAGLPKGLPDRTSRLSIARTVCTINRHGMTYRLVWLPTITLGAACTLTCTRPPSIAWAHAASYQPSRIVSVVGAAYRSCAISL

SEQ ID NO: 242217 - protein, 75 aa, Zea mays
  Clone ID: MRT4577_152486C.1.pep
PKGTFQLKTQMGNNKPHPNENNPFGLGKTSRPGGGVTNRPNRIYPFFKKFGRVARKNDIGVPYKIGPFGVLRIPT

SEQ ID NO: 242218 - protein, 152 aa, Zea mays
  unsure (1)..(152): unsure at all Xaa locations
  Clone ID: MRT4577_152487C.1.pep
KQNQRFGGTLPKPPPPEREGNPGGFWGKLGPPPPFGGGQRGGADDIPPLQYNPRTLGGPGVPXPTTNPGEQGPPNKQERVRHXPSGTLGPRGGPATCTWAGPFWTWGQSPGQKGPPGGGRPPGAQGGAGXKNGQSGAPLFFENGRGYPSLGG

SEQ ID NO: 242219 - protein, 136 aa, Zea mays
  Clone ID: MRT4577_152488C.1.pep
WVLLEVLDKISPGSVNWKHASKPPIIMPFRKVENCNQVIKIGKELNFSLVNVAGNDIVQGNKKLILAFLWQLMRTSILQLLRNLRSHSKEKEMTDADILIWANSKVKESGKNSHIESFKDKTIADGVFFLELLSAV

SEQ ID NO: 242220 - protein, 134 aa, Zea mays
  Clone ID: MRT4577_152489C.1.pep
MESQFSAAGPRFHGLRGYAAPRSAGGALPSVRGGRKRSSSQGIRCNYIGSATNLIMGTTTTLMLFAERFGLAPSANRKATAGLNLKARNSGLQTGDPAGFTLADTLACGAVGQILGVGIELGLKNTGALNKIIG

SEQ ID NO: 242221 - protein, 97 aa, Zea mays
  Clone ID: MRT4577_15248C.1.pep
GCGSCGVGPMDVPCITTALGGLGASSPMGETVWREVLKATLTPPAYPRAARIRSPRESVPLGTSGILRVFSTFGFRPCYGSSLFFLPRSVCTCRISR

SEQ ID NO: 242222 - protein, 40 aa, Zea mays
  Clone ID: MRT4577_152490C.1.pep
NIVDTKKLRATEQFRTQNLNHHTLQMGMKDIIGLTQPHWL

SEQ ID NO: 242223 - protein, 80 aa, Zea mays
  unsure (1)..(80): unsure at all Xaa locations
  Clone ID: MRT4577_152491C.1.pep
MASSAAGTEVVTYFLRNYYNLLQQTPYFVHHFYSXPAPLSASTTSXFTTVASNNMIYIHSLIMFLNFTQIEIFTANSFYS

SEQ ID NO: 242224 - protein, 119 aa, Zea mays
  Clone ID: MRT4577_152492C.1.pep
NLCLNQQLALGAFFFFFFGVIILIFRLKLVSMSFLHMNHIEFTHIYTFQSNPNDTWHYCYAFEERKQEALTPSRVRKPSWSPVRQPNLHQIGLLPETHARGLLPRPPRSRSPGARSLLL

SEQ ID NO: 242225 - protein, 104 aa, Zea mays
  Clone ID: MRT4577_152493C.1.pep
MADAEDIQPLVCDNGTGMVKAGFAGDDAPRAVFPSIVGRPRHTGVMVGMGQKDAYVGDEAQSKRGILTLKYPIEHGIVSNWDDMEKIWHHTFYNELRVAPEEHP

SEQ ID NO: 242226 - protein, 101 aa, Zea mays
  Clone ID: MRT4577_152494C.1.pep
RCPRFTLYRYGLARRGRIVSRITIPHSIQIGRCILNASNKPVNKGDNSRRLDPYAPRWLYILGHLPACAWNLHISSYLIPASPHMCEHDTLSTIAIDDIRI

SEQ ID NO: 242227 - protein, 377 aa, Zea mays
  Clone ID: MRT4577_152495C.1.pep
MADAEDIQPLVCDNGTGMVKAGFAGDDAPRAVFPSIVGRPRHTGVMVGMGQKDAYVGDEAQSKRGILTLKYPIEHGIVSNWDDMEKIWHHTFYNELRVAPEEHPVLLTEAPLNPKANREKMTQIMFETFNTPAMYVAIQAVLSLYASGRTTGIVLDSGDGVSHTVPIYEGYALPHAILRLDLAGRDLTDYLMKILTERGYSFTTTAEREIVRDMKEKLAYIALDYDQEMETAKTSSSVEKSYELPDGQVITIGAERFRCPEVLFQPSFIGMEAAGIHETTYNSIMKCDVDIRKDLYGNIVLSGGTTMFPGIADRMSKEITALAPSSMKIKVVAPPERKYSVWIGGSILASLSTFQQMWIAKAEYDESGPSIVHRKCF

SEQ ID NO: 242228 - protein, 73 aa, Zea mays
  Clone ID: MRT4577_152496C.1.pep
KMTQIMFETFNTPAMYVAIQAVLSLYASGRTTGIVLDSGDGVSHTVPIYEGYALPRAILRLDLAGRASRLLIC

SEQ ID NO: 242229 - protein, 377 aa, Zea mays; identical to SEQ ID NO: 242227
  Clone ID: MRT4577_152497C.1.pep

SEQ ID NO: 242230 - protein, 120 aa, Zea mays
  Clone ID: MRT4577_152498C.1.pep
ALGGVGPPLGVWPPPQLTLPNPRVLFLPPGTFPMGTLGGKNLGNFGLAPFQAFGLWGGLGPPGGGAPDVSGFSRRGGVFPLFRGPFMPGAFFFSNFSLFFGGFFPPFFPFFFGGAPPFTF

SEQ ID NO: 242231 - protein, 406 aa, Zea mays
  unsure (1)..(406): unsure at all Xaa locations
  Clone ID: MRT4577_152499C.1.pep
MADAEDIQPLVCDNGTGMVKAGFAGDDAPRAVFPSIVGRPRHTGVMVGMGQKDAYVGDEAQSKRGILTLKYPIEHGIVSNWDDMEKIWHHTFYNELRVAPEEHPVLLTEAPLNPKANREKMTQIMFETFNTPAMYVAIQAVLSLYASGRTTGIVLDSGDGVSHTVPIYEGYALPHAILRLDLAGRDLTDYLMKILTERGYSFTTTAEREIVRDMKEKLAYIALDYDQEMETAKTSSSVEKSYELPDGQVITIGAERFRCPEVLFQPSFIGMEAAGIHETTYNSIMKCDVDIRKDLYGNIVLSGGTTMFPGIADRMSKEITALAPSSMKIKVVAPPERKYSVWIGGSILASLSTFQQXTNKQTNKFRIRISSTSIKVCSRFCLRLQMWIAKAEYDESGPSIVHRKCF

SEQ ID NO: 242232 - protein, 118 aa, Zea mays
  unsure (1)..(118): unsure at all Xaa locations
  Clone ID: MRT4577_15249C.1.pep
LVEIXCARTPAQLFAVKHSYRDRLKRSLEADVRGHVTPDLRKFXVPLARAYPYXDGAEVSTYFAXHMRAKYFMRKIHKXKGYSDDESITILTTRSRXEILATCXSYQDQITHAVNKAL

SEQ ID NO: 242233 - protein, 56 aa, Zea mays
  Clone ID: MRT4577_1524C.1.pep
HDSAKYVTYDIMCKAQLYICMLELRIANMPSLITAQTSRIVNCALHFEINGIKLLF

SEQ ID NO: 242234 - protein, 64 aa, Zea mays
  Clone ID: MRT4577_152500C.1.pep
RVGSRCPRGGRAAVYNTRGNETRLSHHDVRLCPMRSGSMFNMQPTTAVFIRAFQSMLPLVLSIR

SEQ ID NO: 242235 - protein, 205 aa, Zea mays
  unsure (1)..(205): unsure at all Xaa locations
  Clone ID: MRT4577_152501C.1.pep
ASASDRTGTAPIHPSPSSSPVQRNPSHERRLQEALPGRQVPRPLRFSPLTNFGRKTLPTAYLSYHKQGSHHAASGWGAIAAAVPAAAYMLQDQEAHAAEMERTFIAIKPDGVQRGLISEIMSRFERKGYKLVAIKLIVPSKEFAEKHYHDLKERPFFSGLCDFLSSGPVLAMVWEGEGVIKYGRXLIGATDPQKSEPGTIRGDLA

SEQ ID NO: 242236 - protein, 377 aa, Zea mays; identical to SEQ ID NO: 242227
  Clone ID: MRT4577_152502C.1.pep

SEQ ID NO: 242237 - protein, 92 aa, Zea mays
  unsure (1)..(92): unsure at all Xaa locations
  Clone ID: MRT4577_152503C.1.pep
MLESAGMVLVQALKELRRTPEMFVQLRTMFGSVASVPARVFLTXATIQVAEGSVSDLRPIFEEYLANWRILEDEAYVLDGGGHDSASKVLLL

SEQ ID NO: 242238 - protein, 377 aa, Zea mays
  unsure (1)..(377): unsure at all Xaa locations
  Clone ID: MRT4577_152505C.1.pep
MADAEDIQPLVCDNGTGMVKAGFAGDDAPRAVFPSIVGRPRHTGVMVGMGQKDAYVGDEAQSKRGILTLKYPIEHGIVSNWDDMEKIWHHTFYNELRVAPEEHPVLLTEAPLNPKANREKMTQIMFETFNTPAMYVAIQAVLSLYASGRTTGIVLDSGDGVSHTVPIYEGYALPHAILRLDLAGRDLTDYLMKILTERGYSFTTTAEREIVRDMKEKLAYIALDYDQEMETAKTSSSVEKSYXLPDGQVITIGAERFRCPEVLFQPSFIGMEAAGIHETTYNSIMKCDVDIRKDLYGNIVLSGGTTMFPGIADRMSKEITALAPSSMKIKVVAPPERKYSVWIGGSILASLSTFQQMWIAKAEYDESGPSIVHRKCF

SEQ ID NO: 242239 - protein, 377 aa, Zea mays; identical to SEQ ID NO: 242227
  Clone ID: MRT4577_152507C.1.pep

SEQ ID NO: 242240 - protein, 70 aa, Zea mays
  Clone ID: MRT4577_152509C.1.pep
DPRRRHRRHELPTCRRPIADRIRDRRARCHNTRSRTTLPRAPQARETPGTHSYATAGGCRTRRVNTGPWS

SEQ ID NO: 242241 - protein, 213 aa, Zea mays
  unsure (1)..(213): unsure at all Xaa locations
  Clone ID: MRT4577_15250C.1.pep
MANDEYDFLFKVVLIGDSGVGKTNLLSRFTRNEFNLDSKSTIGVEFATRSIQVDSKTIKAQIWDTAGQERYRAITSAYYRGAVGALLVYDISKHQTYENVTRWLKELRDHADANIVIMLVGNKSDLRHLRAVPTEEAKSFASENHLSFIETSALDASNVELAFQNILTEIYRIVSSKALDSGDSAXGHHRXAGTNISLSKPADDDAAKGGKCC

SEQ ID NO: 242242 - protein, 59 aa, Zea mays
  Clone ID: MRT4577_152510C.1.pep
IDPTNTQCAHDGNNVCLVLLFAKWMSGPHTVFEILEYIKLLLSIISVSFLSYHLETGII

SEQ ID NO: 242243 - protein, 152 aa, Zea mays
  Clone ID: MRT4577_152511C.1.pep
MRRRCSWLSSLFRPRRADRSLPQPDPQGPDSEPKAIDKHSASEEVVMDNILPNSDFSEGLHLWQSNRCHAFVAVEGSGYHYGVRPHSGSTYAVLTHRTQSWQGLEQDITEKVTLGTEYFVAAYVRVHGEVHEPIGVQVTLKLEEDGSSTNYL

SEQ ID NO: 242244 - protein, 63 aa, Zea mays
  Clone ID: MRT4577_152512C.1.pep
RFHKVASVTNEWVTQIECCSQHRERPSLHVCANRTSEGVMIRNPSLEVDMGISVGTGGIALHS

SEQ ID NO: 242245 - protein, 66 aa, Zea mays
  Clone ID: MRT4577_152513C.1.pep
HLSKSGMLGHQRQLNQTTFIVLPQNTCLSVSKTTKQFFVASTLETACWRIKNLSFFFSNDSGLVYF

SEQ ID NO: 242246 - protein, 296 aa, Zea mays
  unsure (1)..(296): unsure at all Xaa locations
  Clone ID: MRT4577_152514C.1.pep
SRPAGNSPGSSKHASPPPISPAPRTSMAAGEGGGGDIGADSERRLQKAMDKLYHFPKPKSSSTGGSKPSSSTSAPSSGRAVGKAAAEAARRFGVVRGSRLPHQMLAMAAISPPPPCRPWDRADLMRRLGSFKAMTWFAKPKVISPVNCARRGWTNIEPDVITCEACGARLLFSTPSSWTTQQVEKAAAVFSLKLDSGHKLLCPWIDNICDESLALFPPTPPPVLVGNYYELLSSLLRLLALPRISCSSLETMKKRNPQLEQFLSEPFSSSVVLKGGLMLTEDSXIKDXDDAFSDAD

SEQ ID NO: 242247 - protein, 53 aa, Zea mays
  Clone ID: MRT4577_152515C.1.pep
RPTRTSTLTRPPTFVIQQQRPPKEVGQHHHHGLKHRDHRRHYLSLSPIQPHSS

SEQ ID NO: 242248 - protein, 284 aa, Zea mays
  unsure (1)..(284): unsure at all Xaa locations
  Clone ID: MRT4577_152516C.1.pep
GYLEAGRWILGSGLVGSWWLLVQHTSRRLPRKPGKAGDSREAAAAGNGTEPSNSYSVARSMDPGNKRAGNGDYPVPSGVIPNPVMNGAVVYHSNEPLPAFKDVPMSEKQNLFVKKVNLCCAVYDFVDPTKNLKEKEVKRQTLMELVDYVTSANGKFSEVVMLEITKMVSINLFRSSSPTPRENKAIEGVDLEEDEPLMDPAWSHLQIVYEVXLRFVASQETDAKLAKRYIDHSFILRLLDLFDSEDPRERDYLKTILHRIYGKFMVHRPFIRKAIXHIFYRFIF

SEQ ID NO: 242249 - protein, 63 aa, Zea mays
  Clone ID: MRT4577_152517C.1.pep
CQDHSINSLQWAIHLIRIVQSCEHRRLSGVTPALINGRSLTAHLYTASLPGRDRVGPTQDSYR

SEQ ID NO: 242250 - protein, 510 aa, Zea mays
  Clone ID: MRT4577_152518C.1.pep
MIKQILGRLPRKPGKAGDSREAAAAGNGTEPSNSYSVARSMDPGNKRAGNGDYPVPSGVIPNPVMNGAVVYHSNEPLPAFKDVPMSEKQNLFVKKVSLCCAVYDFVDPTKNLKEKEVKRQTLMELVDYVTSANGKFSEVVMLEITKMVSINLFRSSSPTPRENKAIEGVDLEEDEPLMDPAWSHLQIVYEVFLRFVASQETDAKLAKRYIDHSFILRLLDLFDSEDPRERDYLKTILHRIYGKFMVHRPFIRKAINNIFYRFIFETEKHNGVAELLEILGSIINGFALPLKEEHKLFLVRALIPLHKPKCVSMYHQQLSYCITQFVEKDCKLADTVIRGLLKYWPVTNSSKEVMFLGELEEVLEATQLAEFQRCMVPLFRQISRSMNSFHFQVAERALFLWNNDHIETLIKQNYKVLLPIIYPALERNSRDHWNQAVRSLTLNVRKIFSDHDSTFFGECVQRFSDEELKQAESDSKRDAMWKRLEEMGASKPGGNHPLGAPNGKPSHAAG

SEQ ID NO: 242251 - protein, 131 aa, Zea mays
  Clone ID: MRT4577_152519C.1.pep
NSALNTELPHITTHHHHQKNTHTMALAIGATSRENFNSTLRTQWTQDLSEIFSQTQRMMGCILTKAPYPHQLLQKDVSSRMPSLHQSHTPVATNPRARLHGAKSRIQRRNQGLRNAPVVRQIYIKKEGPTY

SEQ ID NO: 242252 - protein, 96 aa, Zea mays
  Clone ID: MRT4577_15251C.1.pep
MASLSRTAAAAVVALRSAVRSAPLTGRVLGAPLPSFASPSATRSARILRRSAAAASAGLETLMPLHSAVAAARLRSCIAVDSSCWCSLSQGYALPL

SEQ ID NO: 242253 - protein, 457 aa, Zea mays
  Clone ID: MRT4577_152520C.1.pep
MIKQILGRLPRKPGKAGDSREAAAAGNGTEPSNSYSVVRGMDPGNKRAGNGDYPVPSGLTSNPVMNGAVVYHSSEPLPAFKDVPASEKQNLFVKKVNLCCAVYDFADPTKNLKEKEVKRQTLMELVDYITSANGKFSEVVMLEITKMVSINLFRSSSPTPRENKAIEGVDLEEDEPLMDPAWSHLQIVYEVFLRFVASQETDAKLAKRFIFETEKHNGVAELLEILGSIINGFALPLKEEHKLFLVRALIPLHKPKCVSMYHQQLSYCITQFVEKDCKLADTVIRGLLKYWPVTNSSKEVMFLGELEEVLEATQLAEFQRCMVPLFRQIARSMNSSHFQVAERALFLWNNDHIENLIKQNYKVLLPIIYPALERNSRDHWNQAVRSLTLNVRKIFSDHDSAFFGECDQRFSDEELKQEESDSKREALWMRLEEMAASKPRENSPLGAPNGKPSQAAG

SEQ ID NO: 242254 - protein, 193 aa, Zea mays
  Clone ID: MRT4577_152521C.1.pep
HLMPRNFRNSSTYSISGTSRTSSSPAQADACSHPLAAALAFHGGASCCWQQHRPPSLLAVPILWRSPLPQPWTPSTSTSSGRGIRPAPRSIHFSLLWRTPSPSRPWPRPLLLPLASPSLVTAVEQQLPLSLPGSSSPSRCCSLPLSKLTPQPWHSLLLQAGDPSSLVQRRGLPPWLAPLMAGPPPRHCRLLLH

SEQ ID NO: 242255 - protein, 41 aa, Zea mays
  Clone ID: MRT4577_152522C.1.pep
GVSSSLVLPCEVTPPREKKPHEISISVMLSDGSRCGMSHVV

SEQ ID NO: 242256 - protein, 39 aa, Zea mays
  Clone ID: MRT4577_152523C.1.pep
VKQLYQNSSSLLTKLFSKKTTLLVKLSYDRNMLANAGST

SEQ ID NO: 242257 - protein, 148 aa, Zea mays
  unsure (1)..(148): unsure at all Xaa locations
  Clone ID: MRT4577_152524C.1.pep
MCLGKNWKCGKNEVDDDKCESARKEDGXSTCRXIWTSGNGWREVIRADGMCCSRYTWGKTYKKARTVVGDTASAGSCDHXDDKVDATSKHTNDEVCSSKVHGESFEMSRSNEGADADGFEEGEENGDXSYLAXEDEDTDKTQEPRSLP

SEQ ID NO: 242258 - protein, 55 aa, Zea mays
  Clone ID: MRT4577_152525C.1.pep
CYMLDRFVSWSLMKFLSHFNIVNHDPASRLSPHLCLTIFLVHASYGAGASALEVV

SEQ ID NO: 242259 - protein, 61 aa, Zea mays
  Clone ID: MRT4577_152526C.1.pep
SLTFFVFFIFKSKYCFFFNHDTPPLNLIRKQLFHMCLSIRNGVGKHKSRTVDHYRPVRTPT

SEQ ID NO: 242260 - protein, 78 aa, Zea mays
  Clone ID: MRT4577_152527C.1.pep
MMLIIASWISECINMLLVSAYIVCIDICGSLRCSISQIASCFLIIAIPYPIYDDCIVYRSLCWNESASSCCISTYYAD

SEQ ID NO: 242261 - protein, 80 aa, Zea mays
  unsure (1)..(80): unsure at all Xaa locations
  Clone ID: MRT4577_152528C.1.pep
RLHGAWXPPSPGPGFSSTSGRAWGPALLLGGARGCPRPLFLLYVGVASTSSSGTAMVTPIITRHIRSTSSGLAALDCSMD

SEQ ID NO: 242262 - protein, 221 aa, Zea mays
  unsure (1)..(221): unsure at all Xaa locations
  Clone ID: MRT4577_152529C.1.pep
MADTRKFVLPGQPPDISQILQEAQNRWLRPTEICEILSNYKLFSIAAEPPNMPRSGSLFLFDRKVLRYFRKDGHNWRKKKDGKTVKEAHEKLKAGSIDVLHCYYAHGEENENFQRRTYWLLEEDFTHIVLVHYLEVKGCKQSFNRVKEELMQLSNVDSPSCSNSITSQNQMGPQNMEAAESPISGHISEYEDTXSADNCRASSRYHPLAEMQQLGDGVIME

SEQ ID NO: 242263 - protein, 122 aa, Zea mays
  unsure (1)..(122): unsure at all Xaa locations
  Clone ID: MRT4577_15252C.1.pep
TPPLPGGPGPKKNGPGRNQXFFHGGEPPGGKPXKPGGLKKNLGSPPTPWKTPLKKXGKPGGAKGPGXFAFGEAGPQQHPGGQGPPGNPPRPGGNPFRMARGKPGGGPQQNRFPGRPWGPPIP

SEQ ID NO: 242264 - protein, 147 aa, Zea mays
  unsure (1)..(147): unsure at all Xaa locations
  Clone ID: MRT4577_152530C.1.pep
GEAPVGVSHPGVCVHPLFSQAPLLCNSLSPGVSLALSNITPLGGTTLVEATAGKGSPALTMAYTGPVFADAAFXGLDCFPGMDEGSVVLSSLSELPFFASKALLANNVWLEVLGLEELIGLGKKGVLDLKGLDNSSVDQGSTFAPGL

SEQ ID NO: 242265 - protein, 105 aa, Zea mays
  unsure (1)..(105): unsure at all Xaa locations
  Clone ID: MRT4577_152532C.1.pep
MGRVRSKTRKKTSRHVIXKYFFRMNLEFQNNQEGLREGLIFAFERLRHQGGWFKSQLVAPNQGGPIRGIXVKLQEEERERLMDFVPEKSALEVEEIRVDKETMEM

SEQ ID NO: 242266 - protein, 41 aa, Zea mays
  Clone ID: MRT4577_152533C.1.pep
TTRLTIRCLYIGLFPLVHYQRMARNFQHSTCETLTGASYEC

SEQ ID NO: 242267 - protein, 102 aa, Zea mays
  Clone ID: MRT4577_152534C.1.pep
SQQNWHIGPHPRSVTPYRALMNAISPHNPRELRTITKLIPQQTTDRITTENRVTESGTEGATSGRGLQWARSAGAGETGSRGLSRAALRLFGKGGWEPSCRI

SEQ ID NO: 242268 - protein, 102 aa, Zea mays
  unsure (1)..(102): unsure at all Xaa locations
  Clone ID: MRT4577_152535C.1.pep
DRRSLTHVPVGVVEFLFDQLVVASFAVESSNMLSSAQTXTSPARSRLQLKVVIIPRVSKKSQESGEGEASSAIFPKRSTNCLDQKIATDLVDSWQLLKRYVD

SEQ ID NO: 242269 - protein, 88 aa, Zea mays
  Clone ID: MRT4577_152536C.1.pep
PTRPSFLIGIHFCDDISASKMGSSTFTASPKRLIKSESFQGGGTTELCFSDDAFDMVPDCSRKSLIRLGAHMPGRAEQASRRSGFVFP

SEQ ID NO: 242270 - protein, 72 aa, Zea mays
  Clone ID: MRT4577_152537C.1.pep
AFSHNPAHCSFAPLAFQPSSMTNCVNQRFLSYYVELLSRSSHYYLKTNLSDDSIDPCHVPYWRANNPTLDEF

SEQ ID NO: 242271 - protein, 145 aa, Zea mays
  Clone ID: MRT4577_152538C.1.pep
ISLSLLTPFQIGKTSGLVMTLSGILKSILLVAASVVLWGTHISLTQTLGYAVALMGLVLYSIGYEQLLNMWEEAVAWGTGSLNREGEMSPTLRKGIMIGCLGFITVIIAGALWHYHGLSSEHVTRVTLVVVCPLMTISLRHYIDF

SEQ ID NO: 242272 - protein, 110 aa, Zea mays
  unsure (1)..(110): unsure at all Xaa locations
  Clone ID: MRT4577_152539C.1.pep
TSEGPSSTSRXAARWCLGAEPILXRSWEAWPTWVSSRWQGSGRRMMPRQGEGAPYEEDALVLKAGGEAIIHRAWELAXDEALYGRMKTSCAGLSCLWKNGGLLRGSISXG

SEQ ID NO: 242273 - protein, 40 aa, Zea mays
  Clone ID: MRT4577_15253C.1.pep
QYGVFDVSSGISLDKPIAVTCGSGMTAYIMMDLGQNGKHN

SEQ ID NO: 242274 - protein, 59 aa, Zea mays
  Clone ID: MRT4577_152540C.1.pep
PSPVKPKSLSIFACVWETPTPIKALPSFFSGGGHPVGYLRLFPQIKKIGNLVTKYSSLL

SEQ ID NO: 242275 - protein, 262 aa, Zea mays
  unsure (1)..(262): unsure at all Xaa locations
  Clone ID: MRT4577_152541C.1.pep
GTPAVTGPEFPGRPTRPGSGIWSDGKDKSEGAQAHTWNVEVLIDVLKELNPSLNFKEVTYELDHPGFQIRDSKGLHNVVYGIQRGLGMEVFPVDFIYRPWKHAEGQLSFIQHSLINPEVFCFADYPCHTVATDILKAPPEDDNREIATWKSLDLIESLLRLAEVGQYEQVKQLFSFPIKHCPDMLVLALLQINTSWHTLRHELISTLMPIFLGNHPNSAIILHYAWHGQGQSPSIRQLIMHAMAEWYMRGEQYDQAXLSRIL

SEQ ID NO: 242276 - protein, 74 aa, Zea mays
  Clone ID: MRT4577_152542C.1.pep
VDYDQIGCTQAQLSSVVSVLYSSSFELLRSKGSIGHAYPVSIRAVNHNPASFNLYVPPQISVLVELILGHMRYL

SEQ ID NO: 242277 - protein, 83 aa, Zea mays
  Clone ID: MRT4577_152543C.1.pep
RVWWRACSPMSCGMCAVSPSYVLVLSTRESPLLPRLRVVLLCRSPRCQCTLPRLRTWPLRALHCSTDPWISLPRPPADRWAAR

SEQ ID NO: 242278 - protein, 79 aa, Zea mays
  Clone ID: MRT4577_152544C.1.pep
DWVVRLALPRSHSKRRAPCRGDPYHLKSSLARVPHLPTALANDYHKSCLRPGLLASAQSKVPPLPFDLVCALRGNSELR

SEQ ID NO: 242279 - protein, 74 aa, Zea mays
  Clone ID: MRT4577_152545C.1.pep
WAPISLMHTGPAAFLFSTFCLFYFQQVFLIGPFTNKKRVYPVCIFGCVKALWPRRVSFRVHPCMKKKKKRAPAD

SEQ ID NO: 242280 - protein, 304 aa, Zea mays
  unsure (1)..(304): unsure at all Xaa locations
  Clone ID: MRT4577_152546C.1.pep
LEAGRNQTPPKRKALAVELEPNPAETPNPSSRLEPIDPDPIXFPTVDEPSAAGAMVSSSFPDADAYGNGDSDGLDFPVDPNPNTVFSSPAAAAAPGSAGAAGERRQLFQRLWTDEDEIVILRAFAEFTAQRGTSFASHQYDTTPFYEDMRRRLNTGFTKNQLAEKIRRLKRKYRNCVERLRVAGSGFTFRSPHEQAIFEIARTIWRPASDKHGRDSDDEGGGGNVHDATFAPFAIDAAANGESAKSSRPRRGRRRRTGDFPADAVALPPAPMPMQVMTEDALPSFPQGTAGAVMNGGCGLIVDP

SEQ ID NO: 242281 - protein, 382 aa, Zea mays
  unsure (1)..(382): unsure at all Xaa locations
  Clone ID: MRT4577_152547C.1.pep
MFPTVDDPSAAGAMVSASFPDADAYGNGDSDDLDFPVDPNPNPVFSSPAAPASAGAAGERRPLFQRLWTDEDEIVILRAFAEFTAQRGTAFASHQYDTTPFYEDMRRRLNTGFTKNQLVEKIRRLKRKYRNCVERLRVAGAGFNFRSPHEQAIFEIARTIWRPASDKHGRDSDDEGGXAATTPTTPPSPWTPPPSPSTPPSPPPTGGPPGPRPRGHDVAAAAARATXADAVPETTLALPPAPMLVMTEDVLPSFPQVTAAAVMDGGCGVSVDPASGLPAALSTAAAAAAVSGSSTAENPILAALFKEMVHAMLSVGVGGSTALLGLEPPPPIAGVPMEGEKWRQQRIQELEVYLRRIDLLQDQARAALDELRSAPHAGGMNT

SEQ ID NO: 242282 - protein, 116 aa, Zea mays
  unsure (1)..(116): unsure at all Xaa locations
  Clone ID: MRT4577_152548C.1.pep
TALGDIKSGMNGLGRIGRLVARVXALQSEDVELAGFNIPFITTDYMTYMFKYDTVHGXQWKHRDIDLKDCKTLFLGXTPGTVFGIRNPWEIPSGEAGADYVAGCTGDLTDKDKAAG

SEQ ID NO: 242283 - protein, 149 aa, Zea mays
  unsure (1)..(149): unsure at all Xaa locations
  Clone ID: MRT4577_152549C.1.pep
PTPXQNRKTGKKDSPSTRXQASPVDSMATGPRSLHALFGGGAARRTCCCVGGGHAPAAAVVGAPRIGSSPSARDTVSLXPCTTTWYSSSPXYISGPSMLCLHNRPLPPLADPEAPDAVAVKAADYVLEWTTGCWLSXMTSRIKRNRTVL

SEQ ID NO: 242284 - protein, 74 aa, Zea mays
  Clone ID: MRT4577_15254C.1.pep
AAAGAVDEETPTDEETAKEAEPEPSVAEEVKEEAAAPAAETEAEPAAAEPEAVTAEEPAAAEPEAAAAEEPEKA

SEQ ID NO: 242285 - protein, 84 aa, Zea mays
  unsure (1)..(84): unsure at all Xaa locations
  Clone ID: MRT4577_152550C.1.pep
VEIPATENSSVVWELRVLACQVSYGVEFITEAEGVYSVIVQKTRKVTALEEPIIKGSFXATDPGELVLGVYNAASRNNNLLCRF

SEQ ID NO: 242286 - protein, 107 aa, Zea mays
  Clone ID: MRT4577_152551C.1.pep
HRAPYSRLTAWPPRPRPSPGYSPRGSSALVACEACQREAGGGHTSGKPGPSPRAGRRRCRGAARRQARGVRRRRSGRYERLNRDVMASGSSCAWREMERRQAAIWHP

SEQ ID NO: 242287 - protein, 137 aa, Zea mays
  unsure (1)..(137): unsure at all Xaa locations
  Clone ID: MRT4577_152552C.1.pep
KPITKKNLVLHLIXKTITAQQLHQLVLANLGAYSHQQQILPFNQLAALNSDCYLXQQQLPFKQLPVAYPQRFLPFHPLAALDSPAYLPPXQPLSFCHLARVSPATFLTQPQLLPVYXFPSPNPCTLLXLEQLLSFYQ

SEQ ID NO: 242288 - protein, 105 aa, Zea mays
  Clone ID: MRT4577_152553C.1.pep
YDYIAYYVPTYLQDLVLILETMRIIAITLSPITPSLSLRIYTQLGFTEDQFRVLRWVCSCIIDMLYDSVLIYICSSSKIQSGIIRKCSLQSYMDQPQYFPEHVII

SEQ ID NO: 242289 - protein, 66 aa, Zea mays
  Clone ID: MRT4577_152554C.1.pep
FYIYNSLRGGTASKSSSLCAHNICSTACTSSGKIDGSPNMNRTVLRDIIQCDHEAADPVATLGQGG

SEQ ID NO: 242290 - protein, 70 aa, Zea mays
  Clone ID: MRT4577_152555C.1.pep
LLGLVFSEDSAVASTIQWVKARQIFDSRGNPTVEVDVFCSDGTFARAAVPSGASTGVFEALELWDGGSDY

SEQ ID NO: 242291 - protein, 57 aa, Zea mays
  Clone ID: MRT4577_152556C.1.pep
AMHLTVLYGSCSPQTWIIFLWLYGPHPGKHVTLSPCINYPAQMFVCVPTPTKKKHHP

SEQ ID NO: 242292 - protein, 62 aa, Zea mays
  Clone ID: MRT4577_152557C.1.pep
APFIGIGPTSQSTLSDRPMPCTRLYMCSIITQVILLLQFVRCIPPILNHTLTLLLSHRLQFP

SEQ ID NO: 242293 - protein, 163 aa, Zea mays
  Clone ID: MRT4577_152558C.1.pep
FFFFFFFFFFFFFFFFFFFFFFFGRTQNGGPKFSFPHPGIQQTGRVSFTHWGKEKLWKLWSSTKNIAKNPPRGGGFFNRPHPNFKKKKKSKGRGFYWVPVTNTGIFHFIQGQKPPRPALGGSRIPNGGTFSTCPPKFLDPKLKTRGFFPKKEQIIFWGACFPT

SEQ ID NO: 242294 - protein, 56 aa, Zea mays
  Clone ID: MRT4577_152559C.1.pep
LFKGAHFSPKPNECSKHLEMCYKKRSSIILHESVLFPPLKRSIYSQNNLTTNCSYL

SEQ ID NO: 242295 - protein, 96 aa, Zea mays
  Clone ID: MRT4577_15255C.1.pep
MASLSRTAAAAVVALRSAVRSAPLTGRVLGAPLPSFASPSATRSARILRRSAAAASAGLETLMPLHSAVAAARLRSCIAVDSSCWCSLSQGLNKRI

SEQ ID NO: 242296 - protein, 162 aa, Zea mays
  Clone ID: MRT4577_152560C.1.pep
EGGGGGSDAHCHTHLAVKRRAMPAARNASTSSAMRGPPYISLMPASAMSPSLLLLFGGSGSCGHTFLLRRARSCSLCISRSPLSIGRSAVCVPMGSEGLLVVTSPLGCRREEIMIGISCEMTGKVMITYASRLPLASGLFWVWTRWYVELDEEIPWSGTSRP

SEQ ID NO: 242297 - protein, 236 aa, Zea mays
  unsure (1)..(236): unsure at all Xaa locations
  Clone ID: MRT4577_152561C.1.pep
PAWFRTVLYTTQAIHIPQPATDITSPQPHFLWKPLHKPRIYETKKDHDVMPFANHVRCCEHRLQPPIVRLLTATLPETAAHSANHATTXYAAYRXLVPXGSTTSTLASTSVYGNSKHLDITHVSFPMIDTSVDDDMAARNLDGLIGLYYYRLXDDSTYKESEIVLVDEADTTITNDSRIYWLCHPGYTHPEFPSLTSSGKKLPDLXRAKGHSHHKNRIDEKGHXKRNHTLSLXRYR

SEQ ID NO: 242298 - protein, 57 aa, Zea mays
  Clone ID: MRT4577_152562C.1.pep
SDSSRRLVPSVLPQYSRIDFWAACLAKVICSFFGRQVLCVWTDSKVVPLTNRLEYFC

SEQ ID NO: 242299 - protein, 115 aa, Zea mays
  Clone ID: MRT4577_152563C.1.pep
KITPVLPKGVLTPPSSKKKKNPPFWVGCPPLLGPNPFKPGFFSFKKFGALLKNLGWAPKPPFGWHKKNPFFQSFFSQGFVSPVFKTTFGGLEKDFSGPFFFVLIGKGRKKGFFPP

SEQ ID NO: 242300 - protein, 84 aa, Zea mays
  Clone ID: MRT4577_152564C.1.pep
MDQTQRRLDDHGHAPVVSAHAQQAGPDKSRQQEQPPPPPPSSLNQTAARLLREATVSRPDGEKPASSDILAFARSVDRVDSPLE

SEQ ID NO: 242301 - protein, 96 aa, Zea mays
  unsure (1)..(96): unsure at all Xaa locations
  Clone ID: MRT4577_152565C.1.pep
MPLGRGLRLRTSDLFPRPSRKKGYISFTTYRATYKTYHYTYAKVRGGGHXAMPHKFYHGLTXRVWNVTKRAIGXVQRNKQVTGRIIGKPHNVRVEH

SEQ ID NO: 242302 - protein, 97 aa, Zea mays
  Clone ID: MRT4577_152566C.1.pep
TGDGAPPPRRPPRRVRVLCYAGRQDAAIQATVAKARAHRYTNLIVDVAEVNRPIALIDAVDRTYCEESVILSRNRDNSSRLREVLLDPENAPQEQDE

SEQ ID NO: 242303 - protein, 64 aa, Zea mays
  Clone ID: MRT4577_152567C.1.pep
KLLGGSFVCSKTPLTIIKGAISEFKNPPNPGKIKHSKPKGGAPPEFFGIPETPYFNPRPRRKHP

SEQ ID NO: 242304 - protein, 108 aa, Zea mays
  Clone ID: MRT4577_152568C.1.pep
CGDDCCGGGLNFPKWLGRKNVPRSHILRASNQSGNQASKGEERDESSRRRPSWIAMGRNQSVNRSIDHDGGPAVSGGWATNGCCSIPIAGGRFAGFFWRQRLMKFLKS

SEQ ID NO: 242305 - protein, 37 aa, Zea mays
  Clone ID: MRT4577_152569C.1.pep
TPRGSSTAVSPAQPALGPRPELSGYHQPQACGGASPP

SEQ ID NO: 242306 - protein, 88 aa, Zea mays
  Clone ID: MRT4577_15256C.1.pep
AHLSAAALGFFFWSTFTDCPQRSSQERQGWDDTVVAEPIWMRVHINTLDESVESNSYTGWTPIVLGTNTTGLDMVSGEGNAYDPRCYD

SEQ ID NO: 242307 - protein, 33 aa, Zea mays
  Clone ID: MRT4577_152570C.1.pep
RVNNEMRSNIHIICFVDDNVEDFVITFHRSDLI

SEQ ID NO: 242308 - protein, 99 aa, Zea mays
  Clone ID: MRT4577_152571C.1.pep
TPSVVVNSPIHLGTVMAPVAPQTGSVGFYRLGPHGPVIKLAVVMFPVVQRKYFCPCPVCCGLCAFLIARPLCFFFKPCVHPRYHWTHALMRICADRCPL

SEQ ID NO: 242309 - protein, 115 aa, Zea mays
  unsure (1)..(115): unsure at all Xaa locations
  Clone ID: MRT4577_152572C.1.pep
NVHTTCSHCDKRYTNDKAIKRLLARNIDEYAAVRDMQRGCVHEAYSLXQIVXKAHHSVSXEIHEHXVVPVPSHDNKRKLRPPQGFWRRHDGTKPWHDPPQPCEDDTGGPPECAPR

SEQ ID NO: 242310 - protein, 108 aa, Zea mays
  Clone ID: MRT4577_152573C.1.pep
GKLNKTFFSFQKRGGFPKERGPLYQAPISPRGKPYNKSGRGKPFQGPTPSLKNPPPKRETPSIRGTPWGPPNNLQHRGFKNPGAGGPFPRASPTKKKGLSGKAGENGN

SEQ ID NO: 242311 - protein, 85 aa, Zea mays
  Clone ID: MRT4577_152574C.1.pep
DVRIEEPMTIACRAYDKSWLLHRCGLPYFLLRYSTCLESSIAHRIAVSRLKYISVHTYWETVIKSSISRLYFARVAGRLGRFCHS

SEQ ID NO: 242312 - protein, 41 aa, Zea mays
  Clone ID: MRT4577_152575C.1.pep
AMLCMCVADPDGALATCLVVLAHHYRNDIILEFDFFGPLKI

SEQ ID NO: 242313 - protein, 107 aa, Zea mays
  unsure (1)..(107): unsure at all Xaa locations
  Clone ID: MRT4577_152576C.1.pep
MDAYTMEISSTEMAGTPIKEGSLGEGRITMRKTVGKPKVAASGYPWYSPDRVKNLGPFSGEPPSYLTGELPSDYRWDTVRLYGDPXNFSMNLELEVIHSSWAMLGAL

SEQ ID NO: 242314 - protein, 51 aa, Zea mays
  unsure (1)..(51): unsure at all Xaa locations
  Clone ID: MRT4577_152577C.1.pep
HDSSIERLKWLGYRPESNDKVPFGXXHEKRYNGFSPKTVYTKLISTSSLPY

SEQ ID NO: 242315 - protein, 80 aa, Zea mays
  unsure (1)..(80): unsure at all Xaa locations
  Clone ID: MRT4577_152578C.1.pep
KKKSLSLSWKRPAPSSFXLLEGLVKRGRTKNLYSRQLAGKLPLLPHKLSWFEATWFYSLAGPVHLEIFAQQAQAALARGS

SEQ ID NO: 242316 - protein, 100 aa, Zea mays
  Clone ID: MRT4577_152579C.1.pep
MEVFIHEDYVNKRNELRREQRRRELQRLQVESNPDASREALASRESPRTPAQCLTPTGASPSSFRSPTSRSTLRSPAAAAGQAAGWPSEHRRLYDCLKPY

SEQ ID NO: 242317 - protein, 60 aa, Zea mays
  Clone ID: MRT4577_15257C.1.pep
PRVFFFFFFFFFLTKINKQHGFTLKNINSKQDYRNSINTNWLPMKTQPLRRNKKTQELHP

SEQ ID NO: 242318 - protein, 100 aa, Zea mays
  Clone ID: MRT4577_152580C.1.pep
MEVFIHEDYVNKRNELRREQRRRELQRLQVEGNPDASREALASRESPRTPAQCLTPTDASPSSFRSPTSRSTLQSPAAAAGQAAGWPSEHRRLYDCLKPY

SEQ ID NO: 242319 - protein, 100 aa, Zea mays
  Clone ID: MRT4577_152581C.1.pep
MEVFIHEDYVNKRNELRREQRRRELQRLQVESNPDASREALASRESPRTPAQCLTPTGASPSSFRSPTSRSTLQSPAAAAGQAAGWPSEHRRLYDCLKPY

SEQ ID NO: 242320 - protein, 238 aa, Zea mays
  Clone ID: MRT4577_152582C.1.pep
MSSHRGETAGSGLRGAASSVHDNPTTSTHGNTYDTTGTTGGAGYGTQQPTSGAYDTSGTTSSAGYGTQQHTGANHGHPGSTNAGPHSSNLANKGDPRVDSDVDNRARTGNTTGAAAGPHSSNIANKADPRVDSDLDNRANTGATDTRRKSAATAGLQPSGGLSGQTSRQMEGIDPTEIQGGYTTAETTTGHSGHGGNTGLSGVHETHVGNNPGSTSHGPNENPKSSNHPHGSNILNKG

SEQ ID NO: 242321 - protein, 217 aa, Zea mays
  unsure (1)..(217): unsure at all Xaa locations
  Clone ID: MRT4577_152583C.1.pep
MAAAGADGERRIGVAIDYSESAKKALDWAIDNLLHHGDTLVVVHVLHHGAEETKHTLWAKSGSXAPPLKLSPHPSLPLPKCSPAARWCLFRFCDGLGSSAPSDSLDRWVSLASIPAALIPLSEFREPEVMQGYGVRPDAEVLDAIDTAARQKQLKVVAKLYWGDAREKLCDAVEDLKIDSLVMGSRGLGPIQRILLGSVTNYVLSNASCPVTVVKGK

SEQ ID NO: 242322 - protein, 88 aa, Zea mays
  Clone ID: MRT4577_152584C.1.pep
DRPPFLSCNDSAFDCTLDWIHHRYDDMIINVIIVVDLALIMTLFIIKMVTCTLSGPLDGVNNNMHADRLCDKSSIILLIVGLRVRPGR

SEQ ID NO: 242323 - protein, 164 aa, Zea mays
  Clone ID: MRT4577_152585C.1.pep
MAAARADGERRIGVAIDYSESAKKALDWAIDNLLHHGDTLVVVHVLHHGAEETKHTLWAKSGSPLIPLSEFREPEVMQGYGVRPDAEVLDAIDTAARQKQLKVVAKLYWGDAREKLCDAVEDLKIDSLVMGSRGLGPIQRILLGSVTNYVLSNASCPVTVVKGK

SEQ ID NO: 242324 - protein, 55 aa, Zea mays
  Clone ID: MRT4577_152586C.1.pep
PDALTTLQRCPALVPCSGCAPHSFARARNYLVDSGSTTKVTADLNICRGEELEPN

SEQ ID NO: 242325 - protein, 87 aa, Zea mays
  Clone ID: MRT4577_152587C.1.pep
PAGEYIPNPQAADESGIVAPTGREANGAVPLTRAPRAPRRFRRRRSAGSYPHPPSHSRRHPSSERRWSLPRTPSRRRSSDKPATSTT

SEQ ID NO: 242326 - protein, 87 aa, Zea mays
  unsure (1)..(87): unsure at all Xaa locations
  Clone ID: MRT4577_152588C.1.pep
KGAKGQARHVHKYGXPPKGTSIVLYRNHXNRKQQHGAATEWTGGLYYNLTAVGSTRRGNRAEAWTAKIPLELKRYKGRTRRITDGSK

SEQ ID NO: 242327 - protein, 65 aa, Zea mays
  Clone ID: MRT4577_152589C.1.pep
THSFNRTGSIMHSEQAFLPLLPLFFQQSAAVGVGHSLDQTIMAQQLFILVLPVIFQEALTNLSVY

SEQ ID NO: 242328 - protein, 164 aa, Zea mays
  unsure (1)..(164): unsure at all Xaa locations
  Clone ID: MRT4577_15258C.1.pep
PPPGGAASQERRRPRAPRREKSAPRRGSGGKADXDRXKGPGSAEEDEAXQRRGARHGARNGXXNSRXNPGRXGKAXRHRRSNQXTPQXEHRPXTAEEDDTXXRAHARXGNKGATXARXXXGRTDNAXKNHXNXTXKRKNHAASDXXXXDXDDERPXKRTSSDGH

SEQ ID NO: 242329 - protein, 55 aa, Zea mays
  Clone ID: MRT4577_152590C.1.pep
KGGCCAKLTFLLPPTLSLSPWLFSSSSLHTENQHNHRLFYSFTLPNIYDESLIHE

SEQ ID NO: 242330 - protein, 122 aa, Zea mays
  unsure (1)..(122): unsure at all Xaa locations
  Clone ID: MRT4577_152591C.1.pep
HWVPRGRPGTSSPMPPWVASVPRLTIFRKTGSIDRIPLALRCRNVPRSPYTSLRARSASTHVSPTAINLRPNVPPRNQELYDALSALSGAAETHVNISRLQXGVAGPGRPRCSHKSRCPWFE

SEQ ID NO: 242331 - protein, 247 aa, Zea mays
  unsure (1)..(247): unsure at all Xaa locations
  Clone ID: MRT4577_152592C.1.pep
VVALCSAPFLLLRPCSDLSICAGFEFLPLLAAGRQRLELQFPGKDWGFLLARMEFVASIVDTVFRPLKDYFARTVGYVMSCGDYIDAMGNEMNELKSKRDDVKRMVDAAERQGMEATSQVKWWLECVALLEDAAARIVDEYQARLQLPPDQPPGYKATYHLSKKADEAREEAAGLKDKADFHKVADELVQVRFEEMPSAPVLGRDALLHELHACVRDGDVGIVGIYGMAGVGKTALLXKVQNEFLIN

SEQ ID NO: 242332 - protein, 69 aa, Zea mays
  Clone ID: MRT4577_152594C.1.pep
HRNENNMMPATGLGLSRSNQLPVGSFRANQHSECVQIRRYLDTVHTGLNWTEIARDRIHICKIKGGKPR

SEQ ID NO: 242333 - protein, 109 aa, Zea mays
  Clone ID: MRT4577_152595C.1.pep
KRGFFGKTQKGGECFTPCPKSDLWGGAKWGGSPTRRGRGDLINPGGRAKIIIFKGLLGGFVCAQKFPFFISTTPLGGAPPPKGRANPPFPLKKKTPPPAKKGPPFIFFP

SEQ ID NO: 242334 - protein, 100 aa, Zea mays
  Clone ID: MRT4577_152596C.1.pep
PHRPSRWLSTGLAEWCSLTCIGAAVWSVPGEFLYMKRSSNLGLGLCFRGGYSCIIRNIYSSIWVNERIDKRPSKVKAFRAYRMCLWHESVYRPGLIGPNV

SEQ ID NO: 242335 - protein, 287 aa, Zea mays
  Clone ID: MRT4577_152597C.1.pep
MEAAAAAAAAAPAPAGERNPEHHHGCLAVRTSLPRCAIGAGGGSSLPGSSDETSCGSPRWIGRGLSCVCIKRKGTYERICMNLTPVQEERLQRLKHRMKVYFDPSRRDHQEALKALWHATYPDQELEGLISEQWKDMGWQGRDPSTDFRGAGFISLENLLFFAKTFSASFQRLLNKQCGNRATWEYPFAVAGVNITFMIMQMLDLQSTKPRTFVRAIFIQMLSEDEWAFDLLYCVAFVVMDKQWLDKNASYMDFNEVLKSTRAQLERELMLDDVIRIEDMPSYSLLC

SEQ ID NO: 242336 - protein, 104 aa, Zea mays
  Clone ID: MRT4577_152598C.1.pep
MASKSSTAALFLYAALLLVLVLVAVSTLAQAQPTPPPPPSSSCPFNGSVPLSNITEVLGLLAELDLNTAAQCLCTAVEGVTSLVRLLLGSIGLMLPFDFECTST

SEQ ID NO: 242337 - protein, 97 aa, Zea mays
  unsure (1)..(97): unsure at all Xaa locations
  Clone ID: MRT4577_152599C.1.pep
PPVNQPDPEVAPPTIDVPELTLDDSKHMTDDFGSWAIIGDGSYXRLFMPLLDDGRQPALXNLLHLKTDPKDEVLKQASLXLNLKHDYFLVMFRYCVE

SEQ ID NO: 242338 - protein, 72 aa, Zea mays
  Clone ID: MRT4577_15259C.1.pep
CLHFDIFSILLVALVCNDQSGASISNGNNNTRVFRAQHTVIQSLCAYHICKAYCGLALVISQRSCKLYYNPS

SEQ ID NO: 242339 - protein, 173 aa, Zea mays
  unsure (1)..(173): unsure at all Xaa locations
  Clone ID: MRT4577_1525C.1.pep
APYLKMRAGLRQALIGAIGGGKSTGMSLVXRFYERFYEKVMIEGKDIPERDTXKLHAHVXGLMHEEPELEPTMILNNIVYSMDCATDEEAEEEVKEANEDGYVSGLPNGLRTPDSKRGVQLCVQQKQGINIGRAVLNDPVKVLLDQVINEVNTEFDCELQDALEHMMKGLTNG

SEQ ID NO: 242340 - protein, 79 aa, Zea mays
  Clone ID: MRT4577_152600C.1.pep
LARFCSWIFWSRRAEGGLDIITHPMMSKHAQPHAMTVRAKDPLYTSVAYIQVLMKGQGSNPTVDEHIRTRKLRHFLEHT

SEQ ID NO: 242341 - protein, 84 aa, Zea mays
  Clone ID: MRT4577_152601C.1.pep
VGLAKPKRGGLTCHRLEVALDGHAKQAHHRAGGAHHSLHLHHGRVRRRHPRRGSRPTAVARRGDLDERQYKPGERSRGDRLAEP

SEQ ID NO: 242342 - protein, 121 aa, Zea mays
  Clone ID: MRT4577_152602C.1.pep
LNIHSFIHAGQYYPHLTPYFSWTNTLFSSTSVGRLLQPFYYLGPYAQPHLPRQQPLPSPVYHINHLQTFLHLNAGKVQPECAGYLHFGYSLGMANYLGGLGGASEFNDRIRLGFTNLLQGG

SEQ ID NO: 242343 - protein, 60 aa, Zea mays
  Clone ID: MRT4577_152603C.1.pep
PNNDSWFKHHQNMDPKYKPMVLKKRKSEDTKWHPEMDDRHHRGPYQAEVRIQLTIFFLYS

SEQ ID NO: 242344 - protein, 71 aa, Zea mays
  unsure (1)..(71): unsure at all Xaa locations
  Clone ID: MRT4577_152604C.1.pep
LLLHPAGFGLACHLGVLADIPTIGVGKNRRLIPTFQLRXLHVDGLNQSEVRRLFGSKEDWNRERLLLTGQS

SEQ ID NO: 242345 - protein, 191 aa, Zea mays
  unsure (1)..(191): unsure at all Xaa locations
  Clone ID: MRT4577_152605C.1.pep
SARRLGAAPARPWRRRWAWLRXGSSSVRRXGRPRGRPRLSSFCPAAPWPVSPXRRSWWPVVLCPXXLVPRXXGGRRLGAVPVLVVRLALRRRVVXLLVLRLRRGVRLAALVGPWPRPSXPGLPPPLLPLVGPASCPPPLPRAPAVLLVRRAAPVAGAGAAWLLPVARCRRFVSCARRPPCLLVASVSXPAG

SEQ ID NO: 242346 - protein, 69 aa, Zea mays
  Clone ID: MRT4577_152606C.1.pep
CTCLSSWPPSVLTNSSASSLALYVSIVLSSHHRSSSISVSSLHKAMYRRYITHGRRSGWATSEAPLVRD

SEQ ID NO: 242347 - protein, 71 aa, Zea mays
  unsure (1)..(71): unsure at all Xaa locations
  Clone ID: MRT4577_152607C.1.pep
MRVLLVALAFLAFVESATSTHTSGAXGCHPSPSVDVPSPVHLTIAVHFGLEQHVHESLQHSPHLRTGFHHI

SEQ ID NO: 242348 - protein, 63 aa, Zea mays
  Clone ID: MRT4577_152608C.1.pep
RVFFFFFFFFFFFFFFFFFFFGIGLTQIFLPPKNHFVFKTFFYNPFDIRSKEIPLTSTQGFNH

SEQ ID NO: 242349 - protein, 45 aa, Zea mays
  Clone ID: MRT4577_152609C.1.pep
LLSCLLTPPVQPNNQPRRIPRSILLPLGRSRDRISEFLITGNPSG

SEQ ID NO: 242350 - protein, 67 aa, Zea mays
  unsure (1)..(67): unsure at all Xaa locations
  Clone ID: MRT4577_15260C.1.pep
MKKMGSSAYAAWSRRWIRREVXPLVVPIVVGLGSCSLQRVRNITGNHEVRVTNENKADGVVDNQHEG

SEQ ID NO: 242351 - protein, 434 aa, Zea mays
  unsure (1)..(434): unsure at all Xaa locations
  Clone ID: MRT4577_152610C.1.pep
MSPPPPGGSNGRRHQQQRQEAVSSMESGGGASGAATKRFTWKGPVIVLVFELLESIAFSGVALNLVVYLATVLHGSTAFNAAHVDTWNGTTFIVPVIGAFLADSYWGKYRTILASIVFYLVGLVLLTVSAAIPSLRPATACQMGESCAPATKTQFSVFFAALYLTSIGTGGVKSALLPFGAEQYVDDAGRPERKQAFFSWFFAAINLGIFVAGTLVSWLEQNVSWALGFGIGTACLFVAALAFAAGTPCYRVQMPTGSPLKDIIRVFVAAFRKRDVRMERDEGAAVLLHEDEAEDEDEDGDSAGQQQRLARTKGLRCLDKAAAIIVMDGDKERESEWSLCTVSEVEGVKILVRMLPIWMTCVLYAASLGQMTTTFIQQGMAMDTRLGGRFKVPVASLVSVEVVFMLLWVALHDAAIIPAARGXGRPGGLTQLQR

SEQ ID NO: 242352 - protein, 47 aa, Zea mays
  Clone ID: MRT4577_152611C.1.pep
PTYDKSKEPSLLPTGSMHGASIYTRQDLDYNHVYNKGLIGCSCEIKK

SEQ ID NO: 242353 - protein, 77 aa, Zea mays
  Clone ID: MRT4577_152612C.1.pep
HHPLVEQGSCPTSNASPGVAPLIHPSKSVTWYFVKVKLSQTWVSGRQTGLLDDPLSCTDPLQISPALFQTHAWADAW

SEQ ID NO: 242354 - protein, 73 aa, Zea mays
  Clone ID: MRT4577_152613C.1.pep
AGSTPAPNPSRSTCSSRRSDKNSIAWAHTERVPWQLPRMKPRGVSSKYTRLLYRILHKGWDYYTGAAFDTTMQ

SEQ ID NO: 242355 - protein, 51 aa, Zea mays
  Clone ID: MRT4577_152614C.1.pep
LHLDPSSPSSTTHSWMGMNKIRLGRSIIQLGGLLFCCPLRFFPGNIHTSGR

SEQ ID NO: 242356 - protein, 79 aa, Zea mays
  unsure (1)..(79): unsure at all Xaa locations
  Clone ID: MRT4577_152615C.1.pep
FDHDCCVTIENGRKSKIFFIDXSPSTSRIXIYMLDSTSKDHIKYDCDTFHYEIQATDPSEVDIIGSPANDLTGTGSPFE

SEQ ID NO: 242357 - protein, 94 aa, Zea mays
  Clone ID: MRT4577_152616C.1.pep
LSRALRSSILVGCWEGSPPHASNSSIYRGCASLQLAKSLLPLRFCYEQPPRSALVLIRHAPWCHTGMSLTEVRLHFCYLHSLYIVLLYFLYVIS

SEQ ID NO: 242358 - protein, 103 aa, Zea mays
  Clone ID: MRT4577_152617C.1.pep
LPIARSQGRAILALTLPPGRLLLLLLGLHLPPTTATGLLQPLPRLRRGGGAPPQPGARGGGRDADEHADRPYAPKAKLGRARPHQQQHPRAEHGRNKCSDLTP

SEQ ID NO: 242359 - protein, 58 aa, Zea mays
  unsure (1)..(58): unsure at all Xaa locations
  Clone ID: MRT4577_152618C.1.pep
FYRPYDRFLMXKKKKKKKKKKKKKKKKKKIKKKKKKKKKKVLCVVTTVKGQIPTHWGP

SEQ ID NO: 242360 - protein, 141 aa, Zea mays
  unsure (1)..(141): unsure at all Xaa locations
  Clone ID: MRT4577_152619C.1.pep
AEVPDTYDTFLQCENSDKDDTSYVDFADCHVNGDSSGKSALKKSVYKSRXGISKVXGLSTITXVSLVQPIMMEXIFFEYSPPCVXFNSPNSDTHVFFGEARIDDLYSQVXERTQEXLMAPDLSKMISILETSDPVQDDIDD

SEQ ID NO: 242361 - protein, 53 aa, Zea mays
  Clone ID: MRT4577_15261C.1.pep
VCYQAASYGLSRGTGGTLCRHNTDSGCITPSCGFCIFAAWLRPTWVTMIQPFW

SEQ ID NO: 242362 - protein, 48 aa, Zea mays
  Clone ID: MRT4577_152620C.1.pep
FPINKNTTLSDYINRYPTATTVKPICRKHSTNGPNLDPHKSNAQATKH

SEQ ID NO: 242363 - protein, 61 aa, Zea mays
  Clone ID: MRT4577_152621C.1.pep
HGHNTKGDIKTHRGPYNHHCLHLTASLTCHQLAPAIPYTWPTHRHHQSDPGTAGTPTRGHS

SEQ ID NO: 242364 - protein, 51 aa, Zea mays
  Clone ID: MRT4577_152622C.1.pep
TACTCPGLRSSSGDALAPLDSSSSLLWTTHMHPDSLVHVHAAVVHASSHHA

SEQ ID NO: 242365 - protein, 246 aa, Zea mays
  Clone ID: MRT4577_152623C.1.pep
MSEEDKAAASAEQPKRAPKLNERILSSLSRRSVAAHPWHDLEIGPDAPAVFNVVSTSITLEPFDVLYVWCCGEWGLRLSGTIYGKVVEITKGSKVKYELDKKTGLIKVDRVLYSSVVYPHNYGFVPRTLCEDNDPLDVLVLMQEPVIPGSFLRARAIGLMPMIDQGEKDDKIIAVCADDPEYRHYNDISELSPHRLQEIKRFFEDYKKNENKEVAVDAFLPATTAREAIQYSMDLYAQYILQSLRQ

SEQ ID NO: 242366 - protein, 88 aa, Zea mays
  unsure (1)..(88): unsure at all Xaa locations
  Clone ID: MRT4577_152624C.1.pep
WEALCSIHLLGNIWPSLLHHMLYGPISVTHRTKAGHLPYWARRYTFYILVXIILPCLAGLMPFASLSDWKEHAVQYLKSRFSGINIED

SEQ ID NO: 242367 - protein, 55 aa, Zea mays
  Clone ID: MRT4577_152625C.1.pep
KVQAKRNLEMWNPVAIPPVQFFMVLSLVPEQKVNWAFPSHLPRKMQANWRIRSLV

SEQ ID NO: 242368 - protein, 85 aa, Zea mays
  unsure (1)..(85): unsure at all Xaa locations
  Clone ID: MRT4577_152626C.1.pep
MTMIEALDSTSATQSFLRITXGIHDSXSAHARGGGLDMAEQRLHRMAQSWGLPFEFNAVPTASHEVEFEKLCLLSKEAVVVHFAY

SEQ ID NO: 242369 - protein, 85 aa, Zea mays
  unsure (1)..(85): unsure at all Xaa locations
  Clone ID: MRT4577_152627C.1.pep
SAVXXCXXPFPXXFLFSRPPXCPXXXXLVSXGSSLCXPXXXXPPRFPVSLVPPAXXGGXAPXLXXXXCSGGAVPPPPXLXCPVXV

SEQ ID NO: 242370 - protein, 53 aa, Zea mays
  Clone ID: MRT4577_152628C.1.pep
RHHTGTNAARIAEPPNHDLGILPEFWTYAATAVPDMGLMAMNHILLIAAMLAV

SEQ ID NO: 242371 - protein, 82 aa, Zea mays
  unsure (1)..(82): unsure at all Xaa locations
  Clone ID: MRT4577_152629C.1.pep
SSNCVSXAXVHGDVDVAHEXEFGDEXHDXDDVHHDXEEQXXVFPXXPXVXALVPXLVXLPXHVLPAXXPSILSTLGXEXLMN

SEQ ID NO: 242372 - protein, 64 aa, Zea mays
  unsure (1)..(64): unsure at all Xaa locations
  Clone ID: MRT4577_15262C.1.pep
YGGTVQRRESVEVMVSRNARDRTSTSRVMIDQFNADVADRMPWKFIXHRRVVRVKPSESARGLY

SEQ ID NO: 242373 - protein, 121 aa, Zea mays
  unsure (1)..(121): unsure at all Xaa locations
  Clone ID: MRT4577_152630C.1.pep
RPACCCPVHAASTCPQGLGALVLPNPTPFVCLSVGFLRSRRRSETPQSWLRRAHXDLRRXXEAGTAAAGATTTTAPWMPPPPPDRRDYLYREGRXHDGGGGDPLLPPAPXPXRWRDSPVHP

SEQ ID NO: 242374 - protein, 49 aa, Zea mays
  unsure (1)..(49): unsure at all Xaa locations
  Clone ID: MRT4577_152631C.1.pep
KMVEKQNRRSITSYKXTYYTLLNXXXXXSSXFSSNPSYXXXXPFXPSSI

SEQ ID NO: 242375 - protein, 102 aa, Zea mays
  Clone ID: MRT4577_152632C.1.pep
GGVRGVAPVGGVRATPPGTGGIDRWGPRAQVILFAPGLFPLVQGVYLRWSGVGGGPPVFLIKGRSVPVVSVGFILGSRRPMHHPAWIGDRWGLFPPPGFFLS

SEQ ID NO: 242376 - protein, 112 aa, Zea mays
  Clone ID: MRT4577_152633C.1.pep
KFVQTNFFFAPPPMGNRVFFPCPPRVLKKKVPFSQRNLVVPKGKINCCGAGALFGFPPPKFGPFKTLLFFRGGSRNPFFLLNRKNLFSARFLFSCKTGNLGLGPKGDYFFFP

SEQ ID NO: 242377 - protein, 147 aa, Zea mays
  Clone ID: MRT4577_152634C.1.pep
YPSQHQQPQNHQQLLLKYITQDLGFSGRKPIAASLIYYCLLHWRSFEEAKTTVFDSIIQIVNSATEAQHDTRSLAYWLSNLSTLSVLLQRSFKATRATASTPHRRRISCERIFQANQTSSSGLACLSAQSVDGGTVFHQIEARYPAS

SEQ ID NO: 242378 - protein, 80 aa, Zea mays
  unsure (1)..(80): unsure at all Xaa locations
  Clone ID: MRT4577_152635C.1.pep
DPLERPTYAFVSLLRRLETGKHWRDVGRXRHDSPHTRQQRDHNXNQAKTQEXPEDAQKXPKTLEHSQRATRTSXNRGEPE

SEQ ID NO: 242379 - protein, 59 aa, Zea mays
  Clone ID: MRT4577_152636C.1.pep
LVDLESPLENEWSCSYRRGGKRKHHQNQKTFALFIILYFLRSQPPSLYHTIRTCPGGRS

SEQ ID NO: 242380 - protein, 199 aa, Zea mays
  Clone ID: MRT4577_152637C.1.pep
YPRGRPCLLLVRRSPAPANDLLPSQDASVAARPEAPVDTSRPSPSSDSPSHGGAHLPVLPVPARRGCPFLQPCSASLPAPLFISCAPWFWSQAPWPPRCSSLVLGRQVSLLYAFFFLPGSCSSNDAVGRTSLLLLRPRRGSSLRVVVLQFCSVHFPVPRHCSSPRLLASSTAERPLPSLSKLLCRLQAPAQACSRRSPL

SEQ ID NO: 242381 - protein, 78 aa, Zea mays
  Clone ID: MRT4577_152638C.1.pep
SQHLFLFTVAPGPSSVSTCSSLIVTRSILTKLCLFILSSYSHKTSCPRREMYFPQPNKFEHPAHWVCVRETSKQKRKR

SEQ ID NO: 242382 - protein, 95 aa, Zea mays
  Clone ID: MRT4577_152639C.1.pep
LVCSTRCPLPLGPSRSAIQNEVMGQYAYSVRKFLVYYRMIGDKSTLSPFSWWAVHEVLLCAESVLVCGRPPTVLEKIIILIMFRQMPALRLRHRL

SEQ ID NO: 242383 - protein, 116 aa, Zea mays
  unsure (1)..(116): unsure at all Xaa locations
  Clone ID: MRT4577_15263C.1.pep
PGPPGEVMXVGVEGGVXRCTHCASETXPQWRTGPLGPKTLCNACGVRFKSGRLVPEYRPGSSPPFVLTQHSNSHRKVMELPPQKELVLIRGTPRDPPAAAAGSPGPELMFRDYGVC

SEQ ID NO: 242384 - protein, 78 aa, Zea mays
  Clone ID: MRT4577_152640C.1.pep
LNRYPLGDVLAPAAYLYNNVLASVANMMYRFGLTHEHPVTIQNGAVGKTPLTIARLHTFPYRLARGDRRVRILLLFLS

SEQ ID NO: 242385 - protein, 79 aa, Zea mays
  Clone ID: MRT4577_152641C.1.pep
MFGPGWKERSHGFYPWATSLFCWRPQMNKAKYMMFSCPKKKKKKKKKKKKKKKKKKKKKKTEKKRKKVRDSKTYRDIQA

SEQ ID NO: 242386 - protein, 106 aa, Zea mays
  Clone ID: MRT4577_152642C.1.pep
RKRKKALRSPLPYGSSSCPPSVSSLGEAPLPAQSIGRPRAGIELDKHGRRQRLLVISDKIPPHTGQRDLYYSEGASHYDTLQHKYFESCPCPITNRDLLLKFMMLP

SEQ ID NO: 242387 - protein, 157 aa, Zea mays
  Clone ID: MRT4577_152643C.1.pep
ACGLHDRGAAPTPCWPLFGLKGALHPDPPPPCLPCCIRRPRSMRSEAHVADESFFFSFSSCCFSKIQVGWPCLSVQELKQVSALLVVMVSIGTRTLRRFIPIFAGEVLCQRCHTRLFCSHILRFPVRTGGACILRWGSWISLWTEAQTASLASPRCW

SEQ ID NO: 242388 - protein, 96 aa, Zea mays
  Clone ID: MRT4577_152644C.1.pep
RLVTEIKDHRFRMLDLRKLPEVLALENLSMGSAWVVFSKQMGNRKMVKSLEFKTTQSRTTLKGQAVWVSPIGRGLSVLEKDIVLMVLAQSSSNTAV

SEQ ID NO: 242389 - protein, 150 aa, Zea mays
  Clone ID: MRT4577_152645C.1.pep
PRPNVYILPNLRKKTQEETVILDTVESEPIREETSPDLDKNGPDRAADGSEIVETIAVDAPNDVRTDPDGQSSEPDVVKDQSVNEEDTNDSGFIECGKNSSDKYKSKKKPKVVKKLSEIEVKKKDPVITKELKKSTSNKFAALLDDGSNE

SEQ ID NO: 242390 - protein, 59 aa, Zea mays
  Clone ID: MRT4577_152646C.1.pep
HTAPPLFSVWFLRYGASSTSNKAPCATLLVFMNGMETEQDPLRRVLGHYMKPLESGDDN

SEQ ID NO: 242391 - protein, 294 aa, Zea mays
  unsure (1)..(294): unsure at all Xaa locations
  Clone ID: MRT4577_152647C.1.pep
MLSEQTAASTSSGEHQERSVVEDRRLQPVGENEEAEFRDIHALSPPPSQPSSYRRSRHASVGSDTAPSEPFPTMSREFSAMVAAAAAIANGAAADRLGEAEDEETNPLAIVPDSNPXVAAPGPGPAHPRRRRRPRQRRXGVSVGQVRKEEVESKIAAWQIAEVAKVNNRFKREEVVINGWEGDQVEKAGAWLNKYEVVSPSHRSTPPHSLTSVVRTVQCLLTDTNACNVQRKLEEKRAKAMEKAQNEVARARHKAEAKRASAEAKRGTKVARVLELANFMRAVGRAPSAKRSFF

SEQ ID NO: 242392 - protein, 80 aa, Zea mays
  Clone ID: MRT4577_152648C.1.pep
IFSLLADTLTEIQEQIGAGDGDDSEEDNDWEEVQNGDASISDDIIHSASVPSMTNPSVEHLNAMAKVFDEVCEQPGLLLC

SEQ ID NO: 242393 - protein, 45 aa, Zea mays
  Clone ID: MRT4577_152649C.1.pep
PFRTNPLASPLLVIRLTLCNSNKFFPYENMPSHSKKKQILGFIQG

SEQ ID NO: 242394 - protein, 79 aa, Zea mays
  Clone ID: MRT4577_15264C.1.pep
HAYVIFVPLVRTPLFFFFVLKSRMVDLRSGDQVRFISFDPNEAHAYSPNTRGHQIIFLKDPLPGGGAGCGSKLLPRQTW

SEQ ID NO: 242395 - protein, 103 aa, Zea mays
  Clone ID: MRT4577_152650C.1.pep
REKSPGGQVNNRFKREEVVINGWEGDQVEKASAWLKKYERKLEEKRAKAMEKAQNEVAKARRKAEERRASAEAKRGTKVARVLELANFMRAVGRAPSTKRSFF

SEQ ID NO: 242396 - protein, 41 aa, Zea mays
  Clone ID: MRT4577_152651C.1.pep
LKNCLSKLTPKATWHYTWEGQLRRYEDRGVIHHVEMGNFEQ

SEQ ID NO: 242397 - protein, 118 aa, Zea mays
  unsure (1)..(118): unsure at all Xaa locations
  Clone ID: MRT4577_152652C.1.pep
SKSLLPWEEWGEFEVTKDDXNPQTALIPLHPDLRAKCTETASWIYAESLEGKPSGCHTMIVSWTDTPSDQSARPLDAHVAASGMTEXSTLQPEASCXMWQEAHNIRTGTNGLVLTEII

SEQ ID NO: 242398 - protein, 108 aa, Zea mays
  Clone ID: MRT4577_152653C.1.pep
SKIAAWQIAEVAKVNNRFKREEVVINGWEGDQVEKSGAWLNKYERKLEEKRAKAMEKAQNEVARARHKAEAKRASAEAKRGTKVARVLELANFMRAVGRAPSAKRSFF

SEQ ID NO: 242399 - protein, 276 aa, Zea mays
  unsure (1)..(276): unsure at all Xaa locations
  Clone ID: MRT4577_152654C.1.pep
RQEQPVAENEEEEEEQEEFRDIHALSPPPSQPSXTAGRAAASRGGPPRAGAGTRPSAPSGATXAPSEPFPTMTREFSAMVAAAASAXQQPAVTRXDVVGRAEEEEEEELEETNPLAIVPDSNPIPSPRRGPPPAAPGADAAALVAADGHGSREGGGVSVGQVRKEEVESKIAAWQVAEVAKVNNRFKREEVVINGWEGDQVEKASAWLKKYERKLEEKRAKAMEKAQNEVAKARRKAEEKRASAEAKRGTKVARVLELANFMRAVGRAPSTKRSFF

SEQ ID NO: 242400 - protein, 69 aa, Zea mays
  Clone ID: MRT4577_152655C.1.pep
ILFMFARGKNLSNATPTARNQIYVSYASYTYSENWLRCNQHPGANWMNCYNCRNTYMICFSFKPEHFTD

SEQ ID NO: 242401 - protein, 81 aa, Zea mays
  Clone ID: MRT4577_152656C.1.pep
GICEQSLLNKSSGASIMKVRTPYGQSSGRLYLRWVVGKPILDLEIQHIPDSLLFRRVSLSSFSMHRPSSPGVSEAIGWRCC

SEQ ID NO: 242402 - protein, 76 aa, Zea mays
  Clone ID: MRT4577_152657C.1.pep
QSAFSVEAGGPPPPLTLSTCCYGPAFLHWPGRDLACTAYLVCLGGGSVTARSRWTMWGEDITLWEPHGGRCRSKDG

SEQ ID NO: 242403 - protein, 384 aa, Zea mays
  Clone ID: MRT4577_152658C.1.pep
MAAADASSLPPSAITCRAAVAWGPGQPLVMEEVEVAPPGPMEIRVKVVSTSVCRSDVTAWQSKAQLDLFPRVFGHEASGVVESVGEGVTEFQVGDHVLTVFIGECKSCKHCVSGKSNMCQKLGLERKGVMHSDQKTRFSVKGKPVYHYCAVSSFSEYTVVHSGCAVKVGLTVPMDRVCLLSCGVSAGLGAVWNVANVSKGSSVAIFGLGTVGLSVAQGAKLRGASKIIGVDTNPEKQEKGKSFGVTDFINPDELSEPVQQVIKRITDGGVDYSFECVGDSGVVSTALQSCSDGWGVTVTLGLPKGKLEVSTHYAFLLSGRTLKGSMFGGWKPKSDLPSLVDKYAAKEIQVDGLVTHDIPFNEINKALELMLENKCLRCVIHMPR

SEQ ID NO: 242404 - protein, 36 aa, Zea mays
  Clone ID: MRT4577_152659C.1.pep
VSEGTSLGVISIGVFKHQKVLFYCGRCSFFLIWVGI

SEQ ID NO: 242405 - protein, 61 aa, Zea mays
  Clone ID: MRT4577_15265C.1.pep
FDIAHRALDARHTLVIQSIFLCFQFYDLITRCIIFIQATLQFFAWLIMHLLTQLILGRQKI

SEQ ID NO: 242406 - protein, 97 aa, Zea mays
  Clone ID: MRT4577_152660C.1.pep
LLPNINMQQPKQIKASPSPSPPRTGHLSLAQLPSQQKLPSASAKWPVSTGTTNHLTLSSARVACHAVLLPRIVRFPAVHHGQRLCHVRADVASAAGA

SEQ ID NO: 242407 - protein, 226 aa, Zea mays
  Clone ID: MRT4577_152661C.1.pep
MAASLLHAAASSPLAGPYPAARAAFRPLASSPFLRLARSSPDRRARLDFPLRALSGGARLSTGVAALRPRRFVAALAGEEPMSSELGDDKEKETEKIEIEPEEAQEVWREMLKQFKAEAIRMQALTTQAYDVYSKRAREVLLEASEKLRIQADKAQKDLTIIAAEVGEEGQEYLQLAAKNSPDSIKDITETINAVGNLNGPSEYKDYHVGISFGTFPTVGGFLNFC

SEQ ID NO: 242408 - protein, 40 aa, Zea mays
  Clone ID: MRT4577_152662C.1.pep
GYRRPLSSFFFFFFFFFFFFFFFFFFFFFFFFFWGKTHMF

SEQ ID NO: 242409 - protein, 46 aa, Zea mays
  Clone ID: MRT4577_152663C.1.pep
PAPCSSLTSPCFACWRGLMRVPSLVTAQLESDSGHSSRLPECTCVT

SEQ ID NO: 242410 - protein, 52 aa, Zea mays
  Clone ID: MRT4577_152664C.1.pep
RRGLFMGSQPNLIFKLQYKAYLYTTKLPIGNLLFALFQGEKTPNRPKILFLT

SEQ ID NO: 242411 - protein, 61 aa, Zea mays
  Clone ID: MRT4577_152665C.1.pep
HTYISTTSNPHTHPPLISYLTHNPLHLSHTSHTQRTNEFHYRLTDPHHPHNTDPFTFHTQY

SEQ ID NO: 242412 - protein, 78 aa, Zea mays
  Clone ID: MRT4577_152666C.1.pep
PSSSSSSAAAAAFGRALGDLTLRDTVRPVLVPCYDLATRAPFLFSRADAAERAAHDFRLRDVCAATCAVGAGRVVEVV

SEQ ID NO: 242413 - protein, 62 aa, Zea mays
  Clone ID: MRT4577_152667C.1.pep
GRVGAPSTGLRTAAVVRASGEAQAQAQAGRRAVLGLVATGIVGGALSQAVHAETVKTIKIGA

SEQ ID NO: 242414 - protein, 78 aa, Zea mays
  Clone ID: MRT4577_152668C.1.pep
NRMPKKHNSSFQDYTHYNRHLRRHLVGRCIYRHATRIATPNVGNALCWTDKWGAGGYHPNSTTSLFKLWILRAKSETF

SEQ ID NO: 242415 - protein, 66 aa, Zea mays
  Clone ID: MRT4577_152669C.1.pep
KKFRLQIFAAALNGKLNNSARQQIATPHTRTPEASLEQCLQHQFTSECLALCNCCNLQSDEEPEKH

SEQ ID NO: 242416 - protein, 102 aa, Zea mays
  Clone ID: MRT4577_15266C.1.pep
VNMPPLLKAPLRPSALHRRLRIRAISVEHQPSGASKSTVAKRISNKQPIGLKFIHQILFGRLEKATNIITLYDVSNIWHIRLLLQVSYISFLSMVRRCTDIT

SEQ ID NO: 242417 - protein, 324 aa, Zea mays
  unsure (1)..(324): unsure at all Xaa locations
  Clone ID: MRT4577_152670C.1.pep
MKGDSSRQNSLEDNSQILSAFPREPKLEFLKNITKDFSSERVIGHGVFGVVYKGILQNGQLVAVKKLVQTSGVHDRRFQNEAGNLQFLEHRNIVKLLGSCYQVEKKLVERNNKHFLSDVPEKFLCYEYLSNGSLDNYIYDESSGIDWTMRFKIILGICNGLHFLHEERSEAIVHLNLKPSNIMLGDDMVPKIADFGLSRLFGEEQTRTLTKNVVGWIGYIAPEYHYRGEISVKSDIFSLGVLILEIVTGLKRDLNIQDISSELLIDNVSKNWTEMSHIESKYPSLEEQHLLQVKRCIELGLNSLESDPTPRPTXVXKNXXLXXL

SEQ ID NO: 242418 - protein, 91 aa, Zea mays
  unsure (1)..(91): unsure at all Xaa locations
  Clone ID: MRT4577_152671C.1.pep
TQTTTRPFTLPTTQTAYGRRQAIAESGSQQPTSHVQQQSLAHLTIQTIATQQQQQLLPALSHLAMGNPGVYXQQHVLAXNPLAPANIGANQ

SEQ ID NO: 242419 - protein, 96 aa, Zea mays
  Clone ID: MRT4577_152672C.1.pep
RTARSQATDLAPSALRGPELQGSCPFHNPRRPQGRHPSLLLRWHRRRLAPAALRHLRRQGHLLSAPPFSLEPATIVTIMRATTISSSSPLFGLFVL

SEQ ID NO: 242420 - protein, 55 aa, Zea mays
  Clone ID: MRT4577_152673C.1.pep
MTAAAAVCIDVANTKRPLGEDPASRCDHHGLDEDEPHQAHAAGYIGAVTYQGEDT

SEQ ID NO: 242421 - protein, 68 aa, Zea mays
  Clone ID: MRT4577_152674C.1.pep
TTLLKRSSQMPLEKVLNAHYYRKLLLLWVVHNCYYTNISYPMHLPGMGDYFISLYPSKSGSNKIKAPT

SEQ ID NO: 242422 - protein, 172 aa, Zea mays
  unsure (1)..(172): unsure at all Xaa locations
  Clone ID: MRT4577_152675C.1.pep
MLVASSSSVLLMLLVAALDGMSANAATFKITNNCGFTAXDARIPEVGGTQLNPGGRWNINVPXAATTSRRVGTRSGXSFNGNRKSCQTSDCRSALDSTLSAQTPLDSAEITIRARKNFIQXIRVIHRYKLLMGFSCSSCACVXCEPTLXPHDYHNYPHVITHAYAVNINYQV

SEQ ID NO: 242423 - protein, 54 aa, Zea mays
  Clone ID: MRT4577_152676C.1.pep
IIATMAIIGFLQKRIRTTSVFYLFIFFLRSLDSKFAYSTSLLSYNIVYYNHCPL

SEQ ID NO: 242424 - protein, 110 aa, Zea mays
  Clone ID: MRT4577_152677C.1.pep
PCLRLRLESPMQSSSIPSVIQCHLRLQKVHHLMLISSGQNTPGIDLPTFSFLGSEKEYSLRALCVNSFASVTRQANKHSAFNTGAGGATSSQIVHRGAPTSPPSDACPYA

SEQ ID NO: 242425 - protein, 93 aa, Zea mays
  Clone ID: MRT4577_152678C.1.pep
GKKNLETILYYIRLLLCDSNLVITLELLCWNMISTYCYIVILIYGLCNARGVNVLCVNSILVNNKQFMHYSTSICYPYVSDQIISIFVTYPLE

SEQ ID NO: 242426 - protein, 84 aa, Zea mays
  unsure (1)..(84): unsure at all Xaa locations
  Clone ID: MRT4577_152679C.1.pep
CFERNRFLEFKFFVFKNFFIYKLSRAPGFWGIVKPFEGVFLDFIFTKFAPGGFFFSGXKNKKKNPLKKKQKKKFFXKKIKAXXX

SEQ ID NO: 242427 - protein, 73 aa, Zea mays
  unsure (1)..(73): unsure at all Xaa locations
  Clone ID: MRT4577_15267C.1.pep
FSLLGQTRGGPFFNLFXGQGGKGNQLLPVSLGKKKTPLGPKNQTPFPRGLGDFLIHLAPQVFPLEKGRWGPPH

SEQ ID NO: 242428 - protein, 62 aa, Zea mays
  Clone ID: MRT4577_152680C.1.pep
NDSVILHSISHRMRAFTIRSTRIFCYAPESFTSTMSRWSCCAISISTLIASLTWLVIMCQYC

SEQ ID NO: 242429 - protein, 166 aa, Zea mays
  unsure (1)..(166): unsure at all Xaa locations
  Clone ID: MRT4577_152681C.1.pep
QRELLTKVHLLPKPETAPISEVMRQLGLVVTEGATDEGAPAAKAEXXANVEEDDVDDEEEDYNTFMPAKPNHLDFGESTVSEADMPIMIKLGYFGEAEKKLIRFAGEETPLTPENDEVVVFKSFFRAGLRFPLNEMIGEVLENFEIYFHQLTPNATVRLSVFIWAL

SEQ ID NO: 242430 - protein, 60 aa, Zea mays
  Clone ID: MRT4577_152682C.1.pep
LLSLARSRPRRMDLSNCPFSMPLQTPAHPLDPPTNRLTLLSHMHARSLVASSPRRAGQRH

SEQ ID NO: 242431 - protein, 96 aa, Zea mays
  Clone ID: MRT4577_152683C.1.pep
AFCKQKKIHKAMEFVELMVSRGCYPDIVSYNTLLTALCRNGEVDVAIELLHQLKDKGCSPVLISYNTVIDGLTKAGKTKEALELLDEMTSKGLQPD

SEQ ID NO: 242432 - protein, 54 aa, Zea mays
  Clone ID: MRT4577_152684C.1.pep
DHIFHQILSPSIFSTCSLFSPSLSFPCSLIHIAPRLVPFSLPLTLLVVLLSLTL

SEQ ID NO: 242433 - protein, 90 aa, Zea mays
  Clone ID: MRT4577_152685C.1.pep
RPRSLPLSGRVCVYVSSPESTPPHPPPVPWFHHISLHTPCLPQLSPGVWGDIPPQASFSRGSQERHQDGWVSDCGNVCNRSRFNKYWMNL

SEQ ID NO: 242434 - protein, 368 aa, Zea mays
  unsure (1)..(368): unsure at all Xaa locations
  Clone ID: MRT4577_152686C.1.pep
CRVHPRRQDDLRLEIERLRFKLQHLHKLHEVLXHESLDTTQKLHKSGARHIEDEIKLKEIQLAEDTVRRLVRKQEMEEREAATEAEFYQRSDEMEAKQSYDGGEEAGVREMGKKIAGRGFGEYNRYTWEEIQASTSTFSSALMIGKGSYGTVYKAKLRHTVAAVKVLNSPEGCGTQQLQQELEVLGKIRHPHLLMMLGACPEHGCLVYEYMENGSLDDMLQRRKQNSSPLAWFXRFRXAWKVAAALMFLHSSKPEPIIHRDLKPANILLDGNLVSKIGDVGLSTLLPVPGTGGGGQNVPSTMVKDTAPVGTFCYIDPEYQRTGVLSMKSDVYALGIVLLQLLTARPPVGLPHAVETALEKGRFADVLD

SEQ ID NO: 242435 - protein, 124 aa, Zea mays
  unsure (1)..(124): unsure at all Xaa locations
  Clone ID: MRT4577_152687C.1.pep
YCSPLFEQLLNVYERKTWSKHGHVLPCSWLSQFKDIVTNLKLKLMRIWLQIAAIRRTSAAHPTPTAPAVAEKTVQQQQLPVKKEEAPLPEHEQVQEKPPXCRRGAPQGNRGAQLRNRGGPQAHR

SEQ ID NO: 242436 - protein, 123 aa, Zea mays
  unsure (1)..(123): unsure at all Xaa locations
  Clone ID: MRT4577_152688C.1.pep
IAYLKQQQIFLFKPLAKGKGPKNLEQQVVQPQVVQXQMEQVLINQVXANPCAYLQKIIPINQLDGVKFCGDLQQGQQLIKSPTGGKPMGGAFLQQQQMVPNNQVFFNNPALVWQQPNGGGAIF

SEQ ID NO: 242437 - protein, 227 aa, Zea mays
  unsure (1)..(227): unsure at all Xaa locations
  Clone ID: MRT4577_152689C.1.pep
MADRVTVVLLCDPWPFSTVMVDDLEALVADGLLHPLSGDPQPEWMVPPSGVALTPPPGYVLSFVSFHERGFGVPASRFMRALLQYYGVELHNLNPNSIAQAAIFTVVCEGFLGIDPHWDLWTHLFSVEPFALMTGEKRVRMAVRAGGCILQLRQARAQQYIPAILVSSNKGCNWRYGXRTRNRRISSPFWRPCRSYETEGLPPRGWSLPSIAGGCFPXQSGGCCFRR

SEQ ID NO: 242438 - protein, 97 aa, Zea mays
  Clone ID: MRT4577_15268C.1.pep
SSLKKEKRGLVLPFEGKNDTKTTPVVLIKQKGSPVLKESSRPWDKGGVHHLILRIAPRVGFTRLRKKRPKEKNFPPAVHIVPAREPYFKKGLPILFV

SEQ ID NO: 242439 - protein, 151 aa, Zea mays
  Clone ID: MRT4577_152690C.1.pep
MGDDHGAKLVKSLRGAAQKYVGVGFFLGFFLVLLTYFTLSEQFAIAAPNAIRRTSAAHPTPTAPAVAEKTVQQQQLPVKKEEAPLPEHEQVQEKPPPVDEEPHRETEEPNSETEEDPKPTDDATKIVTTAEESAPAKKPACDIQGPWASDV

SEQ ID NO: 242440 - protein, 51 aa, Zea mays
  Clone ID: MRT4577_152691C.1.pep
MPSHKSFRTKQKLAKAQKQNRPVPQWIRLRTGNTIRYNAKRRHWRKTRIGI

SEQ ID NO: 242441 - protein, 102 aa, Zea mays
  Clone ID: MRT4577_152692C.1.pep
LERHRAAAPRLAASGRVLVRVRRRLRRALVGVRRQHHLNGVVLIVLAWLRTSPFWGFACGEEFSFEVAAPWQVIVVGEGRDEVVVLQVLAKRNRPCTYHESL

SEQ ID NO: 242442 - protein, 91 aa, Zea mays
  unsure (1)..(91): unsure at all Xaa locations
  Clone ID: MRT4577_152693C.1.pep
PGAGDPFPPISPSPEEQLQPSECHTFSDPTCPGAPAVLHFPLVSDSFREYSAPGVRRTPEEAAAGDVNLSSSDSPXHYTKVTYSQEDVDKL

SEQ ID NO: 242443 - protein, 116 aa, Zea mays
  unsure (1)..(116): unsure at all Xaa locations
  Clone ID: MRT4577_152694C.1.pep
MGGVSEDQSVREVDSTETNAMSLKLTHRALSDMSRLSSFKNLXHLYLSLNCLVTLKGMLFXAHQKRLSGQENMLVSLKGVEGLSKLQVLNAGLNELTKTDDVTSYTRPGALSLNDN

SEQ ID NO: 242444 - protein, 129 aa, Zea mays
  Clone ID: MRT4577_152695C.1.pep
WKETPEAHVFKADVPGLKKEEVKVEVEDGNVLQISGERNKEQEEKTEPAQESPAHASAPRGPRRPPCLPPRPSPATIGRRRRPACRPPASSTSSSSRRSRSSSRRPWPPRPPRPPPTPRRGSPATPARP

SEQ ID NO: 242445 - protein, 152 aa, Zea mays
  unsure (1)..(152): unsure at all Xaa locations
  Clone ID: MRT4577_152696C.1.pep
FPKFPHGLAPNSPPRCFLLLEKRAFFFSFPGLKPPFARGPLAILFRALRFPPPPGGAXFPEPPPXDGVQNPPPPSSKGPPSPPFTQEPVPPXIPGGLPPPANSLPPGWGFILPREITKTKYFSPPPVLPFLGGPPFPAPPPGGHFFLPPLFG

SEQ ID NO: 242446 - protein, 187 aa, Zea mays
  unsure (1)..(187): unsure at all Xaa locations
  Clone ID: MRT4577_152697C.1.pep
SLGELLRVREGFRKKKKGANEAKCPHLETRIGCPASLTIRLTANGKCHLIEFVPNHNHQLAIASTIHMLKAKKIRHKARVVRENLTDDTVSTPDFENEDEAYEFYSMYAGKIGFIVRTAGMTVNNENVITTRMLVCSKERFREKKTGAKRVKKPRQEMXTGCLACMVIRLGTNGKYRVTELVTFHNH

SEQ ID NO: 242447 - protein, 42 aa, Zea mays
  Clone ID: MRT4577_152698C.1.pep
GDRSHSAAACWTMMIPPKYGQSGSAGGLGGNCLQPLPQPAKL

SEQ ID NO: 242448 - protein, 100 aa, Zea mays
  Clone ID: MRT4577_152699C.1.pep
QNTPPVASAAAVATSANFPTAICGVPRGEPGTPRWCGGHTFVPPLSAAHPCDHRYLVDGKSPALYRGPQIGVNKPRFERKRGALEGVIHPLVFALKPLFF

SEQ ID NO: 242449 - protein, 55 aa, Zea mays
  Clone ID: MRT4577_15269C.1.pep
CPMWCFLVHQMRLPYRQPCYCVWYRCSLPHGSSTSHSTFLVVRSPSAKRAFTWKY

SEQ ID NO: 242450 - protein, 103 aa, Zea mays
  unsure (1)..(103): unsure at all Xaa locations
  Clone ID: MRT4577_1526C.1.pep
MDVEAAASGRWCTWNLAAVAAWVRVCSXHVXARVADALWWRPRRLEAHFARQGVRGPPYRFLLGCVREMVALMAEAAAKPMSPPDSHDALPRVLGXYHYWRKI

SEQ ID NO: 242451 - protein, 175 aa, Zea mays
  Clone ID: MRT4577_152700C.1.pep
EQNPPRVDDGRDEPAKPPAAPSFRGVNEEDRRAGSAVNQGPLLLQLRWHNFDDKFSGQILFLLLAAAAAPPLHPVRTLTRQGPDHLRTPRAAFIRRLRKALDIQYRIIGSSVHARDRGARCRSRSIQIRPVGSPPRRGGFGGGGERRERWGGGGTVMRDGRSAEEGESLHEMGRQ

SEQ ID NO: 242452 - protein, 228 aa, Zea mays
  Clone ID: MRT4577_152701C.1.pep
MGACASVHKDPGYPKEQFLDSPTKAEAANEKGGCGGGDDDFADFKSKVDAEQQRAELNPKSPDSGSKDEVFFESRAWLDSDCEDDFYSVNGDFTPSRGSTPIHQPRAQTVMSNIFQPDTHGSKSPEPSPTGRRKLAELLQEAMQNGPEESTDQELQLRSVAADGKPVSESTSSSACSTVTTPIAVANAKSRKEKAWYTGRCCLPSFVHSLTLDESERAQKMSSRPCAV

SEQ ID NO: 242453 - protein, 244 aa, Zea mays
  unsure (1)..(244): unsure at all Xaa locations
  Clone ID: MRT4577_152702C.1.pep
MGACASVHKDPGHPKKQFLDSPTKAKAANGKGGGGGGVAPVGDGFGDLKSKVDAEAXAAAGXFNPKNPDSGSKDEVFFESRAWLDSDCEDDFYSVNGDFTPSRGSTPVYQPRAQTVMSSIFQPDTRSSKSPEPSPTGRRKLAELLQEAMQDGPEESADEEEQQQQSRSAAADGKPPVSESTSSSACSTVPTPVAVAKSRKEKAWYTGRCCLPSFVHSLTLDESERGQKMSSRPCAVSPRAPVPS

SEQ ID NO: 242454 - protein, 49 aa, Zea mays
  Clone ID: MRT4577_152703C.1.pep
YPLRACLEPDFSPRFRGFSRPKKFEWISVNFIWDPLEILVFQTRPKKPF

SEQ ID NO: 242455 - protein, 165 aa, Zea mays
  Clone ID: MRT4577_152704C.1.pep
FAGSKDEVFFESRAWLDSDCEDDFYSVNGDFTPSRGSTPVYQPRAQTVMSSIFQPDTRSSKSPEPSPTGRRKLAELLQEAMQDGPEESGDEEQQSRSAAADGKPPVSESTSSSACSTVPTPVAVAKSRKEKAWYTGRCCLPSFVHSLTLDEGERGQKMSSRPCAV

SEQ ID NO: 242456 - protein, 238 aa, Zea mays
  unsure (1)..(238): unsure at all Xaa locations
  Clone ID: MRT4577_152705C.1.pep
MGACASVHKDPGHPKKQFLDSPTKAKAANGKGGGGGGVAPVGDGFGDLKSKVDAEAXAAAGXFNPKNPDSGSKDEVFFESRAWLDSDCEDDFYSVNGDFTPSRGSTPVYQPRAQTVMSSIFQPDTRSSKSPEPSPTGRRKLAELLQEAMQDGPEESADEQQQQQQSRSAGAAADGKPPVSESTSSSACSTVPTPVAVAKSRKEKAWYTGRCCLPSFVHSLTLDESERGQKMSSRPCAV

SEQ ID NO: 242457 - protein, 94 aa, Zea mays
  Clone ID: MRT4577_152706C.1.pep
VLPIDTSRSPYLRSPGPAGTLHNLECYLHGVAGEQGSAAGGFRLEVDRDVALVNKGADALRDEYPVPANWWVPENRWMVRGSDGHWVLKDFEEI

SEQ ID NO: 242458 - protein, 168 aa, Zea mays
  Clone ID: MRT4577_152707C.1.pep
HSQGSSDAPKFINVFCFSCCITIGRALYADFTPSRGSTPVYQPRAQTVMSSIFQPDTRSSKSPEPSPTGRRKLAELLQEAMQDGPEESADEEEQQQQSLSAAADGKPPVSESTSSSACSTVPTPVAVAKSRKEKAWYTGRCCLPSFVHSLTLDESERGQKMSSRPCAV

SEQ ID NO: 242459 - protein, 78 aa, Zea mays
  Clone ID: MRT4577_152708C.1.pep
FFFFFFFFFFFFFFFFGKNFYFFQYPHFFSKFKKYLSFWAPLNAVAMTLPSIDQKEFLSPTIFCFSSTLRWQPRFWTL

SEQ ID NO: 242460 - protein, 99 aa, Zea mays
  Clone ID: MRT4577_152709C.1.pep
VEAVLLLRGVDRVRKVAFFMLALRRSSIASEAVRWLEGPFGVVLLERFLCQVAVDSLSPVMGSVVFPPTFFKRPPVEEKVGGCNIVSSSIGLEPNSELT

SEQ ID NO: 242461 - protein, 659 aa, Zea mays
  unsure (1)..(659): unsure at all Xaa locations
  Clone ID: MRT4577_15270C.1.pep
MQPGWSKESKLVGVNAMLVRVVKLLKNPHFMAKPAAIDLIRSIIQTGGASTEQALSSALTSIMDALKSTDXNTRKAASLALSSSAVSSGYLATSSETSXLRSLERSKFDKLWKAIPGSHTPEPSEAGSSTKENYFGDHHDXEVYMMEDQEILLLGEQIMGLLYLLSVXSLSSAKQMSPLSINKVAINNAANLQQMKTGDWRVEVSVPKQSMILLVDNDEKGSIKVCSLKDTKRNAYESVDVDSKFDYDIVDDKQECSSVSEVASRSFETKHVTTAQECTEDCDSAEVTEQCPRGRESKSIGSTITDVTTHDTHSCCLNTMNELALVRKQLQEMERKQXKFFDLLQEFMASSAENMSVLNLKVHNLENAADXCIYNYSERKPVSSSWLXKHFKNQSVSSLPRLSTSTPRSSMDVNYKPPPNSELKHEKWMRDLPSRGSNMCCKEGADFRKDHVRSKVRKLGPVSLEDXWEDVIQAQQEVEHQGLKGLIQFHLPVSVNNLDCEMHCAPQINLVSFKXTDGMEPAYMEALNCGDYDDLIDLMDRTGPCLGRVSRGTTNELLRVIAEQFLNKKFFDLALPWLQQLADLSTIYKPTQLFASVRAQKEFLSALEEAATGGSMEPALRIAIAQLGFKLSKAFEVGPCRKISARMCRENETIMTNAM

SEQ ID NO: 242462 - protein, 64 aa, Zea mays
  Clone ID: MRT4577_152710C.1.pep
GLDSDSVELTPNICVILKRVIIRIEIISIICDLYLSLHVINPSSKVDNENKEHINNLCIMLEFI

SEQ ID NO: 242463 - protein, 70 aa, Zea mays
  unsure (1)..(70): unsure at all Xaa locations
  Clone ID: MRT4577_152711C.1.pep
AHCTQCDWFIHWTGARAKKDHTLSLSACHSPTSIXYELTITAERSTSPESNHLTLLPQGATLYGDKVLRS

SEQ ID NO: 242464 - protein, 94 aa, Zea mays
  Clone ID: MRT4577_152712C.1.pep
SSLSIMDHGWYCLTKYCRSMLNESDLSWNFGPSACSLPKTIVRPHKSSSSLTEEFECKKALLLPAANNGTKAMLSADANKKQGGGKTTASYLPR

SEQ ID NO: 242465 - protein, 72 aa, Zea mays
  Clone ID: MRT4577_152713C.1.pep
KLTWPLVGFSGLIWFYFSSGLSFLSAIKGPPIKFILTTNWRFIFFFYAPRRALFIALIFLVRGCPTGPPRNL

SEQ ID NO: 242466 - protein, 160 aa, Zea mays
  unsure (1)..(160): unsure at all Xaa locations
  Clone ID: MRT4577_152714C.1.pep
NGKQIFRGGPLLKGPPTGAGRXQGAPGLGGFTKAGGAGRPYGPGKKAKAGLNTXSPPDXPKKPPLAGGGQNGPPPPGMTQGPXGNHRGGPPGGGGPPGGGDPKTWLAKTLXPPKRGGGPKPSXPGLKKGPSLRNTQRSKEEPPPAKXSPPPPRWDKQPGP

SEQ ID NO: 242467 - protein, 88 aa, Zea mays
  unsure (1)..(88): unsure at all Xaa locations
  Clone ID: MRT4577_152715C.1.pep
ENPVATQIKLVEQHTPFTRWGNKEKTPTDSPFQKLGPPNGEWXTPCSAALKAGGVVVTHRATALLSTALXPPPFGFFPLFFATFAGFP

SEQ ID NO: 242468 - protein, 108 aa, Zea mays
  Clone ID: MRT4577_152716C.1.pep
KGPLYLYTWLCSVQLTTKSVSDPVPVFKKITRTGKGTQSLKTKSSQNKNKCTTFVRHILYMDDTVAGRRCWRGPRRLPLFVVPVDLIHQPPGFLARLRGAVGDHRVQR

SEQ ID NO: 242469 - protein, 205 aa, Zea mays
  Clone ID: MRT4577_152717C.1.pep
CLSSMVTTMKLVIDESEEIQTALASYLLQKARNEERETSPASFELAEKVISSCEDGKLKPIFLQLLKVQGTPLDEYSKIVTLVCEGDKVVREDNNVDPSGKDTVDDGKLSERTISDELPHESSKLEQDGTPTTAISSGATLVDNGEANQGPVSPKGPASPKGPASPKGPASPKGSASPKGPASPKEKPEQPEDTKDADQLKSAND

SEQ ID NO: 242470 - protein, 138 aa, Zea mays
  unsure (1)..(138): unsure at all Xaa locations
  Clone ID: MRT4577_152718C.1.pep
KKSGRNPPPPPIPGKXQPPQPKKPGXEGPKSKKGPGTPPPLAPMAMRPPPTRGGGXTPAAACPGFQPRGSPRPRETGPPAPCTPGPPPSPNGARPTQTTPGGGAPPPXPKKTQPPPKYPPGVYGEKKRPIFPTPPHLD

SEQ ID NO: 242471 - protein, 109 aa, Zea mays
  Clone ID: MRT4577_152719C.1.pep
PVPWIPNFFVPRPLLSVWFWAHPLFLKGGPHYEFVFSKTLPVRGVSPLFFFGPGPNKNSLRPGGVFFLVLFRNLFFPRFFPLIDPCFWDLGHFFFFYPKIFFFWGKPSP

SEQ ID NO: 242472 - protein, 31 aa, Zea mays
  Clone ID: MRT4577_15271C.1.pep
LVAQGHNPAVLSATRWPTSSFRPLCNLGFGL

SEQ ID NO: 242473 - protein, 129 aa, Zea mays
  unsure (1)..(129): unsure at all Xaa locations
  Clone ID: MRT4577_152720C.1.pep
RVSRRXSSGITSEAQSHVTKCRYQCLLINKIGIVHDAQTIPVTSRHCYIMLSRDPFTHRNPPCLERRTPCRLFPIKHGSSEVAKEWQIVLITRGFVHISTRRVHEAKLDHTMQVVSPTLRHPELRVTHG

SEQ ID NO: 242474 - protein, 158 aa, Zea mays
  Clone ID: MRT4577_152721C.1.pep
LPHFYPDGDFQIACDHFTGDPSDLNNAPNGGFAYVRSSAETAEFYRFWYAARERHPGLHDQDVLNAIKRDPYVGELGVRIRFLSTELFGGLCEPSRNLSRVCTMHANCCVGLRRKIGDLNAMLQDWRRYRALPREEKREVSWTVPRNCSLFHTQEERG

SEQ ID NO: 242475 - protein, 120 aa, Zea mays
  unsure (1)..(120): unsure at all Xaa locations
  Clone ID: MRT4577_152722C.1.pep
LIYANMTKHRKQIRRHLVEKTFDNYMHEESXLITKDGLFFCHNIAILKRPGIKARFYIQLRKNCNHPDLLESQVDTTXFFFVLLLAGLYPPVEKILEQCGEFQLFDRLLNFLKKKKKKAA

SEQ ID NO: 242476 - protein, 82 aa, Zea mays
  Clone ID: MRT4577_152723C.1.pep
YHRMLVIIILSRSHGIKKISISALSNTHILFTYESLVVGVYRECALYSKWIHLDNVYDSDRLQTQIGIRYNERKIDASQSQS

SEQ ID NO: 242477 - protein, 126 aa, Zea mays
  unsure (1)..(126): unsure at all Xaa locations
  Clone ID: MRT4577_152724C.1.pep
MLEDVPSLFVAVXFSARLDMXTENFEDYSEHRLKFFSLLRAIVTHCFQALIQLSSQQLKLVIDSMNWAFRHTVRNISETGLSLXLEILKNFVAXEFIIHYYYILFLTFYLDIFAVFDQLIFINFVF

SEQ ID NO: 242478 - protein, 35 aa, Zea mays
  unsure (1)..(35): unsure at all Xaa locations
  Clone ID: MRT4577_152725C.1.pep
RXXPGRRHAVRARSCTHLPIAFLYRVSEINVTERG

SEQ ID NO: 242479 - protein, 59 aa, Zea mays
  Clone ID: MRT4577_152726C.1.pep
KFFRCGFFFRYSCSVFYSVSILQLHATFKFCKIIVVNYQAVWLLVLWHLIDRKCAHKYN

SEQ ID NO: 242480 - protein, 93 aa, Zea mays
  unsure (1)..(93): unsure at all Xaa locations
  Clone ID: MRT4577_152727C.1.pep
GHVNPNRGDACCTGPMXGVAVDVWHPHXGSKGAPRGFXMPNNAMXPHISGPSLNAHLRYKDGVKNMLQRYFQGQCFPVHNYIVKEGKLQGQPR

SEQ ID NO: 242481 - protein, 868 aa, Zea mays
  unsure (1)..(868): unsure at all Xaa locations
  Clone ID: MRT4577_152728C.1.pep
LAGERSEYGRYGYDSDYERGKRDSSWRRRDSCDSERERSGLSREREESPYTRHSRSRXGRDDRSRSRSRSRSPRPRSHGRNQRDGLYYDNRFDTRREYDWDDRGHGDSVAPSATVVVKGLSLKTNDDDLYKILAQWGPLRSVRVIRERNSGMSRGFAFIDFPTVEAARRTMEATGENGLEIDGRNVFFQYSKPTGGMGGPSLGQENFTRPTYGHRTAAAPCDWICTICGCMNFARRTSCFQCNEPRTEDALPADATGSASHFGRRGSELSLGVGPTHVLVVRGLDENADEEMLRYEFAKHAPIKDIRLVRDKFTHVSRGFAFVHFHSVEDATKALEATNGITLEKNGQVLRVAYAKSTHGPASGGSQSNSLAAAAIEAASFAQQYDAIGWAPKEYNPDDKQNNNSESQKDGSTAQSGFVWDEKSGYYYDSASGFYYDGTTGLYYDSNSGVWYSYDQQTQQYVPCNDQSNTKAAGEAASENTKTSDSNSGKKVVISAPAATIKQSEKTSLPDAVQAAANAALAAEKREKEKAKEIKLASKNSLIANKKKMSNVLAMWKQRNQEGQAARIVLDDKEPANSDDKFSHSRSGTGFSLKSKPNSDLENAMGNSLGQGMTSTQTLDSVVKPRPVSNSLGTTVMGVIRGSARGVIKSDTTFHALSDAGSTDSRTTITTRASGLMTSSEALITPAPFKTDVSALVSNTPSGVSGSGKRRFSEAPGQSQYRDRAAERRNLYGSSHGTDTVGLDSTGDYPSRKGSSEIGSMPFPPGVGERSSGEIGNSENYEVITADRAIDESNVGNRILRNMGWQEGLGLGKDASGIKEPVLAKSVDARAGLGSQQRKPDPSLEAQAGDSYKTIIQKKAMARFKEMS

SEQ ID NO: 242482 - protein, 150 aa, Zea mays
  Clone ID: MRT4577_152729C.1.pep
PNIQFRDDVFGFACKIFIDFLEITCCQAGDYPSRKGSSEIGSMPFPPGVGERSSGEIGNSENYEVITADRAIDESNVGNRILRNMGWQEGLGLGKDASGIKEPVQAKSVDARAGLGSQQRKPDPSLEAQAGDSYKTIIQKKAMARFKEMS

SEQ ID NO: 242483 - protein, 61 aa, Zea mays
  Clone ID: MRT4577_15272C.1.pep
GDLRPLTLFNLQRRKTPNEPWGGCASGSLFRLLLGAPPPPIQSAGVAVRHRRRLIYRRRGI

SEQ ID NO: 242484 - protein, 106 aa, Zea mays
  Clone ID: MRT4577_152731C.1.pep
ARRLGKNPKTLGFLGLSLEKKRFPKENFPWNQNGILGGEGKPKKRPPQLGGGAPAEKKKNPPSRAKKPKVFFNPGVGGGGKKKKNNSFLKGKNPPPKLMGRKVLFF

SEQ ID NO: 242485 - protein, 106 aa, Zea mays
  unsure (1)..(106): unsure at all Xaa locations
  Clone ID: MRT4577_152732C.1.pep
DGCVLVAAGAAVQRPRSQSGVIVRLPLQLHQPLQSSRRPGPGPWGRRPVDNDDPAAXSWKTSRLTVHRSVQLQRRKSIALPHEAGAVTSRRQRARIFSASLWTASF

SEQ ID NO: 242486 - protein, 48 aa, Zea mays
  Clone ID: MRT4577_152733C.1.pep
KLQEFRPKKIKIPGTTRGVPYSNGGKHSPEFSWVEIYNPSIGVFAWLV

SEQ ID NO: 242487 - protein, 64 aa, Zea mays
  Clone ID: MRT4577_152734C.1.pep
SKSLFNTSQSTSISVITIVPKLDLVGKIKPPRTAAPNPILRSQKGSKYVIVVIVLQRDISLSAS

SEQ ID NO: 242488 - protein, 71 aa, Zea mays
  Clone ID: MRT4577_152735C.1.pep
APGALRATTSGRARVRSTSIATALAIASSYLVGSTSCSYLPLRSLPPLLVLSEESVRGVKAEKCCCLLYTL

SEQ ID NO: 242489 - protein, 57 aa, Zea mays
  Clone ID: MRT4577_152736C.1.pep
IKKKKKKKKKKKKKKKKKKKKKKKKKKKKNLGREPPLRGKFWEIFHTNWGGRLELSF

SEQ ID NO: 242490 - protein, 131 aa, Zea mays
  unsure (1)..(131): unsure at all Xaa locations
  Clone ID: MRT4577_152737C.1.pep
MGAPVNGAVVLFLLLLAGTGAVAEETAPQEPTLPAAGSGSGSGSGAGAGAAVGVNSNSVLVALLDSHYTELAELVEKALLLQTLEDAVGKHNVTIFAPRNEALERDLDPEFKRFLLEPRNLRSLQXLLLYH

SEQ ID NO: 242491 - protein, 48 aa, Zea mays
  unsure (1)..(48): unsure at all Xaa locations
  Clone ID: MRT4577_152738C.1.pep
PSYNLDSIAIGGGSLTPLLVCXSSXSTLQHFYRGGLLGPIVSNXLPSS

SEQ ID NO: 242492 - protein, 76 aa, Zea mays
  Clone ID: MRT4577_152739C.1.pep
KITKGVINKFWKKKRGGRPRGSRLTCPCMQFHTPSRLSPNFISGAVFLQLRAGETLGFSQFNPFAANPLFPIGGNT

SEQ ID NO: 242493 - protein, 324 aa, Zea mays
  unsure (1)..(324): unsure at all Xaa locations
  Clone ID: MRT4577_15273C.1.pep
QQTSPLTVYASIPQMLVRVVKLLKNPHFMAKPAAIDLIRSIIQAEGASTEQALSSALTSIMDALKSTDWNTRKAASLALSSIAVSSGYLVTSFRTSCLRSLERSKFDKVKPVRDTIIHAIQLWXAIPGSHTPEPSEAGSSTKENYFGDHHDARSIHDGGSRDTSFRRTDHGPSVSVISGSSLSSAKRRSPLSINKVAINNAANLQRMKTGDWRVEVSVPKQSMIPLVNNDEKGSSKACSLKDTKRNAYESVDVDSKFDYDIVDDKQECSSVSEVASRSFETKHVTTAQECTEDCDSAEVTEQCPRGRESKSIGSTLQMLLLMTH

SEQ ID NO: 242494 - protein, 89 aa, Zea mays
  Clone ID: MRT4577_152740C.1.pep
MGAPVHGALALFLLLLVGAGAAPEASSPQEPTLPATGSGATPSPARAGSAEASCWKRRAKWLGSSVSGRDSQAAASRRRRGCDTERRTN

SEQ ID NO: 242495 - protein, 189 aa, Zea mays
  unsure (1)..(189): unsure at all Xaa locations
  Clone ID: MRT4577_152741C.1.pep
MPMPMPMPMPMPRARTRWSALAASALIQCCAGSSYCFGVYSQTLKASQRYDQSALDAVAFFKDVGANAGVLSGFLVAWAPGGRRRPWIVLLAGSLLCAAGYLPMWLAVAGVAPAPLPLVCLYMLLAAQAQTFFXTADVVSAVENFPDRRGTVIRIMKGFLGLSGAILVEIYRTLGIDPSSFIRMLAVLP

SEQ ID NO: 242496 - protein, 461 aa, Zea mays
  Clone ID: MRT4577_152742C.1.pep
MGAPVHGALALFLLLLVGAGAAPQEPTLPATGAAAVGVNSNSVLVALLDSHYTELAELVEKALLLQTLEDAVGKHNVTIFAPRNEALERDLDPEFKRFLLEPRNLRSLQALLLYHVLPSRLPSDSWPAASHPTLSGEEVELAPAAGDGAGMRVGHAAVTRPDAVLRPDGVIHGIERLLVPRSVQEDFNRRRSLAAISAVLPTGAPEVDPRTHRLKKPAPPVAPGAPPVLPVWDAMAPGPSIAPAPAPGPGSGKHHFDGHSQAGDFIQTLLLYGGYNELADILVNLTSLATEMGRLVSEGYVLTVLAPNDEAMARLTTDQLSEPGSPENILYYHMIPEYQTEESMYNAVRRFGKVRYDTLRLPHKVVAREADGSVKFGQGEGSAYLFDPDIYTDGRISVQGIDAVLFAPDDTKATQTADPNRKPPAIVTHKKKIKLRRGKLLEATCQMAGLFGQRSRFASCQ

SEQ ID NO: 242497 - protein, 471 aa, Zea mays
  Clone ID: MRT4577_152743C.1.pep
MGAPVNGAVVLFLLLLAGTGAVAEETAPQEPTLPAAGSGSGSGAGAAVGVNSNSVLVALLDSHYTELAELVEKALLLQTLEDAVGKHNVTIFAPRNDALERDLDPEFKRFLLEPRNLRSLQALLLYHVLPSRLPSGSWPAAPHPTLSGEDVELASAGAGGMRVGHAAVTRPDAVLRPDGVIHGIERLLVPRSVQEDFNRRRSLAAISAVLPTGAPEVDPRTHRLKKPAPPVPPGAPPVLPVWDAMAPGPSIAPAPAPGPGSGKHHFDGHSQVKDFIQTLLLYGGYNELADILVNLTSLATEMGRLVSEGYVLTVLAPNDEAMARLTTDQLSEPGSPENILYYHMIPEYQTEESMYNAVRRFGKVRYDTLRLPHKVVAREADGSVKFGQGEGSAYLFDPDIYTDGRISVQGIDAVLFAPDDAKATQTADPNRKPPAIVTHKKKIKLRRGKLLEATCQVAGLFGQRSRFASCQ

SEQ ID NO: 242498 - protein, 82 aa, Zea mays
  Clone ID: MRT4577_152744C.1.pep
VPTCKHVFAVTATGTAATSPRAKNKTRRSALLRDPIATTSELVEPLRSFLRNYTPDCGFKKKRKDGLTAHFVLVDLSDHPSH

SEQ ID NO: 242499 - protein, 470 aa, Zea mays
  unsure (1)..(470): unsure at all Xaa locations
  Clone ID: MRT4577_152745C.1.pep
MGAPVHGALALFLLLLVGAGAAPEETAPQEPTLPATGSGATGAAAVGVNSNSVLVALLASHYTELAELVEKALLLQTLEDAVGKHNVTIFAPRNEALERDLDPEFKRFLLEPRNLRSLQALLLYHXILPSRLPSDSWPAASHPTLSGEEVELAPAAGAGMRVGHAAVTRPDAVLRPDGVIHGIERLLVPRSVQEDFNRRRSLAAISAVLPTGAPEVDPRTHRLKKPAPPVAPGAPPVLPVWDAMAPGPSIAPAPAPGPGSGKHHFDGHSQVKDFIQTLLLYGGYNELADILVNLTSLATEMGRLVSEGYVLTVLAPNDEAMARLTTDQLSEPGSPENILYYHMIPEYQTEESMYNAVRRFGKVRYDTLRLPHKVVAREADGSVKFGQGEGSAYLFDPDIYTDGRISVQGIDAVLFAPDDTKATQTADPNRKPPAIVTHKKKIKLRRGKLLEATCQMAGLFGQRSRFASCQ

SEQ ID NO: 242500 - protein, 37 aa, Zea mays
  Clone ID: MRT4577_152746C.1.pep
FFPKKKKKKKKKKKKKKKKKKKKKKKKKKKKKKKKKK

SEQ ID NO: 242501 - protein, 53 aa, Zea mays
  Clone ID: MRT4577_152747C.1.pep
PGPVVISVMGPLPSSLWLVPSFSGDGYRGVPPPHGGRGAPCPEWTFEMGGNNI

SEQ ID NO: 242502 - protein, 106 aa, Zea mays
  unsure (1)..(106): unsure at all Xaa locations
  Clone ID: MRT4577_152748C.1.pep
GNASPTXKDLTTTIDTVHFVVINVRMELMQSHMTGKAILXIIDADRNNFISLPCGDGGVDVSAASPHAAGAAHPAQSKKEEKVQEKQXTHHDIGFSLFVKGAQSSQ

SEQ ID NO: 242503 - protein, 92 aa, Zea mays
  Clone ID: MRT4577_152749C.1.pep
MPDYCGKYKDELIKNAGYIGTPDKGILADDESTATIGKRLSSINAENVEENRRALRELLFCCPGALTNISGVNLFEETLHQNTQDAQPFVDA

SEQ ID NO: 242504 - protein, 69 aa, Zea mays
  Clone ID: MRT4577_15274C.1.pep
DPRVRTKPLNKPTNFFYCIVQLHYGRVFIMHTDILITIYIFIHAHHHTNHANLLHTTRPLTYPRVHALL

SEQ ID NO: 242505 - protein, 76 aa, Zea mays
  Clone ID: MRT4577_152750C.1.pep
AGGNTQFHRFLPPRSKKNILFLVGAKHFCLPAPPFLYLKSLTLLFKLLRFPSLAGILATPSFFKRVMRNRWKAHPS

SEQ ID NO: 242506 - protein, 65 aa, Zea mays
  Clone ID: MRT4577_152751C.1.pep
FGIVVFPCALPKFGTVLAKMLELAHRSFNCLEQKCYLRGVSNSPQVVHLTVFEPGFASAVLHQFE

SEQ ID NO: 242507 - protein, 83 aa, Zea mays
  unsure (1)..(83): unsure at all Xaa locations
  Clone ID: MRT4577_152752C.1.pep
SRRLTRAPSVGPLTLASTLSPTTMGKEKSHIIIXVLAHDDYRKSITTGHLIYKLRGIDKHLINTFEKEAAEKNILFFKNAIVL

SEQ ID NO: 242508 - protein, 98 aa, Zea mays
  Clone ID: MRT4577_152753C.1.pep
VMQSKQLGRLPVVQFAAGGVATPADAALMMQLGCDGVFVGSGIFKSGDPARRARAIVQAVTHYSDLEMLVEVSCGLGEPMVGINLNDEKVERFANRSE

SEQ ID NO: 242509 - protein, 116 aa, Zea mays
  Clone ID: MRT4577_152754C.1.pep
HRRSCPAPCRCLVCPQRPPAVCSRLWVSARSASCRRSRSCRATPAASSWSPFGLTALSFLRILLPLPVVVIAFERAGLFFLFPLPRCLDLLCYARHAALFSCLSRHIVSPSSPWPL

SEQ ID NO: 242510 - protein, 71 aa, Zea mays
  Clone ID: MRT4577_152755C.1.pep
HIFCWVLNNIPHYPTNKKTKNSHYSSTHLLAKCSPPLLAGHQNANLSPPVVSDKHNNIYSHYLNPNLPLLP

SEQ ID NO: 242511 - protein, 77 aa, Zea mays
  Clone ID: MRT4577_152756C.1.pep
AASVLFLVTLSARGGEEVEGRSPRGATTHRMPALLTVVMCCGCGARTPRPASRGTDQGPSCASRPTQCCNSQRSLCI

SEQ ID NO: 242512 - protein, 99 aa, Zea mays
  Clone ID: MRT4577_152757C.1.pep
LVVHYKHGQDQAAVLSVVLGLRDVLFLVLHHKCYPIMFLEMVCGMINNLQSQKQLCDANATFCAQLPITIKRGIPHCFNKHSIAYDELNSKATEFHFVS

SEQ ID NO: 242513 - protein, 232 aa, Zea mays
  Clone ID: MRT4577_152758C.1.pep
MIGHKPAISFKNPQSAQFSMKMGSPKRDSCHAVAAPSSGSEVQTSSEFKTDFSQDNQVNISDRVYQNRKAKEVNDSSIAVRIQGLKNMDRQKLPDISSERSSSLLVDPTAGNDLFDIFGAEFPHLCRNVDGDSTWNTAKPASSGKDALESSVYLDTSPVFGALDDEFPFSGIFSLTDSDQLLDAVISSVNPGGKQISGDSASCRTSLTDMPSSSYCGSKVMKQHESSGAPPL

SEQ ID NO: 242514 - protein, 129 aa, Zea mays
  Clone ID: MRT4577_152759C.1.pep
IAPTKLWQPYELKPKATENPSFFEIFQQLRVSCPNSVCKNNRSHYALLGFASMPNGNFTKTGYLSSHAANSTRAYAQKSAALIWTVPCEHIVASRNSIFFLHIITGMQQQSVPQRGSEFHNQAGNKATQ

SEQ ID NO: 242515 - protein, 139 aa, Zea mays
  Clone ID: MRT4577_15275C.1.pep
RASAIPAEPNRTHRHRDRNPSHRHPEARRERGDDRARQSQRLRSRVLVHWRPRSPCRKEIRQAKVKMPDHPVEESAPGSITDKIAKESSDSTASSHGMHDTGNMQHAEAFKSKGPVIAQNLPEPASKEELKKRAEELNK

SEQ ID NO: 242516 - protein, 153 aa, Zea mays
  unsure (1)..(153): unsure at all Xaa locations
  Clone ID: MRT4577_152760C.1.pep
NETAKKFSPAXXGGDRGXXTNTNRRGHANXDTXXXXRXXTPXRXAXADTTXRKQPXXXKXTXXXRGGSXGGAXGXXTTXXAXSPTAXXXAXAXXXTXTTEXXDXKHXXTSRGXNTXGXXPXNNXXXRRPAPXXXXXTGEHRXXXAAXEXRGEE

SEQ ID NO: 242517 - protein, 53 aa, Zea mays
  Clone ID: MRT4577_152761C.1.pep
RVVWFAIARCKRVRAPCSAGVEWRQHLACTRYSLIGSLAQLSSVPLLHLRIWK

SEQ ID NO: 242518 - protein, 84 aa, Zea mays
  Clone ID: MRT4577_152762C.1.pep
LAESGLRPSARAGIWHSLIYLGVFLAFLPGKHQNLLFVPHTNFHYNNKEVHFVLFSNVINNIWRKCYPQLAIYVSLIYGPETVC

SEQ ID NO: 242519 - protein, 69 aa, Zea mays
  Clone ID: MRT4577_152763C.1.pep
WGGFYIKFLGCKNTKPYTPFWILLLSLSFSLNYHTKTFSFIQPNLYLQNTIILFLSTPAFILKQTPGQF

SEQ ID NO: 242520 - protein, 119 aa, Zea mays
  unsure (1)..(119): unsure at all Xaa locations
  Clone ID: MRT4577_152764C.1.pep
CWAGAMATRRRRQLLRPIPPTLRTYTELTDDDTERDXDFRAREPHRCPSLDGAISATWGTRLALPCSTSMPGSKDLPVVACWRTTNRGSSSMSPSTRLRTDTDDTEVAHISADRNRDDH

SEQ ID NO: 242521 - protein, 38 aa, Zea mays
  Clone ID: MRT4577_152765C.1.pep
AVYTNRRLHRTDSPTISYHGRGRRITTHRIRRCIRSPP

SEQ ID NO: 242522 - protein, 72 aa, Zea mays
  Clone ID: MRT4577_152766C.1.pep
GPHWRRWLRSCMAPPIAPWTSRNPLAGAKWLAPITRRSRMPAGWNLRKDSIPFSWQGKIKGRFREFRNYLFR

SEQ ID NO: 242523 - protein, 116 aa, Zea mays
  Clone ID: MRT4577_152767C.1.pep
MAPKKVTTRASTALDDATEAAIAEKKGKATLTSDTLQTTTKNEAGALNRKHPRTKDPLTPEGSIHTCSSEDPPWDDVPPGFSPTEAEDTMEEGKVMGISAEDQLKLRALRIKNNHL

SEQ ID NO: 242524 - protein, 92 aa, Zea mays
  Clone ID: MRT4577_152768C.1.pep
RGDPAGTAAAAQAPQTGGGGRRLPRAGQQSSNCGGSSFRMPLHYPRYKKADYEAMPEWRVDCLLREYGLPVAGDLRDKREFAMGAFLWPGQY

SEQ ID NO: 242525 - protein, 99 aa, Zea mays
  Clone ID: MRT4577_152769C.1.pep
MGSLGPSVVTLQEQQQQPKPRKPAAAGGGCHELEQQSSNCGGSSFRMPLHYPRYKKADYEAMPEWRVDCLLREYGLPVAGDLRGKREFAMGAFLWPGQY

SEQ ID NO: 242526 - protein, 95 aa, Zea mays
  Clone ID: MRT4577_15276C.1.pep
MPKQVTDIKKFLEIARRKDATLARIKKTAIKHHSTTASTKSKSAKQPTATKFKIRCSRFLYTLVLFDAEKAEKLKQSLPLGLKVEEVGKAAPKKK

SEQ ID NO: 242527 - protein, 105 aa, Zea mays
  Clone ID: MRT4577_152770C.1.pep
MAEEKSALQSAREWVVEHKLRAVGTLWLSGIVGSIAYNWSRPGMKTSVKLIHARLHAQALTLAALAGSGLVEYYDHQQGSGSKVHQYAKQFLSSDADSSSSPQKE

SEQ ID NO: 242528 - protein, 56 aa, Zea mays
  Clone ID: MRT4577_152771C.1.pep
QAPYFLLVYYFVLIVLLVRQSPLLQGIIHATTPSSVKKKIYKLKKNKKKKKKKKKK

SEQ ID NO: 242529 - protein, 114 aa, Zea mays
  unsure (1)..(114): unsure at all Xaa locations
  Clone ID: MRT4577_152772C.1.pep
SWVXLCSPXCCGXPVLRXAFPXWXXXRPXVLXLXXXXXPWXGLSPFXXRPXPRXPCRXXXXCAXACAPWCSXPARXXXSAXPFPPPXWXXXXXPPSAXPXAARLAAXGGSGKVG

SEQ ID NO: 242530 - protein, 136 aa, Zea mays
  Clone ID: MRT4577_152773C.1.pep
MVEILFEDIFTVTQLDPDGKKFDKVSRIEAVSQQFDMQMQLDVNTEIYPLSVGKKFTMVLAPTLNLDGTPDTGYFIQGGRKSLADKFEYVMHGKLFKISEESASGPNVKVEMYASLGGLLMMLRGDPSNAANFELD

SEQ ID NO: 242531 - protein, 79 aa, Zea mays
  Clone ID: MRT4577_152774C.1.pep
VILINLLEQLVAETEVIIPVDDDESHEQGSRAARWSHWQAVDLCAEPVLDVHTVAASLHDSALIALTVVRHRCAMEFEG

SEQ ID NO: 242532 - protein, 127 aa, Zea mays
  unsure (1)..(127): unsure at all Xaa locations
  Clone ID: MRT4577_152775C.1.pep
ISYIYSTAQKNPTDTLRVSIVALALLAIAASATCTHTSGGXGXQPPPSVHLPPSVHLPPPDHLPPPVHLPPTVHLTTAVHLXRTVHVPXXVHLAPPPCHXPTXPPLPXLIPXPHPCPCQQPHSIPRQ

SEQ ID NO: 242533 - protein, 81 aa, Zea mays
  Clone ID: MRT4577_152776C.1.pep
AHLSLCLALFIARYCGPYSDEHINNAGYMVFVGRDLKCNGTTNDVMNMGITMIEGQDVDANLAAVGETPTYVPSCCGQHPA

SEQ ID NO: 242534 - protein, 81 aa, Zea mays
  Clone ID: MRT4577_152777C.1.pep
NKCTTSMMHYKTTVSEPIVEDVTIASASGDMMQVVSSETPHRINFISITRCGWHVAPVETAAASSDGGEDVSLCTEPDASA

SEQ ID NO: 242535 - protein, 288 aa, Zea mays
  Clone ID: MRT4577_152778C.1.pep
MESEIMASYETKQNCEIRVFESSDEMATDLAEFISQASEISVKERGCFAIALSGGPLVRHMRKLCEAPYNKTLDWSKWYIFWAEERAVAKNHAESNYRLTKEEFLSKVPILNGHVYSINDNATVEEAASDYEFVMRQLVKVRTVGVSESNDCPRFDLVLLNIGPDGHVASLFPNHPALELKGDWVTYITDSPEPPPERITFTLPVINSASSVAIVATGEDRARAVSFSVSACQDQEEEGPADDDAGTTMIPPASMVQPTDGKLVWFLDEAAASSLEASNGACEHQEGY

SEQ ID NO: 242536 - protein, 100 aa, Zea mays
  Clone ID: MRT4577_152779C.1.pep
GDWDPRGRPGPPHIQAPPPPPPADVEHQKANEVVAPEAAVAEPDHKEEEAVEKTVVEEEKPAAAANAEEKVATAAETTTTVEAKKKDVEEARKEKQAQQS

SEQ ID NO: 242537 - protein, 105 aa, Zea mays
  Clone ID: MRT4577_15277C.1.pep
SENFSGVPILFGACPFPPLVCFFFFSSLEGPLLPPPLGGVWCCTTFFAPLGGGVFFRGAPLFGPPPVFFSSFLASPFFFALLIQFFSHDLFFYVTVIVAYIFVNT

SEQ ID NO: 242538 - protein, 288 aa, Zea mays; identical to SEQ ID NO: 242535
  Clone ID: MRT4577_152780C.1.pep

SEQ ID NO: 242539 - protein, 147 aa, Zea mays
  Clone ID: MRT4577_152781C.1.pep
MASIPATTFAVILSVLFCAAAGTAVDNDLPDYVIQGRVYCDTCRAGFVTNVTEYIAGAKVRLECKHFGTGKLDRSIDGGGRKKKKKKKKKKKKKKKKNPNSLGRLGPSSPAGTSTHSSTSSSPAGQQLSRRNRHISHGRLRNQAQDA

SEQ ID NO: 242540 - protein, 82 aa, Zea mays
  Clone ID: MRT4577_152782C.1.pep
LNTKTVYHLIKPFPPPWHSRPPFTRHLPKTKKSNFSHPRSHTDRSIQPKINNQQLSSAPYPDIPVYKFYFFFHLFPPFPPIP

SEQ ID NO: 242541 - protein, 100 aa, Zea mays
  Clone ID: MRT4577_152783C.1.pep
LRRWWWRSRLRRPTLSIRRLMRWSLQRRPSPSPITRRRKPWRRPSSRRRSQRQPPMQRKRSPPPPRPRRRWRRRRTPRRPGRRSWRSKADRLSVHACQLI

SEQ ID NO: 242542 - protein, 290 aa, Zea mays
  Clone ID: MRT4577_152784C.1.pep
MDGLHGTDACFSPARAVSPQVRLPGPPDVGSQYLAELLQEHQKLGPFMQVLPICSRLLNQEIMRVLNIRRQHGAAVDFEKFAAASPNQIHPSPPMPNFCGNGFSPWNGMHSERVGVPQGAMGWQGPPQSPASYIVKKILRLEVPTETYPNFNFIGRLLGPRGNSLKRIEACTGCRVFIRGKGSIKDSGKEEQLKGRPGYEHLSEPLHILIEAELPANVIDARLAKAQEILEELLKPVDESQDYYKRQQLRELAMLNSPLREESPRSGGAPPSPFSKTVSGRPNKTGDTEL

SEQ ID NO: 242543 - protein, 81 aa, Zea mays
  Clone ID: MRT4577_152785C.1.pep
SLVRPLQERLPNVMRLQLSTERAFQELVCFSRQGAAGGTKRGVKGLLPFPVARGAAGFYRPNYERGFSNAIFLGGAPSPKV

SEQ ID NO: 242544 - protein, 232 aa, Zea mays
  unsure (1)..(232): unsure at all Xaa locations
  Clone ID: MRT4577_152786C.1.pep
PICXRLLNQEIVRVSNIRRHMXAGDFERFPAASPNQIHPAPPMTNFCGNGFSPWNGMHSERVGVPQGAMGWQGPPQSPSSYIVKKILRLEVPTEAYPNFNFIGRLLGPRGNSLKRIEASTGCRVFIRGKGSIKDSGKEEQLKGRPGYEHLSEPLHILIEAELPANVIDARLAKAQEILEELLKPVDESQDYYKRQQLRELAMLNSPLREESPHPGGAPPSPFSNGGMKRVKQ

SEQ ID NO: 242545 - protein, 98 aa, Zea mays
  Clone ID: MRT4577_152787C.1.pep
WENPSKGLTALGTSFGGPLGFVLGRQHNLLPLLAQKNFLLGLQVPLGAIDIVGRVKKLFGQFRFLPQGCYCAVLVGPLHKYHKKIHSKTKNRKKEIIK

SEQ ID NO: 242546 - protein, 71 aa, Zea mays
  Clone ID: MRT4577_152788C.1.pep
KRRGVGGGFFFYIFFCFFFFFFLYPNKIIGAYKPAYSSMGPLPTNTEKKNMNRYLGSSGAKHIHKNTYSAT

SEQ ID NO: 242547 - protein, 62 aa, Zea mays
  Clone ID: MRT4577_152789C.1.pep
AESPRVSASGRVVFRGLERYSSTLASADVEPHPMGMERSYSTNLHVDPVINVFGFGHLFMPS

SEQ ID NO: 242548 - protein, 218 aa, Zea mays
  Clone ID: MRT4577_15278C.1.pep
MLKNIIFNNDKNKTFKPKKSFSKGTKRYELHKHAKATLGSGNLRQAVVLPEREDINEWLAVNTVDFFNQINLLYGSITEFCTPKTCEVMSAGPKYEYLWADGETIKKPIKVSAPEYVDYLMTWVQSILDDESVFPSRVDVPFPKNFRDIIKQIFKRLFRVYAHIYYSHFHKIVSLGEEAHLNTCFKHFYYFICEFNLVDKKEMSPLQELIDNLTRNDK

SEQ ID NO: 242549 - protein, 642 aa, Zea mays
  Clone ID: MRT4577_152790C.1.pep
MSCAAPSTSAARFTDPTLVYHHCGRANPSGPVDPTPSTSMICFADPALVYHCRKWATPSPLDAPPARTELPVYHPIDIRCDPGHVHLMVTRHAVDVLRPVIRLILAADTTATPPGASPVPSYVLAALADPHWRCAMEYAALLTNHTRDLVPRPPGTNMVTDMCLFRHKLTSDSSLDRYKARWVLRGFTQRLGVDHDETFSPVVKFATPCSTLVDTHAKLSEDDGPPITDTTSYRSLTGALQYLTFSRPDIAYAVQKVCLHMHTPREPHITALKRILHYLRGSLDYGLLLRPSPTSKLVVYTDADWSGCPDTCRSTSCYTVFLGANLVCWAAKRQPVISRSSAEAEYHVVANDVIEASWLRQLLQELHSPLQRAALAYYDNINAVYLSTNPVYHQHTKHVEIDLHYVREHVAVGDVRVRNQDSFYILGGISLEGREIAWTWLKPRPCGLRTSRAFNVGRTPPDTGAGKHASRPNLMLAGPMSKAYDRRPRPRVGTRLLPGQGADKKLRRIDLMVWVERVRLPNWKAWLLNLAGRTAMDRWLNGSGVNDIAPVVVCKENWDHVLKTWKSSSLISDFIESIVPRFTSEEKAVEVTEFFAGQVKPSFERALKQSLERVRISARWIESIRSEPKLGQTVQELLQADA

SEQ ID NO: 242550 - protein, 237 aa, Zea mays
  unsure (1)..(237): unsure at all Xaa locations
  Clone ID: MRT4577_152791C.1.pep
RPGHCGLNRPVTDAMEDDDMDESPDRGMSKRACDSCRTRKIRCDRAVPCSNCKASKLACKTTAPQQKAQRQRVHISEQYERKIDRIEDRLAGIENVLANLSSKLGNMDLAKDSPETGSQSRSSRVGRSPGSGLQEAPTPAPFEGESSISIQSVYAREMLAQVIDSTPSIGQNEEVKMALTALSEMVSQPSQTMAPSNRLINRSLAEVDPTRLEQPPXGGGLQCVGHSYEVFNNDICP

SEQ ID NO: 242551 - protein, 61 aa, Zea mays
  Clone ID: MRT4577_152792C.1.pep
VLSPLQCCELPLSLQYLVTQSVSCFGLLSGSFRATIASVLLVFVGRAYRYFSSCGSQGCVL

SEQ ID NO: 242552 - protein, 100 aa, Zea mays
  Clone ID: MRT4577_152793C.1.pep
KLTRSEGPFERGKGLKETRSLSKVGDKDYDSEEVDQIQHFNSQATTILLASLSREEYNKVQGLKSAKEIWDMLKTAHEGDEVTKIIKRETIEGELGRFVL

SEQ ID NO: 242553 - protein, 108 aa, Zea mays
  unsure (1)..(108): unsure at all Xaa locations
  Clone ID: MRT4577_152794C.1.pep
PPPSSAPSKPFAGDGISQSLHMTIQTAVLIETLTALGAQDHWCSCNIFYTQDHADAAIGRDXTAVFGWXKGETLYEYWGSTEXRCLNWGEAGGPHLLVVDGGDSTLLI

SEQ ID NO: 242554 - protein, 278 aa, Zea mays
  unsure (1)..(278): unsure at all Xaa locations
  Clone ID: MRT4577_152795C.1.pep
VNGRNTXFGTDNWIDGQSLCQLAPHLVQMVSSRARMRNVHDALISRSWVHDIRGAITVNVLSDFLKVWDLTTDWVLTPDQEDKHSWRLSSSGLYSAKSAYTGFFLGATTFKPWERIWKSWAPSKCKFFMWLVAHDRCWTADRLAKRGLPHPQFCILCDQEEETINHLLVSCVFSRAVWFQMMKSVGLQHLAPNPACSSFEDWWEGVAAFSAGLVNTGLHKGLNSLIIIGAWAIWNHRNSCVFNGVQPSQSMVINWVKEEAHLWYRAGARDLSNILMLQ

SEQ ID NO: 242555 - protein, 101 aa, Zea mays
  Clone ID: MRT4577_152796C.1.pep
PNLLFYPQFPPEFINRPISLAKVFFLSPNKGVYPPGIFSNLAFFDLAPKERLSPHLGQGQKKFFGAPPDKRVYIPGFFPPQWFKIGPPPQILTSPRFFKTP

SEQ ID NO: 242556 - protein, 66 aa, Zea mays
  Clone ID: MRT4577_152797C.1.pep
LTKELEESSPPCASWFPPLSSSASRSLVSSADAFLFALFVSEEGVVESNLFPMNRSVPPVLLCPSG

SEQ ID NO: 242557 - protein, 358 aa, Zea mays
  Clone ID: MRT4577_152798C.1.pep
MAMAAAQLEAEEELRLELEAVAAVYGDDVRVLRDLPPHLFVHVRPRTADDTSQQFVELFLGIKASSQYPKEPPHIYAVESKGLDENRQIYLITSIQNKANELSNCPMLVTLCEEAGEILSNMNHPAGDCPLCLYPLMGEDKVGSELPFMKLMSCYHCFHSDCIMRWWEWLQHGDTNPKEPNTGDKHYNVNQPRGFCPVCRKVFDEKDIEHVRDLLGDNTSRLASLTVDLGEDEKELLHSEAEQNRRKRIESLVNLQQELNGLIEPKKDLAIQPGMYVSVPPSTPDTAEEENADPSQGTATSTSETEQRGQASNASSNKPKNPGHRRRNRANASRRQPHGQGQPARQQWQRKEAGTSHQ

SEQ ID NO: 242558 - protein, 88 aa, Zea mays
  Clone ID: MRT4577_152799C.1.pep
HRLCDVEAAEDGERPTLGLQRRVATSGPRWRRVARSTRASSLGLSGGAPDCPVSQRSAAQSAGDPWPTPTVGRGHRTVRCAPDSVRCS

SEQ ID NO: 242559 - protein, 94 aa, Zea mays
  Clone ID: MRT4577_15279C.1.pep
HASDPSFEGAWGPPCHLLGRTNTAPLRRRTPPAALCFLTPKATIDKWQTHVGGMDTALLPACYSANHIALALLTTPGCTRRAIHSFKYADFRHS

SEQ ID NO: 242560 - protein, 92 aa, Zea mays
  unsure (1)..(92): unsure at all Xaa locations
  Clone ID: MRT4577_1527C.1.pep
NRPRDDDRASGVVLTTRCSRWTTQGRMDLTSGCSPSEYLPSKHSLSVKLKVLXRMIGCWCDXAFIPATGINGREGYCFRRRGSGGVXWPGFA

SEQ ID NO: 242561 - protein, 153 aa, Zea mays
  unsure (1)..(153): unsure at all Xaa locations
  Clone ID: MRT4577_152800C.1.pep
AERPGXXSLLTRKGKRAQFANRLFPGVGRFFYAGGRTGFSLGKGGVGATQFLWVWSPLGAPGVFPFCFRVVFFLGLWGGYIFSQGTVFALFSPSLGPGWGPLVTAASLLGFALRGGGAGVCPPTPPLGWPIFFGGVLLSFGFFLKKKKKXKKK

SEQ ID NO: 242562 - protein, 42 aa, Zea mays
  Clone ID: MRT4577_152801C.1.pep
QKGSVHVYHTPTTTLPTHVQDNELDLVETLFTSGWMDHHSLM

SEQ ID NO: 242563 - protein, 216 aa, Zea mays
  Clone ID: MRT4577_152802C.1.pep
LRGFPVPGSGAAVVLVLPGPDQTRPAPKAETPPCNRSRALEVDRWWHLWATANGTADSGRSSWPPPETSTRRPQLRRRRPVPLVTVAVSLALISLACLPVFADASRALHRDREEHRRQHHRTEDKKSRVSLPPDADGDSPPEPPDSGGAPPPADDSDCGNVFDVRAFGASGDGSCVDDDTAAFRAAWKAACSSDSAAATLLVPSDGVFTIASTIFS

SEQ ID NO: 242564 - protein, 46 aa, Zea mays
  Clone ID: MRT4577_152803C.1.pep
MLNGTPTLESVQLKVGSTVCNSTAPRAVSDAPQKALEYPQDRIPSR

SEQ ID NO: 242565 - protein, 242 aa, Zea mays
  unsure (1)..(242): unsure at all Xaa locations
  Clone ID: MRT4577_152804C.1.pep
IYRRCCLPRLLPVRHHSRLLPAHRHPAASYRRAAGPSFFPGAPPPRCPRHLPPWGNPRWRRPAAADVASFSLGPQPPNSRCITPIRSYPRTATGVVISRSLPPNRCHLHLRFSQRRSSPSSSSMGVALPRPIINVHAPTPSRRSSLERAPRLTLGTESGLPARPRHVMLAPHSTCSATPRSPTAILRNPSRRHHRLLSSSKCAAVRQCPXIGKLRPCRHRPPTPCPPLCQAALSGDYQKVKT

SEQ ID NO: 242566 - protein, 123 aa, Zea mays
  unsure (1)..(123): unsure at all Xaa locations
  Clone ID: MRT4577_152805C.1.pep
HGPDRPKDLGPLSXQTPSYLTGEYPGHYGCDTDGLSDDPETFARNREXIEVIHSHWAMLFALDCAFPDILAKNVVKITEXVXLKDDAQIFSEDVMDYLGNPNLVHXQSILVMWACQEWLMCLL

SEQ ID NO: 242567 - protein, 88 aa, Zea mays
  Clone ID: MRT4577_152806C.1.pep
LTQTANFKNHYLFCSTKSRINYSLSYTEVLKNTPILYLTKKTLGGRQNLSLITKVLTLYILAISKTLALIRSMPMFLKINDVLLFLAI

SEQ ID NO: 242568 - protein, 74 aa, Zea mays
  Clone ID: MRT4577_152807C.1.pep
RGSLLGGGFKNLTPPPFFCQGQKHFWNFVAWPGNHPPKGSFCFPVSKKKKKKKKKKKKKPKTKKKKKKKKKKGR

SEQ ID NO: 242569 - protein, 118 aa, Zea mays
  Clone ID: MRT4577_152808C.1.pep
LQMRALSAMKKLGALYRNCWRQFFVFFQKKLDLKELWGTLGDVLTKQGLYLTTSVTLLQSRYVCRYVWIGQSILLKTPPITGLVQHHAKTRVKGHRDYDLACYWTGVALMLYALRIQC

SEQ ID NO: 242570 - protein, 106 aa, Zea mays
  unsure (1)..(106): unsure at all Xaa locations
  Clone ID: MRT4577_152809C.1.pep
SYFPHHHLPFTHLSXXLPPPFLPFPPXTPLHSPXYXHHQHLLPFXHLTFLTPXPFLTHPQFFPFYQPLXPNPXPLLQLQQFLPFNHLXXPNPPPPPPQPIFXXPLI

SEQ ID NO: 242571 - protein, 45 aa, Zea mays
  Clone ID: MRT4577_15280C.1.pep
SRWLHIGYFLPKLFLLNPTLEHITHLLSTLKFSPPILSTPNSFSH

SEQ ID NO: 242572 - protein, 70 aa, Zea mays
  Clone ID: MRT4577_152810C.1.pep
SMPPCRRSALTSSSGVRTLISPAGSRAPFARVPRSGRISATATTMSVLLDHSSLHCPRHARTHSSNQTKK

SEQ ID NO: 242573 - protein, 89 aa, Zea mays
  unsure (1)..(89): unsure at all Xaa locations
  Clone ID: MRT4577_152811C.1.pep
STRPTPSSPLPSYPSCTLSIHPLLPCSGSCSCSAIGLSTVYSPSGPLLVPAPLGRCRSAQPRCPLRAPLATVRSSVDATKQAHDVXATA

SEQ ID NO: 242574 - protein, 278 aa, Zea mays
  Clone ID: MRT4577_152812C.1.pep
SLPTSPPTSATRSYLEMSKQWKASPLPTEPVELFIGILSSANHFAERMAVRKSWMISTRRSSDVVARFFVALNGRNEVNEELKKEADYFGDIVIVPFMDNYDLVILKTIAIVEYGVMVVPAKHIMKCDDDTFVRIESVLDQVNKVPRGKSIYMGNINYYHRPLRSGKWSVTYEEWPDEVYPPYANGPGYVISSDIAQYILSEFDNKTLRLFKMEDVSMGTWVEKFHTTRQPVEYLHDVRFYQPGCFDGYFTAHYQSPQHMICLWRKLQAGSAQCCNVR

SEQ ID NO: 242575 - protein, 180 aa, Zea mays
  unsure (1)..(180): unsure at all Xaa locations
  Clone ID: MRT4577_152813C.1.pep
QCTTYCAWGPKAATGSKPTKAAIVAAAKKANLWAREVXPTRMQKEYQDHVSLNXCSSCGEQRSATACDHTTKKHGTCTRLAXRLLVHARRKQRAXRIRCTRLXNIPRQDWATQTTQYHTPXDDETADSAAGNELTADLVSMHASLXEVNNLNKEMRGDAPETSGGHQSEPNDAGDGSDPK

SEQ ID NO: 242576 - protein, 70 aa, Zea mays
  Clone ID: MRT4577_152814C.1.pep
NLFQVGKSNSLKLGLGGFTCSVGFTHNFAWNLLCKVFPSENALFGKPSGERGFPLKKRGNLGQAPGFFFP

SEQ ID NO: 242577 - protein, 92 aa, Zea mays
  Clone ID: MRT4577_152815C.1.pep
IQFENIQHQVNSNNEPNRLVNAMRRLKRKRKETQTQAWLHMLLTTSSQMCHWEQYTLHAFCYISRRGKDLSPHGDARLQVLEAHSLVCFTHR

SEQ ID NO: 242578 - protein, 61 aa, Zea mays
  Clone ID: MRT4577_152816C.1.pep
SPGISSGLLKIIRAVSVVVSSRKSFTFPPLCIFCHQKNRVGGCAFEMFHKYTLAPVLVVFA

SEQ ID NO: 242579 - protein, 89 aa, Zea mays
  unsure (1)..(89): unsure at all Xaa locations
  Clone ID: MRT4577_152817C.1.pep
MEPGLGKRLMTVLHAVYHMMRRGLCRKRLMMDLHLLLGRGKLAGKALRDLLAAASHHQXPPHGRAASALPRAPHRRRGPLAPVRDNHSF

SEQ ID NO: 242580 - protein, 62 aa, Zea mays
  Clone ID: MRT4577_152818C.1.pep
PFLEKKKKKKKKKKKKKKKKKKKKKKKKKKKKKKKKKKFKKKKKKKKKKVFSLARPPLGGNF

SEQ ID NO: 242581 - protein, 81 aa, Zea mays
  Clone ID: MRT4577_152819C.1.pep
MELGDKAVGFLLTLTSLTLFTYYTFWVIILPFVDSDHFVHKYFLPQEYAILIPVLAGVVLLSFLSVFVGLVMLKSKKKKTA

SEQ ID NO: 242582 - protein, 402 aa, Zea mays
  unsure (1)..(402): unsure at all Xaa locations
  Clone ID: MRT4577_15281C.1.pep
MPVRSSVAMTTTAARALAALVLVTAAAAAAAVADDGAALVEIKKSFRNVGNVLYDWAGDDYCSWRGVLCDNVTFAVAALNLSGLNLEGEISPAVGSLKSLVSIDLKSNGLSGQIPDEIGDCSSLRTLDFSFNNLDGDIPFSISKLKHLENLILKNNQLIGAIPSTLSQLPNLKILDPRVRLAQNKLSGEIPNLIYWNEVLQYLGLRSNSLEGSLSPDMCQLTGLWYFDVKNNSLTGAIPETIGNCTSFQVLDLSNNHLTGEIPFNIGFLQVATLSLQGNKFSGPIPSVIGLMQALAVLDLSFNELSGPIPSILGNLTYTEKLYLQGNRLTGLIPPELGNMSTLHYLELNDNLMTGXIPPDLGKLTELFELNLANNNLIRPIPENLSSCANLISFNAYXHKLM

SEQ ID NO: 242583 - protein, 42 aa, Zea mays
  Clone ID: MRT4577_152820C.1.pep
VPPTILAPPKFCMPGPFCSQYVNRSVPERSTTDGLTERQQRF

SEQ ID NO: 242584 - protein, 150 aa, Zea mays
  unsure (1)..(150): unsure at all Xaa locations
  Clone ID: MRT4577_152821C.1.pep
EKNQXXGGXAPXEKGXGRXQPXXEXXTQEPERDHXEXXIRTXTQTHRGGPXXXXXXXXTGEEEKEXAXRKXNKEXXXXGEQEGPEKDEXXNTTXPPAXQEKKEEXAXAPRKEGGTTGRKTGGGTNKAETGGXEXGGGGGGPGGGGGDPGA

SEQ ID NO: 242585 - protein, 129 aa, Zea mays
  Clone ID: MRT4577_152822C.1.pep
RTDNTHPRMYCCISHYQTTPSVKHFHNTEIQTSGTLPSTTIHRVAQCFFQTSPLVYKLHRVVLYSCLLRVHSGSFLAYLLLHACVHQPAATQGTNDKSCRLKFQSGSWKQQLQFMMPKGMHECHNSGLQ

SEQ ID NO: 242586 - protein, 168 aa, Zea mays
  Clone ID: MRT4577_152823C.1.pep
PDIPVYRAMLWLLICAVPIRQSVPSPSNSYSSSRQTPSTLPHPVVVVPSPRFDASPYVLSPTCVRVDKRIPRKYREASSWSMPKCSVKGQNQNHRRLCGVLLNIERFQELWMEKKVKLHSILVSCLIEDFNRRLSSFPQTLNQVDNGELNHYFYYRFYDREIRRVVCV

SEQ ID NO: 242587 - protein, 82 aa, Zea mays
  Clone ID: MRT4577_152824C.1.pep
RVSLELHQCLSCGSRGRTVVTVVAYCKDQEVEIQEDVTFGFHESVVNLVARDTSAPARGHCLEAEMKEKGMVVYRVESRTGR

SEQ ID NO: 242588 - protein, 65 aa, Zea mays
  Clone ID: MRT4577_152825C.1.pep
YNKVKGGQKHCKTKPQHPVYTLENRVHERRIEQHHLTTGIVGITSKILMPTITKIRNYTIKNDNT

SEQ ID NO: 242589 - protein, 89 aa, Zea mays
  Clone ID: MRT4577_152826C.1.pep
ASSRVNRLRWITLNCLRQFVGGSRQTCCRLPPSRHPSLQCQRSQLSLAALTPLQSSTYGVHPHQKSCSVSWVPTNASGRSNAAMPSHDP

SEQ ID NO: 242590 - protein, 87 aa, Zea mays
  Clone ID: MRT4577_152827C.1.pep
QKFSFDGYHTAPSLPFLYPSRCTCLCLGVGADGDIGLGSGRDRTDPSRRLISVYVCGASCPGKWTPSGAATRARLALRAEFRRLIAQ

SEQ ID NO: 242591 - protein, 95 aa, Zea mays
  unsure (1)..(95): unsure at all Xaa locations
  Clone ID: MRT4577_152828C.1.pep
QTLQYQSKIPKSTHTSTKYNTRAEKVLTYYLMYRSDIIPKNINATITTIKTKRTVQFMDXYPTRFKYSINYQTPSNIPESNLSKIQRAVCIMHNN

SEQ ID NO: 242592 - protein, 41 aa, Zea mays
  Clone ID: MRT4577_152829C.1.pep
MAQQQEKKQQQRGKLQRVLREQKARLYVIRRCVVMLLCWSD

SEQ ID NO: 242593 - protein, 56 aa, Zea mays
  Clone ID: MRT4577_15282C.1.pep
FLIAYSHSTHVNQKLSRANLTIVADTNINLLQRPPYPNMTTSKTSTSILSYSTMQT

SEQ ID NO: 242594 - protein, 116 aa, Zea mays
  Clone ID: MRT4577_152830C.1.pep
LGGGAETPLLPLPCPRSSLFWGGSCLVLVHSRGCSFFFLVSALCLVSCLSFVFFPSLFPFSPPPRPCCLPLSRPFCPVPLFFFPGSFGPPPFCFWPVVFSSHGSFLPSELKGFSSQ

SEQ ID NO: 242595 - protein, 161 aa, Zea mays
  Clone ID: MRT4577_152831C.1.pep
RELTSPRGHSGTRTRDQGRRASFRGRTPCGSRARRRRRGKSTRTPARAGSGGGEGTPLPPPPPPRRNGRAAATATGEGVVSSGRPWHKAEEAAAASTAAVRTVSGRLEVRRGPPGTAAEAEAPAMAGLCSHVVGRKLAQESNSLVISSHRVYSVPVCRLYI

SEQ ID NO: 242596 - protein, 165 aa, Zea mays
  Clone ID: MRT4577_152832C.1.pep
ANRNNDALRQAKQESTEYRRQVQSLTCEVDALKGTNESLERQMREMEENFAVEAANYQDTIGRLQDEIQNMKEEMARHLREYQDLLNVKMALAIEIATYRKLLEGEESRISLPLPNFSSLNLTDTNLDSLPLVDTHSKRTLLIKTVETRDGQVINETSQHHDDLE

SEQ ID NO: 242597 - protein, 44 aa, Zea mays
  Clone ID: MRT4577_152833C.1.pep
LVGFECYILSKSWYGLLQELLQRSSACRRYHERATWENKLNRSI

SEQ ID NO: 242598 - protein, 63 aa, Zea mays
  Clone ID: MRT4577_152834C.1.pep
WSLACTLITTDVSCSCTGSESVISTIASPGPVTIVLSSDPRPVMRCPTPRVTRRVGWAGTAGP

SEQ ID NO: 242599 - protein, 81 aa, Zea mays
  Clone ID: MRT4577_152835C.1.pep
MAQGKAEQGAIRVGRAGRGAGGEMEGERSKGARHGKDRAGAGAKAGGGVLERGGRDLQRSFARAERRKKPREVAGGGLAGR

SEQ ID NO: 242600 - protein, 36 aa, Zea mays
  Clone ID: MRT4577_152836C.1.pep
LNSSRLAAMPLLPRALPWVAAPGLTMTGPLLSWGGH

SEQ ID NO: 242601 - protein, 135 aa, Zea mays
  unsure (1)..(135): unsure at all Xaa locations
  Clone ID: MRT4577_152837C.1.pep
PPPLGADNFXFSSAPPQKGSLKTPLPFIITPVSXGGHXFVPDFSLPKGGGGRPLVGFSSEVKMPPATLILGGRPLFASVVGGIKDLQKMVIFCAAPNFFPGIGVLKIDFINEALPRLVYRNVKNRFVIPLENPFK

SEQ ID NO: 242602 - protein, 87 aa, Zea mays
  Clone ID: MRT4577_152838C.1.pep
RIYATEGQPHPRGELFGRVVPVPHLAPTRSIRLSHLVLIRRTGDSRYRPPQFVLEPMLRGEGVWLTSICLRWWRSIRSRIYFLIVRL

SEQ ID NO: 242603 - protein, 105 aa, Zea mays
  Clone ID: MRT4577_152839C.1.pep
ILVVTVYALLDPQACGARKHPDRSGAGFRVRFIARSYITCALPLIILVPHKFPFSFHMDKEVFRNHSPVSMINADSVCCLPLSPYGTQQPPLVLPSHSTVYPPAQ

SEQ ID NO: 242604 - protein, 63 aa, Zea mays
  Clone ID: MRT4577_15283C.1.pep
EGLGGRLGTTRGEPVTPTSLSGPRFSCRFFFSPTKILSRLMARRFPPLFIKAAMRIAPYAFHL

SEQ ID NO: 242605 - protein, 44 aa, Zea mays
  Clone ID: MRT4577_152840C.1.pep
EISVLGLCNTAALSPRRSNVPANVSSVVPIRFCICSTYPYVYGQ

SEQ ID NO: 242606 - protein, 82 aa, Zea mays
  Clone ID: MRT4577_152841C.1.pep
QAPGVRVGPVVVVDQPLHAKAVVHAPVSGPPPPRTSSHEWQGQLRTRRRTKGHACLSSKPRKVSLVSEPLLDQRRCSGDRAG

SEQ ID NO: 242607 - protein, 96 aa, Zea mays
  Clone ID: MRT4577_152842C.1.pep
PAWPGSVLSTVSHPHRREDIGSRYQIQSRRPIIVTQSVSCSGSSPVARKTPVASPGVEEPWGMADFSPDIEKSHQPLLYVVGPRHISIASRFQSRS

SEQ ID NO: 242608 - protein, 67 aa, Zea mays
  Clone ID: MRT4577_152843C.1.pep
GPAKAYFMKSDIPMATWDLKLHNKPEAHPKTGDTCTDVYRIPWRNYNVQQLLTLKEGVKAPHVITCH

SEQ ID NO: 242609 - protein, 92 aa, Zea mays
  unsure (1)..(92): unsure at all Xaa locations
  Clone ID: MRT4577_152844C.1.pep
GAVFASAWASGXLXSVSFGXXGAFXGXXSXGGLGWGVALFFSXVVCVRXGGAFLWSPGXCCAAGXSLCVLSSLXWVCXWFCPFFCCSXXXLR

SEQ ID NO: 242610 - protein, 73 aa, Zea mays
  Clone ID: MRT4577_152845C.1.pep
RGLTPPFSTGRAARKNNRFGNPVIFPYVYFWIKTQTPWAMFKKPWIHRNRPPQIGNSTKLTLTEPCGCRCYLY

SEQ ID NO: 242611 - protein, 198 aa, Zea mays
  Clone ID: MRT4577_152846C.1.pep
PRVRVNVLTSGYSFLLKIFHERGLVMQKPVGDDKTQSVLSEDKMLFQRSQHSSMINGLHGRYQVYGPVVRLAKRWISAHLFSSFISEEAVELVVAHIFLKPFPFHAPSSRVAGFLRFLRLLSSFDWIFSPMVIDINNDFNLMDEKEINDNFMLSRKSYERNPHDIEPAMFLATSYDKTSEAWTKQSPSKSVCVILFYS

SEQ ID NO: 242612 - protein, 168 aa, Zea mays
  unsure (1)..(168): unsure at all Xaa locations
  Clone ID: MRT4577_152847C.1.pep
MARQRPQPEQTPEKARAAELGTRVRIPTGRPRPEIELGKIQALQGMRTRECLPRAPACGTWSRASIYWRRTHQGEGRXMAESSARRGARQGEPASREDGARACHGDSTGSCARRASVRARCTGTSRESLGTETGQRRSTKPELGAAKDWAEGGAEPNQGLGRGTGGAS

SEQ ID NO: 242613 - protein, 62 aa, Zea mays
  unsure (1)..(62): unsure at all Xaa locations
  Clone ID: MRT4577_152848C.1.pep
MAFNPTPPGRGCPYLRPNPYLPRPPQQAFPPPRRAPPPXNLPKTASSRRGSPTTGLGPPPPT

SEQ ID NO: 242614 - protein, 173 aa, Zea mays
  unsure (1)..(173): unsure at all Xaa locations
  Clone ID: MRT4577_152849C.1.pep
GKVLNXGFGMGLVDEAIQRYGPEEHTIVEAHPEVYERMLKLGWGEKKNVRIVFGRWQDVMPQLGSYDGIFFDTYGEYYEDMREFHQHLPKLLKPGGIYSYFNGLCGDNAFFHAVYCQLVALELANLGYSTQFIPLPVKDCLAEEVWKGVKRKYWQLDTYYLPACQSESESTIS

SEQ ID NO: 242615 - protein, 79 aa, Zea mays
  Clone ID: MRT4577_15284C.1.pep
MNLFLSLALLDHSSRPVPKPAESRSMKRVVEARNTEKTMMFQSKHANSRGGGHGCLISLLPGKRSSPKLFATSTIPFPT

SEQ ID NO: 242616 - protein, 107 aa, Zea mays
  Clone ID: MRT4577_152850C.1.pep
GSKGSKTFSGHVLSGQLCWDSLDISQAFAWTSAVLKETVVDLSLLLDMDINKVWALNESVGFLELPMRAMGRADFIFPCTLFSMSFTNFLLMCVCVCVCVCISHYSL

SEQ ID NO: 242617 - protein, 382 aa, Zea mays
  unsure (1)..(382): unsure at all Xaa locations
  Clone ID: MRT4577_152851C.1.pep
PAGFHGHWVNRGVHVRSKRXDGILLQNAGGAGIVDVDSYEWSRDGSALYSFTLPGLTLSYTAGEKLRAYMVSVPYPVASLSFGCETVISRKNRAPVVAGFSSRGPNPAAPELLKPDVVAPGVNILAAWSGDAPLAGVFVPDGRRANYNIISGTSMACPHVAGIAALIKKKHPSWTPAMVRSALMTTAGTVDNRGGHILDNGHTDTLGRTDNVRVATPLVAGAGHVHPDLALDPGLVYDAGERDYVDFLCALNYTAEQMRRFVPDFVKCTGTLAGGPAGLNYPSFVVAFDSRTDVVRTLTRTVTKVSEEAEVYTATVVAPEHVKVTVTPTTLEFKEHMETRSYSVEFRNEAGWHREAGWDFGQIIWANGKHKVRSPVAFQWKN

SEQ ID NO: 242618 - protein, 140 aa, Zea mays
  Clone ID: MRT4577_152852C.1.pep
LGADCVPRYVEKKRLIDLEFEDAFQAKQKRFGDIGGGGTEYKSLERVWARSEDAWQALLKELPDDTSERVVVAVGHPAIHLALICRCLGLPMEYLSSFHLDEGSVSVIDFPDGPRGRGVVRCTNYTAHLGRWAIPITRPN

SEQ ID NO: 242619 - protein, 254 aa, Zea mays
  unsure (1)..(254): unsure at all Xaa locations
  Clone ID: MRT4577_152853C.1.pep
MPYWNRSAGADHVFVASHDFGACFHPMEDVAIADGIPEFLGPSHXCQEVEHVVIPPHVPPEVEHELPEPEKAQRDIFAFFRGKMEVHPKNISGRFYSKKVRTELLQHYGRNRKFYLKRKRFDNYRSEMARSLFCLCPLGWAPWSPRLVESVLLGCIPVIIADNIRMPFPSVLQWPEISLQVAEKDVANLEVVLDHVVATNLSVIQKNLWDPVKRKALVFNRPMEVGDATWQVLRELEVLLDQSQRRRYGGSWRA

SEQ ID NO: 242620 - protein, 150 aa, Zea mays
  unsure (1)..(150): unsure at all Xaa locations
  Clone ID: MRT4577_152854C.1.pep
ATRSRREGGLRATTTCEVQTFSTSHNSRRRFIPLRDTVRECIAMHMGQAGLHVGNACWELYWLEHGIDADGHMPGDKTIGGGDDAFNTFFSETGAGKHVPRAVFVGLEPTGIVXGRTGNFRQLFQPEEVISGKEGAGHNFGRGSLSIGQG

SEQ ID NO: 242621 - protein, 90 aa, Zea mays
  unsure (1)..(90): unsure at all Xaa locations
  Clone ID: MRT4577_152855C.1.pep
ILPVGMCAKSQAAPKKAPLWAXKRILQKLXYPPKFGFGNPREPPFHLIGYSNPVWAGCKFNRKSPSGPSQFLEKPLVFWPSNHQKKKKYV

SEQ ID NO: 242622 - protein, 53 aa, Zea mays
  Clone ID: MRT4577_152856C.1.pep
PKLIVCSVFFPPYENQERENEGPAVKWLKPGSLFPAGKMHLFVSGERINRKQL

SEQ ID NO: 242623 - protein, 101 aa, Zea mays
  Clone ID: MRT4577_152857C.1.pep
RLKKLTQLDLSDNHLSGNIPEELGEIVEINTLDLSHNELSGQLPVQLGNLRLARFNISYNKLSGPIPSFFNGLEYRDSFLGNPGLCYGFCRSNGNSDGRQS

SEQ ID NO: 242624 - protein, 92 aa, Zea mays
  unsure (1)..(92): unsure at all Xaa locations
  Clone ID: MRT4577_152858C.1.pep
TFSQCGSLPEGKGSQLRSNLYSFWRNXXIFSQRPLQIFPNIFDRXMIPRKSRHAALPREAFFLPSLKQVCHIXHEHNALPRAIGVLVSQEXL

SEQ ID NO: 242625 - protein, 58 aa, Zea mays
  Clone ID: MRT4577_152859C.1.pep
SCCPRVSSFSMPEVRPLPSVDPPAGPRFVSALAGIVEPPRPPPRPAATMVFHWPILLF

SEQ ID NO: 242626 - protein, 44 aa, Zea mays
  Clone ID: MRT4577_15285C.1.pep
CSHSCRRLLCMLDSPRTLRRGSFSVAIGALWLPCDSPLYVAWSS

SEQ ID NO: 242627 - protein, 79 aa, Zea mays
  Clone ID: MRT4577_152860C.1.pep
IVFGVLPHPRLGQKETMPGQGGGKKKGALGGPTKLTHGPYQPVIRETPTTAPPLARGGTILLTKAGGHPQGPKRPLPQG

SEQ ID NO: 242628 - protein, 69 aa, Zea mays
  unsure (1)..(69): unsure at all Xaa locations
  Clone ID: MRT4577_152861C.1.pep
ITSPQSTLPSLQLIPLNIITTQPSHQIPTSILLTSLISSIFISSSINTSTSPHLXLSFILLPFFQLTLP

SEQ ID NO: 242629 - protein, 68 aa, Zea mays
  unsure (1)..(68): unsure at all Xaa locations
  Clone ID: MRT4577_152862C.1.pep
YNKGLTKRSGGLKVPQPHQTKERHLLYRRNKHPEEKKPLXRTAPVHCVEKPTFQQGTLRHLADSPPFP

SEQ ID NO: 242630 - protein, 106 aa, Zea mays
  Clone ID: MRT4577_152863C.1.pep
RTRGFIFETVKNSYIRGIYIYIICQDKGMESYACFSRPTSWGSAHWDHRLAQAAGNARRTASDSLGHAWGRTTAPTCAGEGSPGECSTFRRRCFALGRLINSPGAL

SEQ ID NO: 242631 - protein, 45 aa, Zea mays
  Clone ID: MRT4577_152864C.1.pep
MSHRKFEHPMHGSLGFLRRKRFSRHRGRAKSYCRDDRMKPCHVTS

SEQ ID NO: 242632 - protein, 53 aa, Zea mays
  Clone ID: MRT4577_152865C.1.pep
RVLDDSSREIARGHGSSPGCAGVDSVRSPSYSAGLLRRRTTLVVSREVRLPAR

SEQ ID NO: 242633 - protein, 280 aa, Zea mays
  Clone ID: MRT4577_152866C.1.pep
GTLGFGRLQTSSPDSDSYSVATAVSNGNGAPPQNKDLASESSFGADAPSTEHGSNGAGSGENGGGMLAVQNAVVVAHDAENKENHTVEQPTENSETCRAVSGHDDDTERRLNASEIKTVSSEMSKAAVSAQDPEQKEEGGGEHAANKKGYLVRVLSRSCDLRSSRDSTDFQSARTSLQSKSFSASEPLQSKIMNTVDEMKGDLSELFSNKPADDCKPKAHQPPRPSNSKQDGRTTRAAIASSAPLAAYHPAAKHSGYVSRPSKSGQVAAASRGLPSLRYR

SEQ ID NO: 242634 - protein, 70 aa, Zea mays
  Clone ID: MRT4577_152867C.1.pep
PGVANRGLRDQKRKYPGRPLNNQLGLMGANVSLKTSKTVFLHATLGYAHKEGPQRNMLKLNTCNAHTRIS

SEQ ID NO: 242635 - protein, 131 aa, Zea mays
  Clone ID: MRT4577_152868C.1.pep
STKKRGFTIAKKRRGPLGQQNRNNQRPTNGKREGALTGWRKHHQTGAKKQQKNGFVPQQDNENTTNGAHHTKKKATHPTNQRQNKAEVRKPGKEKKRKEEQTKAGKGHTPRDKEKAMAGQTKARGERDATG

SEQ ID NO: 242636 - protein, 90 aa, Zea mays
  Clone ID: MRT4577_152869C.1.pep
MAGAAKASWTVAMSVGAVEALKDQAGLCRWNYALKSIHRAAKAKATIRGGVSQGSKQLQASASAVAERRRAEKAEEGLRTAMYLSCWGPS

SEQ ID NO: 242637 - protein, 168 aa, Zea mays
  unsure (1)..(168): unsure at all Xaa locations
  Clone ID: MRT4577_15286C.1.pep
EPPAAASHGQGWRPGGRAARNARPEPGARHPALPAMVNDPPVPALLWAQEVGQVLAGRARRLLLQFGVLFCTILLLLWVSVFLYGSFYYSYMPTVSHLSPVHFYYRTDCDSSTTSLCSFPVANVSLTKGGRDRVLMYGQPYRVTLELELPESPVNQDLXMFLVTISCY

SEQ ID NO: 242638 - protein, 157 aa, Zea mays
  unsure (1)..(157): unsure at all Xaa locations
  Clone ID: MRT4577_152870C.1.pep
MAAITKTASGTAXPARHPKPKPAVDNXKASIDVGSHSPYFQMNKEAITELKERTESSSLAIVKYVXKKHDATLMVNFNXMVFIHLGVIAVKVKLVKAEASHKLSDAXKKGSPKSKAKSTKVXAAKSTARRPRKADCAKXKKGAAAKPKKVAAAGTKR

SEQ ID NO: 242639 - protein, 69 aa, Zea mays
  Clone ID: MRT4577_152871C.1.pep
LGFGGFPTNGSRSAWGGIRGCKVNLVFYGGSSRRADKDLIQPRGEKMGFLWFPPPLIGWCLELEQAERR

SEQ ID NO: 242640 - protein, 78 aa, Zea mays
  Clone ID: MRT4577_152872C.1.pep
MTRSISRKYRNRTSKRNKLTETNRKQTMADSRRKLRPGGKRQPVKSQQRKHGGTQNGNDGREHGRGGADGGGRPNLPS

SEQ ID NO: 242641 - protein, 68 aa, Zea mays
  Clone ID: MRT4577_152873C.1.pep
VGQAFLKLVLPLAYHVYHYSRLEPSYMATNPTQHALPQHLSIEHVVFKLTFCTIQQSKSNCRSIKLAF

SEQ ID NO: 242642 - protein, 103 aa, Zea mays
  Clone ID: MRT4577_152874C.1.pep
SAREATLVLRPPGSNWCLLGLRGAYCACKPTRGQAPHCTLTTTLHSLGHPVCAGGNGQLPSLFLLRYPKSGATTRLQYRRIKATSCLSEVIYFLRFVIKAVGS

SEQ ID NO: 242643 - protein, 126 aa, Zea mays
  Clone ID: MRT4577_152875C.1.pep
FFFFFFFFFFFFFFFFFFFFFFSTTRGFFSHKQAPPVAVFFPPSSILIHFFFVKPGRDPFLFFYKGRFNPKTATNFWVSKLKGGLKKRGPVFFGLNPQPQNCFWVKLTLKNVSLGLENPCHLFQVC

SEQ ID NO: 242644 - protein, 99 aa, Zea mays
  Clone ID: MRT4577_152876C.1.pep
LLASPSSWIGFKVGLLDSCGVHGSSVTCEEEGRKKADPWRRSGSSRSSRTCRRILPPLAAQVIQIPPALLLLLIFHDGIRLSPARSAISGAMRFLVRSC

SEQ ID NO: 242645 - protein, 121 aa, Zea mays
  Clone ID: MRT4577_152877C.1.pep
VRKKKKKKKKKKKKKKKKKKKKKKKKKKKKKKKKKKKRKRKKKKGAAFFRGPSSWSGVFPRALPFFLGSLKINSRWAACFKPWWVGKNLGFPQFILLCNCPLLPGGGISKGAHPFGLSKGL

SEQ ID NO: 242646 - protein, 88 aa, Zea mays
  Clone ID: MRT4577_152878C.1.pep
MGPQKDRSSSMANGTAAARSKDAKKVVHYRECQRNRAASIGGHAVDGCREFMASGAEGTACAACGCHRSFHRREVEAGEDRDCSSTSG

SEQ ID NO: 242647 - protein, 108 aa, Zea mays
  Clone ID: MRT4577_152879C.1.pep
RPVSGLLLPYMRRPVPILRLSSRLCEGYIRSAPSALRSGTESTLRPCRTCCWTHLPLSTTPLKSTFGPMLTAEWHLVAFRPLNHICGEYRPAETSMRRLHLHLSGSPY

SEQ ID NO: 242648 - protein, 89 aa, Zea mays
  Clone ID: MRT4577_15287C.1.pep
GPFPFRFGFLKILLSLAFSKKTFLGQNLLSFEKLKSLFFFGSNAIFFFGRFPRDFFENFILKILIFLTNIFFGGFSPFGPFWPFFFTTF

SEQ ID NO: 242649 - protein, 212 aa, Zea mays
  Clone ID: MRT4577_152880C.1.pep
MPDSDNESGGPSNAEFSSPREQDRFLPIANVSRIMKKALPANAKISKDAKETVQECVSEFISFITGEASDKCQREKRKTINGDDLLWAMTTLGFEDYVEPLKLYLHKFRELEGEKAATTSASSGPQPPLHRETTPSSSTHNGAGGPVGGYGMYGGAGGGSGMIMMMGQPMYGGSPPAASSGSYPHHQMAMGGKGGAYGYGGGSSSSPSGLGR

SEQ ID NO: 242650 - protein, 56 aa, Zea mays
  Clone ID: MRT4577_152881C.1.pep
IEIAMRELRAWFEGFQSLTYGGGTFGDDKGARAIVKAFQPLKGTGLALPKIMATKP

SEQ ID NO: 242651 - protein, 49 aa, Zea mays
  Clone ID: MRT4577_152882C.1.pep
KLGEHGGGLPGQGGHPPGPGGCDFRRANSWRRAGPKGFLTPKRVSFLEI

SEQ ID NO: 242652 - protein, 121 aa, Zea mays
  unsure (1)..(121): unsure at all Xaa locations
  Clone ID: MRT4577_152883C.1.pep
MRPAAQSLGAIWGVXLVKGVHSDNYARYGRGSNEASAGYFTGTGLAAEMIGSFRQLQTDPNVSGPIRAVGDSHGPVRATVPNGLDVFMVHLATNPITGTGLNPERSLGAAAVYNNSKAWSD

SEQ ID NO: 242653 - protein, 71 aa, Zea mays
  Clone ID: MRT4577_152884C.1.pep
NHPPKKKSFMALFLLIPCVVDVELFDLVVVLGEVHLGALGIRVRGCHRHKPCALACRVPGEHESKRRRAEP

SEQ ID NO: 242654 - protein, 87 aa, Zea mays
  Clone ID: MRT4577_152885C.1.pep
EAQPMPSAAAARGPKNRPKRPKSVKQGAELREQNLQLPEHDYEIIDTESGAAETVQRDKKANGIFQDTSQSDEEEIEDEYDAPSNDT

SEQ ID NO: 242655 - protein, 170 aa, Zea mays
  Clone ID: MRT4577_152886C.1.pep
MASLWRAVMDSVSGSSPSALDAAPGSGVEFWHGAERAGWLNKQGEYIKTWRRRWFVLKQGRLFWFKDPAVTRASVPRGVIPVATCLTVKGAEDVLNRQFAFELSTPAETMYFIADSEKDKEEWINSIGRSIVQHSRSVTDAEVVDYDSRPQPPAAAYDQRRECTSSLMAW

SEQ ID NO: 242656 - protein, 44 aa, Zea mays
  Clone ID: MRT4577_152887C.1.pep
GTLAIALSLTPFALLFCFVERYEVIQRREFSYALNYRITHKRTC

SEQ ID NO: 242657 - protein, 62 aa, Zea mays
  Clone ID: MRT4577_152888C.1.pep
LSQLSMGPNRVFRSLARRFPALLQTSSSKEQCRKSSCQRLTHVYLTLPRSCLSCQWAPTGCR

SEQ ID NO: 242658 - protein, 82 aa, Zea mays
  Clone ID: MRT4577_152889C.1.pep
VDSVRQCVPSSRSLQLCHGHIPVNAECLPEELVTGTPTIVSGRLHRSLPGERSVRHSTCPADGRSARSQTATPYKGSAPRAG

SEQ ID NO: 242659 - protein, 111 aa, Zea mays
  Clone ID: MRT4577_15288C.1.pep
FHKQGKHNRFRGLFPQYSFSRPPFLEHTPFFFQCKENPAFPPRGVFYTFFAAGKQSFFSPWLILGYAVSFSESQGGFSPRFFPPCFSENGISLFDLGPAPLQQTGVFPLMG

SEQ ID NO: 242660 - protein, 74 aa, Zea mays
  Clone ID: MRT4577_152890C.1.pep
IRVPGGFLVGQFFIPWKGGGLFFKAGVRVGLYFNLIYFLSFLHLFYFILLFIGFFFFFFFYFFYVFCFLLFFLP

SEQ ID NO: 242661 - protein, 292 aa, Zea mays
  unsure (1)..(292): unsure at all Xaa locations
  Clone ID: MRT4577_152891C.1.pep
IRLEEDLVVCCYYIDCAMKAFAISPAQLYSNTPSDFDFKLESLAQEFDSLSDFAEHLATNVDIVFPVIHGKFGEDGGIQELLEKANVPFVGTPSKECQRAFDKHNASLELNAQGFLTVPNFLVEKDKLAKPELEAWRQVADAWEENGKTIVKPTRAGSSIGVVVAYGVNDAAQKAEEIISEGIDDKVIIEVFIEGGTEFTAIVVDVGIANNSEPVVLLPTEVELQYSNNSDTKEDTIFNYRKKYLPSRQVAYHSPPRFPAEVIDCIRQGISRLFLFFSLHDXFDXVDGWFLP

SEQ ID NO: 242662 - protein, 314 aa, Zea mays
  Clone ID: MRT4577_152892C.1.pep
MHSHRIAGTVVKRKKGAVLADLTHHCDEVLVARGGQGGISLIDVPEYKRRKAMALSPNIMRDTSDKVLTHGQPGEEVSLELILRVVADVGLVGLPNAGKSTLLSAITLARPDIADYPFTTLMPNLGRLGGDPALGALQFSSEATLADLPGLIEGAHLGKGLGRNFLRHLRRTRVIVHVVDAAADDPVNDYKIVREELRMYNPQYLERPYVEDLNKIDLPKAQDRLSALVLEISSIGCEEGHEQSGSKDNLNGRVSDHQVLSEAKAEGVEKELGDYPRPEAVVAASVLRHIGIDEMLKEIRAALRKCFDHKLPEH

SEQ ID NO: 242663 - protein, 169 aa, Zea mays
  unsure (1)..(169): unsure at all Xaa locations
  Clone ID: MRT4577_152893C.1.pep
MPARPATPPCARRIMSNSSWKTLAEEHDQAACCILIHHTTTMNALIQGLEGLPADQKLVIFTGEHFEDRRALNDYNIQKNXTLHLSLRLRXGSFKHMEKTCTNPNKIKHILIIVKLGMIYIYKVDNTPGNVTRLHTECPNTLCGACVFMGNHLNRPYCGKRSLTYLYHQ

SEQ ID NO: 242664 - protein, 135 aa, Zea mays
  unsure (1)..(135): unsure at all Xaa locations
  Clone ID: MRT4577_152894C.1.pep
TSRPAGPGFPYASRARSVLVVHRLTRYRRNVLDVADTQDLEYYSLAWSRACHHLAASSGLRQAERGTQGIDSRVKRKFLGCSLMPYIAHECDKTARYYLPRXINEFGVHKVSDLELLMMHNRTYCGEIGHNVSTK

SEQ ID NO: 242665 - protein, 98 aa, Zea mays
  Clone ID: MRT4577_152895C.1.pep
SCTYIINLILKLIISYKSYTYNINQAITLEVSSRASRRGAGETTGRGRDDGARARRRVAGEAPGGRGHGGETAGSRRGVRRGRWAGAVSCVVLLGFYT

SEQ ID NO: 242666 - protein, 71 aa, Zea mays
  Clone ID: MRT4577_152896C.1.pep
FAKYLLPLGELHKSPPRWSRGKCTKEAVKNAWKKLRSRAPPPKGTTSHGEKHQSRRRRLRCPFLFKCFAQI

SEQ ID NO: 242667 - protein, 74 aa, Zea mays
  Clone ID: MRT4577_152897C.1.pep
DQKEVVLLNKAPKSLISSHSGSPKKLYRLRCLQQTLKPYIGLSSFTDLGVDSRFSCPAHCHRTKKKFCAPDIYY

SEQ ID NO: 242668 - protein, 214 aa, Zea mays
  unsure (1)..(214): unsure at all Xaa locations
  Clone ID: MRT4577_152898C.1.pep
MEQVNELKEKGNKALSAGNIDDALQCYSEAIKLDPQNHVLYSNRSAAYAKKGDYQKAYEDGCKTVDLKPDWGKGYSRKAAALEFLNRFEEAKRTYEEGLKHEANNLQLKEGLQNMEARLAERKFINPFNLPNLYQKLENDPRTRSLLSDPTYRELIEQLQNKPSDLGTKLQDPRVMTTLSVLLXVDXGSMDEEEEAXTPPPPPPPXKEPKPEPM

SEQ ID NO: 242669 - protein, 78 aa, Zea mays
  Clone ID: MRT4577_152899C.1.pep
LKVIKLFKTEGGGKCTGACLDNTRLVLLDDVRLTTIFCLDIRQIIHLQVRPTDDVVLRQRSTPSTILRSTWLVFRITD

SEQ ID NO: 242670 - protein, 226 aa, Zea mays
  Clone ID: MRT4577_15289C.1.pep
LEAGRDSPLLQTSRGLAVAAEDIEAASNAIERDAGETRESREGAREGTPNPRRRLVLGLSGWRHGECRARLRGANRRRRRRRRLLRDAATITECLHTFCRKCISEEFVNKEVCCCPVCSIDLGCAPLEKLRIDHSLQYVRSKVFPSKKRKVEDPEVTSPITSPIKTKVRSLSSLTKHAPQMSMQKCLRKRRTKASCLQNLPLHSTLRSSNITKKSVETFRVSLSSS

SEQ ID NO: 242671 - protein, 284 aa, Zea mays
  Clone ID: MRT4577_1528C.1.pep
MASSLAEEEEAFEHTLLVVREVSVYKIPPRTTSGGYKCGEWLQSDKIWSGRLRVVSCGDRCEIRLEDPATGELFAACFVLPGQRESAVETVLDSSRYFVLRIEDGRGKHAFVGLGFNERNEAFDFNVALSDHEKYVKREQEKETTGAGGEETGGGEIDIHPAVNRRLKEGETIRITVKNKPSTGSGMLSAAGLSGGTTAKPKTSMLLAPPPGAAGKLRSPLPPPPNDPAAARMNSGHTAGIRAPKEPTKRNNDPFSDLSAIKQNLPSSAEPGQTKSTGAGWAAF

SEQ ID NO: 242672 - protein, 167 aa, Zea mays
  Clone ID: MRT4577_152900C.1.pep
MASSGSGGGSPGSPCGACKFLRRKCAAECVFAPHFCAEDGAAQFAAIHKVFGASNAAKLLQQVAPADRSEAAATVTYEAQARLRDPIYGCVAHIFALQQQVASLQMQVLQAKAQVAQTMAAAGPQGGSSPLLQRWPLEPESLSTQSSGCYSDMYCGFGDQEEGSYTR

SEQ ID NO: 242673 - protein, 59 aa, Zea mays
  Clone ID: MRT4577_152901C.1.pep
IFILLFFFQHISMLNKSYEHGMLSLYCYPGRPTTSGMNDREILTGSVEGEATRPIGNTE

SEQ ID NO: 242674 - protein, 71 aa, Zea mays
  Clone ID: MRT4577_152902C.1.pep
PGSLTPITTDHQRSYVPSSICCRSLYDLYLKQLVSEHLVVSTDPSAYLVLQIEQLSDDLYPGFTISHLDHE

SEQ ID NO: 242675 - protein, 108 aa, Zea mays
  unsure (1)..(108): unsure at all Xaa locations
  Clone ID: MRT4577_152903C.1.pep
VYIPTHGASDMLXMLGESDPTMVSYTEFLEMFNDPYCRFGILTTLMNLDESDHTRHGLHTCYISLYPIIDSRSLETKHFFSLCNRCYTEGKVPSAFKLEEFSFNEYGN

SEQ ID NO: 242676 - protein, 788 aa, Zea mays
  Clone ID: MRT4577_152904C.1.pep
STVYDFLVREVALSVVSGINSSVLPYGQTSSGKTYTMNGVTEYTVADIYDYINKHEERAFVLKFSAIEIYNEAVRDLLSAENTPLRLWDDAEKGTYVENLTEVVLRDWNHLKGLISVCEAQRRTGETFLNEKSSRSHQILRLTIESSAREFLGKDKSTTLVASANFVDLAGSERASQALSAGTRLKEGCHINRSLLALGTVIRKLSMGSNAHIPYRDSKLTRILQPSLGGNARTAIICTLSPRQQRIEHSRNTLLFGSCAKEVVTNAQVNVVMSDKALVKHLQKEVARLESELRQPASNSSLEALVKEKDNQIRKMEKEIKELKSQRDLAQSRLQNLLETVGDQVKHSGSGKRSARSPPSIGISPGISRDDSSQISHDDSDLYKDVRCIGTSGTGGNEQLDLSAGESSSLQGLNMNSSLHGSGSNASVNSRRSRLLSESPITLEQHLENIKRPFVSLGRDLGSSTHNSSGSRILGRSRSCRSLMGSTMFDGMEMDDGTPLHRSLVGFPGRPEGNHRRGSTPNHDAESETLSRAGSVVSTKTNAACDAEFTGIGEFVAELKEMAQVHYQKQLGNQITNGEFVDIKNIGLDPIADASQSPSRWPLEFEKKQQEIIGLWHACCISLVHRTYFFLLFKGEQADSIYMEVELRRLSFLRDTYSRGNTPSNAVVGSLNSSPAASAKKLQREREMLARQMQKRLTAEERERLYTKWGISLDSKKRKLQVARRLWTEAEDLEHVRESASLVAKLIGLQEPGQVLREMFGLSFAPQQQPPPRRRSSNGWRYGIPSFG

SEQ ID NO: 242677 - protein, 116 aa, Zea mays
  unsure (1)..(116): unsure at all Xaa locations
  Clone ID: MRT4577_152905C.1.pep
LMQTIESSAREFLGKDRSTTLVASANFVDLAGSERASQALSAGTRLKEGCHINRSLLALGTVIRKLSMGSNAHIPYRDSKLTRILQPSLGGXNVVMSDKALVKHLQKEVARLESEL

SEQ ID NO: 242678 - protein, 174 aa, Zea mays
  unsure (1)..(174): unsure at all Xaa locations
  Clone ID: MRT4577_152906C.1.pep
MGAIGGDESVQWDKVAGADAVNGGGASVGRMDRIQVLVRLRPLSEKEVARGEPAEWECINDTTVMFRSTFPDRPTAPTAYTFDRVFHSDCSTKEVYEEGVREVALSVVSGINCEXAIQQTNFYFCNDKVFSLNXAFFSLTASVFAYGQTSSGKTYTMNGVTEYTVADIYDYLNK

SEQ ID NO: 242679 - protein, 65 aa, Zea mays
  unsure (1)..(65): unsure at all Xaa locations
  Clone ID: MRT4577_152907C.1.pep
ESMKPTRPSVGDPDIPKYQALAQTLQHSRGFANQYRFXSNRRQNSAAADPLASGAAAAGDYDLSG

SEQ ID NO: 242680 - protein, 74 aa, Zea mays
  Clone ID: MRT4577_152908C.1.pep
GSVNRTLAAETEALRNSATCRPKGAVAEVKDKGTCGICWASSPLPAVEGINQIVIADMTSWPDKDLVNCDTSYN

SEQ ID NO: 242681 - protein, 128 aa, Zea mays
  Clone ID: MRT4577_152909C.1.pep
TCFLDSWAFPLLRAFLTFWERPSPLKALTQREGANLENFLPKRAPKLSPNLKGAFWEKPGENPSFGPFFKKAGLNNFFCPLLRVPFLGYLHLRSLFKAPSSLPTNFPLLGGFGIKPFFSKPLLWKPFC

SEQ ID NO: 242682 - protein, 387 aa, Zea mays
  Clone ID: MRT4577_15290C.1.pep
MESAVLACEAPTAAAAAAPGAGGDRGAEGVVMLRRSGLAACLTCPLCGRLLRDAATITECLHTFCRKCISEEFVNKEVCCCPVCSIDLGCAPLEKLRIDHSLQYVRSKVFPSKKRKVEDPEVTSPITSPIKTKVRSLSSLTKHAPQMSMQKCLRKRRTKASCLQNLPLHSTLRGSSNITKKSGGWRPLGCHFRAAKKKRSLRPKSDDIKTAGKRTDDPVDVTLASQAKTRKQVTRRGNLEKRTGTKKVLILKGKQKNRKTKNTPNKRRLPALWFYLLAAFDQKGHPPLPQIPSKFLRIKDVNLPASFIQKYLAQKLNLSSETEVEIFCGGRPVSPGITLHDLADHWIGKRSKGRVRSSVGTPAAEFVLKVFYARSGAPLPKTESNQD

SEQ ID NO: 242683 - protein, 36 aa, Zea mays
  unsure (1)..(36): unsure at all Xaa locations
  Clone ID: MRT4577_152910C.1.pep
LFMKDGGNFSDGSGKLXNHHPLLHIDGWLLSPSFIY

SEQ ID NO: 242684 - protein, 51 aa, Zea mays
  unsure (1)..(51): unsure at all Xaa locations
  Clone ID: MRT4577_152911C.1.pep
KXCQTLMQNTCSTVHHTNDRLLSIQRTSISGAAQNTKDRNYLNDIKLLFSR

SEQ ID NO: 242685 - protein, 102 aa, Zea mays
  Clone ID: MRT4577_152912C.1.pep
DHASATLLQERLPNLQALRHGFLSCIPNPYGTRARSRSCPHQFGVCLLSETYQEILCRPAMAKCLYVLGSHGYCWCLTVSRTSKESRITLFRVAQGAEQTCP

SEQ ID NO: 242686 - protein, 27 aa, Zea mays
  Clone ID: MRT4577_152913C.1.pep
ACSGLASLMTRPALTHWLMIRYLHVGS

SEQ ID NO: 242687 - protein, 94 aa, Zea mays
  Clone ID: MRT4577_152914C.1.pep
LGKLRDPTVGAICHLHHVQHDKLSPGSEGAQCPWPAYALTFTGTSPDAPTPLAPPSPTPRCTHQPCSTAPWQPLYQTDSNPFANSVPDAPLYTP

SEQ ID NO: 242688 - protein, 60 aa, Zea mays
  Clone ID: MRT4577_152915C.1.pep
SKDVKFVRMLASSTFRIVLWLIKPCVAMCGMVHLWWCVNLISIHIYIYICVCVCVCVCVC

SEQ ID NO: 242689 - protein, 148 aa, Zea mays
  Clone ID: MRT4577_152916C.1.pep
MPFWGCCRVLCHLWRKVRDTERVYRGRRQPGDIEAGDLSTRSYGYSGSSSPSSSSDYSGHRGRAVAARSKWDSSSSARERRKDRLRQSLRTRRANSKVEHAMRMSRESERERRHPHHPHSIGARRKEASSLHEHGSAPRDHAHAHRRT

SEQ ID NO: 242690 - protein, 48 aa, Zea mays
  Clone ID: MRT4577_152917C.1.pep
VGPAGPLAAAAETRRNWRPSIAHRVVLFIFSSYRCNASCRLIIQERKL

SEQ ID NO: 242691 - protein, 92 aa, Zea mays
  Clone ID: MRT4577_152918C.1.pep
MMEVSPSPEQGVMAGREPFGLPKTPATPPSSGGTQGLRMAYTTDGTAIFTPVSSVPPATATYQPVGGSAASASSLAGVRGNGGAPVHSGGRG

SEQ ID NO: 242692 - protein, 60 aa, Zea mays
  Clone ID: MRT4577_152919C.1.pep
MLVFTKPATDILLLYNSYLIWIPNMILTPQKSVLLYCSLCVYGSKKHCHLFIVAYLCISE

SEQ ID NO: 242693 - protein, 54 aa, Zea mays
  Clone ID: MRT4577_15291C.1.pep
VITGVLGRPFCVPGSRNRCGAWSRRGCSVRLSSSKSPESSGLTTLLLVLSAQLV

SEQ ID NO: 242694 - protein, 46 aa, Zea mays
  Clone ID: MRT4577_152920C.1.pep
MMFHHSAHLMTTRAHQDGMIYIYSSSHIFPNLPGSVPMLLLQYNQT

SEQ ID NO: 242695 - protein, 100 aa, Zea mays
  unsure (1)..(100): unsure at all Xaa locations
  Clone ID: MRT4577_152921C.1.pep
MTHKNAAGHKPCDGASQRNPPLHCAVPLSASKKEELAARTPLVLQVMKLLGXLERDSFRRILPXFFPLLDDLIRCEHSSGEVQHALYNIFQSAILPMIRV

SEQ ID NO: 242696 - protein, 90 aa, Zea mays
  Clone ID: MRT4577_152922C.1.pep
GNLVGLPVIVVPTGFKNIPSPPPTGTRRRTTVNTGIYAPPNHDHIALALAMAYQSATNHHKQRPPIDDLGPNDTIPNPPTVPIPPRRLHM

SEQ ID NO: 242697 - protein, 96 aa, Zea mays
  Clone ID: MRT4577_152923C.1.pep
ARAGPEYIAWSTFSLCRGPTCYLCLHCPRIGCLGEQDTNNAKSQRTWAASTTRIMADVTYTDHATYPVSELPINILVEQCSRHGAMDVNFFLWMIT

SEQ ID NO: 242698 - protein, 183 aa, Zea mays
  Clone ID: MRT4577_152924C.1.pep
PVGPPHLLWVGPPFGPPGFSLFSFGLFFFWNFWGVTFFPREPLLPFFPPGLVPGWVPLLRPPVVWDFPFGGFRPRDHGLGEGGVQRGFPPVLVFPTRGFFFGFSVLGGLLARPPTWVFYKKGGLINGGLLVFWLGGVGNPILGCICWANTNLFFLPKKKKKKKKKKKKKKKIKKKKKKKKKLV

SEQ ID NO: 242699 - protein, 70 aa, Zea mays
  unsure (1)..(70): unsure at all Xaa locations
  Clone ID: MRT4577_152925C.1.pep
ISWRVSLGPGGDLGLTSRVTNANAAGRPFSYTLAYHTYXAVSDRSNVRVVGLVTMCYLDNLQAEALFTGH

SEQ ID NO: 242700 - protein, 82 aa, Zea mays
  Clone ID: MRT4577_152926C.1.pep
GKLFPFFFFTGPDLVAKWNNPKPFFTKERFFRWGPSWDLFGVLNSVFGPPKWGGGTNETNWGPLSVAFVTWARFFLVWFPPT

SEQ ID NO: 242701 - protein, 91 aa, Zea mays
  Clone ID: MRT4577_152927C.1.pep
KCNLQFEKPLDEDTAREILRAAPGVTIIDDRASNRFPTPLEVSDKDDVAVGRIRQDLSLDDNRGLDIFVCGDQIRKGTALNAVQIAEMLLK

SEQ ID NO: 242702 - protein, 86 aa, Zea mays
  unsure (1)..(86): unsure at all Xaa locations
  Clone ID: MRT4577_152928C.1.pep
LGXEHAASSRMRSERERIWTQHAAIQGLVLAARHNHLYPDSQPGLDPPPAQGGYGYGYQYQGYLGESANPPYYYYTGQLAEQPPAP

SEQ ID NO: 242703 - protein, 377 aa, Zea mays
  Clone ID: MRT4577_152929C.1.pep
MQAAAAVVVRHPRLFPPSPGRSAQHRRAPSTVRMALREDGPSVAIVGATGAVGQEFLRVITDRDFPYRGLRLLASERSAGKRLAFEDREYTVQDLAAPGAFDGVDIALFSAGGSVSRKYGPAAVASGAVVVDNSSAFRMEPEVPLVIPEVNPEAMANVRLGQGAIVANPNCSTIICLMAATPLHRHAKVLRMVVSTYQAASGAGAAAMEELKLQTQEVLEGKAPTCNIFKQQYAFNIFSHNAPVLENGYNEEEMKMVKETRKIWNDKEVKVTATCIRVPVMRAHAESVNLQFEKPLDEDTAREILRAAPGVTIIDDRASNRFPTPLEVSDKDDVAVGRIRQDLSLDGNRGLDIFVCGDQIRKGAALNAVQIAEMLLK

SEQ ID NO: 242704 - protein, 122 aa, Zea mays
  Clone ID: MRT4577_15292C.1.pep
PNRVFTVADEPAGSPNRCGGSRWACTDSRDMQPVCRSSLALVRPQPEVPPARAGADTVTECYARDTTTSRVCLWCAASVRRLRADTLHGGRTTDPVEPNMDGPELQELEVADVGVYSQELEV

SEQ ID NO: 242705 - protein, 92 aa, Zea mays
  unsure (1)..(92): unsure at all Xaa locations
  Clone ID: MRT4577_152930C.1.pep
VSTLFLPFFLVLKQVHPHIGIXYTATCIRNSTINXIQEGGAPXAAKLARYNKKATITPPENQTXXRLGLTGELDKHAGCKGSIFFINNLKLS

SEQ ID NO: 242706 - protein, 95 aa, Zea mays
  Clone ID: MRT4577_152931C.1.pep
TDEVHGQQPTNIIKNGNFECQQMTNMTMEENAAAGYVAYAIDDEECVAMHQPINCGSVQPSADEVFAELEELEPTSSPVNANIYFRGVTYEWPKF

SEQ ID NO: 242707 - protein, 55 aa, Zea mays
  Clone ID: MRT4577_152932C.1.pep
HLGCFQCDIKRMALLQTRKTWHTLRAETVPEKLHPLRTRVHDFYCWGKTCFLFQS

SEQ ID NO: 242708 - protein, 72 aa, Zea mays
  unsure (1)..(72): unsure at all Xaa locations
  Clone ID: MRT4577_152933C.1.pep
PGWVVPWDGPXNKFFWPWPGSPGVTQGKVVFGRGPFFLGLVSPPVQAGKVFFVPWGGTPFGAGGDPWWKALG

SEQ ID NO: 242709 - protein, 109 aa, Zea mays
  Clone ID: MRT4577_152934C.1.pep
TGGPLTKGTLGGARTTFFLWASLVHEKNVARKFLFQQKLVVFVGPFPCLPKGGLPPLWVPPSNDFGATHGGGCGPPPGNPPLGGEFGGFGYFTPPPNRPLFFLRNFRGA

SEQ ID NO: 242710 - protein, 51 aa, Zea mays
  Clone ID: MRT4577_152935C.1.pep
NWLHWVNNFCQKFFLLDGWKTTVALLYQKAVLWKGMAIIWWVVKVLEKKFC

SEQ ID NO: 242711 - protein, 47 aa, Zea mays
  Clone ID: MRT4577_152936C.1.pep
FDGNNDIVIDGCVPTLNRAAAMINFFENTAVCDDLGEDINPDDYTMK

SEQ ID NO: 242712 - protein, 101 aa, Zea mays
  unsure (1)..(101): unsure at all Xaa locations
  Clone ID: MRT4577_152937C.1.pep
RPFIRGVLLTEADFWLFVSFIGFDEVXIYRRSDSEAHNSAYHSCLMSVPITSXLQVYAVLSKSNTMLVLEYPYPFYYTKDIYQIPGLCSSANMEHTRKHYY

SEQ ID NO: 242713 - protein, 75 aa, Zea mays
  unsure (1)..(75): unsure at all Xaa locations
  Clone ID: MRT4577_152938C.1.pep
SCKLLRPAYXHLLGGDLQQEAAFSPLWLVHEPMALSAKKAVTAFSSRGRVRALVPFFSSRSISCIDSSLDISLKQ

SEQ ID NO: 242714 - protein, 316 aa, Zea mays
  Clone ID: MRT4577_152939C.1.pep
MATATTSAYHCNAVLHLPRPPQFRRLLPPLPSLVTRRAASVGLGAARLGSRARARASSVPPPPPFFETVEEEEEEEEEEERGWSDAEAGFSDEAEDEQEWSGGNGAARGEDLGADAGEDLSGWARQWPRPRELFVCNLPRRCDVQDLLELFTPHGTVLSVEISRDAESGISRGTASVTMRSLAEARAAIDALDGFDMDGREVFVKLASDVISNRKNVNLAHITPTKDHIFETPHKVYVGNLAWSVQPQDLRELFTQCGTVVSTRLLTDRKGGRNRVYGFLSFSSAQELEEALKLDRTVFFGRDIVVKEAHVERQTR

SEQ ID NO: 242715 - protein, 61 aa, Zea mays
  Clone ID: MRT4577_15293C.1.pep
GRRLLFSDSVYPVWAWVNEPDAANSLIQFGPGPCMLDQVRKISVSDGSGSLRVHVGPLRSV

SEQ ID NO: 242716 - protein, 87 aa, Zea mays
  Clone ID: MRT4577_152940C.1.pep
MRRRYGGPGRAFSKMRGLVVAGDELPEEMTWRVGREAEGRTLRWRLGLKAWVTYLPNEARSRHFETRCIEWAHEVDLPLLAVDGDQS

SEQ ID NO: 242717 - protein, 34 aa, Zea mays
  Clone ID: MRT4577_152941C.1.pep
GRAGAYKRVFQTPGLTHDRDRQISNSPYRPAIDL

SEQ ID NO: 242718 - protein, 55 aa, Zea mays
  Clone ID: MRT4577_152942C.1.pep
FIAKLNNKVLGLQDILGTLLTTRIYASFKKKLMLRLHRCIHQQLRCCHSSACTTP

SEQ ID NO: 242719 - protein, 86 aa, Zea mays
  Clone ID: MRT4577_152943C.1.pep
LHTVTIRWISRGPVKWVRPLMDGSVAVMIQGVSYRRHTSACARAYERVGRREMGMAWTALERPRSRRNVRVASKQVVVQEISFTDM

SEQ ID NO: 242720 - protein, 118 aa, Zea mays
  Clone ID: MRT4577_152944C.1.pep
REREREGGGKPYLLAGPRSLTGRAPSVSACPSTAGPAARLPCTSLLLSCNASVRHVMLPRLPVVSPLMRNDMARWMAVLIIPSFQRIWSRSDRIWVNTHLPSQRRLCPDYSPPSFCWL

SEQ ID NO: 242721 - protein, 186 aa, Zea mays
  Clone ID: MRT4577_152945C.1.pep
MVKSDPTLRMNVHQYLVTGRRIPTEKTPESEIIAMRVFAPNEVIARSKFWFQTRRQNKLKRAQGEILSVSEIFERNQRTVRTYAIAFRYQSRTAVHNMYKEFRDVSLNGAISQLYIDMSGKHRARHDTIHILRTSIITKADDIRRPLSAAYRDSQLKFPIVKVLPRSSERRFRSVFKANRPSTVRK

SEQ ID NO: 242722 - protein, 73 aa, Zea mays
  Clone ID: MRT4577_152946C.1.pep
ALMCIHQLTAYPCMIVSIIYGASTYCGHRRKERKMQLTNARKAYLTNHLLQYSNWGKARKHVYCWGPSASEGP

SEQ ID NO: 242723 - protein, 110 aa, Zea mays
  Clone ID: MRT4577_152947C.1.pep
GQNPCFKQKKKAWGSMIPKWDLHREKPKLFWGGKKNVKPIWEHKNPNWGKRGKKEKKNRFVNDPKKKLMPKRILRGQKGAARGVPNILSPRNFWAGGGASRPAQKGGKGF

SEQ ID NO: 242724 - protein, 76 aa, Zea mays
  unsure (1)..(76): unsure at all Xaa locations
  Clone ID: MRT4577_152948C.1.pep
FXXXFFFFFGNNPTPPKCPAKKNHSLPPLFSMTPFKPMSARPDFYPPPHLFKTAASTPTPPKTNRSVAATTPTVPR

SEQ ID NO: 242725 - protein, 115 aa, Zea mays
  Clone ID: MRT4577_152949C.1.pep
VFLKDRPSWFRDCRSLEVYTVLPAGNGGTIELVYMQMYAPTTLVPARDFWTLRYTSTMEDGCLVVCERSLSGSGDGQSAATTQQFVRAEMLSRGYLIRQCEGGGSIVRIVDHLDL

SEQ ID NO: 242726 - protein, 138 aa, Zea mays
  unsure (1)..(138): unsure at all Xaa locations
  Clone ID: MRT4577_15294C.1.pep
LEDEIVXLRDKLSEMEKSYVIKCEEAANAIESKEKHITSLMNEISGLRTEVSQKLPQLEKLEIELALSKSSLDEQYKRWRTAQDNYERQVILQSETIQELTNTSKQLSSLQHEITVLRQTADALKNENECLRSSAEQE

SEQ ID NO: 242727 - protein, 114 aa, Zea mays
  Clone ID: MRT4577_152950C.1.pep
MGSLGGYVSPYGVYLDQQRVFLLVINRRPRDLFDYLHSIPGAPADLRCRLVGFAERALLAPRLGNWWPDESSWSLYWAMYAWAHADAMLNRFVTGGMNGLVYYDGAQNCCYWSQ

SEQ ID NO: 242728 - protein, 414 aa, Zea mays
  Clone ID: MRT4577_152951C.1.pep
MATAAKARAPPAVTASKAAAAAVELEEHVHYKHTDACHQLRWTAKESYEYMYARPWSRVVDFYAELVRAGAGAAGLAKLFGNDEKDYTLYTAGENYLTPSEKPTTTTFSKGRGGRWERVTFKVVISYHGGSFDGWQKQPGLNTVQGLVEKHLGQFVDERKAKQLEARSLPIEGCAIVAGRTDKGVTALQQVCSFYTWRKDVKSGDIKGAINEAAPDKLKPLHVSEVSREFHPNFAAKWRRYMYIFPLDEDADLILGEAQSSKTLENSEHNIKPQSFDVSKVDEILKPLAGKTLSYKMFARDTQASRSVGPPTECFMFHSRAAVAKLHSANEDHKGGMVVMCVELVANRFLRKMVRVLVATAIREAAAGAGADALLNLMEATDRRATAPPAPPEGLCLVDVGYEDFDKQRCFIVD

SEQ ID NO: 242729 - protein, 154 aa, Zea mays
  Clone ID: MRT4577_152952C.1.pep
MLTKFRLLMATAAKARAPPAVTASKAAAAAVELEEHVHYKHTDACHQLRWTAKESYEYMYARPWSRVVDFYAELVRAGAGAAGLAKLFGNDEKDYTLYTAGENYLTPSEKPTTTTFSKGRGGRWERVTFKVVISYHGGSFDGWQKQPGLNTVQG

SEQ ID NO: 242730 - protein, 504 aa, Zea mays
  Clone ID: MRT4577_152953C.1.pep
MASTVLEATRAAHEDLERLERLAVRELQREPANPRDRLFQSHRVRHMLDLVVSTSGKLVEIYEDKDNARKDEINTHLTAPTQSGLFSKYYERLKEIREYHRRNPSARFVSTTDDYEELLKEEPVIEFTGEETFGRYLDLHELYNEFINSKFGTLMEYSAYVGCFSQTDKISHSHKATRKYREYLEHILEYLTSFLYRTEPLQDIDKIFLKLESEFEEQWANEGILGWGNKGTEKESEIDLDYYSTVEELVELGPEKLKQALAARGLKSGGTVQQRADRLFLLKVTPLEQLDRKHFAKVPHTKDGSNTAPNGNAFKEDMKKEIALMEVKMKRLCELLDEAFVRTKENAEKKLTLTYEEMEAEREEEEVQVDTESDDEEQQIYNPLKLPMGWDGKPIPYWLYKLHGLGQEFKCEICGNHSYWGRRAYERHFKEWRHQHGMRCLGIPNTKNFNEITSIEEAKALWEKIQARQGVNKWRPDLEEEYEDQEGNIYNKKTYTDLQRQGLI

SEQ ID NO: 242731 - protein, 55 aa, Zea mays
  Clone ID: MRT4577_152954C.1.pep
CTSYHSSGQVHKPLYVVLDYPLTDGCDLTSGLCRMILSPFLLIHLVILSDSCCSF

SEQ ID NO: 242732 - protein, 243 aa, Zea mays
  unsure (1)..(243): unsure at all Xaa locations
  Clone ID: MRT4577_152955C.1.pep
AARGLKSGGTVQQRADRLFLLKVTPLEQLDRKHFAKVPHTKDGSNTAPNGNAFKEDMKKEIALMEVKMKRLCELLDEVCSSLLPVVXLRLYSCNFERMVHSCKCTSMCSQSFCDHLGCVWLRDRQERDVLWXSSPVPPILRDKWGXIGIVMSQPLTLNQNNAPRQIVPKRXQCQRNKHTLXIPKIKSPNEXTPTKKPKAPGRKIQARQGVNKGAPDLEEEYEDQEGNIYNKNPSTDMEGQGXX

SEQ ID NO: 242733 - protein, 119 aa, Zea mays
  Clone ID: MRT4577_152956C.1.pep
MAACRSIMEEITKRAFAEGILLTKNWDTEPLFPLPESVVGMAGASDLSPFLSVSTPRKRVKSRWEPVVDDNVTNKVEQIAKGLISSNVHSTLDPRNRIPHPVRGSSRDRGKFLQSCRAS

SEQ ID NO: 242734 - protein, 204 aa, Zea mays
  unsure (1)..(204): unsure at all Xaa locations
  Clone ID: MRT4577_152957C.1.pep
MASTVLEATRAAHEDLERLERLAVSELQREPANPRDRLFQSHRVRHMLDLVVSTSGKLVEIYEDKDNARKDEINTHLTAPTQSGLFSKYYERLKEIREYHRRNPSARFVSTTDDYEELLKEEPVIEFTGEXFDSSCGILVVSMETFGRYLDLHELYNEFINSKFGTLMEYSAYVGCFSQTDKISHSHKATRKYREYLEHILEYL

SEQ ID NO: 242735 - protein, 52 aa, Zea mays
  Clone ID: MRT4577_152958C.1.pep
SRSVIKPAERTAPAATSTTRHPHGRTWVFSTHLTRTVSNHYVHACLAFACRL

SEQ ID NO: 242736 - protein, 103 aa, Zea mays
  unsure (1)..(103): unsure at all Xaa locations
  Clone ID: MRT4577_152959C.1.pep
MCGVLILLALVACVANAPICPQGSQAPIVSLFPPYLPSMIAEDCENPPFQLYRLQQAIAARNIPLSXLXFQQLSALSLVQPLVQTIRAQQLQQLVLPVINQVD

SEQ ID NO: 242737 - protein, 107 aa, Zea mays
  Clone ID: MRT4577_15295C.1.pep
LNSLGYPLFLNYLYFTSLTPSIPYLLSATIPTQSWWLQTHPINHSNALTSISTANGINVSTYFSQYKDSNISHHKCNQSSSTQSSDSLSTALYDISQIALFTLTHAF

SEQ ID NO: 242738 - protein, 78 aa, Zea mays
  Clone ID: MRT4577_152960C.1.pep
CTCAVKVLITFTISVLCTLDPLAYFILVHSINLIWPVPIFVSEHWLHYVIRRACGSLAVDARRRTLFYLCMLFQRTIC

SEQ ID NO: 242739 - protein, 198 aa, Zea mays
  Clone ID: MRT4577_152961C.1.pep
MELLLRATGLPSTAYNGPSWQQNQGGLSQRGPGAPGVPAGGVRPPLPPHLHSQTDGASRPGQPRSYMSGMDNHVVVQGNKDDKSGVNQSVQEVADPKKVEVEKQVLDSREKLEYYRTKMQDLVLYKSRCDNRLNEITERASSDKREVESLAKKYEEKYKQVAELASKLAVEEAAYRDVQERKVELNDALIKMVQGGKC

SEQ ID NO: 242740 - protein, 76 aa, Zea mays
  Clone ID: MRT4577_152962C.1.pep
YLAGLTPKTISLAGPIQLPHFQNLGVTLLNRLALQYSFSGLPNSDYSMFQKPSHETSTLTSDLDTPWNASPIATTM

SEQ ID NO: 242741 - protein, 88 aa, Zea mays
  Clone ID: MRT4577_152963C.1.pep
TTQANPFVSGALKEGCVETFYKAPPKRFLIFCGPTPKFWVSLGLLGKRPPIVILFLGANLFIAPLGCLSKRGFGVPRIGLPIPIILSV

SEQ ID NO: 242742 - protein, 147 aa, Zea mays
  Clone ID: MRT4577_152964C.1.pep
MKIKKSFNIIAMLSPKRTRFRKQHRGRMKGKSCRGNHICFGRYALQVLEPAWITARQIEAGRRAMTRYARRGGKIWVRIFPDKPVTIRPTETRMGSGKGSPEYWVAVVKPGRILYEMSGVSETVARAAISIAASKMPIRSQFLRLEI

SEQ ID NO: 242743 - protein, 119 aa, Zea mays
  unsure (1)..(119): unsure at all Xaa locations
  Clone ID: MRT4577_152965C.1.pep
KKGPPARGALAKPRGLGPPPPGIPWPGPTQPPKGAAKXNQPPRGRXARGSKQHAPPEGPXIIPIKAGWNPTPKPKLQVEKKPGPKRCPYASGAKNPLPRQGPPPQPGIPPHEEGPPGTG

SEQ ID NO: 242744 - protein, 340 aa, Zea mays
  unsure (1)..(340): unsure at all Xaa locations
  Clone ID: MRT4577_152966C.1.pep
MVREEITGSTQTLEWKCVESRVDSKRLYYGRFILSPLRKGQADTVGIALRRALLGEIEGTCITRAKFGNVPHEYSTIVGIEESIQEILLNLKEIVLRSNLYGVRDASICVKGPRYITAQDIILPPSVEIVDTTQPIANLREPVDFCIELQIKRDRAYHTELRKNSQDGSYPIDAVFMPVRNVNYSIFFFGNGNEKHEILFLEIWTNGSLTPKEALYEASRNLIDLFLPFLHTEEEGTSFEENKNRLTPPLLTFQKXRFTNLKKNKKGIPLNCIFIDQLELPSRTYNCLKRANIHTLLDLLSKTEEDLMQINSFRMEDGKLIWDTLEKHLPIDLPKNKFSL

SEQ ID NO: 242745 - protein, 62 aa, Zea mays
  unsure (1)..(62): unsure at all Xaa locations
  Clone ID: MRT4577_152967C.1.pep
SHLDQQELFSQNANSPPQSLIRIPCNLAESRTISCLLHXSAQQRNNRQSKHIQGKPXXLVQX

SEQ ID NO: 242746 - protein, 78 aa, Zea mays
  Clone ID: MRT4577_152968C.1.pep
RLPDWFFFFWSLGGGQIAEGSGVRTPNKIMLSNYPLGRALCFWYNWGERKYGPTCKVKQTCRCSDLWGKMGRERVKGG

SEQ ID NO: 242747 - protein, 91 aa, Zea mays
  unsure (1)..(91): unsure at all Xaa locations
  Clone ID: MRT4577_152969C.1.pep
FPVDHTSYYXMXTYLTKFIDXXQCIVTKKLGVANNXXXLINNXLNNISYYKVDYTNFFPFFSNINPNPXIPXNQLLFPLKASLLHILKESK

SEQ ID NO: 242748 - protein, 140 aa, Zea mays
  Clone ID: MRT4577_15296C.1.pep
GVPMEDVSKVRVDQAKVARARMKPLRVMETWSSWPPGGRSRIPWDWQVAPLVYFVSGEVKVIPPGAVPGDDYMPFVAGDLVRAPPWFKAPLYFAGPYEEPPRFLPPGAAPRLGHLPSKPLCLAPRGPPPRPGMRCNVPPE

SEQ ID NO: 242749 - protein, 104 aa, Zea mays
  Clone ID: MRT4577_152970C.1.pep
RAARVFHSYAPHSPNAGYILLHHLLLSSLERQHLAQFVAGAVSAEHSSMLVRASLLSIQAQLQRVLSPNIRIFICTYPYSALAPALPLRALAQALLESRTLRPG

SEQ ID NO: 242750 - protein, 69 aa, Zea mays
  Clone ID: MRT4577_152971C.1.pep
MAPASCGRSSQRVFHFGKGKSEGNKNMKELLGGKGANLAEMASIRLSVPPGFTGSTEACQQYQEVGAPF

SEQ ID NO: 242751 - protein, 137 aa, Zea mays
  unsure (1)..(137): unsure at all Xaa locations
  Clone ID: MRT4577_152972C.1.pep
RQPPSSPPPXSPSPMPHPXPPPPPLHPPXPTYPPLPPLTRAAAARPLHPTTNYPSPPSSFRPQGLRSYPSRDPSPSPPRPRPPRXCPRLPLPPSPRRLPAHLPPPRRRPRPLAPPGPCAPPXSPRPRSRPPPTTPST

SEQ ID NO: 242752 - protein, 195 aa, Zea mays
  Clone ID: MRT4577_152973C.1.pep
MAIAEGKKRRPALICCGVLVAVLVLLAVIFVTLYFTLFRPRSPKVVATAVGAEIFPKNNGGGAQDLNLTVHVDVTVNNPNYAAFRYGDVATVVRYHGEDVGLSVVPAGEIGPRETQTIAAAVEVDTGKVATIPYFWVEFPTGKLPFQTATEVAGKAVVLGTIKIRASSEVACDVTVQLLPPNATSECTSTVHIGR

SEQ ID NO: 242753 - protein, 102 aa, Zea mays
  Clone ID: MRT4577_152974C.1.pep
MVRYRVRSLSERSHEVYRQQLHGQEQGHHGQEEQGLSPEHVEVYERTHGQSHYRRRHCSRRRLHRIHRRQHRSCRRRKRRSCRHRRRHRRGCRTRKRTCRRH

SEQ ID NO: 242754 - protein, 65 aa, Zea mays
  Clone ID: MRT4577_152975C.1.pep
ILSLCYACSTRSTSEKELVREQVFVLGRMGNAKEPLSTIINKLEDINTYLASITASEVWSVYMKV

SEQ ID NO: 242755 - protein, 133 aa, Zea mays
  Clone ID: MRT4577_152976C.1.pep
THGSHTHSNTTSQVALVGADVCPIESLDYELIENDVFKQDWRARGRGHILRYVALKWALCFLVGALAAAAGFVANLGVENVAGAKFVVTSDLMLDGRHGSAFAVFLASNFALTMLAAVLTVYVAPAAVGSGIP

SEQ ID NO: 242756 - protein, 42 aa, Zea mays
  Clone ID: MRT4577_152977C.1.pep
FQLTRKYKVIHEKNGYVMIPNIENKSYGRCSYVNKIITSFIL

SEQ ID NO: 242757 - protein, 243 aa, Zea mays
  unsure (1)..(243): unsure at all Xaa locations
  Clone ID: MRT4577_152978C.1.pep
MPPSSQMVAILQLTLLLISCSLYSMLHSSSSSSPSSSSPSSAPSSLALLVLLVVSTCLSLLFASLRRLLRDTTAHRANHRAPAPSMEAEAAAAAAAVFPEKSVVSSSPLPQGEAAEDFTVGGSGTILSDSSECATTNDDDEDEGTEEEGSVSDDDDDESLIEISLVDGHYVGSEQAEQRRAYNCNYKKDLLADLLPDLLLDRRDFIFXHLVGKSARRTTALIEIDLAKAHSSATSSRMNMNRL

SEQ ID NO: 242758 - protein, 106 aa, Zea mays
  Clone ID: MRT4577_152979C.1.pep
VPRRAGSLKAAHASSFYLGHGGHDGLPQVSTIRRVCFCMRVRRQRNGLRVPCQRRKARTNRKSVQSEIRWATAAFREELDRGRRPEKQGNVARRRVLADARKLISD

SEQ ID NO: 242759 - protein, 91 aa, Zea mays
  Clone ID: MRT4577_15297C.1.pep
MGSFKGHVLPGTLFLAEGLWRAWSSAARHAADPSSLRVRAWSPAPVRRPAPLLELYAVAGGALADMCVQVLYSPPPPIFPGGQANPAHPPT

SEQ ID NO: 242760 - protein, 92 aa, Zea mays
  Clone ID: MRT4577_152980C.1.pep
VHGVTAVDDGDAERGERSHAYSKASDMMLHSVGHGHAQSVLSKVRIRYRIPDEQGAAEQICDSQIRTVAFACVPSDMRLTNSRLRLRSWQRW

SEQ ID NO: 242761 - protein, 170 aa, Zea mays
  unsure (1)..(170): unsure at all Xaa locations
  Clone ID: MRT4577_152981C.1.pep
FSFFGSSRPADDATPTDEDVLAEQNLVKEQASNNAVDPNVAVQIHGLRKTYPGTFSIGCCCKCSKSKPFHSVKGLWVNLEKDQLFCLLGPNGAGKTTTISCLTGITPITGGDGKXFIEAAFLFLCLKTTTSILIIHTKHLIAFIYGHSVRSTVGMSNIRRMIGVCPQVVL

SEQ ID NO: 242762 - protein, 172 aa, Zea mays
  Clone ID: MRT4577_152982C.1.pep
MACVQVITVLLFALALAKIDPSTCQMVQGRVFCVDCTHNYDLSDIKVSVRCDGVKKLALATTENDGSFKVDLPLDHTKPSSVKNCLAKLLGGPVQLYVSRENQVSQIIKGKEQNSYTISTPLSFRTSCPLNTKCKAGKKVGSSKTVDLPLPPEWGLAPSSYYVPFFPIIGIP

SEQ ID NO: 242763 - protein, 38 aa, Zea mays
  Clone ID: MRT4577_152983C.1.pep
PCQEELEVSLVRLLTSLMCKRKRRQSIKFFLLPKLGLQ

SEQ ID NO: 242764 - protein, 37 aa, Zea mays
  Clone ID: MRT4577_152984C.1.pep
YSLNFIHFELVLWIGECQVICFRFKMKPFPPREIRRF

SEQ ID NO: 242765 - protein, 83 aa, Zea mays
  Clone ID: MRT4577_152985C.1.pep
KYKKKKKKNGKCKILEKKKTTNKKKKGAPFKKSGLTFPFLQHHTFFIGPLNLIHSPKFYNLPTLKPLSFPNLIPFPHIPLFPT

SEQ ID NO: 242766 - protein, 50 aa, Zea mays
  unsure (1)..(50): unsure at all Xaa locations
  Clone ID: MRT4577_152986C.1.pep
RVFSQLIHDRIGTHADVTAPDMGTNAQTMAWLLDEYSTSHGHSPGXVTGK

SEQ ID NO: 242767 - protein, 36 aa, Zea mays
  unsure (1)..(36): unsure at all Xaa locations
  Clone ID: MRT4577_152987C.1.pep
XSPKRVYFVYKITSTCNKETLFYFLDHHETSDLPSI

SEQ ID NO: 242768 - protein, 65 aa, Zea mays
  Clone ID: MRT4577_152988C.1.pep
IYSIYNNLLLHNADRRYMCVVTISRQLRPLLDNVAHHATRQTLNLGTSTKHLIYCASFEKGSFLS

SEQ ID NO: 242769 - protein, 72 aa, Zea mays
  Clone ID: MRT4577_152989C.1.pep
GWVFIWGWGFYLFQLVSIYLMAPTKRKPYCVFQKKPKKAKSFDSASGPAHLIKNPNWHPCPKPAWSQRLGAP

SEQ ID NO: 242770 - protein, 122 aa, Zea mays
  Clone ID: MRT4577_15298C.1.pep
PTPAAGSAAPQPTRRPQAHNPRTGPPRHQGNPRAQLRVPAPINDGRIQPWGGPPQLRSPTNFEGRVHHQLSISNSPPRSSPTRSSQQRFKVSFPLRLSEALVKKTSSDESKTRKRKKKGGDK

SEQ ID NO: 242771 - protein, 101 aa, Zea mays
  Clone ID: MRT4577_152990C.1.pep
RAPGCFFFFFFSLFPKNGPLVALTPMSKTIAHNEPFIQQAPPGSKKNTTPDLNNWPNAPRGRTKRKSLWGSPPRGPPAWKRVLTILTEPPRARRGFCRPLV

SEQ ID NO: 242772 - protein, 632 aa, Zea mays
  unsure (1)..(632): unsure at all Xaa locations
  Clone ID: MRT4577_152991C.1.pep
MVLHQDGVVSVSFVIYVPFTVPEKKKKKKKKKKKKKRDWPRGRPGLVRGRETQGTHHHITGGASLQAGTRTDERGSPAGRSHNPSAALCLPPLRLSSRPASAFHSAARRCRVPTSSPPEFLVSGLDLSESERARMGGGNGETTQLGEPLLAKKAKAYRPRCPGCRVDRLNAEREGVFPLKDLFLIWLVTITCTLPIQSLFPFLYFMIRDLHIAKQTQDIGFYAGFVGASYMCGRAVSSTVWGIVADKYGRKPVIVLTLIAIXDPFFDKTVIFNTMFGLSSNYWMALITRCLLGIMCGYLGPIKAYATEVCRKEYNHLALAVVSSSRGIGLIIGPAIGGYLAQPADKYPSIFSQTSIFGRFPYFLPCLCISILAVIALIACIWFPETLHKHNGDAVDNSVETVEESLAGTDTEENGGGGCLKLFTNWPLMSAITLYCIFSLQDVAYAETFSLWAVSDRSFGGLSFTTTDVGNVLAMSGLFLFLYQMLIYPFLAKTVDHITLVRAVALLTLPVLASYPFFPSLSGFGLMVVVNCASFLKNTFSVTTITVFNILMNEAVTQDVRAAANGIAVTLMSISKAVAPAVAGIIFSWAQRRQTAAFLPGDHLVFFILNIFTFIGFVFTFRPFFVRGSAKH

SEQ ID NO: 242773 - protein, 68 aa, Zea mays
  Clone ID: MRT4577_152992C.1.pep
LIITLCPNLTLHYIFFIFTFTAPPSPPIISSSPVKHFTSLTLFSFLPFPLIYLTSYPLPPSQKLSPIL

SEQ ID NO: 242774 - protein, 48 aa, Zea mays
  unsure (1)..(48): unsure at all Xaa locations
  Clone ID: MRT4577_152993C.1.pep
SLLLPRLPVRYSNLVICLASSSHQFXDFLLSRHTARQNGRQGSIPCLP

SEQ ID NO: 242775 - protein, 75 aa, Zea mays
  Clone ID: MRT4577_152994C.1.pep
AGGRYICYAQVVNRPKEFPKLDRHLGLPGGAAPGPGQGFDVRPARFELCKGKLSRLMSSRGGCAYNPYYSVGFEV

SEQ ID NO: 242776 - protein, 125 aa, Zea mays
  Clone ID: MRT4577_152995C.1.pep
DPWGKIPWHSWISSYSLPCPPRPLHAPRRSVIVLAQHQQPYRGIYFLFGIRRFRLHVPRLRLLDGRRRLDGSLRQRQRQRQRQRQRQRQVVLVVQQDEAQGAIGVTAVHGEGDLLLPVAQLVPVV

SEQ ID NO: 242777 - protein, 165 aa, Zea mays
  unsure (1)..(165): unsure at all Xaa locations
  Clone ID: MRT4577_152996C.1.pep
KAEEKFYPVQSGKWGLLGWLTNKDTTPXIIDRFSQARAGLVDIHPSVXFQGLPLERQFLRIQGDELPRQTLSVYVSPPENLNPLVYVGRGVFKKPGCKVNIQTGKNEPPGKKGPPQDELVRFPKMFVREPRARIPKKKTSHPLLTKVASPNKDPHATQRVFFLIA

SEQ ID NO: 242778 - protein, 76 aa, Zea mays
  unsure (1)..(76): unsure at all Xaa locations
  Clone ID: MRT4577_152997C.1.pep
AFXVXGRVXSGRMLLEKQAQERSIDYNLGWFVEPVVRGDYPFSMRSWSRIGCPLHREEKEKLVGSYDIMGINYYTR

SEQ ID NO: 242779 - protein, 68 aa, Zea mays
  Clone ID: MRT4577_152998C.1.pep
VASLFRPPRVYPLTFRPPKCLQFLLDTHFFRETVIALFFPNFNTSPYKENWFPSRSRYGIFGCPPASV

SEQ ID NO: 242780 - protein, 84 aa, Zea mays
  Clone ID: MRT4577_152999C.1.pep
TYIYVCTGGACGYGNLYSAGDGASTAALSSTLFNDGAACGQCYQVQCDQQNSRWCKPGVVVTVTATNLCPADYSKPSNDGGWCN

SEQ ID NO: 242781 - protein, 70 aa, Zea mays
  unsure (1)..(70): unsure at all Xaa locations
  Clone ID: MRT4577_15299C.1.pep
GDFRSHLCXGIVYALLDRKEDADKQFDIYRSLVPDEFPDKSFISDVILAARMESHDRLQKEFESEFQTKK

SEQ ID NO: 242782 - protein, 121 aa, Zea mays
  Clone ID: MRT4577_1529C.1.pep
MASLPEEEEAFEHTLLVVREVSVFKIPPRTTSGGYKCGEWLQTDKIWTGRLRVVSCGDRCEIRLEDPGSGDLFAACFVLPGQRDSAVETVLDSSRYFVLRIEDGRGKHAFVGLGFGERNEA

SEQ ID NO: 242783 - protein, 49 aa, Zea mays
  Clone ID: MRT4577_152C.1.pep
YSYIGKINWDDGVASTSICFLINVVKQMLLSLGICHDDNILTWVKLTGL

SEQ ID NO: 242784 - protein, 75 aa, Zea mays
  Clone ID: MRT4577_153000C.1.pep
MARGPFSLQHQRHTSLYESDDNKESFKESEEEDKKGGHNGDKGNNGKDDIEGSSEGNNDRDGKGSSDVGGKVPPA

SEQ ID NO: 242785 - protein, 61 aa, Zea mays
  Clone ID: MRT4577_153001C.1.pep
MATAEVQTPTVVATEEATEAEPAAAEPEAAAAEEEPAAAEPAAEEPEKAEPAAEVAEKASE

SEQ ID NO: 242786 - protein, 72 aa, Zea mays
  Clone ID: MRT4577_153002C.1.pep
MGTAEVQTPTLVATEETPAVERPASPAVVPQEAETEPAAAAEPQAAPLEAEEETPKEAEPEPAAAGEVKEEA

SEQ ID NO: 242787 - protein, 122 aa, Zea mays
  Clone ID: MRT4577_153003C.1.pep
TVGASARDATGTPRAHAETSISRPAVRRRSARTAHGLTRWPSRPPQRPARPSRAPQRPAQPPRAPQQQQQPRAQRLPVLLLSRQRALPLPPSPLQPGSPPRRFLGRHNGRGLDLRTACTHGA

SEQ ID NO: 242788 - protein, 278 aa, Zea mays
  unsure (1)..(278): unsure at all Xaa locations
  Clone ID: MRT4577_153004C.1.pep
MPMEAPLAKPAFVAMAKEVPQHKGMAMSEPVPAKAAPAKAGVMAMDIADGHEDAEGMVGGGVKVAKEKVKEMVMSGGGSWEVVGISGMGGSGKTTLAMEVFRDHKVRAYFNDRIFFETISQSANLEAIKMKLWEQISGNMVLGTYNQIPEWQLKLGPRDRGPVLVILDDVWSLPQLEELIFKFPGCKTLVVSRFKFPTLVKQTYEMQLLDEAAALSVFCRAAFDQECVPQTGDKRLGRQVSXECRGLPLALKVIGASLRDQPPEIWLSAKNRLSRGEG

SEQ ID NO: 242789 - protein, 89 aa, Zea mays
  Clone ID: MRT4577_153005C.1.pep
VSIVLQFFVGYEWVLGLLGALNGGQEELPPSLAKSKVDTAPVFRCSLCKQCRAVCFWTAGQRRVDGMAFLTPIWHPRSQVSVCTTLKVS

SEQ ID NO: 242790 - protein, 76 aa, Zea mays
  Clone ID: MRT4577_153006C.1.pep
MATAEVQTPTVVATEEAPAGEVKEEAAAPAAETEAEPAAAEPEAAAAEEEPAAAEPAAEEPEKAEPAAEVAEKASE

SEQ ID NO: 242791 - protein, 793 aa, Zea mays
  unsure (1)..(793): unsure at all Xaa locations
  Clone ID: MRT4577_153007C.1.pep
MEAADRGIARWLERHAPAHVIGGVRRLRDEADARIGRLERRVEEIAAATAQPPPPALSVPVAPPPHKGVPMPMEAPLAKPAFVAMTKEVPQHKGMAMSEPVPAKAAPAKAGVMAMDIADGHEDAEGMVGGGVKVAKEKVKEMVMSGGGSWEVVGISGMGGSGKTTLAMEXGRAGSLSPPFHDSTQFLFVFRDHKVRAYFNDRIFFETISQSANLEAIKMKLWEQISGXGAGXYNQIPEWQLKLGPRDRGPVLVILDDVWSLPQLEELIFKFPGCKTLVVSRFKFPTLVKQTYEMQLLDEAAALSVFCRAAFDQECVPQTADKRLVRQVSAECRGLPLALKVIGASLRDQPPKIWLSAKNRLSRGEAISDCHETKLLERMAASVECLSEKVRDCFLDLGCFPEDKKIPLDVLINIWMEIHDLDEPDAFAILVELSNKNLLTLVNDAQNKAGDLYSSYHDYSVTQHDVLRDLALHMSGRDPLNKRRRLVMPRREETLPKDWQRNKDTPFEAQIVSIHTGEMKGSDWFQMSFPKAEVLILNFASSLYYLPPFIATMQNLKALVLINYGSSSAALDNLSAFTTLSGLRSLWLEKIRLPPLPKTTIPLRNLHKISLVLCELNSSLRGSTMDLSTTFPRLSNLTIDHCIDLKELPPSVCEIGSLETVSISNCHDLTELPYELGKLHCLSILRVYACPALWRLPASVCSLKRLKYLDISQCINLTDLPEELGHLTSLEKIDMRECSRLRSLPRSSSSLKSLGHVVCDEETALLWREAEQVIPDLRVQVAEECYNLDWLAD

SEQ ID NO: 242792 - protein, 203 aa, Zea mays
  unsure (1)..(203): unsure at all Xaa locations
  Clone ID: MRT4577_153008C.1.pep
APARATRLARHARAHAETSISRPAVRRRSARTAHGLTRWPSRPPQRPARPSRAPQRPAQPPRAPQQQAXQPRAQRLPVLLLSRQRALPLPPSPLQPPPAPAPAPPPLPSLPPLASLPPPPRGPPPRGPPRAQRRQLARSPPGQLAPPPWPRRRGQPPRARRRAEPGSPPPALPRSPRRSGSGHVPRQWPWVTIRRLMTTRPSG

SEQ ID NO: 242793 - protein, 77 aa, Zea mays
  Clone ID: MRT4577_153009C.1.pep
MATAEVQTPTGVATEEAPVGETPAPPDVVPEEAAPAAEAKEEEPAAAAEPEAAPVAAEEETPKEEETAKEPEPAAAE

SEQ ID NO: 242794 - protein, 129 aa, Zea mays
  Clone ID: MRT4577_15300C.1.pep
SINDPTTSMGYLVPVGRYVSDGLCLTRTCWTYKTSPERSLYMIFFAMSGTAKANMLWGLCLVRMIVATPDLLDADIIRTPLSVLTVQVSNGWAHNIKVYLHNGQGPTATVPFTRASINTPRYKMVARFS

SEQ ID NO: 242795 - protein, 354 aa, Zea mays
  Clone ID: MRT4577_153010C.1.pep
MKGVGGGAASPGDYVYFKSVVPLHKISIGSKLWRYYDFGPKVVPPLVCIPGIAGTADVYYKQIMSLCMKGYRVISIDVPQVWNHHEWIHSFEKFLDSMNIHHVHIYGTSLGGFLAQIFAEHRPRRVKSLVLSNTFLETHKFAAAMPWSPVVNWTPSFLLKRYLLTGIRDGPHEPFIADSVDFVVGQVETLSRDDLSSRLMLNVNVASVGSLMLPDSLITIMDTNDYSAVPQQLKEQLNERYPGARRAVLKTGGDFPFLSRPDEVNLYLQLHLRRVGVEPRSDLVQGFTRNGSAGSSKDQKDGGDSFDNSGGDNGHHGSGGSDHDRRHCASESHHSDEPIPTSTMLANTVLELVM

SEQ ID NO: 242796 - protein, 90 aa, Zea mays
  Clone ID: MRT4577_153011C.1.pep
LATRSCSHQPSDRHPWPLPRSRPRPSWRPKKRRWWRPQLRPPSCPRRLPPPPRPRWRSQLPRRRPSQLPPLNPKRPPWLRMKRRQMRKRR

SEQ ID NO: 242797 - protein, 170 aa, Zea mays
  Clone ID: MRT4577_153012C.1.pep
PAGSNFLWQEGEKSLNKQGIQETGSSWPAETTHNKKQVRQSEPSWPRSYHHQLARHRRPVSLSSVSVMGPMASADAPARQAAIFHGRRRGRHHVLANDFVPLVQGPTHVAEKEKAFPVLHRIGFCRLLQSFIEFELNRIVGPLVLSAFDQIESFFSRNMLRKKKKKKFAA

SEQ ID NO: 242798 - protein, 88 aa, Zea mays
  Clone ID: MRT4577_153013C.1.pep
GIPWDYIASGSNTRIHWRHTTTLIMVPVRLGLTTIANRTSTGENKLEARESKLKTGDLLGGKLSNTLGSVADNHMKSLHIMIKTQQHL

SEQ ID NO: 242799 - protein, 205 aa, Zea mays
  unsure (1)..(205): unsure at all Xaa locations
  Clone ID: MRT4577_153014C.1.pep
MATAEVQTPTVVATEEAPVVETPAPPAVVPEEAAPAAEAKVEEPAAAAEPEAAPVAAEEETPKEEETAKEPEPAAAEEVKEETAAPAAETEAEPAAAEPEAAAAEEPAAAEPEAAAAEEPEKAEPAAEVAXRPASEAVRRARTAAADSGSGDRWLSAWPGSLVARAPTWHGLAVQYNANATVSLHLSVCDSVCVVAIAVPGADCE

SEQ ID NO: 242800 - protein, 182 aa, Zea mays
  Clone ID: MRT4577_153015C.1.pep
DIDLPTRCPPPQCAYGARPHSLAFSATSAAGSAFSGSSAAAASGSAAAGSSAVTASGSAAAGSASVSAAGAAASSFTSSAAAGSGSASFAVSSSFGVSSSAATGAASGSAAAAGSVSAGAAGSSTLASAAGAASSGTAAGGAGVSTTGASSVATTVGVWTSAVAMGDDQKADDYTTEWLATS

SEQ ID NO: 242801 - protein, 99 aa, Zea mays
  unsure (1)..(99): unsure at all Xaa locations
  Clone ID: MRT4577_153016C.1.pep
QINTKPTIPLSFLXFFKYLPPPIPSNLLLTAITSLSXFPFILYHTYFIFSXIYHYYPNFTNAHISSFNXTIPIPTFILLLNSLILSFNSXFLIKPIFLK

SEQ ID NO: 242802 - protein, 87 aa, Zea mays
  Clone ID: MRT4577_153017C.1.pep
FGFPRVAAWPLVRPRLVPGLGSLVPAASVLAPPLRVVGAWVPFILFPCLRVCLIINNKTSFLLLTNKSKKKKKKKKKKACTCPGGRS

SEQ ID NO: 242803 - protein, 186 aa, Zea mays
  unsure (1)..(186): unsure at all Xaa locations
  Clone ID: MRT4577_153018C.1.pep
MGLLSNRVERSEIRPGDHIYTWRAVYAYSHHGIYVGGSKVVHFTRKKETESSDSSDFTSSLISGVPSECPTFPDCGFQLPSSGVVLTCLDCFVRSGSLYCFEYGVPSAVFLAKLRGGTCTTAESDPPEVVVHRAMYLLQXGFGNYDIFEXDCEDFALYCKTGLLPXEGXGIGTSGQASSAFGVPVA

SEQ ID NO: 242804 - protein, 51 aa, Zea mays
  Clone ID: MRT4577_153019C.1.pep
LLEIYQPHTTHFLIGIQLFRNIGMATTNDAVLVDRCVMAQSELVRFHLVCQ

SEQ ID NO: 242805 - protein, 247 aa, Zea mays
  unsure (1)..(247): unsure at all Xaa locations
  Clone ID: MRT4577_15301C.1.pep
QFQISPNLLLPDTLELKDVAVYRCSAWCLDPSLVPASRELWIVEPPFAVDGMSSGRRTLMYPIRITFSSAPRRDGSDPKLHAITSGGDGSGHVQQGSPPFSRPPHSSGRRGEHGHSGRLSVHERLGPRDENMQQRSISSGVAVSDLRRTLESDGGTLSPRLVEMTDDMVLVSPVKAKQLKVYFRQRFKNVLNQEEAGTPNSVTVLPPSTTDVAAADTDPSEYPVSDXDAVLATLSRTLTSLLSDVAA

SEQ ID NO: 242806 - protein, 73 aa, Zea mays
  Clone ID: MRT4577_153020C.1.pep
SLFTALTVQECVRAGERHFFYCPSPERVGEDRPFFAVSSPMIQTAQLMLLADFFFFCPPPWSKQWPLKAIVYM

SEQ ID NO: 242807 - protein, 55 aa, Zea mays
  Clone ID: MRT4577_153021C.1.pep
EFGCSFQVGWSLPHLQLVDTCSLLCIAIPINLQLPSLHIYLTAIYPSVIWILSDF

SEQ ID NO: 242808 - protein, 83 aa, Zea mays
  Clone ID: MRT4577_153022C.1.pep
VQDLSSSVIIGMTWLVIFRNTPPPPNYSGSSNAHCKPNISLMESRCIVCSVTSQSHTVTQLRWSDTTQDTAECNVKVSERSRT

SEQ ID NO: 242809 - protein, 88 aa, Zea mays
  Clone ID: MRT4577_153023C.1.pep
TNTLTKTRSIQCTIDAADLSSKNGASGRPVQKQQIILANMTCLLKPREHGIFHYEYSLTTEKISLSEGGNFFFLQYSFFFYKPQEQHP

SEQ ID NO: 242810 - protein, 112 aa, Zea mays
  unsure (1)..(112): unsure at all Xaa locations
  Clone ID: MRT4577_153024C.1.pep
MGTPSPTLCNSFTKLRNACIGHPRGIGFXTPRKGLHGRGSARVDKVSKRDISEYPAIMTANFAKLGEQVKPVKVARCDWNNVDGMDGRFEPHITIGPSIADALRPKTXDIPL

SEQ ID NO: 242811 - protein, 77 aa, Zea mays
  unsure (1)..(77): unsure at all Xaa locations
  Clone ID: MRT4577_153025C.1.pep
EHXRRSTEAENTQKDGEHKEGIVEKIKDKITGEHGEKSGEHKDKDHKEKKDKKKKKEKKHGEGHDHDGHSSSSSDSD

SEQ ID NO: 242812 - protein, 103 aa, Zea mays
  Clone ID: MRT4577_153026C.1.pep
PALNAPFLGSVCNQLGRSFFNLFYSLWHCGFLYVPYPFPPNRFPCFCFSPTLFGPLFLGVRPFLPVSSPFAFNQICARGRVSLFASPLGYLLWSVSSAPGIMG

SEQ ID NO: 242813 - protein, 88 aa, Zea mays
  Clone ID: MRT4577_153027C.1.pep
KNAISKAEHSVGSDRRAAPGGIVVRLRLQPCNSTTEASNLGRSLSSRFQHFSSRSNPNSHFNCPTNFKYRSVADQPTCLVQLFLKDFF

SEQ ID NO: 242814 - protein, 73 aa, Zea mays
  Clone ID: MRT4577_153028C.1.pep
CRIMTVSSLKMRSASMLREHLLLGDVGYPSSCCLPDGIKGLLIFFLGSVWNFAALHSRVPGVMDKPYVFCGLC

SEQ ID NO: 242815 - protein, 171 aa, Zea mays
  unsure (1)..(171): unsure at all Xaa locations
  Clone ID: MRT4577_153029C.1.pep
KTQVEFQLRVSFIEILKEEVRDLLDPTAATVGKAENGNGHAKLSVPGKPPVQIREASNGVITLAGSTEVHVTTQKEMAACLEQGSLSRATGSTNMNNQSXMRKIDPIMTADGMPIEEMNEDYLCAQLHLVDLAGSERAKRTGSDGLRFKEGVHINRGLLALGNVISALGDE

SEQ ID NO: 242816 - protein, 88 aa, Zea mays
  Clone ID: MRT4577_15302C.1.pep
PGGGGEEPNPNFIFKKNTGMPIPEPYNVYIQANMLTHWPSTFLIKDTFLNNPTTQNKPGLFHSPIDRATALSKRILKGMDLLDRRALH

SEQ ID NO: 242817 - protein, 105 aa, Zea mays
  Clone ID: MRT4577_153030C.1.pep
MAASTTAAAEALLLLLLALAAAADMWIVLYGERSDEEALPMHTEWMAGHGRTYNADCEEERRDQQYRDNLHYIDAHNAYDDAGVHYFRLGLNRLADLTNDQYRAT

SEQ ID NO: 242818 - protein, 309 aa, Zea mays
  Clone ID: MRT4577_153031C.1.pep
MTMEHGEDCCVKVAVHARPLIGDEKLQGCKDCVAVVPGKPQVQIGSHSFTFDHVYGSTGTPSAAMFDECVAPLVDGLFQGYNATVLAYGQTGSGKTYTMGTACKEGSHIGIIPRAMAALFDKIENLKTQVEFQLRVSFIEILKEEVRDLLDPTAGTVGKAENGNGHAKLSVPGKPPVQIREASNGVITLAGSTEVHVTTQKEMAACLEQGSLSRATGSTNMNNQSSRSHAIFTITLEQMRKIDPIMTADGMPIEEMNEDYLCAKLHLVDLAGSERAKRTGSDGLRFKEGVHINRGLLALGNVISALGDE

SEQ ID NO: 242819 - protein, 605 aa, Zea mays
  unsure (1)..(605): unsure at all Xaa locations
  Clone ID: MRT4577_153032C.1.pep
MTMEHGEDCCVKVAVHARPLIGDEKLQGCKDCVAVVPGKPQVQIGSHSFTFDHVYGSTGTPSAAMFDECVAPLVDGLFRGYNATVLAYGQSGSAKTYTTGTACQXGSHNEVIPRATAALVDTIENLKTQVEFQLRVSFIEILKEEVRDLLDPTAGTVGKAENGNGHAKLSVPGKPPVQIREASNGVITLAGSTEVHVTTQKEMAACLEQGSLSRATGSTNMNNQSSRSHAIFTITLEQMRKIDPIMTADGMPIEEMNEDYLCAKLHLVDLAGSERAKRTGSDGLRFKEGVHINRGLLALGNVISALGDEKKRKEGAHVPYRDSKLTRLLQDSLGGNSKTVMIACISPADINAEETLNTLKYANRARNIQNKPIVNRNPIADEMKRMRQQALGPPGPAGGVQHTRAPLVLLSNHIARDTIDSKYRPVQYCCTAWFRGTEMGKQKIVLKLPLDDERKRRKAFKAAVGMNGVTSATMEGDKITVVGDGVDPITLTTILRRSLGYAELLSVSSGDDKKKGDGYGYGSAGGMMYGGGGYGGGKEGKESKESSGGKSSGGGGGYGGHYQAMPSVSYPAAYQQYNAMPPYPAAYSYPAAYPQQEQDPGCSIM

SEQ ID NO: 242820 - protein, 120 aa, Zea mays
  Clone ID: MRT4577_153033C.1.pep
LRRVTVGPRDAFRAGGQRGCSVPGAWCHSSSPERGDVRVQMGDQMLILFPQETDCELLVDAGYYSGCNTSSYVSSFDDSRTGDTLHRLTAHLFVAATRPFSVPTTSSSEGPSAGACVAGR

SEQ ID NO: 242821 - protein, 81 aa, Zea mays
  unsure (1)..(81): unsure at all Xaa locations
  Clone ID: MRT4577_153034C.1.pep
MHERLLLSALPHHVAMYMKEDINEHSFNNFQMKIGLNMGPVVACVIGARKPQYDIWXDTVNVSSRMDSTGVPDRFQXTTDL

SEQ ID NO: 242822 - protein, 150 aa, Zea mays
  Clone ID: MRT4577_153035C.1.pep
GTSRPAGHRHTDSLETNPEYLKNDASDSGNVTDLKDMQVGVGRRFRGLKLWMVMRTYGAAKLQEHIRSDVAMAKMFEDAVRSDNRFEVVVPRNFALVCFRIKPHGGGIMTEEDADEVNRELMERLNRTGKVYLTNTEVGDRFVLRFNDGK

SEQ ID NO: 242823 - protein, 82 aa, Zea mays
  Clone ID: MRT4577_153036C.1.pep
RSTVAHKLIHRSCNNNYGMDDPSSKGSGVRTSISPRHRLSAENQRTQVNNTVHRHVVTYRTPRPHLGPRWPQAYTTCIKLRV

SEQ ID NO: 242824 - protein, 106 aa, Zea mays
  Clone ID: MRT4577_153037C.1.pep
FIHRFVSLATLGFVSVALAFLSSYLSPGPSGLRISRLRREGETIRWRRRLEPGCDMSNAGVALPILSGRATGTKATRLTKCNVGRDDQGDRLYPCVDIDIHTHMQD

SEQ ID NO: 242825 - protein, 72 aa, Zea mays
  Clone ID: MRT4577_153038C.1.pep
CSIKSLVSKFIPNVIGKGIRSSTSRIYPLSGVFIRTVMILRAPRFDLGKLRRVLGDNKEYVGIKLERPSQGD

SEQ ID NO: 242826 - protein, 79 aa, Zea mays
  Clone ID: MRT4577_153039C.1.pep
KKKKKKKKKKKKKKKKKQNYGHLHDKKINVLLLPPYINFLFLHLQPIYFLIPLHLPHLIILLSLTLFNLPYFINLFPPT

SEQ ID NO: 242827 - protein, 112 aa, Zea mays
  unsure (1)..(112): unsure at all Xaa locations
  Clone ID: MRT4577_15303C.1.pep
MLTNILCMSDPTSVTLLISHRFIPGTASLLHYRXYQITTHLMIRSMKFKSLLRQISHYFYSDLHYXTAQGSPLQELDEYYLSLLFKDTXLRTIHIMRSTVMLPRDPGLSAAC

SEQ ID NO: 242828 - protein, 236 aa, Zea mays
  unsure (1)..(236): unsure at all Xaa locations
  Clone ID: MRT4577_153040C.1.pep
LLFAYAANGLHEKAHAIYMXYXREGLKPTLETYTALLDTLRRAGDTEKLXETXXKTMVDEKFGGTRVIFHMVIDCLAKHGLYLQVRDVIYEFGKMGLKPTVMTYNILMNAYGRGGQHYKLPQLLKEMTALELKPDSITYCTMIYAYARVRDFSRAFYYHKQMVRNGQIPDPRSYKKLLNTLDVKAARKNIKDKSAIQGIIKGKSGLKPRKEKKDEFWKNRKKQSMLNHGHQRKEFL

SEQ ID NO: 242829 - protein, 90 aa, Zea mays
  Clone ID: MRT4577_153041C.1.pep
TKHKRTKTERIRYRTAADKLNTQRLPCPKPTWKQWPGAPFTFILSIHKQKGWFATKGHWLRPSGGRHKNRGVLGFEHVADQVDDPVDGAK

SEQ ID NO: 242830 - protein, 115 aa, Zea mays
  Clone ID: MRT4577_153042C.1.pep
DPDDGAGDESTSFSELDLIGDPADTDLVLFIPFSDDVTELLTINLPVWNRLTNGILSPALVTKGICAKKGTMIKPSALRVFDAHDFLTILDLYMAKGYYMSLIKGNHKHKIPKSS

SEQ ID NO: 242831 - protein, 52 aa, Zea mays
  Clone ID: MRT4577_153043C.1.pep
RDDEDVYFDDEWGEVVISYLRLGNHQESGWLFTNFNWFACDEDKALNDGLGC

SEQ ID NO: 242832 - protein, 103 aa, Zea mays
  unsure (1)..(103): unsure at all Xaa locations
  Clone ID: MRT4577_153044C.1.pep
ETTHAAGNQPRKDERGSPEGKXTSGEEDATRSSHGDDKGDKAQSGDTDRQERDRXSTSADDRRAGGAPGGNDDTRHXTXENXERRTREXKDHTDANNGNQGGN

SEQ ID NO: 242833 - protein, 243 aa, Zea mays
  unsure (1)..(243): unsure at all Xaa locations
  Clone ID: MRT4577_153045C.1.pep
MYRASNFIPDPNQVLLDAKPLRSLAPMFPAPMGVNVNQSSTPPLVCVTPVGQFSAGFGAGTSANGAIDATPISAYKTRSNISLDGDDDPYSGNQTERKPRRGRPPGSGRDGSNGKLKRPKPTYKNFVAGKELAFLAASSDPRDIVEAVHMTFEALRRRHLQMDETQDASRRADLKAGAIMMASNIRANSGKRVGTVPGVEIGDIFYFRMELCVIGLHAPSMGGIDYMTSKFGNDXDPVAICIV

SEQ ID NO: 242834 - protein, 101 aa, Zea mays
  unsure (1)..(101): unsure at all Xaa locations
  Clone ID: MRT4577_153046C.1.pep
SPXRXVXXXADXRXXVXXXDXXXSRDASRXAXRRSSLPVNRYRTPRGRVAKSVKHNNVIPNGHFKKHWQNYVKHGQPAAATESACRXELEYPAMCPSMSCT

SEQ ID NO: 242835 - protein, 239 aa, Zea mays
  Clone ID: MRT4577_153047C.1.pep
MYRASNFIPDPNQVLLDAKPLRSLAPMFPAPMGVNVNQSSTPPLVCVTPVGQFSAGFGAGNLPAFGSFTTFSATSNGVSYAGTSANGAIDATPISAYKTRSNISLDGDDDPYSGNQTERKPRRGRPPGSGHDGSNGKLKRPKPTYKNFVAGKELAFLAASSDPRDIVEAVHMTFEALRRRHLQMDETQDASRRADLKAGAIMMASNIRANSGKRVGTVPGVEIGDIFYFRMELCVIGWM

SEQ ID NO: 242836 - protein, 59 aa, Zea mays
  Clone ID: MRT4577_153048C.1.pep
GCTIFLFYFFLNRVGFFTPSKDIPGTCHNIGLMGPCTQERKFKKKKKRLTGEKKSNAFF

SEQ ID NO: 242837 - protein, 60 aa, Zea mays
  Clone ID: MRT4577_153049C.1.pep
PLVQAQDPTDSTQEGKETNCAPSSRAMSCRLILSVSFSWLRTHCHLIVEYVMNSLSDPAG

SEQ ID NO: 242838 - protein, 237 aa, Zea mays
  unsure (1)..(237): unsure at all Xaa locations
  Clone ID: MRT4577_15304C.1.pep
MTEMVSSMVVQETVSQILSGLVHSYEGKEDSNPNDNLERLEMAHIKLEAALETCSKWHVTDLSLLRFWRKKLKRAAKECDDTLYKYKKMILEDEQMEQEARNYNIKLFTETSTHRFXWLVPFATEEHRIEACLVFIKKDRNXXEDEFFFSVILQLSEXTDIVGIAVKCXLQLFPHHFQPTVDTIKKELTQLTTQDFSWVPYVDLWHRKHWDNPXRFSTQWSPPDPLCCKQHDQQHLQ

SEQ ID NO: 242839 - protein, 37 aa, Zea mays
  Clone ID: MRT4577_153050C.1.pep
ALSFFFFLDALRHGLLHKFVSTPRADQRGFGVIHGSR

SEQ ID NO: 242840 - protein, 58 aa, Zea mays
  Clone ID: MRT4577_153051C.1.pep
YSGLIGLGRQILELSTYHIYRKFLGLVRSVFLIREMLILNFHCNWDNIFALENGIYTA

SEQ ID NO: 242841 - protein, 76 aa, Zea mays
  Clone ID: MRT4577_153052C.1.pep
SNYPLPSNLITLFYSPLTTIKRPSFKTFSIGKTPSSPNLSTFHTISISLSTLSSNTPFPISFPNTTPTLSPIITPP

SEQ ID NO: 242842 - protein, 81 aa, Zea mays
  Clone ID: MRT4577_153053C.1.pep
NPARRTHPHNTTHLLTLILPFQRLITWHAPLYNKTAPPYHTSTLHHLHYPPLLPCLTLLLHQPLPHSLQPLYHHAQAHPTL

SEQ ID NO: 242843 - protein, 39 aa, Zea mays
  Clone ID: MRT4577_153054C.1.pep
RRTGASFQQAQEEFSQGIFSNRSFHRAASCAAQEAFQGN

SEQ ID NO: 242844 - protein, 37 aa, Zea mays
  Clone ID: MRT4577_153055C.1.pep
KKKKKKKKKKKKKKKKKKKKKKKKKKKKNFTLDRNPP

SEQ ID NO: 242845 - protein, 118 aa, Zea mays
  Clone ID: MRT4577_153056C.1.pep
MGYGTLDNGDWLMVGMSIFSKDRSVELRMQDDGKLAIYYNNRCAWQSTDQQISNAKGAIMQGDGNFCIYDKNGKATWHTNTAAPKGDNKTFVAVQDDGNLVLYRDGGATPIWSSKSNK

SEQ ID NO: 242846 - protein, 62 aa, Zea mays
  Clone ID: MRT4577_153057C.1.pep
PRGPFFFKKTQWWAKDSNPAPFFRANDPLKFVLGPPKFMGFPKLYPFLGSMLAPPVFEPVFF

SEQ ID NO: 242847 - protein, 76 aa, Zea mays
  Clone ID: MRT4577_153058C.1.pep
SFNTQERVKAIRQAMCWAANVAPAGRGQERAAVSLGSRRPSPAARSQGTQETSAHTHTGTLPSCHLFCCPKWLLAP

SEQ ID NO: 242848 - protein, 232 aa, Zea mays
  Clone ID: MRT4577_153059C.1.pep
VIKSIIIHALAKPKHHPTGTLPFVRRFTAKEVEAATRGFTAVLDAAGTAYRARFAGGLVATVVRRRRDADAADADDDHRQGEGGGGGTTDAFYLELQLLARLNHRHVVRLRGFALAHHARFLVFDHMENRSLKECLHDPLRTPLDWRTRLQVAIDVAAALEYLYYHCDPPVFHVSVNSGTVLMDANFVAKLSDVGVVSHDVRLATTDSFQGTGSSGGGRAWRSSTACWCWSW

SEQ ID NO: 242849 - protein, 524 aa, Zea mays
  Clone ID: MRT4577_15305C.1.pep
LLENVRFYKEEEKNDPEFAQKLASLADLYVNDAFGTAHRAHASTEGVTKVPPTSLSLAARAATRAAAAAAAPLRRGGLATACQPARSLAFAAGDARLAVHVASRCRQAFSGRGTRAMATMAKKSVGELTEADLEGKRVFVRADLNVPLDENQNITDDTRIRAAIPTIQYILSKGAKVILSSHLGRPKGFTPKFSLAPLVGRLSELLGIQVQKADDVIGPEVEKLVAALPNGGVLLLENVRFYKEEEKNDPEFAQKLASLADLYVNDAFGTAHRAHASTEGVTKFLQPSVAGFLLQKELDYLVGAVSSPKRPFAAIVGGSKVSSKIGVIESLLEKCDILLLGGGMIFTFYKAQGLPVGASLVEEDKLELATSLLAKAKEKGVSLMLPTDVVIADKFAPDANSQIVPASAIPDGWMGLDIGPDSVASFNAALDTTKTVIWNGPMGVFEFDKFAVGTEAVAKKLAELSGKGVTTIIGGGDSVAAVEKVGVADVMSHISTGGGASLELLEGKELPGVVALNEAATVTV

SEQ ID NO: 242850 - protein, 407 aa, Zea mays
  Clone ID: MRT4577_153060C.1.pep
MGCCLHRRLCLGGTGTLPFVRRFTPKEVEAATRGFTAVLDAAGTAYRARFAGGLVATVVRRRRDADDDHHRQGEGGGGGTTDAFYLELQLLARLNHRHVVRLRGFALAHHARFLVFDHMENRSLKECLHDPLRTPLDWRTRLQVAIDVAAALEYLYYHCDPPVFHVSVNSGTVLMDANFVAKLSDVGVVSHDVRLATTDSFQGLSIRSPTPPTPHDVAALTYLLAALFARLCLCCACRPGRAEAGGPGVPVRRAGAGAGDGAVPGRRRRARALGAGPRLRRLRAPDGGRRPRRRLRRPRAPRPRRRRQALHQGQGRQGRGRWRRHHSADRQVPPGEAGADRMPGQVRMMMMTVMVRLRCVRGRSAYHHRLCSSLTACLYHQMYKSAWLFFCGCPESVGVDQSIEEPK

SEQ ID NO: 242851 - protein, 187 aa, Zea mays
  Clone ID: MRT4577_153061C.1.pep
MDGVSTEPRHPLLQAVLDGDLRLLKEMAGVVAADVGVWARALTVAVMEGRLDICRCLVEDHGVDVNQRTFTGDTPLAISATYGTPAITRYLLDRGADPTLAGALWPPLHAAASFGQCEIVELLLSTGIDVDHFDSEYGTALHVAATNAQDGSMNILLQHRADPNKVYRLDSTPLRLAMISESLECVK

SEQ ID NO: 242852 - protein, 101 aa, Zea mays
  Clone ID: MRT4577_153062C.1.pep
KKVYVPPNPLNKRVGAPPWGKLGAKLPKPPKSRAEKIRGPMGGPPKPAPPGDKAPSPGLEAPRGGCGQKSSHPGPAGYFWQAKALSKTRWGSGFPKGYPLN

SEQ ID NO: 242853 - protein, 176 aa, Zea mays
  unsure (1)..(176): unsure at all Xaa locations
  Clone ID: MRT4577_153063C.1.pep
LCRKFXPLSPWSXRPEGTKXXFLFIYLLFFFFSFLFIFFFFFFFFFLGNVPRPAAKRGGTRARGATCGKKGAAHKGTQNREPRKRYTQKTWGPQKRDQKHRNQKEQTKNREEKKTNRPAPKRKTPTRKERKQKPRAPGGKLGQRHPGKRRPKRGSGIRPLRGGNPGTHKRGGERGN

SEQ ID NO: 242854 - protein, 81 aa, Zea mays
  Clone ID: MRT4577_153064C.1.pep
ITMDRSIFHGSSGHHTTVTTTNAGAPVWNDNEALTVGPRGPILLEDYHLIEKVAHFAREHIPERLVHAHSAFTKDYFKCTH

SEQ ID NO: 242855 - protein, 87 aa, Zea mays
  Clone ID: MRT4577_153065C.1.pep
TTSLHRSRRLHQRICHIWIHDGDSYNVLVNGMNGLYMVSTLLIFVGGGGGIPINPFLALWKKGDAFLVNDLMVPYYVTLYICFHLQN

SEQ ID NO: 242856 - protein, 264 aa, Zea mays
  unsure (1)..(264): unsure at all Xaa locations
  Clone ID: MRT4577_153067C.1.pep
MERLSTNQLYSSGVPVTVPTSLPCIPVSLDESFPRLPDAQSVLMERELRSTPLPPHQTTVAPIRGLFHSNTGSVGPLCSPPSVRFSSHSNPEQYPNHNSYNSQVPSTASSSTLNYGSQYGGFEPSITDFPRDIEPTWCPDPVESILGYSGDVPAGNNLTGTTSIGASDDLTKQTEWWTEFMNEDWKDMVDNPTSTETQPVGQPVQSSNSVHQSATQQTVSSQSVEXVGSCTSPTAGSNTGKXRMRWTPELHERFVDVFIIPCLY

SEQ ID NO: 242857 - protein, 62 aa, Zea mays
  unsure (1)..(62): unsure at all Xaa locations
  Clone ID: MRT4577_153068C.1.pep
IKSYLILYRNYNXFYQSLINXFNXLRYPKLRHTELERNGTTTKQPEXAPSMGAQXPTXLRLS

SEQ ID NO: 242858 - protein, 67 aa, Zea mays
  Clone ID: MRT4577_153069C.1.pep
LIQAKKWLALGHKNLGGAQKTGNFEGINVWGHRRAGNEIRPTGEDWLFSSHDFGPPHIRGGHNLPDI

SEQ ID NO: 242859 - protein, 51 aa, Zea mays
  Clone ID: MRT4577_15306C.1.pep
HQGPLLFHSPRTHVSLLVTALNTPFHSLNQDHGDHLGRLLTSPWSTHSVST

SEQ ID NO: 242860 - protein, 61 aa, Zea mays
  Clone ID: MRT4577_153070C.1.pep
IHKKIVFLPLVYYLDNVYNQSNLYKVPCSIDFKKVLMYHDVDKKFTSVRHSQEAEAASNYL

SEQ ID NO: 242861 - protein, 40 aa, Zea mays
  Clone ID: MRT4577_153071C.1.pep
VASCDRGEFWEGMRASSGLCEDKRRRGSTATGLGYRVAAV

SEQ ID NO: 242862 - protein, 73 aa, Zea mays
  Clone ID: MRT4577_153072C.1.pep
LRNMTVIGQCMFLSRMNLPRRQETGTSGLGAGLLAPSRLSRWALAPSWGVALVCRGCWALGSCLRPTAGRLDE

SEQ ID NO: 242863 - protein, 47 aa, Zea mays
  Clone ID: MRT4577_153073C.1.pep
SESHAVDLVKDVFASATDRDIYTGDKLKLVVIHSFGTHRECIELRKD

SEQ ID NO: 242864 - protein, 69 aa, Zea mays
  Clone ID: MRT4577_153074C.1.pep
GRQGWPESAVGYMYVHRHWKAGVCRGIYMLTTHVPTLNLGLDGESVQGSSVSLQDNTCDHKERVNGQTK

SEQ ID NO: 242865 - protein, 109 aa, Zea mays
  unsure (1)..(109): unsure at all Xaa locations
  Clone ID: MRT4577_153075C.1.pep
NSARGACRTGQPYILQTNAFTGGMGDRXQRIXRWMDPSKEYHSYXGLWSLYMIVFLMGEVTTPIVQRDRAPTCDERCPLSRPKKLYSKLWNADDWASRRGRXKTDWTNA

SEQ ID NO: 242866 - protein, 57 aa, Zea mays
  Clone ID: MRT4577_153076C.1.pep
GKDSSKPYFKENEWVLAYHCHVLYEANVHRIEDHEYEWHYFGHYLSWNKNWDECLAN

SEQ ID NO: 242867 - protein, 78 aa, Zea mays
  Clone ID: MRT4577_153077C.1.pep
FLEYVICKVLTMNRNQTCLSFILFFINKLWATIFCGKESCCVLVFYFLQVAIFPRVHPTKRFRTYLESMNHRDLCLFL

SEQ ID NO: 242868 - protein, 84 aa, Zea mays
  Clone ID: MRT4577_153078C.1.pep
RAHVSSWPSVNRLSCTATKEKSACHRRRRGLRHILRPFVAAAVSVFVDHERAGGGGHVRASRSPSPDESRPPRSTTGCPASCDS

SEQ ID NO: 242869 - protein, 68 aa, Zea mays
  Clone ID: MRT4577_153079C.1.pep
RSFVHSSPSTCTIYTHTVNYTVIFLTTSLHTKTHVKPILIDFLHIPFYLNAIIKNNPLPISLHNILTS

SEQ ID NO: 242870 - protein, 132 aa, Zea mays
  unsure (1)..(132): unsure at all Xaa locations
  Clone ID: MRT4577_15307C.1.pep
MALSDLVLLRWLRDSRHSRKLILFIVFLALLLDNMLLTVVVPIIPSYLYSIKHEKNTTEIHTARPALTASTCESFHSIFSYYDNSTACTANATXGLPGGDAPKATTTQHTATNTTXPPDCPGEDNDLLNETA

SEQ ID NO: 242871 - protein, 67 aa, Zea mays
  Clone ID: MRT4577_153080C.1.pep
LPSHIGSRFLTPASFSSITCCNCFIHLIGSMISVFMISSYLICKFCRLKGSNSILLALISNSCAHAS

SEQ ID NO: 242872 - protein, 55 aa, Zea mays
  Clone ID: MRT4577_153081C.1.pep
IPAEYTPLEFLVLRCLTYVRWYSGLPSKFHICVTRPQAGHSTQSPISTVQQFLMS

SEQ ID NO: 242873 - protein, 306 aa, Zea mays
  Clone ID: MRT4577_153082C.1.pep
MAAYFNHSSSYPPPPPPPGTSPYGAYRHAYPPAPAPPAAYGAYYDRAEQALPARDEVRTLFIAGLPADAKPREVYNLFRDFPGYVSSHLRTGKSSQAYAFAVFADQQSALAALSATNGMVFDLEKNCSLHVDLAKSNSRSKRLRSDDTSPYSPEKRNRKPRGFPDSGAGSNIYISGMGSTSHSLSGYPSAQSYTSLESSTSLSKDPSTFAPQNNPPCPTLFVANLAPACSEQELIDVFSSCAGFVKLKMQNKLGAPVAFVDFKDAISSTEAINRLQGVILYSSSGEGMRLEYAKSRMGLRKRDKHP

SEQ ID NO: 242874 - protein, 145 aa, Zea mays
  Clone ID: MRT4577_153083C.1.pep
PTKCYISNFISSMKCLFTHIAENSYKALILHIFGTLCALSGAGSNIYISGMGSTSHSLSGYPSAQSYTSLESSASLSKDPSTFAPQNNPPCPTLFVANLAPACSEQQLIDVFSSCAGFVKLKMQNKLGAPVAFVDFKADMGKMIS

SEQ ID NO: 242875 - protein, 202 aa, Zea mays
  Clone ID: MRT4577_153084C.1.pep
MAAYFNHSSYYPTPPPPPGTAPYGAYRHAYPSGPAPPAGYGAYYDRAEQALPARDEVRTLFMAGLPADAKPSEVYNLLRDFPGYVSSHLRTGKSSQAYAFAVFADQQSALAALSATNGMVFDLEKNCSLHVDLAKSNSRSKRLRSDDTSPYSPEKRNRKPRGFPDSMTQVAFWAEWHERNHLYFHTTKILVLTAYGRSTTIT

SEQ ID NO: 242876 - protein, 208 aa, Zea mays
  Clone ID: MRT4577_153085C.1.pep
MLLAVEGGGFFSSSATGYSHGLALLLLGRKAEEKPVKVSPWNQYRLVDREAEQVYHLPSAKDQAPGKCAPFVCFGCTANGLEVASPSKAVSSNALGRGTSQEEASCSAHKALTTSASISGSERRGCLKSNSKRDSLEHRIVVSEGEEPRESLEEVQTLRSSIERRKVQWTDTCGKDLFEIREFETSDESLSDDDPENEGFRKCECVIQ

SEQ ID NO: 242877 - protein, 65 aa, Zea mays
  Clone ID: MRT4577_153086C.1.pep
SDNLITLQSTYRMFYYSLKNITPSISSMICDVLLLATKHYSLRSSTILDVLLLYKTLLHLFIYHL

SEQ ID NO: 242878 - protein, 109 aa, Zea mays
  Clone ID: MRT4577_153087C.1.pep
MEVSDMELNETSVEIIWIFMVVEKMVMRYLIISDGVTRSDVKCLSRFQMIELVYKNGVEQSCNHGEDGNEYKLEMLKLRVNMNKMELGEILEAEIYQLCFAFVGQGAYR

SEQ ID NO: 242879 - protein, 208 aa, Zea mays
  Clone ID: MRT4577_153088C.1.pep
MLLAVEGGGFFSSSASGYSHGLALLLLGRKAEEKPVKASPWNQYRLVDREAEQVYHLPSAKDQAPGKCAPFVCFGCTANGLEVASPSKAVSSNALGRGTSQEEASCSAHKALTTSASISGSERRGCLKSNSKRDSLEHRIVVSEGEEPRESVEEVQTLRSSIERRKVQWTDTCGKELFEIREFETSDEGLSDDDAENDGFRKCECVIQ

SEQ ID NO: 242880 - protein, 93 aa, Zea mays
  Clone ID: MRT4577_153089C.1.pep
HASGTLSALGAWPLLLLAATCNARLRVSRPPPPLNIIVLIGLVLLISTDEQQASKSSSINSSCTRRGLLNSNNAYSFFQKKKKKNKNGTVTKK

SEQ ID NO: 242881 - protein, 80 aa, Zea mays
  Clone ID: MRT4577_15308C.1.pep
WGPLWVQCDTEFWLPEWRRRALGGSGGPPRTSCGPYRSTPKGSLLPASPKKCPPFRIGKGHASHLSPEKIGTQSPWHWFA

SEQ ID NO: 242882 - protein, 186 aa, Zea mays
  Clone ID: MRT4577_153090C.1.pep
MLLAVEGGGFFSSSATGYSHGLALLLLGRKAEEKPVKVSPWNQYRLVDRETEQVYHLPSAKDQAPGKCAPFVCFGCTANGLEVASPPKATSSNALGTGTSQEEASCSANKTLTTSGSISGSERRGCLKSNSKRDSLEHRIVVSEGEEPPRAAGVRHALRSSMERRKVQWTDTCGKDLFEIREFETR

SEQ ID NO: 242883 - protein, 122 aa, Zea mays
  Clone ID: MRT4577_153091C.1.pep
MAASHGYYTRLQRRQGKMDPSSKFLLDEIEKKFTALDLKWEQHFLDFNCTKEERLVALEQSSIDLEQWRPKVEASLEDVKLELCKMNKQWDQTMLDWATADQGILGIPEPCFGLHRQHTPAF

SEQ ID NO: 242884 - protein, 51 aa, Zea mays
  Clone ID: MRT4577_153092C.1.pep
IAAYRAKGKSEAGKKGPGRPTGSKKKNEPEDEEEEEEEEDEDEEEEDEDEE

SEQ ID NO: 242885 - protein, 100 aa, Zea mays
  Clone ID: MRT4577_153093C.1.pep
TAVVLAVSGHFSWVISVNQYDNNVGLCLIFPMSTYALDWELYFKRYRCLNPGMSLSKRQKKTDYRVHLVDCFGLIRCWNLIINCVPNFWGILCRCLWSLC

SEQ ID NO: 242886 - protein, 124 aa, Zea mays
  unsure (1)..(124): unsure at all Xaa locations
  Clone ID: MRT4577_153094C.1.pep
MEVAMAMAVKVLLSLCCVGACGLAVYLYHILWLVPQKVLAKFEDQKIGGPRPSFPYGNLADMRERRXPLRRLRARRHAVAAAAAAVAAASCTTTARRCCPTTRNGGKSTVPYSLTPWGTSYSFT

SEQ ID NO: 242887 - protein, 68 aa, Zea mays
  Clone ID: MRT4577_153095C.1.pep
LLARANHVRAHGLRSSSSLGQGPGHRAPATLVRLHGGATQHNGAPRWSARRLTRGGSLNKRVHGVAPS

SEQ ID NO: 242888 - protein, 61 aa, Zea mays
  Clone ID: MRT4577_153099C.1.pep
IHGHCAYSTTMRAKGHTRTATQEACQKKGCRRGTKKKPATNKLKKKKGPQGGKKKRAHPPV

SEQ ID NO: 242889 - protein, 37 aa, Zea mays
  Clone ID: MRT4577_15309C.1.pep
HHHTPFCIMEMKSQNTLIGTLKNTVKCNYSINNYSDF

SEQ ID NO: 242890 - protein, 82 aa, Zea mays
  Clone ID: MRT4577_1530C.1.pep
MATKEHAVDVGGRWWSSRFVRAERERGRGSWAEGANGRGEVGEQGAGLKRGAGARTWTKKARSWVRPRRGDRGRKGFQFKFN

SEQ ID NO: 242891 - protein, 63 aa, Zea mays
  Clone ID: MRT4577_153100C.1.pep
ARHFCLVPGHLFFFLHPAHSWFFFWCTGFWHFQLGFCPRGANKTELAGTSFCFLHARPSHVSF

SEQ ID NO: 242892 - protein, 175 aa, Zea mays
  unsure (1)..(175): unsure at all Xaa locations
  Clone ID: MRT4577_153101C.1.pep
TTHQHEXPPQHDQWEQHQQLHGHMLPQTLCNNTEAYVQQQQQQPEDRRQQPRQHDQPQHXCAGQQQRHQPSPGPVQQHEPSPASHQGPSHEQQHTQQFQGHDKQCQPPQTEPYQTGQXKSQPPQCPXQEQQQTARCSSNYYSICSNLKKXNEFLMQXCRPLAMSFVQLRLLQPSL

SEQ ID NO: 242893 - protein, 462 aa, Zea mays
  unsure (1)..(462): unsure at all Xaa locations
  Clone ID: MRT4577_153102C.1.pep
IKIERGATSTPEVQPVAFKATEEKKEESTSSRLPIDASKLDNEEMALIIKSFRQILKQRRGKDYEPRSKKVCYKCGKPGHFIAKCPLSSDSDRGNNKKGKRKEKKKYYKKGGDAHVYREWDSDESSTDSSSDEDATNIVVNKGLLFPNVGHXCLMAKDGKRKKVDSRSSTKYATSSDEDSSSDDEDDLLTLFANLNMQQKEKLNELISAIHEKDELLDSQEDFLIKENKKHVKVKNAYAQEVEKCKKLTSKLNICHDTISNLRNENAKLNVKVEKSNVCDDSISNLRNDNASLIVKIDKLNASLAAFKFEIENLFAKAKXFNVFXYAISNLRNEYSMLHAKIDELNVCKPSTSSVDHVSICTRCRDINVDAIHDYLALIKQQNDHIAQLSAKINEHDLENEKFKFARSMLYSGRRPVIKDGIGFQQGGNVKLNATKRLSNFVKGKATXPQDNKDYILYHAGY

SEQ ID NO: 242894 - protein, 46 aa, Zea mays
  Clone ID: MRT4577_153103C.1.pep
RLYSNQPAQEALQFHTMLCTCVRRALIMIKQPYNPRVMGWLSIFTT

SEQ ID NO: 242895 - protein, 332 aa, Zea mays
  unsure (1)..(332): unsure at all Xaa locations
  Clone ID: MRT4577_153104C.1.pep
MAMPSSRSPAPPPTASSSYWCYMCDRFVRAXLPPPPHXSPSSSSPACPSCGGGFLEEMGAPPPRARRPRRAARRGADSRASPFNPVIVLRRSPPADADADGSSSPAAATGSSFELFYDDGAGSRGRPLPESMSDFLMGSGFERLLEQLAQMEAGGGLAARARDAPPASKAAVDSMPALRVGAAHVAADAHCAVCKEAFELGAEAREMPCAHIYHADCILPWLALRNSCPVCRHEMPADNAAPRAAAAAAADEDARVGLTIWRLPGGGFAVGRFAGGPRPDERELPVVYTEMESGFNFNSGHAPRRISWGARQAAATDRGTVRRFLRSVFACF

SEQ ID NO: 242896 - protein, 61 aa, Zea mays
  unsure (1)..(61): unsure at all Xaa locations
  Clone ID: MRT4577_153105C.1.pep
EACPGPSWRGQPCPSWWLEIGFCEGTGRVPRIGSGGEPRAPLVVXXGGWFXXFGXRERRLC

SEQ ID NO: 242897 - protein, 60 aa, Zea mays
  unsure (1)..(60): unsure at all Xaa locations
  Clone ID: MRT4577_153106C.1.pep
SSYDCSPEKACQPYCTGTPVRTYQTDSVPSYVKLSNRHSETKTFASRWYSTXXASPTYSS

SEQ ID NO: 242898 - protein, 79 aa, Zea mays
  Clone ID: MRT4577_153107C.1.pep
DAARASLQRIRGRSADVGVELRDIVQAAEEDRRHESGAFRRIVRREYRPHLVMAVAIPLFFELTGMIVVTLFTPLLFYT

SEQ ID NO: 242899 - protein, 100 aa, Zea mays
  Clone ID: MRT4577_153108C.1.pep
QFIYYALQSHDSCRLSSRTWAAFIMPAEVIQSEALGLVAVGVQALSECRQVGGLSVAGAVRHNAKRLTGRGVQLCMMVQRFRVSSHQLWECTARTKRVLM

SEQ ID NO: 242900 - protein, 270 aa, Zea mays
  Clone ID: MRT4577_153109C.1.pep
MMTVPMDSASAAPSSARDFAERLLTRNNELEDQLRKSAQSKVPSDPSIWLQMRDNFEKIILIDHDLSEQKEVEYLLWKLHYKRIEDFRRSISAASSAASQSGKSNANPDRVKRIKLTFKSFLSEATGFYHDLMLKIKSNLGLPLSYFPEGIDNANNSARDDKTTVQLKKGLISCHRCLIYLGDLARYKSSQGDGDSASREYAAASSYYMEAASIYPSSGNPHHQLAILASYSGNEVVAVYRYFRSLAADTPFTTARDNLIILFEKVLDRV

SEQ ID NO: 242901 - protein, 235 aa, Zea mays
  Clone ID: MRT4577_15310C.1.pep
MPKSKRAKVVHLTKTDKKGKELSLKLFANVQEAADNFEHIFVFAVENMRNSYLKEVRAEFADSRFFFGKTKVMAKALGQTPAEEHLTNLSQLTEHLNGNVGLLFTNREPSEIIEYFANYSQTDFARAGVVATQTFTVPAGVVYSRGGELPEEDDVPLPHSMETTIRKWGMPTRLDKGKIILDAPYTIAEEGKPMNSHQTALLKLFGVAMADFKIDLKAYYSKATESVTEVGAMEE

SEQ ID NO: 242902 - protein, 75 aa, Zea mays
  unsure (1)..(75): unsure at all Xaa locations
  Clone ID: MRT4577_153110C.1.pep
MACLYDHRXEDHNWAAYWSLYNHIHVPTVAGINESVPGSVKFALKSWEHILDTWVGFLEKHEGEPXLLILMPTIH

SEQ ID NO: 242903 - protein, 61 aa, Zea mays
  Clone ID: MRT4577_153111C.1.pep
HEHHVHSNAPTSSSAVWSSRLTLSHTKHTFHLTRVKFIAVDIVLLNPVYCRLTYIFEPMGP

SEQ ID NO: 242904 - protein, 97 aa, Zea mays
  Clone ID: MRT4577_153112C.1.pep
ERPPGQVQAFFFFFFFGFFFCFFFFFFFFFFFFFFEQIKFLGCFKNTSVWQKNTIFWQGEYLFEQTTYVVSPPQILCFWKKQLGWENHTCDVNNLGG

SEQ ID NO: 242905 - protein, 46 aa, Zea mays
  Clone ID: MRT4577_153113C.1.pep
RPYTLLRSLAVLRTCYCLRHWVNLNGVTGSNLIPIPMLKDLTAKFI

SEQ ID NO: 242906 - protein, 50 aa, Zea mays
  Clone ID: MRT4577_153114C.1.pep
GTWCHELTNQKPAQGLLFLNAGQTLKGTCADACLQDRQSTSKDKHYWTSS

SEQ ID NO: 242907 - protein, 52 aa, Zea mays
  Clone ID: MRT4577_153115C.1.pep
AYKSLQSILFFSCAYQCIVNLCPSPPTHTHTLFSRNDRILPLTQIFLGANPP

SEQ ID NO: 242908 - protein, 139 aa, Zea mays
  Clone ID: MRT4577_153116C.1.pep
PPPPQPPHPPAPPLNHPPPPPPPAPPPPPPSSPPPPPPPPTPPHPPPPRPPPPHRPPPFLRSPPPTPPPPPPPLVTPPSSHPPPLLPHPLTASPPPYLPPDLSLPPTPPPPFLPPSTSLEGRPQSDSSTAPLVYFVLPH

SEQ ID NO: 242909 - protein, 63 aa, Zea mays
  Clone ID: MRT4577_153117C.1.pep
GGSGNEGVFGRAQVLVPNNIWGWGEGGGRLTEGGRPHLGGAGPNGTRVGLVFIPGVLRREGGR

SEQ ID NO: 242910 - protein, 279 aa, Zea mays
  Clone ID: MRT4577_153118C.1.pep
MGSSARARHLFFLAALVAVAAPRSADAWGGGRFFFSKTTRAEATAEPDKKAAGGDTVAAPAFSRPSTAGSGGRGYGLYGRLEEKYPADYFRRGVHRNTEKLTTTTGGERVRTTFPEDSGRGRPPTDVPGATEEEGGGAGGDLEGVRPYPENGSGRGRPPWYYTAFHRGRQQEQEQRDFGMSDTRLYQNGRYYYDVDAGRYGYGRESNPMRTRPDEGEFGSGYGRPRGPAGGRRGSSYGDAAGYQQRYGNDEEFGDGAMDQNTNGAFQEEAGQNGRRYTP

SEQ ID NO: 242911 - protein, 87 aa, Zea mays
  Clone ID: MRT4577_153119C.1.pep
GGPHHEDSHGPGAPIAARHIEPIIRMSEAHPPTHRMSHVSQEDADMAIRVLLDSFISTQKFDVPNALLKNFREYTTSKTDYNELLLL

SEQ ID NO: 242912 - protein, 82 aa, Zea mays
  Clone ID: MRT4577_15311C.1.pep
LSLNIMHFTIHYCLSLNLKSSMILRGIQVDISHDYNHNTHSDYQENDDNQHSAHINIREPSLHKRKLHTYTSFPTSSSHEGT

SEQ ID NO: 242913 - protein, 93 aa, Zea mays
  unsure (1)..(93): unsure at all Xaa locations
  Clone ID: MRT4577_153120C.1.pep
ICSVTFLEDVHLRSIYSGGIGRPEKKQISVDLPQKENENQISXCVLPKTGETKWPTERGEKIDGRKGIVCADIEGIMCGPLDVLDHLSQVVQL

SEQ ID NO: 242914 - protein, 323 aa, Zea mays
  unsure (1)..(323): unsure at all Xaa locations
  Clone ID: MRT4577_153121C.1.pep
GTLEAGPLRDLLPPVDFCCAYGSTLLQARPDGTSMVDYIIGVADPLQWHSENLERNPAHYSRWMAGFGAGAITGLADHVGVGVYFNPFVEWRDKRIKYGVVRMRDLAMDVLTWDRFYLSGRLQKPVHVLVDNWDIRTVNSINLEMATSASLLLLPAEFTEYDLYAQICSLSYMGDLRMLFAEDKDKVKKIVEGSFQSFQLMYSPLLQEYIAEGLLKTSSHGQYKTFRQDCGPSTTQXLFSVLPWTIQSQMXEGTHCTEKKYHHAPVVSSXKEMAANCVRRALRHRVMVSSVRQAVCGLLASGGAVAAQYLGKKMAKAWRSRVA

SEQ ID NO: 242915 - protein, 72 aa, Zea mays
  Clone ID: MRT4577_153122C.1.pep
MPYLAMAATPEAQPHRHIQLGSWICELHSGSVWVSVAPAQGMDHRDSLNCLMEQWRRRVPWAARLDHRLELH

SEQ ID NO: 242916 - protein, 146 aa, Zea mays
  Clone ID: MRT4577_153123C.1.pep
EIPLSSSSSFHNLSHLSNEHEDEDEHDDETLPSISNNLNNEQHWETVINELNKSPSITPTSVSSPLSVHEQEDKTVNIAGTVPLVLATLVGFLCGILATNYYHSRNSTSISTLQAIILEKDKQLDRITKMFESYLKVPVVVKMLDR

SEQ ID NO: 242917 - protein, 81 aa, Zea mays
  Clone ID: MRT4577_153124C.1.pep
SPHGIELNLFVNASESIIRFQTSTIHDLPLLAVTCDRLMGAVAVCNSPVSKCRCQLINKRYKESPSSWIDASVLDRYSNHH

SEQ ID NO: 242918 - protein, 499 aa, Zea mays
  Clone ID: MRT4577_153125C.1.pep
MTSALRRKAAQMASAATQCFSYSSLPATWALRQRGGGASVLRLSSRRTFSVSAAAGFDNQNREYVIVGGGNAAGYAARTFVEHGMADGRLCIVSKEPVPPYERPALTKGYLFPPDKKPARLPGFHTCVGSGGQRQTAEWYKENGIEVLYEDPVVAFDGKTQTLKTSSGKVLKYGSLIISTGCEASRLPEKIGGKLPGVHYIRDVADADALVSSLGSAKKVVVIGGGYIGMEVAAAACGWNLDTTIIFPEDHIMPRLFTPSLAKKYEELYQQNGVKFIKGALIEKLGAGSDGRVSSAVLKDGSVVEADTVIVGIGAKPVVSPFEAVGVNPKVGGIEVDSLFRTSVPGIFAIGDVAAFPLKMYNRIARVEHVDHARKSAHHCIETLLTSQTKAYDYLPYFYSRVFEYEGSSRKVWWQFYGDNVGEAVEVGNFDPKVATFWIDSDSRLKGVFLESGTSEEFSLLPQLAKSQPVVDKSKLQAATSVEDALEIARSSLRSSATV

SEQ ID NO: 242919 - protein, 107 aa, Zea mays
  Clone ID: MRT4577_153126C.1.pep
PAGREREREKSFAGDLRLIAGLAVFCGQGSSLAHTTCVHGLPGRRAGLAGNLSPNLGRCHGSARRRGHKVWCHFCWSEVSSPPKTNLVPRISSLRQVVSLITFFITH

SEQ ID NO: 242920 - protein, 94 aa, Zea mays
  Clone ID: MRT4577_153127C.1.pep
TMAPSTPALEASVSVSAERHTLPSLLFASLSRYACRLVVVARPVPKSFISFNNYLDVQVPLTLATSLPHGLFLSSVVQDYYSRTKLDRIESIES

SEQ ID NO: 242921 - protein, 116 aa, Zea mays
  Clone ID: MRT4577_153128C.1.pep
RPGEYDAPVKLLVKHLHAMAESPDEQLVVVSQVLVSDINIGYEEIVNTQVLAFNGQPVKNLKNLATMVENCKDEFLKFDLEYDQIVVLETKTAKAATQDILTTHCIPSATSDDLKA

SEQ ID NO: 242922 - protein, 102 aa, Zea mays
  Clone ID: MRT4577_153129C.1.pep
FKHAAPLTGSLSSVDRDADRHDLGLPHTNQDGGPYVLNAKSIARRCHLLTMDANPQVNHLALERFGPEPGRPPVHLGVSLTSPRGNNGDSTHLREIKSNNSR

SEQ ID NO: 242923 - protein, 78 aa, Zea mays
  Clone ID: MRT4577_15312C.1.pep
QAITKHSYGTFNKSKRCLPIYGRHNTSNCQKRVQSPMASSSRTINMLHLGSVKNLLIAGMISGVFSCTKLLKPDPDAW

SEQ ID NO: 242924 - protein, 438 aa, Zea mays
  Clone ID: MRT4577_153130C.1.pep
GLVGGEGSTTQPWTSSTPSQRTRRYSSSSGGIVISGGRFLTKAHSVEHYTQVKLKKRGSDTKYLATVLTIGTECDIALLTVNDCWLSIGGDTISVTSGVVSREILSYVHGSTELLGLQIDAAINSGNSGGPAFNDRGKCVGIAFQSLKHEDAENIGYVIPTPVITHFIEDYKKSGEYTGFPILGVEWQKMENPDLRKAMGMKPDQKGVRVRRVEPTAPESGCLQPSDIILSFDGVDIANDGTVPFRHGERIGFSYLVSQKYTGEKALVKVLRDSKVHEFKIRLATHKRLVAAHVKGRPPSYYIVAGFVFAAVSVPYLRSEYGKDYEYDAPVKLLVKHLHAMAESPDEQLVVVSQVLVSDINIGYEEIVNTQVLAFNGQPVKNLKNLATMVENCKDEFLKFDLEYDQIVVLETKTAKSATQDILTTHCIPSAMSDDLKA

SEQ ID NO: 242925 - protein, 79 aa, Zea mays
  unsure (1)..(79): unsure at all Xaa locations
  Clone ID: MRT4577_153131C.1.pep
VIKCXGQTGXCLQLLYWLELLFTAQWSLLFVILELSSSLVGGGGXXXFPLFICCCACLFWAHCPCSLVPFCRCLLRRLL

SEQ ID NO: 242926 - protein, 69 aa, Zea mays
  Clone ID: MRT4577_153132C.1.pep
VCAPSSACLGSTSWPPVPSCWAQTVQRTGKTALFFRPMKACAPSSACTASNAKGQLRIMPQLSSELLHR

SEQ ID NO: 242927 - protein, 60 aa, Zea mays
  Clone ID: MRT4577_153133C.1.pep
ALNSFWHLGGPLYEKDRGIAVLSLGFKDDVGADLHGLLILLVVYQTSVEVSIRKIDRWRW

SEQ ID NO: 242928 - protein, 86 aa, Zea mays
  Clone ID: MRT4577_153134C.1.pep
GPPPFSKNSFLSSLQKSPQSFPSCVGPQKTGLVPKGGRGGTPVFPLQVEGPPFFCWWAPKGLGVFGFPLFQGGGPLSALPLFFPGF

SEQ ID NO: 242929 - protein, 110 aa, Zea mays
  Clone ID: MRT4577_153135C.1.pep
FRTRGTLCHKPMQMHMHMLHTQVQVQARSSQRTKSKGVQKASLKRLPAPAALHSHHRCWHQQSWHHHHRLATPRQVLQGQRSRALLSPWQWQAQAVSGHQRPGAHRRLAA

SEQ ID NO: 242930 - protein, 474 aa, Zea mays
  Clone ID: MRT4577_153136C.1.pep
MGSPLPHVAVVAFPFTSHAPKVLMVARALATAAPSATFSFISTTDSLARLPTGAGAAPSNLRFVEAPSGGGDGPGIPSWRRMELFLDAAEDGGLRQALETARAAAGGAAVTCVVGDAFMSMAADAGVPWVAVWTGGPCALLAHVIGDTIRKDIGDHAASRADEPLASYPGLGMYRVRDLPFGDAGAGGDMYRVMTTLLGRVAERVPRAATAVALNAFPGLFPEDVSAALADALPNCLPMGPYHLLPGAAAAAAALADDGDRHGCLAWLARRDAGTVAYVSFGTVAALPPDELRELASGLEDSGAPFLWSLREDAWALLPPEFLERAKAAADSRLIVPWAPQAAVLRHPAVGAFVTHSGWGSVVEGMAGGVPMACRPFFGDQLMNARAVARLWCFGTAFDEDKPMTRGGVAAAVASLLTGEEGARMRATARDLQPRVVKAFGPDGGSVNNFHKFVDTCLTVGRDMHLNARGNHPM

SEQ ID NO: 242931 - protein, 82 aa, Zea mays
  Clone ID: MRT4577_153137C.1.pep
RKPKPHHEETFKHNNFLLLRLLHTSCPLSSAVANRPLSPHLPLKKPQFSATFSISHRIFGVALGVAIISVPLATKFSLMFGV

SEQ ID NO: 242932 - protein, 151 aa, Zea mays
  unsure (1)..(151): unsure at all Xaa locations
  Clone ID: MRT4577_153138C.1.pep
ENHDQSADQEESYNQNLGLQEQEKTESDLTENLEYSPTEGTLELKEDMSEPQKEKLPESFLAHDVSSIVDSNQQESITKTEENQKQPVDDSHPQLNSQDLRDQGNQDQDTNGEEEGEKEPGEVGTHNDEXKRETELSNEPSNNKQEEDKSQ

SEQ ID NO: 242933 - protein, 102 aa, Zea mays
  Clone ID: MRT4577_153139C.1.pep
LSKAELTGCFSSVVFVDSTYSVHCSSSFCTLTPKWLLKCKISSGQPMAKNPTSHARLPGFSLPKCSLLYWTYLSHSCSHMLCFLFILWVLAILRIVQVFYSL

SEQ ID NO: 242934 - protein, 80 aa, Zea mays
  Clone ID: MRT4577_15313C.1.pep
LKSSRPQLTFSSRTKIKVVVAIVSHVTHSTSIIVIIIIYLGPNPEPRTQLPVCVPFPPCVKHLPIPTKAQRFRGFHFPRE

SEQ ID NO: 242935 - protein, 65 aa, Zea mays
  unsure (1)..(65): unsure at all Xaa locations
  Clone ID: MRT4577_153140C.1.pep
PPPRKEEEVRSSKARKRPRRNPPSLRWAGGYALLVDFARRRRLRRPWXPPPTPHPSGGERENAGS

SEQ ID NO: 242936 - protein, 123 aa, Zea mays
  Clone ID: MRT4577_153141C.1.pep
HQHAQQHRPQQQYTGNYQGGGQYYEDYSENYAQGGQDGAYFDPVSNSFVMPYAQPVSRRAMTPPPLGQRFPGPRGPNRQFHGSMGGQRMPGPPGSYGGSRPGSASSSRMGPRPGSSASAAYYN

SEQ ID NO: 242937 - protein, 104 aa, Zea mays
  Clone ID: MRT4577_153142C.1.pep
VIHRQCLIIQEGWVRGDLQYACIRGINDGGRYIWVMRIAIAIVGRLICTLSSSLRLLCCGCSRRGRWWLLLRQVQVGTSCIRACIHAGVEGSSTGDEVIASKKK

SEQ ID NO: 242938 - protein, 116 aa, Zea mays
  Clone ID: MRT4577_153143C.1.pep
SLSMCSLVVLPPWRPSALSSDRSFSARRSQASFPMALGAQVPSRALELPFPGAWSVLLAPQLLARPLRTASCTSPPSSSPDLLRAPDPSSSAARSSPLFAAVGDFSQMLRVKNKTT

SEQ ID NO: 242939 - protein, 144 aa, Zea mays
  unsure (1)..(144): unsure at all Xaa locations
  Clone ID: MRT4577_153144C.1.pep
TFQKPLHPAIHPXPPPPPSPPTLFPPLLPNPIQYPFLHPARXAAPPPGPSSPPXPPPGSGRAPPRPAPPRPXPPSPPPPPRSRPRGKFSPTPPTAVRLGGDLSPAAGTGVSFPQASGGADGAPVTERAVMARLNGHPGASGRAC

SEQ ID NO: 242940 - protein, 50 aa, Zea mays
  Clone ID: MRT4577_153145C.1.pep
RALNPVPCFSEPRLVVSLILFGWLRASHHRLYGSGRRVTSVVRDKMPPLA

SEQ ID NO: 242941 - protein, 108 aa, Zea mays
  Clone ID: MRT4577_153146C.1.pep
QARRVSSTISEDGKSAAPVEKDGLADKLSPISIGVGKSLELLVRQRSLTCVSVALECCLGRQLRLQMQIRFCQLSVSSCFAPWCNGAEVKVYSSTHGHLGIGCPSVLC

SEQ ID NO: 242942 - protein, 132 aa, Zea mays
  Clone ID: MRT4577_153147C.1.pep
PERGHAGPCEYSAGCHIRRPAFVETEGKIYYKSTGSMAHAVHSVNARAGESTVHASHSLQRGTLHMLSGEDPDVLEMSTMVMGMMSRQRAGHSPLLDIVRARPRSAIATALPRAPDLPAAEGQDAGADLGGV

SEQ ID NO: 242943 - protein, 319 aa, Zea mays
  unsure (1)..(319): unsure at all Xaa locations
  Clone ID: MRT4577_153148C.1.pep
TRPIKSNPIAFVKPGISRIYRLIRSNRNSRNKFVHSIVRKFESDSRSRSTVSFLVYCAEVLASLPFTCSDEPLYLIYDINRIIHLKAGGVESNLKRWTSMSQSQDTVDMPTLPGEXGMLSCKEPGGYYDNVGYAHERVNDNPCSTSDVDIAKVQGDCHDAIALQLLLKLKRHLKVVYGLDDARCQSFSLKEPPKSGETFSRQNVSFNIGSTNISLPSCLQDVASVYQDFKTVLHEDSMDFAVFIPSVQIRKRPTPRNTTNPTPRSTTRVRRTAASSVTKARGGARGDDSDDSDDDDWTGGPRVLDFSGGGRVTRQRVQV

SEQ ID NO: 242944 - protein, 55 aa, Zea mays
  Clone ID: MRT4577_153149C.1.pep
NYLLPIHLLIIILLVTAFPIVVLVTVALPITSLVTVHHDHPHQLPRPLSRQPLPS

SEQ ID NO: 242945 - protein, 73 aa, Zea mays
  Clone ID: MRT4577_15314C.1.pep
VPEEYLLGNSQNYIPSMFGKHYYGIYSTWLVLLSKGSDKLAKLYVTHYYMMLQHGEYCRLKKGNTNNHSSFFD

SEQ ID NO: 242946 - protein, 373 aa, Zea mays
  unsure (1)..(373): unsure at all Xaa locations
  Clone ID: MRT4577_153150C.1.pep
KPLTAESTVKPPVRCEINGRSKVPVAAGAGDTNICGGIIQLYWSSILERCLDTNDQVRQSALKIVEVVLRQGLVHPITCVPHLIALEMDPLEGNSKLAHHLLMNMNEKYPLFFESRLGDGLQMSFKFFESIVSNHKMAANIKSNPIAFVKPGISRIYRLIRSNRNSRNKFVHSIVRKFESDSRSRSTVSFLVYCAEVLASLPFTCSDEPLYLIYDINRIIHLKAGGVESNLKRWTSMSQSQNTVDMPTLPGERHVVMQEPGGYYDNVGYAHERVNANPCSTSDVDMAKVQVDVDMAKVQVRXKFWVVGSIILXSIGEAAAVNXFILLFSLIFFXQGDCLDAIALQLLLKLKRHLKVVYSLDDARCQVWLALYL

SEQ ID NO: 242947 - protein, 50 aa, Zea mays
  Clone ID: MRT4577_153151C.1.pep
KLNFSLHRRILKLRSKSYCLFHILSRILSVLKKYCTINLVCSLKFYDPNL

SEQ ID NO: 242948 - protein, 104 aa, Zea mays
  Clone ID: MRT4577_153152C.1.pep
LSSCQLLPAIGFPRMYKSTKTSHHTWTLCLVTRPPPLKSSTLGPPVQSSSSESSESSPRAPPRAFVTLEAAVLLTLVVLLGVGFVVFLGVGRFLIWTEGMNTAK

SEQ ID NO: 242949 - protein, 85 aa, Zea mays
  unsure (1)..(85): unsure at all Xaa locations
  Clone ID: MRT4577_153153C.1.pep
KGVAILRFKKPWVLIWSGKLGEIRGFXMNKKKGVFKSVKVSAKFVKGKRGGIKAKYVMGTPRDWDRLMGLMEGDFKAKGLQLVKK

SEQ ID NO: 242950 - protein, 145 aa, Zea mays
  unsure (1)..(145): unsure at all Xaa locations
  Clone ID: MRT4577_153154C.1.pep
RHRRILVHLCRRTLIISHNGXSGDYPDCTDLAYHSAIDDGADIIDCPIQVTNDGVLMCMSSTNLLDTTNVQRTTYNSLVSVVPDIQPQPGIFTFNLTWSDINSNVLKPKISSPVSGYFLVRNPRYTNQGKFLKXSDFLAIAMDKD

SEQ ID NO: 242951 - protein, 138 aa, Zea mays
  Clone ID: MRT4577_153155C.1.pep
GRFGEEGACDELFIGARGKGSGGARRAPVRCTAPALMPHSGDVRDLTAGAVPGKDAVKRRGWAGAELSYAARGWARGQRWRGRRWRGRRCVVREEDDEAADRWGRTASEREHVRGRGWQVGPACQRERGRGARSRGTE

SEQ ID NO: 242952 - protein, 115 aa, Zea mays
  Clone ID: MRT4577_153156C.1.pep
ACKRQLLRNFIQRQAPDLAEVIRAVTTTELYSGIASGKLDALIGAVVHRHERRRSWTLLHSEVLCQARRSSSLIRHVPVAPRCSWTSRSLRSEKESKSVTARRTTRHGSLGTVIR

SEQ ID NO: 242953 - protein, 111 aa, Zea mays
  unsure (1)..(111): unsure at all Xaa locations
  Clone ID: MRT4577_153157C.1.pep
FPTAPHDPGNQGNQGSKLPTDPTRPRPKRNPPIPGHANHISQLPKTHKCAERAKNQRDPQPNEEKPPKPNQPGGPPRQEAPPPGPDSPKPPTPGKTPXPNTHTLPPPKPGH

SEQ ID NO: 242954 - protein, 75 aa, Zea mays
  Clone ID: MRT4577_153158C.1.pep
TGIQRKKKTPSCWSPGCSRLQGTPSIMTFQLNTENGLFIHPFKQKRVNTTSDILSYRNSAKNSGKQMSKFIIHIL

SEQ ID NO: 242955 - protein, 79 aa, Zea mays
  unsure (1)..(79): unsure at all Xaa locations
  Clone ID: MRT4577_153159C.1.pep
MAAADVEYLCFVRGHAWATSNESLQNAFASYGXILDYKIITDRNTARFRGLVCVTFSYENSMLDAIENMNSNELYARII

SEQ ID NO: 242956 - protein, 349 aa, Zea mays
  Clone ID: MRT4577_15315C.1.pep
RSGRLLRGGGFGYVYKGVLARSQKEVAVKQLKAGSGQGEREFQAEVEIISRVHHRHLVSLVGYCIAGSSQRLLVYEFVPNNTLEHHLHGKGVPVMAWPARLAIALGSAKGLAYLHEDCHPRIIHRDIKAANILLDENFEAKVADFGLAKLTTDTNTHVSTRVMGTFGYLAPEYASSGKLTDKSDVFSFGVMLLELITGRRPVDPTNYMEDSLVDWARPLLARALSEDNFDELLDPRLENRVDRLELERMCSSAAAAVRHSAKRRPKMKQIVRALEGDASLDDLNEGVKPGQSMMFSSGSEYDSGANYAANISKFRKVAFESSEFSNDYSGTSEYGADSGDAATQRQQHR

SEQ ID NO: 242957 - protein, 116 aa, Zea mays
  Clone ID: MRT4577_153160C.1.pep
SPSVLGRRPTLLPLQPRAVTVTVGRVTRHTPFRPAPLHLRAPTLALGAYNHGLLAFSPNFRLRGGGHLTLRPASPLLLSCRKICRPSINLGNVMGASSTTSDKAITSAQVVSSSDQ

SEQ ID NO: 242958 - protein, 79 aa, Zea mays
  unsure (1)..(79): unsure at all Xaa locations
  Clone ID: MRT4577_153161C.1.pep
XRSHEIANMGTESGLHDKSKAASNIPQLICTGNNLNRLQRELTKKKVGLLIENKIWVFSRKNFSLYTFQKKGGKKLEKL

SEQ ID NO: 242959 - protein, 66 aa, Zea mays
  Clone ID: MRT4577_153162C.1.pep
NYGVDPHFRTGSRNTRHRSWLSSLPPHARPTGAGRASSPRLSVSPRGRHYTPANACLPSLCMTDAD

SEQ ID NO: 242960 - protein, 73 aa, Zea mays
  Clone ID: MRT4577_153163C.1.pep
ARRRCLVRGGHERLQRPRGARQGDHARWRARPLDYSFTDVVVPLTPALRKRCRGIVRRLDERRRQDLQDRRSP

SEQ ID NO: 242961 - protein, 122 aa, Zea mays
  Clone ID: MRT4577_153164C.1.pep
MEDEEHEVYGQEIPVDGEDVDMSAGDDATKLQELDEMKRRLKEMEEEAAALREMQAKVAKDMQDPNATTSENKEEMDSRSVFVGNVSLLSSSLSIKVLASGSVSAQVLVLASWGKKKKKKAA

SEQ ID NO: 242962 - protein, 97 aa, Zea mays
  Clone ID: MRT4577_153165C.1.pep
MEDEEHEVYGQEIPVDGEDVDMAAGDDATKLQELDDMKRRLKEMEEEAAALREMQAKVAKEMQGVDPNATTSENKEEMDSRSVFIGNVSFISSLYVN

SEQ ID NO: 242963 - protein, 105 aa, Zea mays
  Clone ID: MRT4577_153166C.1.pep
MEDEEHEVYGQEIPVDGEDVDMSAGDDATKLQELDEMKRRLKEMEEEAAALREMQAKVAKDMQDPNATTSENKEEMDSRSVFVGNVSFIGSLCKLRELMYSSMGI

SEQ ID NO: 242964 - protein, 49 aa, Zea mays
  Clone ID: MRT4577_153167C.1.pep
FARQKIYWNLPTVGGGATVIFSHGLRLRLRLRLYVDMATVCFGTITSFL

SEQ ID NO: 242965 - protein, 203 aa, Zea mays
  Clone ID: MRT4577_153168C.1.pep
MEDEEHEVYGQEIPVDGEDVDMAAGDDATKLQELDDMKRRLKEMEEEAAALREMQAKVAKEMQGVDPNATTSENKEEMDSRSVFIGNVDYACTPEEVQQHFNSCGTVNRVTILTDKFGQPKGFAYVEFVEVEAVQEAIKLNESELHGRQLKVAPKRTNVPGMKQPRGRGFNPYHGHPYMRPYGYSPYGYGRFPRFRRPRRPYF

SEQ ID NO: 242966 - protein, 60 aa, Zea mays
  Clone ID: MRT4577_153169C.1.pep
SCPVSHLRIAGLQRVICLSERLEFLQDYQHASLCTVVHASYSLCLSSVCFHPRNGLTLEL

SEQ ID NO: 242967 - protein, 30 aa, Zea mays
  Clone ID: MRT4577_15316C.1.pep
SGRFRALLIDTDQLSKALNLPGDQVGTELY

SEQ ID NO: 242968 - protein, 118 aa, Zea mays
  Clone ID: MRT4577_153170C.1.pep
MAAAASSKGRAIAGSFVSRVMAGKAASPRRAVHASSYDKNPEEQVRPAFVPDDVIGGGAGSPDKYWSPHPKTGVFGPAAVDPNQLGVAADAAAAGGTVLDQKVWFRPLEDVEKPPPVA

SEQ ID NO: 242969 - protein, 87 aa, Zea mays
  Clone ID: MRT4577_153171C.1.pep
CAQLVGCRPAGAVVKAVLLSHQVTGLKQRLRICGRIFVLIYPFLRSHSCGSLRRVCSLVCPTCMGLILKSHCCLLKILPNSFSSLSL

SEQ ID NO: 242970 - protein, 189 aa, Zea mays
  Clone ID: MRT4577_153172C.1.pep
LGRYKMGAAGGCGDYYHHFNLSPSASPAAQRSASTVGCGGFPPPPNDRSFAWQQRLAPRGGRSLGASSAASWPARPPPRGTGTTATRTRFRPVVHSLSVCSSVLVELLCFFLGCAFLLSWSNPSSCGSCSRAERFACLLLSSVDDSDSQCVCCCWWQDFARQKIYWNLPTVGGGATIIFSPMVYDYDST

SEQ ID NO: 242971 - protein, 122 aa, Zea mays
  Clone ID: MRT4577_153173C.1.pep
MAAAASSKGRAIAGSFVSRVLAGKAASPRRAVHASSYDKNPEEQVRPAFVPDDVIGGAGSPDKYWSPHPKTGVFGPAAVDTNQLGVAADAAAANAAAAGGTVLDQKVWFRPLEDVEKPPPVA

SEQ ID NO: 242972 - protein, 91 aa, Zea mays
  Clone ID: MRT4577_153174C.1.pep
RRRAVHASSYDKNPEEQVRPAFVPDDVIGRGAGSPDKYWSPHPKTGVFGPAAVDPNQLGVAADAAAAGGTVLDQKVWFRPLEDVEKPPPVA

SEQ ID NO: 242973 - protein, 119 aa, Zea mays
  unsure (1)..(119): unsure at all Xaa locations
  Clone ID: MRT4577_153175C.1.pep
MLRKSSHGQIEHQKLEEQKTEAEEVDAEEDDQDDQDDDDDDRDDDELDGQEWDGSGKSXHRRSEKKSRKDMLKLGMKPITGVRRGTEKKKQNMLFVIXNADVFKSPNLDTYVIFGEAXI

SEQ ID NO: 242974 - protein, 67 aa, Zea mays
  Clone ID: MRT4577_153176C.1.pep
RYKMVWYFGIYHMSRQVFRTFPRLTQVSSYESLFQFHLVMPASLWIRVHIPSLQCNLSISSQFWSWT

SEQ ID NO: 242975 - protein, 119 aa, Zea mays
  Clone ID: MRT4577_153177C.1.pep
MAAAAASSKGRAIAGSFVSRVLAGKAASPRRAVHASSYDKNPEEQVRPAFVPDDVIGRGAGSPDKYWSPHPKTGVFGPAAVDPNQLGVAADAAAAGGTVLDQKVWFRPLEDVEKPPPVA

SEQ ID NO: 242976 - protein, 80 aa, Zea mays
  Clone ID: MRT4577_153178C.1.pep
FFFFFFFYFNFWGFFLAGQIFKFYMTIRFTYSRVCHGQKFDLCFFLENEQKICTTGFSDHHTKTIKFKLLWSTRTGAIHF

SEQ ID NO: 242977 - protein, 69 aa, Zea mays
  Clone ID: MRT4577_153179C.1.pep
ILHYGPTCIDLNPLGEPPLFFFVVVLCFWGGGGDFCFFFSFFFFFFFFGLGFFFFFFFFFKHINRPKVP

SEQ ID NO: 242978 - protein, 117 aa, Zea mays
  Clone ID: MRT4577_15317C.1.pep
GFLGVSKKFLGGLIPGSPGGFFPSPLFPGTGRGGPPKYQKSCGTRLPRGGWGALKITRLSPLGASRGSRTCGTNFFSPSFFSPELKVLFPRGPVKLGFFFGIGPVPNIILFGFGPPV

SEQ ID NO: 242979 - protein, 173 aa, Zea mays
  Clone ID: MRT4577_153180C.1.pep
APAPPAVCEALLLATVCMVGLPVEVQVRDGSAYAGVFHTASLDAGYGVVLKKARKIANGKDNANLVLGAFVDTLVVLPDDLVQVIAKDFSLATKDISKTSACDVVAASGLMQPQTSHLGDPKASRQVEKCSRLCQNSDNPTGKIAPMNSNAANVCSPIEHIVANWNAIPTSAD

SEQ ID NO: 242980 - protein, 51 aa, Zea mays
  Clone ID: MRT4577_153181C.1.pep
MSYCLFSLYCLYKCVRPCTIGLLIMFKFYACILSIGSSVINAVALLCTIPI

SEQ ID NO: 242981 - protein, 121 aa, Zea mays
  Clone ID: MRT4577_153182C.1.pep
RRKFLRRRSALTRPSDDRDPLHCKNWRTALTRVPHQWALAAGWAPCSSARDGKKVHAGPIPADGGQPVAVELQNRRKGGAAPCRIERKGRTTEIVQARIGREGEELQAGRAGWVPHEKRGC

SEQ ID NO: 242982 - protein, 151 aa, Zea mays
  Clone ID: MRT4577_153183C.1.pep
VVKVLIKLPLNYVMCASTTTTVMVVLWRYTIDTWIKACITYLWMDSCMIVFAFLFVWRLLNVFRLVEVSFSVFLIILFVLVIFVIFIVSGLLIGRRLDSCRPLVWRGLRRVRLNRTVCSSSVWERGAGCRPVDAKKRLTSVVDATKWGRVP

SEQ ID NO: 242983 - protein, 118 aa, Zea mays
  Clone ID: MRT4577_153184C.1.pep
VSIHFIWLPEMYYTYLVKYVLFFVRVPSLYSMGTDWNQVMTQYGSYLSEDDATQFQNTAFAPSPEIPAQGSPAPPPVKKAPQRTKLANFTSEEDMRVCQAWLAVSCDPIVNTGQKRQG

SEQ ID NO: 242984 - protein, 82 aa, Zea mays
  Clone ID: MRT4577_153185C.1.pep
SQSSATFCLFVPVMCLAVFLVGVDGAKSVDVVALHAFPFLASVLVSPHRAVYVPVQVVYQGGHCRVCDRWFDTCFSTYPRAE

SEQ ID NO: 242985 - protein, 323 aa, Zea mays
  unsure (1)..(323): unsure at all Xaa locations
  Clone ID: MRT4577_153186C.1.pep
ALSIPRLPDAYKQTGLGIFSSNANXPILVQEISCYLGLELRQIKIERVVDGGIYVQLEESVHGCHVFQVQSTCPPSNENLMELLIMIDACRKASAKNINAGIPYFGYARADKKXSGREKKKKAKLVANLIMEVGAHRVLACELHSGQSIDYFDIPVDHVXSQPIILDYLASKTICPEDVVVVSPDMGGVARPRAFAKKLSDAPLAIVDKRRPGHNQAEVVHLIDDVRGKVVVMLSDAPLAIVDKRRPGHNQAEVVHLIHDVRGKVVVMVDGMINTTENISKGAELLHKXGARVVYTCSTHAVLSPPALQRLFSDLFQEVIITN

SEQ ID NO: 242986 - protein, 40 aa, Zea mays
  Clone ID: MRT4577_153187C.1.pep
LKLGLPYISRFRFQSNILYQDQLTLSDKILSKQRTRYDFN

SEQ ID NO: 242987 - protein, 164 aa, Zea mays
  unsure (1)..(164): unsure at all Xaa locations
  Clone ID: MRT4577_153188C.1.pep
KSSDGEELEVEEGVGMEXKTTXXMMEDECAEXXXXFXKVNXKXLSKVMEYXKKXVNXXEXEXXXXKXGXXEVGXXXXKSXXXPGEXLKNWDXGFVKXDKXXFLEXILXEKYVXMKGMIDMKCKNXDEMXKGKKKEEIRKKLKIKNELTHEEEEEXGREKKWELE

SEQ ID NO: 242988 - protein, 135 aa, Zea mays
  Clone ID: MRT4577_153189C.1.pep
MKNTPVDFQSLRTLARVWRVVRRRGCSCSSRHRISAPPARSLVSSPVRRGATMAGKGGPTNLEKEQMFGMAEKEMEYRVDLFNRLTKTCFEKCVEKRYKEAELNMGENSCIDRCVSKYWQVTNLVGQMLGNQPQM

SEQ ID NO: 242989 - protein, 100 aa, Zea mays
  unsure (1)..(100): unsure at all Xaa locations
  Clone ID: MRT4577_15318C.1.pep
PRRQRGARLHLQRRGTLPEVLQASLPARPHRTLRHHRAPPRLRPHRHALHSRYLHLLFPLHFICRANAPGQSXSTTTPAAVTRPSAKPSAVKAPPEAYES

SEQ ID NO: 242990 - protein, 69 aa, Zea mays
  Clone ID: MRT4577_153190C.1.pep
RLTSTYSYFLIQTFIHAPIIAYHYYLPKSNFIRPSNTCPRFTVPPRTASSSGLNPFPFIVSSSAFPSST

SEQ ID NO: 242991 - protein, 79 aa, Zea mays
  unsure (1)..(79): unsure at all Xaa locations
  Clone ID: MRT4577_153191C.1.pep
LRYLHIDWNLIISANSFYKAAISVTXGXSSAITNFAVIYKQQRKYADAITCYTEVLRIDPTAADALVNRGNTFKEIVAA

SEQ ID NO: 242992 - protein, 74 aa, Zea mays
  Clone ID: MRT4577_153192C.1.pep
TPQESSRSKLATRSTARKLMLEATHLQHWRPEGKKQDTKRAPSLHPFLRSDDFRIGLPKLSATNSHQNLAFYCI

SEQ ID NO: 242993 - protein, 96 aa, Zea mays
  Clone ID: MRT4577_153193C.1.pep
MSLHYLPPVKPSAIALGTVFNHATELAILTPLFGKTYQRAKEAHTKEEFLRSKEATSAAVAWGTSFLGSGLQAYGVGALINATGTLSYKGAAYLGA

SEQ ID NO: 242994 - protein, 57 aa, Zea mays
  Clone ID: MRT4577_153194C.1.pep
EKLYTKVKSIHDSLIEAGVRVESDYREGYSPGWKFNDWELKGNPLPNQFRPKDSQKG

SEQ ID NO: 242995 - protein, 89 aa, Zea mays
  Clone ID: MRT4577_153195C.1.pep
KVGLKPKPFNGPLDKPQGSFYKKGRRGNKKGALKVEVGAGSLGFPTNFEKVFKKWAFVAKVPDPSFFESERLSHGGGPSKGPTWAWPVT

SEQ ID NO: 242996 - protein, 100 aa, Zea mays
  Clone ID: MRT4577_153196C.1.pep
KPGARARAERTSLHTLGGSSKYSHDNFERLRGEEGPCERHLHMGKPFLTDGANPLNNSITPVTRKGIGISISRAGTTCQTPTLGSPETPAVASGRGIFYA

SEQ ID NO: 242997 - protein, 36 aa, Zea mays
  Clone ID: MRT4577_153197C.1.pep
TYNLLIITNNPSPKHKPITSHSPNPYSPTTTFTHSS

SEQ ID NO: 242998 - protein, 71 aa, Zea mays
  Clone ID: MRT4577_153198C.1.pep
KKKKKGKKKKKKKKKKKKKKKKLNLKKKLFLLAAFLTLMGLILGVFSHHFFGGCGIPFFRGPFFPFLLGLF

SEQ ID NO: 242999 - protein, 44 aa, Zea mays
  Clone ID: MRT4577_153199C.1.pep
NKRVSLRFYNMHFYGGNKMLITCAALSYMNKKRLVFTDYVNMKK

SEQ ID NO: 243000 - protein, 38 aa, Zea mays
  Clone ID: MRT4577_15319C.1.pep
KYLVGVQVHLYPYPCGSNRRSFLPPPKGLPSRSRKIGY

SEQ ID NO: 243001 - protein, 284 aa, Zea mays; identical to SEQ ID NO: 242671
  Clone ID: MRT4577_1531C.1.pep

SEQ ID NO: 243002 - protein, 51 aa, Zea mays
  Clone ID: MRT4577_153200C.1.pep
MAKQQQGQGMAAAETASAASCNAGQLAACAPAITAGATPSASCCGVSVPRC

SEQ ID NO: 243003 - protein, 178 aa, Zea mays
  unsure (1)..(178): unsure at all Xaa locations
  Clone ID: MRT4577_153201C.1.pep
RTPPTGATSTAPTRARSSPPAASPCRAASTSTCAVHACTCARGLIFLLVSCLAARYQVDDLSRSAKCALINSTHWRDQVAIGRALADAAKKAGIQHYIYSSMPDHSVFGQGWKALPMWAPKFTVEQYVRQIGLPATFVYCGAYHNNFTGLDSPLFXMDISMTAAFVWQAPFHPDQPLP

SEQ ID NO: 243004 - protein, 99 aa, Zea mays
  unsure (1)..(99): unsure at all Xaa locations
  Clone ID: MRT4577_153202C.1.pep
MAKQQQQGMAAVALVVLVVLAXGGGRDGVGGXSCNAGQLAACAPAITAGATPSASCCSNLKAQQGCFCQFVKNPTYGRYINSPNARKVVASCGVSVPRC

SEQ ID NO: 243005 - protein, 80 aa, Zea mays
  Clone ID: MRT4577_153203C.1.pep
MAETADMERIFKRFDTNGDGKISLSELTEALRTLGSTSADEVQRMMAEIDTDGDGCIDFNEFITFCNANPGLMKDVAKVF

SEQ ID NO: 243006 - protein, 104 aa, Zea mays
  Clone ID: MRT4577_153204C.1.pep
LCFSGAPVPALSLLSFGVFLFGWFFARPSCSAVCLLLPVFSGVWSFLCVCLPPCFALVCLLPRSVILFWLPVLCSWLLPSFAWARRLFLPRPPPCGLVAVSVTQ

SEQ ID NO: 243007 - protein, 61 aa, Zea mays
  Clone ID: MRT4577_153205C.1.pep
VIVGKHVQHDANIAAVQHHCDNAKLGMGICVMGLIKVTQPAAIRTYGYTDSDMIVKSGISR

SEQ ID NO: 243008 - protein, 123 aa, Zea mays
  Clone ID: MRT4577_153206C.1.pep
GRSGFWAKNIKKGGVITLFWGVPWGLGFFQFLHKLDGGHWLGGGTRAAQAINACQIAPWERGGPAPGRRPPWVCPWPEGSPPKVGRSPTQSPGGATRVRRTKSCQGAGDNPLNRQGWDRGRWA

SEQ ID NO: 243009 - protein, 97 aa, Zea mays
  unsure (1)..(97): unsure at all Xaa locations
  Clone ID: MRT4577_153207C.1.pep
WCGPLGVFVFPXFXAGSVAFALXLAVLXXXXGVSPFVGGGXSVAAVXXAGLAXXLGPLSXGGGXXLXLLXGXXLPGVLALXXAFLGSALACFCSAPW

SEQ ID NO: 243010 - protein, 91 aa, Zea mays
  Clone ID: MRT4577_153208C.1.pep
MAMATQASAATRHLLAAAWAPAAKPRQLSSQLALPSSSSRGPAPLRASTEEAKEAAKASASPDMNHRIAKRNVPDRRIYLLRKADGQNVYA

SEQ ID NO: 243011 - protein, 151 aa, Zea mays
  unsure (1)..(151): unsure at all Xaa locations
  Clone ID: MRT4577_153209C.1.pep
EDVYRKXTTQTAGIVGLYRGFXIYCVXGIMAYRSLHYXLYNCIKPDALTGSLQDNFFASFALGWLITNGAGLASYPIDTVRRRMMMTSGEAVKYKSSLDAFQQILKKEGPKSLFKGAGANILRAIAGAGVLSGYDQLQILFFGKKYGSGGA

SEQ ID NO: 243012 - protein, 250 aa, Zea mays
  Clone ID: MRT4577_15320C.1.pep
FCQVFEKLGPSLYDFLKRNRYQPFPVELVREFGRQLLESVAYMHELRLIHTDLKPENILLVSSEYIKVPSTKKNSQGEMHFKCLPKSSAIKLIDFGSTAFDNRDHNSIVSTRHYRAPEIILGLGWSFPCDIWSVGCILVELCSTHENLEHLAMMERVLGPLPEDMIRKASSSAQKYFRRATRLNWPEGAVSRESIRAVRKLDRLKDLVSRNADHSKVALVDLLYGLLRFEPSERLTAEEALDHPFFRNPT

SEQ ID NO: 243013 - protein, 103 aa, Zea mays
  unsure (1)..(103): unsure at all Xaa locations
  Clone ID: MRT4577_153210C.1.pep
LNSAEYEESAGIPFTPSAPDIHVPFGTPPGAEILGNLVPXIRGEINRVNPPKITSSGGPPVAVLEGIPPPSLFEKAFTPRVLELWPERSPRTPSMVGGGSTPK

SEQ ID NO: 243014 - protein, 57 aa, Zea mays
  unsure (1)..(57): unsure at all Xaa locations
  Clone ID: MRT4577_153211C.1.pep
SGVSLGDKYVELSVCRSVWQLTNSPLSWXYYCSWLATSXSSPLLFLLSPPPPPPVTK

SEQ ID NO: 243015 - protein, 148 aa, Zea mays
  Clone ID: MRT4577_153212C.1.pep
GREHFAPEQKGTEESPSKSPQVASRLQQQSLYDRHVGPLTYASLLLCPLPPVPRIAPFPNPTSKPLPLRLPFPANATAPRYRRQHRLPSATSPAKSQAAATVATLRRGPCPAAVHRWVHREYRGSKRLRHHRCVAHRPRLMNRGPVRC

SEQ ID NO: 243016 - protein, 418 aa, Zea mays
  Clone ID: MRT4577_153213C.1.pep
MAGAPRARSLNIAVPEAEARPVLVPGGNKARSGPANARKPSPKPVRKAEPAPAGTPEETVPAATKAEEGAKRNAVGGGGGGAPKGASPVPSPRRTPPGPPSRRNDAPLSHPGLPLSASCSSDASAESVRARRAFTGKVEKGRSVPTAQPKQGKAVGKAVESKPIRVEVVAPMTVTPEAVQGKRRCAWVTPTTDPCYVTFHDEEWGVPVHNDRRLFELLVLSGALAELTWPEILKKRQLFREIFMEFDPAAVSKINEKKLVAPGCVAHSLLSEQKLRAVLENARQILKIADEFGSFDRYCWGFLNHKPIVSKFRYPRQVPVKSPKADIISKDMMRRGFRGVGPTVIYSFMQAAGLTNDHLVSCFRFEHCSAVPTLCACDIDRANTKVDLKKDEVTAKIYREEVIANPEMLRTIDALTVS

SEQ ID NO: 243017 - protein, 122 aa, Zea mays
  Clone ID: MRT4577_153214C.1.pep
RLAGFSLFCQLLPLPKAVGPRVVVQLPDRGPASPSAFPLSLPVLLFLFSLLFSGLFFGPCSFRFFFFLGVSFVTRCFPLWLSAGVLSGFLPCSGFPLSPGFALFSSPLGARPGARIHYQQSP

SEQ ID NO: 243018 - protein, 68 aa, Zea mays
  Clone ID: MRT4577_153215C.1.pep
SPPPFFFFFFFFFFFFFFFFFFFFFFFFFLGENWQFQRLVNFMCKKGETKRKLVPEVVRFSQPVDHVS

SEQ ID NO: 243019 - protein, 182 aa, Zea mays
  Clone ID: MRT4577_153216C.1.pep
HCNKTDKASMLDEAIEYLKSLQLQVQMMWMGSAGIAAPPAVMFPGVHQYLPRMGVGMGAAAAAARPSMPRLPFMAPQPVVPSAPVSVGPVPAYRGHMPAVGITEPYGHYIGVNHLQPAPPPPQVQHYAQGVSYYPPPLGATAKAVQQAAELHHVPGPGGSIMPAGAAPGVLLPESAQGRGPG

SEQ ID NO: 243020 - protein, 131 aa, Zea mays
  Clone ID: MRT4577_153217C.1.pep
LVPRAGRKKYSLAVLALTCVFSAAFGWSWGPLTWVIPGEIFPVEIRSAGQGVSVAVNLGATFLLTQTFLSMLCTLKYATFIYYAAWVAVMTAFVVAFLPETKGVPLEAMGAIWERHWYWRRFVQPSVAEDP

SEQ ID NO: 243021 - protein, 43 aa, Zea mays
  Clone ID: MRT4577_153218C.1.pep
NVMHNDLSSHIKYLNIKINYWAVVLEDSRLRTCACDYIALFIV

SEQ ID NO: 243022 - protein, 133 aa, Zea mays
  unsure (1)..(133): unsure at all Xaa locations
  Clone ID: MRT4577_153219C.1.pep
LTKAMIXSWSERMISXTGTXTRSXLLREAAGXFIYFLMXTWYIDMKGYYDVCXKSPILEAFLGIGXEIDPLPWVCHESPXXLKLIPSALHGQTFISEXNXSHXXXXFCXPVHYLXNXXXXSNQTXLFVPXNFX

SEQ ID NO: 243023 - protein, 113 aa, Zea mays
  Clone ID: MRT4577_15321C.1.pep
YSAETVSGFLYDMLQKEVLPVRKTCHEKDQILKDKDDAIEMLAKKVDTLTKAMEVEAKKVRREVASMEKEVAAMRASKEQEIRAKRLGTKGSGSSQLLPGRNAPRSGSMRNFQ

SEQ ID NO: 243024 - protein, 79 aa, Zea mays
  Clone ID: MRT4577_153220C.1.pep
TSITRMHPQPIQDHIYYDVHMHDDHHICTDHCDVYSDDCHRSGECVLKVHQCLHVLHLQLNNLLLKLADMHELYPNELN

SEQ ID NO: 243025 - protein, 474 aa, Zea mays
  Clone ID: MRT4577_153221C.1.pep
MATTALLRALRRPSSEAALRLATKANVQTTNGYRHLNNRNLSVFNEFSKQLKGEAKSNPEFQKSMKEFSEKLDVVKEDLKVRTKKTTETIYKRVDDVWSEAEETSKKVTANIKEKMFAAKEEVKESFGVGKEESTSCRDGLPEGSKHEKTEASSHSDGTTEDATDSHTLFTKLKSTISSASPVVSGAFAKLKDTKVSTLAKQGYEIVKDELSSNSSRKKKHQARHASAKVEKSTRTDLVLTPTKKTVLGEKWEEFKNKIRGHPVYRRVDEYTKPVVTKGQEVAEDVRERWETSDNPVVQKIQDLNESLLEETSAAVTFREIRQRDPSFSLSDFVADVQEMIKPVLTAYSKGDAETLKNYCTKEVIERCKGEREAYASQGIFFDHKILHISEADVLETKMFGSSPIIILRFQTQQIYCVRDREGQVTEGGQDTIQTVFYSWAMQLMDSDEVPEEESYYPVWRLREMQQAGIKALI

SEQ ID NO: 243026 - protein, 117 aa, Zea mays
  unsure (1)..(117): unsure at all Xaa locations
  Clone ID: MRT4577_153222C.1.pep
MKIAQKRLRETLQXRYKELXQDIIAILGLDELSEEDRLTVARARKIERFLSQPFFVAEVFTGSPGKYVGLAETIRGFQLILSGELDGLPEQAFYLVGNIDEASTKAINLEEESKLKK

SEQ ID NO: 243027 - protein, 72 aa, Zea mays
  unsure (1)..(72): unsure at all Xaa locations
  Clone ID: MRT4577_153223C.1.pep
PNPWHVSFSYARALQNTXCLKTWGGQPDKVKAAQDALLLRAKANSLAQLGKYTSDGEAAEAKEGMFVKNYSY

SEQ ID NO: 243028 - protein, 91 aa, Zea mays
  Clone ID: MRT4577_153224C.1.pep
HSIGRLGSSRPAGLNAMNQGPNPWHVSFSYARALQNTCLKTWGGQPDKVKAAQDALLLRAKANSLAQLGKYTSDGEAAEAKEGMFVKNYSY

SEQ ID NO: 243029 - protein, 69 aa, Zea mays
  Clone ID: MRT4577_153225C.1.pep
TAIQELFKRISEQVTAMDRRKGFLHWYTGEGMDEMEFTETESNMNDLVSEYQQYQDANADEEEDFGDEA

SEQ ID NO: 243030 - protein, 37 aa, Zea mays
  Clone ID: MRT4577_153227C.1.pep
MVVKNFMKVVRDLGMQEVRRHFHPELLNRFDEIVIFV

SEQ ID NO: 243031 - protein, 35 aa, Zea mays
  Clone ID: MRT4577_153228C.1.pep
HVMELLNTMLCNSHRLMTVTCPLQGIQVPRHISYD

SEQ ID NO: 243032 - protein, 99 aa, Zea mays
  Clone ID: MRT4577_153229C.1.pep
TGSCPCPSRSSPTASFLFLAVGVCSKIAHGLMHVPVSLPIPSMNIISPYVRSLDFSSDYIFSMHGEYINVSFEEFIYTNYLGFFKVVPSVLGVVSFTCI

SEQ ID NO: 243033 - protein, 276 aa, Zea mays
  unsure (1)..(276): unsure at all Xaa locations
  Clone ID: MRT4577_15322C.1.pep
SPFRSRLLRPRLSPSRVSLSVSTPSDRSXSMESSQSRKRTRQAYDCAAALPPEREVVARGGASPPWREDDRDGHYVFDLGENLTRRYKILSKMGEGTFGRVLECWDRETREYVAIKVVRSIRKYRDAAMIEIDVLNRLAENEKYRSLCVQIQRWFDYRNHICIVFEKLGPSLYDFLKRNRYRPFPVELVREFGRQLLESVAYMHDLRLIHTDLKPENILLVSSEYIKVPSTKKNSQDEMHFKCLPQSSAIKLIXDFGSTAFDINDQLDCSTRHYRH

SEQ ID NO: 243034 - protein, 107 aa, Zea mays
  Clone ID: MRT4577_153230C.1.pep
LLHDVPSLTQLAVANPAAYLQQLLPFNQLTVSNSAASLRRRQQFLNPLAVPNPLVTAFLQQQQLLPYSQFSLMNPALSWRLPIAGGALFSVACDMCSFLVPSCRPVF

SEQ ID NO: 243035 - protein, 342 aa, Zea mays
  Clone ID: MRT4577_153231C.1.pep
MEQAAMPPVPRVKLGTQGLVVSKLGFGCMGLTGTYNAPLGDEAVAAVVAHAFRRGITFFDTSDAYGPRTNETLLGKALKQLPREQVQVATKFGIGQGAAGMTVCGTPEYVRACCEASLRRLDAGYIDLYYQHRVDTTVPIEDTIGELKKLVEEGKVKYIGLSEASPDTIRRAHAVHPITAVQMEWSLWSRDIEPEIVPLCRELGIGIVAYSPIGRGFFGGRGVTQQVSSESSLQRHPRFTTESLEKNKQIYLKIEDLAKKYQCSPAQLALAWVLHQGDDVVPIPGTTKTKNLDANVDSLKVKLTAEDLKEIGSQIRAEDVAGGRQYNSYAHTSWKYADTPKK

SEQ ID NO: 243036 - protein, 85 aa, Zea mays
  unsure (1)..(85): unsure at all Xaa locations
  Clone ID: MRT4577_153232C.1.pep
EEMANLSQHHTYLPIQAKHNINFIMTTIKRNMDVQNYAYAKHMLHLIYSKAPITKQDXLTILIHMNIQTSLTNKFIDTIDDPSQF

SEQ ID NO: 243037 - protein, 35 aa, Zea mays
  Clone ID: MRT4577_153233C.1.pep
TGQPFPFAWFLNLNISYYFILFRGPDSTHNYVAHN

SEQ ID NO: 243038 - protein, 227 aa, Zea mays
  Clone ID: MRT4577_153234C.1.pep
MDRPGVSPSGHLFPHPHPHALQSPPAPSRSPTTAAMSFAAALHLRPTSATTHPRLHQSTRKSYFLRLQPSRRRLPVPRLSLTPTTASNSNSSPPPPSPSPAPAAPGSLLANWSPPRAIWRGLSALLLAGQVFHRVLTGRVHRRNLLAQLRRVGPGSAGVALLTAAFVGMAFTIQFVREFTRLRLHRFVGGVLALALARELSPVVTARETPSTWPCPSSTRARNHDLC

SEQ ID NO: 243039 - protein, 234 aa, Zea mays
  unsure (1)..(234): unsure at all Xaa locations
  Clone ID: MRT4577_153235C.1.pep
RRRWARGPRGETGGRGRGGGAVAVAEAGGEVVAQGNATEAKEGSLADMIDRALEKEFPESEGEQGGGETDPGSFNNTVAEKQGVLETVARRVTKKNETKDNKSFPFKEVFLDRTEQEDVPTLIDRKDNVFIISNPKSKYPVLQLDLRLISDLVVVIVSATCGGIAFACLGQPVITGYLLAGSIIGPXFSFVNEMVQVETVAQFGVIFLLFALGLSFYCVRAVAVLAPISFCGFS

SEQ ID NO: 243040 - protein, 97 aa, Zea mays
  Clone ID: MRT4577_153236C.1.pep
RGNTTTRTEQTGRRKLHAQLYSSSMTIKQSISKAIIQAIRKDTQSTATTEGELRLNLALRGIRILTQHCELRRTEEAQARRQGISKTTVYDPAYLCE

SEQ ID NO: 243041 - protein, 61 aa, Zea mays
  Clone ID: MRT4577_153237C.1.pep
TLVVSNSLYCSLISGLFFLQIEPIRNLFAALFLASIGMLINVHFLWNHVDILLAAVIFVIT

SEQ ID NO: 243042 - protein, 122 aa, Zea mays
  Clone ID: MRT4577_153238C.1.pep
GQKKSRKAGVSGINKEGVSTRGPSPNPNFRAKKGLQILPLGSPNKRGKKKGGAGPISARAGKRGQNGKIQDKTGGQMGSAGGERAPTLVFFWTTQPGGGAGPKSPSYGGGWGPLPWGKPFFF

SEQ ID NO: 243043 - protein, 89 aa, Zea mays
  Clone ID: MRT4577_153239C.1.pep
VITKTTVIVHIRCIQMKVNVFVWVDKFISLRSLLKGGYAIIKVYWRSMDLEFSVDFLLVFCIKLTVCLQMSEVVLTSFLMERWGASGCC

SEQ ID NO: 243044 - protein, 299 aa, Zea mays
  unsure (1)..(299): unsure at all Xaa locations
  Clone ID: MRT4577_15323C.1.pep
MESSQSRKRTRQAYDCAAALPPEREVVARGGASPPWREDDRDGHYVFDLGENLTRRYKILSKMGEGTFGRVLECWDRETREYVAIKVVRSIRKYRDAAMIEIDVLNRLAENEKYRSLCVQIQRWFDYRNHICXYMHDLRLIHTDLKPENILLVSSEYIKVPSXKGLGWSFPCDIWSVGCILVELCSGEALFQTHENLEHLAMMERVLGPLPEHMIRKSSSSAQKYFRRATRLNWPEGAVSRESIRAVKKLDRLKDLVSRNAGHSKAELADLLYSILRFEPSERLTAQEALEHPFFRNPT

SEQ ID NO: 243045 - protein, 164 aa, Zea mays
  unsure (1)..(164): unsure at all Xaa locations
  Clone ID: MRT4577_153240C.1.pep
MLPRRFSSHPGSSSPLPFLVVCGLLLAAAVAFSPVAAAEAAGRGGGGGGGGAGHEGRAGKPEVEAEAEARGDGVAVAEAGGEVVAQGNATEAKEGSLADMIDRALEKEFPESESEQGXGETDPGSFNNTVAEKQGVLETVARRVTKKNETKDNKVFAFKEVFFG

SEQ ID NO: 243046 - protein, 479 aa, Zea mays
  Clone ID: MRT4577_153241C.1.pep
YQQQTLHNILLNKLVLSADRTQPHLSRGSLPCPLWDANRVRSLWNHVDIQSLPQDNVFIISNPKSKYPVLQLDLRLISDLVVVIVSATCGGIAFACLGQPVITGYLLAGSIIGPGGFSFVNEMVQVETVAQFGVIFLLFALGLEFSTAKLRVVRAVAVLGGMLQIMLFMFLCGILATLCGGKTKEGVFVGVLLSMSSTAVVLKFLMERNSINALHGQVTVGTLILQDCAVGLLFALLPILSGTSGLLHGVASMTKSLVVLITFLTILSILSRTGVPWFLKLMISLSSQTNELYQLAAVAFCLLFAWCSDKLGLSLELGSFAAGVMISTTDLAQHTLEQIEPIRNLFAALFLASIGMLINVHFLWNHVDILLAAVILVITVKTFIVAIVVKGFGYSNKTSLLVGMSLAQIGEFAFVLLSRASSIHLIEGKLYLLLLGTTALSLVTTPLLFKMIPAVVHLGVLLRWFSVDTNQVEVHDHTS

SEQ ID NO: 243047 - protein, 111 aa, Zea mays
  unsure (1)..(111): unsure at all Xaa locations
  Clone ID: MRT4577_153242C.1.pep
LLMEFEKWVLRAESXGXILKXPLDXQSSLGSEEVIKAKKRRLGRAQKIIGDYCLLAGSPVDANAPYTPAIELARLAGDVFWHAGALEGSVCALVRRGYESLEDQVGTWERV

SEQ ID NO: 243048 - protein, 81 aa, Zea mays
  Clone ID: MRT4577_153243C.1.pep
LSSTVPPKFLPLYPTHMPRQRSLSPYISTLYSGSPYIKPLYPTTPKKKKKNQKKKKKKKKKKKKKKKKRKIGGGNLKKYLL

SEQ ID NO: 243049 - protein, 348 aa, Zea mays
  Clone ID: MRT4577_153244C.1.pep
MEATMQDILDALARMEARLTDALVGRCGEQYAREHTSPFDGSVPPSSIVNTQYRDEAILPPLVHDDAAKVASLDSGNDFGLQQTATVLASLGSDEMSSSTTLLAGSISDRYIPPLYDDDCYTMPQPFVDTLANPDDDLLQELDVLDEDAASANAADDDSGVVLVYAPLDSNIDSSGSPRYPCLPEGAVLFHRDPHEKVLIGGTELSGEVRRLRFSLSSPDQAMNPALVPNTDAEEEEFSHHAHKCSTIYLTAAFTRPRLIVKHPISSRYTANARCFLRREPSKAPTAAQTKMDIELVIAKATLSPLLGLDEAKAPPDVHAYITPSNDSTMAHVYAYVVGCQCQGSIAP

SEQ ID NO: 243050 - protein, 223 aa, Zea mays
  Clone ID: MRT4577_153245C.1.pep
PRSSPARYSTTSSRHSTTTTATPRHNRLSVLSPTLTTTSSRSSTGWTRTPRAPTRLTTIQALSTSMRRSTPTRRSTRTSTPVDHRATRASPRARRCSVGTRIRRSTMGSSAASASTSGASWTRSNTRPQGWSRRSSPSTGTSTSSSRRGSSTWIRYLRSSPTPTQRRRRFSRPRPPGVREWASTVAHTPSPTSSWSASWAHPNSTNTAPTAVLHRTRLQRPPL

SEQ ID NO: 243051 - protein, 45 aa, Zea mays
  Clone ID: MRT4577_153246C.1.pep
LAIASGGPKPKLAYIILYVKVVEKAVSFYDSAFGYTVRRLDQSRK

SEQ ID NO: 243052 - protein, 54 aa, Zea mays
  Clone ID: MRT4577_153247C.1.pep
VKHFSKKNVRVPKVGTQLFCKMGITGLKNKLKSVFGVTWFFWGTRLVFNNNLLG

SEQ ID NO: 243053 - protein, 623 aa, Zea mays
  Clone ID: MRT4577_153248C.1.pep
MGSRSAGAALRLWLLALLLGCCQGRFVVEKNSLKVTAPDGLKGTYECAIGNFGVPQYGGTMVGFVAYPKANRKACKSFDDFDISYKAKPGAFPTFLLVDRGDCYFAKKAWNAQKAGAAAILVADDKDEPLITMDNPEEGGNTDYLENITIPSALITKSFGDRLKKAIDSGDMVNVNLDWREALPHPDERVEYEFWTNSNDECGPKCDSQIDFVKSFKGAAQVLEKKGYTEFTPHYITWYCPEAFILSKQCKSQCINHGRYCAPDPEQDFSKGYDGKDVVVQNLRQVCVFKVAKEHKKPWLWWDYVTDFAIRCPMKEKKYTKECADGVIKSLGLDHKAIDKCIGDPDADEENHVLKAEQDAQIGKGSRGDVTILPTLVINNRQYRGKLDKGAVLKALCAGFRETTEPAVCLSDDIQTNECLENNGGCWQDKAANITACKDTFRGRVCECPVVKGVKFVGDGYTHCEASGSGRCEINNGGCWKDTKNGRTYSACTDDGCRCPDGFKGDGKHKCEDVDECKERTVCQCEECRCKNTWGSYECGCSGGLLYMKEHDTCISKNGASEAGWGFLWAVVFGLVAAGIAGYAVYKYRIRRYMDSEIRAIMAQYMPLDSQGDVQSHAHHIEM

SEQ ID NO: 243054 - protein, 209 aa, Zea mays
  unsure (1)..(209): unsure at all Xaa locations
  Clone ID: MRT4577_153249C.1.pep
MGSRFASAALRLLVCAALLLGCSHGRFVVEKNSLKVTAPDDLKGTYECAIGNFGVPQYGGTMVGFVAYPKANRKACKSFGDFDISYKAKPGAFPTFLLVDRGDCYFAKKAWNAQKAGAAAILVADDKDEPLITMDNPEESGNTDYLENITIPSALITKSFGDKLKKVIDNGDMVSVNLDWREALPHPDERVEYEFWXNSNDECGPKCDS

SEQ ID NO: 243055 - protein, 86 aa, Zea mays
  Clone ID: MRT4577_15324C.1.pep
LPKLVGGVVNLCSVGRPAPMAFVASFGGAASLFGPEVPVHVRELLWGQFWVEDGVFFFPVLGPARPLGWVLASGPRTGMVLAAMGV

SEQ ID NO: 243056 - protein, 84 aa, Zea mays
  Clone ID: MRT4577_153250C.1.pep
AASTPTPTARSSRCAARRRAAWLPPPRRPWRRSKLVPTLSAKEPQGGRHGGWPRSGGCTFFFPGRNSLVPYLNYPPFLLLVSSS

SEQ ID NO: 243057 - protein, 65 aa, Zea mays
  unsure (1)..(65): unsure at all Xaa locations
  Clone ID: MRT4577_153251C.1.pep
PSVFFYLVWSLPAFGXFTRWAALRCGGVAASPWGGCGEXCTXXEPCEMGGGGGGSGKRMFWKLFN

SEQ ID NO: 243058 - protein, 49 aa, Zea mays
  Clone ID: MRT4577_153252C.1.pep
LEPAFIALGELDARSDLELGHRLRHTDAKLASRTGRKAPTLRCTRDLLS

SEQ ID NO: 243059 - protein, 199 aa, Zea mays
  unsure (1)..(199): unsure at all Xaa locations
  Clone ID: MRT4577_153253C.1.pep
ANMQDARLRLNPKKCVFGVRQGKILGYLVSHRGIEANKTKIQAIINMTXPQSARDVQRLTGRLAALNKFISKSAERSLPSLRTLRGAKDFAWGPEQAVAFASLKPYLSELAILTSPDPSLPLLLYIAATPHAVSASLVQEQNREGTIRQCPVYYVFEVLTTSKCNMTELEKIAYAVVMASRKLHHYFEAFKVWVTSDRE

SEQ ID NO: 243060 - protein, 55 aa, Zea mays
  Clone ID: MRT4577_153254C.1.pep
EVNQNRMIAVYTCPSTLAYGVIASMFDKSTICILYCEWFGASMSRLLFSFRIATL

SEQ ID NO: 243061 - protein, 160 aa, Zea mays
  Clone ID: MRT4577_153255C.1.pep
GCHRCLSNLASEQDDRLQLLTLKSLIVQQRRADGRHVKLNSYAKHTYDPQQKKKKPEGNRKHHGKGNTTNRWILHQPRPMSRWLMAFSTCDTLLIILSSLDSAAISWSLVRRSPRARLVCGGVQPPQRRRYPLFRGIDDTLLGSWPLRATCLRRRRRSRP

SEQ ID NO: 243062 - protein, 97 aa, Zea mays
  Clone ID: MRT4577_153256C.1.pep
KILKGKISLSLYFPVRKYLTVIITRWLFGYPTVPERITEWLFAREPYRSTTSTHKKKPQRLSAPPSLESGEIYGEMTTATCGCGLRELEKRAATAKN

SEQ ID NO: 243063 - protein, 166 aa, Zea mays
  unsure (1)..(166): unsure at all Xaa locations
  Clone ID: MRT4577_153257C.1.pep
MAPSATCPLHSMASVSRALRPRPRLAAPRLGCGLRVGCSVPAYGGAATEKTGWGLAIAPAPATTLVPVVRSRQIFCKAEANISSNLPASEPTGASQYEKIVELLTTLFPVWVILGTVIGIYKPSMVTWLETDLFTVGLGFLMLSMGLTLTFEDFRRXLRNPWTVGV

SEQ ID NO: 243064 - protein, 60 aa, Zea mays
  Clone ID: MRT4577_153258C.1.pep
IYTLSGISLLQSSSWVSLSKSGRTPCRFCHVPPVSSQQPVPFPISHTYDRSGSLPRRAGP

SEQ ID NO: 243065 - protein, 70 aa, Zea mays
  unsure (1)..(70): unsure at all Xaa locations
  Clone ID: MRT4577_153259C.1.pep
KXRRCGSEKKRGGTACTRCRWGEIKLGAPPTALQCETESDCTCYYSTCXSEKGRHAATKSLLIFPFHQNI

SEQ ID NO: 243066 - protein, 76 aa, Zea mays
  Clone ID: MRT4577_15325C.1.pep
QLGLVTRVNSFQRFYLLLHKPLQGRSSSHDSQKEVIGFFRLALCRNCTGNITALAPLSHSFFKIHTFEMCGSANMV

SEQ ID NO: 243067 - protein, 56 aa, Zea mays
  unsure (1)..(56): unsure at all Xaa locations
  Clone ID: MRT4577_153260C.1.pep
MAPSKVALFLALNLVLMAAAHXCGSYCGNTPAIPVATPPMAMPPPIVPTPPTTGGG

SEQ ID NO: 243068 - protein, 213 aa, Zea mays
  unsure (1)..(213): unsure at all Xaa locations
  Clone ID: MRT4577_153261C.1.pep
PPLPFLFFPPLFFFSLVFFVCFFFFFFFKRGPGLRAGALLFLLIKKKTFSPFWGGNSPKPPPFFFFYFPQGTPPHGPLLLKRGFFGVFPGPPTRVCPPFWAPFRAPPPPPXPVFKGRAPFPPXFCPEPFQTLPGIPPGPWPPSVRPSIVPCPGPPQGTPPXPLNPIGPGGREINPPPLGTGXPSPKRPXRDLRPGVRPPPPPPGNGGPFRNKP

SEQ ID NO: 243069 - protein, 111 aa, Zea mays
  Clone ID: MRT4577_153262C.1.pep
FGVFFSPRGLFRMGFFLEKGVLGPVSVFFPFSPGFPFKKALFFQGPSYGPFLNGKPFLGGGGFWGGLNMGWGFFWGFCFLVEFFLPPLLGCGFFPSFFFWPPLFLPVLWVS

SEQ ID NO: 243070 - protein, 97 aa, Zea mays
  unsure (1)..(97): unsure at all Xaa locations
  Clone ID: MRT4577_153263C.1.pep
HPVDMVTTSHDYGPXLTCVINDIDXKKHIEIGRYIYYXVMGTALLLLEDXTMLADDINAENYELSLSCINKYCVRHKIDFQXRPALLVLQDLMMYME

SEQ ID NO: 243071 - protein, 147 aa, Zea mays
  unsure (1)..(147): unsure at all Xaa locations
  Clone ID: MRT4577_153264C.1.pep
AVVRRLVDPAAFRLSSDRLLGHPAGRVSNGDIXGRRAVRRRPARDAVVGTVPLLRRHALQCGGTEQLAGEQHRTIRQEARGGDVRCGFAKPKAAAAVQCVLRDVEEGRVGAADNTAVAAGEAAAHRGVDSQSQMLIRRVAGHLIKSY

SEQ ID NO: 243072 - protein, 115 aa, Zea mays
  unsure (1)..(115): unsure at all Xaa locations
  Clone ID: MRT4577_153265C.1.pep
RSAWGPDVPPPPPVRRRRKEAGTXGPPPLXSNASSRSSSPPRTDPAGSRSPHLPSGRXARSLSXTRSPPPRRTGPGSRRQRTTSPGSSTKTRGSSRLPALQRQAAWSSCWAREQR

SEQ ID NO: 243073 - protein, 73 aa, Zea mays
  Clone ID: MRT4577_153266C.1.pep
QAGVPLPARAIRMPHSPLFRQEKRLASHPPTAICARPYLNTFSRKHGPLTRQSSLQVNARRVLNISRNSILDI

SEQ ID NO: 243074 - protein, 1214 aa, Zea mays
  Clone ID: MRT4577_153267C.1.pep
MAQQNEILRQLAQRQPPPQHYGGGDHQRHPTAATYQEFLSTQPPLFTRVEDPLDADVWLRLVESKFPLLNGVCSEVTKVRFATQQLRGPARTWWDHYLAMQPVDHEVEWREFKAAFRGHHILASIMDRKLNVFLALTQGNQTVLQYAQAFNDLCQYAKYHADTDEKKRDRFRRGLSTKLRDRLNTVRANNYNELVNMAISQEDCIIARQAEKKRKTPVAGPSAQPHRFRIISDTQNRGPQQQQGRWAVIDVAARAIEIHSPLDGEITLYLPDQGCTRSCAFTMIESPVEKIPIVCDYPDVFPDELPGMPPDRGIEFAIELQPGTAPISKRPYRMPPAELAELKKQLQELLDKGFIRPSTSPWGCPALFVKKKDESLRMCVDYRPLNAVTIKNKYPLPRIDVFFDQLVGAKVFSKIDLRSGYHQIKIRASDIPKTAFSTRYELYEFLVMSFGLTNAPAYFMYLMNSVFMPELDKFVVVFIDDILVYSKNEDEHTEHLHIVLQRLRDHRLYAKLSKCDFWLREIKFLGHTISQDGISVDPEKKGVKYDWSQRCEDAFNTLRQHLTTAPVLAQPDNTKPFEVYCDASGTGLVCVLMQDNRVIAYASRALRPHEQNYPTHDLELAAVVHALKIWRHYLMGAHCNIYTDHKSLKYIFTQADLNMRQRRWLELIKDYDLEVHYHPGKANVVVDALSRKAQCNCMNMDARITTLCDELCKLKIEVVSSGALSYISVEPTLQEQIVMAQIGDKGVQVIKEMIEQKAEKYKCFRQDSKGILWFGDRLVVPKNPELRKKILDEAHLSKFSMHPGSNKMYHDLRSLYWWTRMKREIAKYISECDTCRRVKASHLKVAGTLQPLPIPSWKWEDICMDFIVGLPNTSQHHDSIWVIVDRLTKTAHFLPVHTTHKTEKYAEIYVDQIVRLHGIPKTIVSDRGALFVAHFWEQLQESLGTHAIRSSAYHPQTDGQTERVNQILEDMLRACVLHYGKNWDKCLSLAEFSYNNSYQSSLKMAPFEALYGRRCRTPLNWSQAGEREIFGPDLVLEAEEKVRVIKKNLEAAQARQKSYHDKRRKPLQFEVGDHVYLKVSPTKGVQRFGIKSKLAPRYIGPYEIKANCGPVAYQLKLPPHMSAVHDVFHVSQLRKCVRLPTEVLPEPEIEVEPDLSYQEHPVKVLDQKERSTRAKSIRMYKVQWSHHSVEEATWETEDFLRSRFPNFLPKGVGT

SEQ ID NO: 243075 - protein, 1358 aa, Zea mays
  Clone ID: MRT4577_153268C.1.pep
MTSHGSSDEGNAQSHTDGLAREGFRCILWEVLQGAGYMTPPLYAVQQLEKHRVPRCRVRMTLEPHPLQPGWRSLDFECFGYRAEDTIEAIALHGLTTFCRFHPLELSTHPIGLFLTEKEDDPMWKDRVEHAKDIWAIYPCQTAHLTVRCMNALYRLQVMRGEAMSHLMALLEATKITLDNREELVVDLSTEMVEKDLQVEQLSNEIQELEELVGTRENTLEELMAQQNEILRQLAQRQPPPQHYGGGDHQRHPAAATYQEFLSTQPPLFTRAEDPLDADVWLRVVESKFPLLHGVCSEVTKPEDREVEWREFKAAFRGHHIPAGIMDRKLNEFLALTQWNRTVLQYSQAFNDLCQYAGYHADTDEKKWDRFRRGLSTKLRDRLNTVRANSYNELVNMAISQEDCITARQAEKKRKSPVEGPSAQPQHFRIVSDTQNRGPKQQQGRWVIRPQQQQQYRQANDNMCFTCGNTGHYAKNCPMNQQRQRQNANQNQGKRQKVQVRQGRLNFTTMADIPEGAPVMTGIFSVSNYPAIILFDSGASHSFISAKCQLPFHHTNGGITISTPGGRVATYQINKNVPIKFGSLIIKTNLLILGLNSVDIILGTDWLTKHQATMDTAARAIEVHSPTCGETTLYLPNQGCTRSCAFVMIESPVERIPLVCDYPDVFPDELPGMPPDRDIEFAIELQTGTAPTSKRPYRMPPAELAELKKQLQELLDKGFIRPSTSPWGCPALFVKKKDESLRMGVDYRPLNAVTIKNKYPLPHIDVLFDQLLREIKFLGHTISQDGISVDPEKVQEVMYWKPPTTVRQIRSFLGLAGYYRRFIPDFSRIAKPMTELLKKGVKYNWSQKCEDAFHTLRQHLTTAPVLAQPDNTKPFEVYCDASGTGLGCVLMQDNRVIAYASQALRPHEQNYPTHDLELAAVVHALKIWRHFLMGAHCNIYTDHKSLKYLFTQADLNMRQRRWLELIKDYDLEVHYHPGKANVVADALSRKAQCNCALNYISVEPTMQEQIVRAQIEDKGVQVIKEMIKQKAEKYKCFRQDSKGILWFGDRLVVPKDPELRKKILDEAHLSKFSMHPGSNKMYHDLRSLYWWTRMKREIAKYISECDTCQRIKVIHLKVAGPLQPLPIPSWKWEDICIDFIVGLPNTSRHHDSIWVIVDRLTKTAHFLPVHTTHKTEKYAEIYVDPIVRLHGIPKTIVYDRGALFVARFWEQLQESLGTHAIRSSAYHPQTDGQTERVNQILEDMLRACVLHYGKNWDKCLSLAEFSYNNSYQSSLKMAPFEALYGRRCRTPLNWSQAGEREIFGPDLVLEAEEKVRVIKKNLEAAQARQKSYHDKRRKPLQFEVGDHVYLKVSPTKGV

SEQ ID NO: 243076 - protein, 95 aa, Zea mays
  Clone ID: MRT4577_153269C.1.pep
CILRDHAVCRHRFPPEPPPPSFEAQTQQNLPSVALGGFETQTTKPVMSTAPRARPSRSDACPASPRPCRQHSPLHYVLAQVCPRCQPPRLVTWLL

SEQ ID NO: 243077 - protein, 93 aa, Zea mays
  unsure (1)..(93): unsure at all Xaa locations
  Clone ID: MRT4577_15326C.1.pep
IGYLEAGRAPSIHSPLPALLYTPSSAPVLSLRTSSTPTTGLLAAAALLRRPRSALFXPLRSATNDTSYLYPEHTADLTHLRTKNPSLNLNPFA

SEQ ID NO: 243078 - protein, 194 aa, Zea mays
  Clone ID: MRT4577_153270C.1.pep
PPPPPPKEKSGDRGGVPFFAPHLINPRKYAFPGSGFGSKKNFPLFFLLPPLPPSRLSIRPRAGSRCFTGFFPAPRHSEKKKNPPPFPSVFFFSCSFWSREKKKTKVFFVPGPGGPEGIRGSSPPVPLPFVFGRKLTLGLASSVVPCLSGHVRLVTSIEKGTSPVVVKILFLPLPNQKKKKKKKKKKKKKKRNKN

SEQ ID NO: 243079 - protein, 67 aa, Zea mays
  Clone ID: MRT4577_153271C.1.pep
SAGHAHSIPAHIVSVPFTHARGISDLSARGEMYDRGRRPLLLRRRETADDSRSERRPVENGGEYHCG

SEQ ID NO: 243080 - protein, 68 aa, Zea mays
  Clone ID: MRT4577_153272C.1.pep
TARQRILLTARVLAKRVYYHKEGWKNHFVVIINNSRLRAKRSRGNCHSISIFYTSPELELIKEGGPTL

SEQ ID NO: 243081 - protein, 93 aa, Zea mays
  Clone ID: MRT4577_153273C.1.pep
ASSSSSSSSSSPRHPRQHAAAFAAATLESHLFNAPYLSLPMGVRSVVRTADCLLKALRSGVATVGKWHGKALRNVAYASCILGYTRLESTRKL

SEQ ID NO: 243082 - protein, 85 aa, Zea mays
  Clone ID: MRT4577_153274C.1.pep
NGMFLHNELYLLECNPLSHFWVVACLFLTADTVCLRRVDYRIIHLCRQDHRYNPPRLFLIHCFLERVGGRVRPPNNSVRSSRRAT

SEQ ID NO: 243083 - protein, 619 aa, Zea mays
  Clone ID: MRT4577_153275C.1.pep
MLVLRRLRLRLPLPRPLLVSSFSSTSPSSSPSTSSSSSCWSSTGESRRAMASSPSPDSAAVVAEGSAARRFWIAASTREAAFAAYTPFLLSLAAGNLRLNVFRHYIAQDAHFLHAFARAYEMAEDCADDDDDMATIAALRKAILQELNLHSSVLKEWGVDPTKEIPPSAATTKYTDFLLATAAGKVDGTKGSDKMVTPFEKTKIAAYTVGAMTPCMRLYAYLGKELMVFLKQDENHPYKKWINTYASSDFEDTTLQIEELLDKLSVSLTGEELEIIGKLYQQAMKLEVEFFSSQLIDQPVVAPLSRYCDPKYKLLIFSDFDLTCTIVDSSAILAEIAILSFQKANQSGIDNNLDRAKSGDLRSSWNMLSKQYMEEYEKCMERLLPPEESKSLDYDKLYKGLEVLAEFEKLANSRVVDSGVLRGMNLEDIRKAGERLILQGGCKNFFQKIVKTRENLNLDVHILSYCWCAELIRSAFSSAGCLDGLNIHSNEFAFEDSVSTGEIDRKMQSPLDKVEKFKSIRSDVDSTVPFLSVYIGDSVGDLLCLLEADIGIVIGSTTSLRRVGKQFGVSFVPLFPGLVEKQRQLAEEDASVFKARSGVLYTVSSWSEIHAFVLGSDFS

SEQ ID NO: 243084 - protein, 310 aa, Zea mays
  Clone ID: MRT4577_153276C.1.pep
MQLKAMGIGAENGNKENVPGADLPKPMSIEPPFAVDWLEISWEELELKERVGAGSFGTVYRADWHGSDVAVKVLTDQDVGEAQLKEFLREIAIMKRVRHPNVVLFMGAVTKCPQLSIVTEYLPRGSLFRLINKAANGEMLDLKRRLRMALDVAKGINYLHCLNPPIVHWDLKTPNMLVDRNWSVKVGDFGLSRFKANTFISSKSVAGTPEWMAPEFLRGEPSNEKCDVYSFGVILWELLTMQQPWSGLGPAQVVGAVAFQNRRLPIPKDTSPELAALVEACWDDDPRQRPSFSSIVDTLKKLLKALLGGS

SEQ ID NO: 243085 - protein, 88 aa, Zea mays
  unsure (1)..(88): unsure at all Xaa locations
  Clone ID: MRT4577_153277C.1.pep
CQGLKPSKLVIFHDGYDYTXSLVASTAVAPKKRLIVLLLQLCEAYRQTQKDCDKARQRCLHRCWGISRTILKGDGVCGQRALQWVLCA

SEQ ID NO: 243086 - protein, 45 aa, Zea mays
  Clone ID: MRT4577_153278C.1.pep
MRDRVYDIRGFRGPYSSLDGSKCVKDLYITGLSQAGPSAGPVWVT

SEQ ID NO: 243087 - protein, 112 aa, Zea mays
  unsure (1)..(112): unsure at all Xaa locations
  Clone ID: MRT4577_153279C.1.pep
HAYALLALLALLALAIALVVVLVVKPRKPQXDLDQVYMQYMLVASPTSGASLLPSTPGADYICINMTLVLTGQNPNKVGIRYSTTKFDVMYHGVPLEMAAVPGFEQPTHSTR

SEQ ID NO: 243088 - protein, 400 aa, Zea mays
  unsure (1)..(400): unsure at all Xaa locations
  Clone ID: MRT4577_15327C.1.pep
TESPDPSPSTGDPFCSLPCGPQPATNPRSQSRLLRPRLSPSRVSLSVSTPSDRSXSMESSQSRKRTRQAYDCAAALPPEREVVARGGASPPWREDDRDGHYVFDLGENLTRRYKILSKMGEGTFGRVLECWDRETREYVAIKVVRSIRKYRDAAMIEIDVLNRLAENEKYRSLCVQIQRWFDYRNHICXYMHDLRLIHTDLKPENILLVSSEYIKVPSTKKNSQDEMHFKCLPQSSAIKLIDFGSTAFDNQDHNSIVSTRHYRAPEIILGLGWSFPCDIWSVGCILVELCSGEALFQTHENLEHLAMMERVLGPLPEHMIRKAXKYFRRATRLNWPEGAVSRESIRAVKKLDRLKDLVSRNAGHSKAELADLLYSVLRFEPSERLTAQEALDHPFFRNPT

SEQ ID NO: 243089 - protein, 249 aa, Zea mays
  unsure (1)..(249): unsure at all Xaa locations
  Clone ID: MRT4577_153280C.1.pep
MCSHAHATTCVTCPPPSQGRLITVLSIDGGGIRGLIPSTILACLEAKLQELDGPDARIADYFDVIAGTSTGALVASMLAAPGDNKRPLFEAKDINKFYLDNGPKIFPQKSGGFLTSVWNLYGAVTGPKYDGKFLHDKIKSLTNDVTVADTVTNIIVPTFDVKYLQPIIFNTYEARVDPLKNAHLSDICISTSAAPTYFPAHYFTTHDPDGKQXREYNLIDGGVAANNPXMAAMVMITXEVMRRNPDSRT

SEQ ID NO: 243090 - protein, 34 aa, Zea mays
  Clone ID: MRT4577_153281C.1.pep
MCTLPPPPPQKAPPPPGRGARPPPPPGGRGRKKP

SEQ ID NO: 243091 - protein, 330 aa, Zea mays
  Clone ID: MRT4577_153282C.1.pep
TGHCELLDRNAPPLCSLFCGQNPQQCQLQDENWLLPAVYIGIGNIKDSPVVGFSTSTAPVLSPRQSRPLQELCTKTLRDAAGLDSWYMDALLSASTMASDLSFPLSVAKSSSFCWPRLRCSWMKCGSVSTDIHDLHTSLQAASARAGSLRNTSVRASSQINRAGSSTALAFLCSITSLLGQDKSAASRDGTTANAHYHTDTDQTARATTQDAPAPLVVLESRKRIAQFQRNKPKNKRTEAMKRRHEMRACIAAAETPPPEPPRTGRPNRRSDPLESGVAGGGDQRGGTRRGRAVQRIELTDRSAASGGRRLCAFPPPVSASSVGLGAEYA

SEQ ID NO: 243092 - protein, 77 aa, Zea mays
  Clone ID: MRT4577_153283C.1.pep
LLIFFAATYLIRRRMEAERFGQVVGEDILFISLDWMQTTVSINHIRHDNVNSSPNADVSQIYSNGLLVGRRNNVPEN

SEQ ID NO: 243093 - protein, 155 aa, Zea mays
  unsure (1)..(155): unsure at all Xaa locations
  Clone ID: MRT4577_153284C.1.pep
KQTTTNRKNPRGEEKEGEPPXPKGKNPHQGERAGDTPQGKGPGPGRGNPPPPPRGGANPNTGAAPPTGPXPPPTPPXQGXLPPGANPKPGTLHTKNGPGTKREKPAKKKEGPNKQKPRPPHGPLSKPETRKTSGPNQKANGPPDPLSQKGTLPPP

SEQ ID NO: 243094 - protein, 76 aa, Zea mays
  Clone ID: MRT4577_153285C.1.pep
GRLSWKKKKLGFVLEGVWVKVGPFGPLETTLENGDGGRDPPPKAPFLVWFHVSEGKAVAQGKGGGGAFRGRGRGGP

SEQ ID NO: 243095 - protein, 94 aa, Zea mays
  Clone ID: MRT4577_153286C.1.pep
THFATIGFVLVPNFKPGVKREGWVKPNVFFPKIPYKFLESFIKEGNFFFFPGGFLLEPPLISPFVEAIFGPIYSVMGLPKGLPEKFFKDSLLKT

SEQ ID NO: 243096 - protein, 80 aa, Zea mays
  Clone ID: MRT4577_153287C.1.pep
CLLARVNYCFFPRSVVPAQSCLTSPECSWSCALPSHPPAPPLSARLSAVARLAHRLEPHILLFLALTPRSSSASITLERV

SEQ ID NO: 243097 - protein, 106 aa, Zea mays
  Clone ID: MRT4577_153288C.1.pep
ISIQHSHGFLYSCPTGRAEHGAREQSRRAGRGPARPLGPSGRRSVDAPPHPRRSSSPARGLAGRAEALSGRRTTLRRCGLAARSGARLWPVAVWRTDQSRRGPARS

SEQ ID NO: 243098 - protein, 332 aa, Zea mays
  unsure (1)..(332): unsure at all Xaa locations
  Clone ID: MRT4577_153289C.1.pep
MASRPPNSADGEGPAGNNVELPSLPFHVVTKPSQLPVEFLEPSAAKKLVIGFDCEGVDLCRHGALCIMQIAFPDAVYLVDAIEGGKELVEACKPALESNHITKVIHDCKRDSEALYFQFGIKLHNVMDTQIAYSLIEEQEGKKRAYDVYISFVSLLADPRYCGMPYPEKEEVRTLLRQDPNFWKNRPLSEMMIRAATDDVRFLLXIHEKLMEKLSKVSSWRWAVRSELYCRCFCINDNQQADWPPLPTVPDGIEADVYVPEVDILSVLDVPHGKMGRVIGRKGSTIMVVKESCNVEIHIGGAKGPPDRVFIIGAVNEVRKAEAIFRGRMLEF

SEQ ID NO: 243099 - protein, 50 aa, Zea mays
  Clone ID: MRT4577_15328C.1.pep
IVYVGVCLFRAHTTYRRTSSIWAMQFNTNDMILEQNLEVASWGGPVPIGP

SEQ ID NO: 243100 - protein, 48 aa, Zea mays
  Clone ID: MRT4577_153290C.1.pep
WTTVASKIPECDHLSLGRAKNTSVFCGPNLYEFLENVHNMGAHGTGVL

SEQ ID NO: 243101 - protein, 35 aa, Zea mays
  Clone ID: MRT4577_153291C.1.pep
GFFILEVIYVKELCVNKVKCNCMLHSAPLVCIGWF

SEQ ID NO: 243102 - protein, 48 aa, Zea mays
  unsure (1)..(48): unsure at all Xaa locations
  Clone ID: MRT4577_153292C.1.pep
HSXPRAKXTALDPPKELDGRXXIGRRNARIAESEAKGTRDDVASTPGI

SEQ ID NO: 243103 - protein, 63 aa, Zea mays
  Clone ID: MRT4577_153293C.1.pep
SGFRRVRMKKLEQNIHKLDVCRTQPPSGRIGLAVHGTTFIEVDFDHPHLGGNQFVDLHHHTEP

SEQ ID NO: 243104 - protein, 69 aa, Zea mays
  Clone ID: MRT4577_153294C.1.pep
GRKTGALPSQKIYLFPLVALNGPGKPKTKNCSPLPRRGGKPFKKRPQFPPFFSGQKIPMFTPFFFNPPS

SEQ ID NO: 243105 - protein, 151 aa, Zea mays
  Clone ID: MRT4577_153295C.1.pep
MCSVRFHQFHHEIRLYKSFLGVPSLSCASPDGTKRQTLLRSLLLVLTPQSEREGHPEEPVVLIGVSLPPFPRGENNLEKMAPISGATAVLVMAVVATLAAAANALAPAPAPATSDGTSVDQGIAYVLMLVALVLTYLIHPLDASSAYKQLF

SEQ ID NO: 243106 - protein, 243 aa, Zea mays
  unsure (1)..(243): unsure at all Xaa locations
  Clone ID: MRT4577_153296C.1.pep
MNCGRGPAPATMVRCRQCSASVAAPPGACAVQCAQCCCVTRVGGXATAQCDAPHPELRRXRGKKRAVLVGIKYTKTRACELRGPINDVKCMRYILTERFGFANDCVLILTDEERDPCRQPTKANIRMAMHWLVQGCSSGDSLVFQFSGAGAQVPDCDGDERDGMDEAICPVDSFQQGPILDDEINHAIVRPLVHGVKLHAIVDACHSATVLDLPYRCXLQQYGCLSWMDKRPLNAACKGTSGG

SEQ ID NO: 243107 - protein, 53 aa, Zea mays
  Clone ID: MRT4577_153297C.1.pep
MYRCYYWWVLKYYCSWPPNMPANVLHAYLRINLFEPPCNPNVFPCKKHNKSIK

SEQ ID NO: 243108 - protein, 155 aa, Zea mays
  unsure (1)..(155): unsure at all Xaa locations
  Clone ID: MRT4577_153298C.1.pep
GFFNKERGAPPPTKKTTPPRPRGNIKASPXKAPPGKKKPKLGGKDSKGKGNPXGGPPGPPVLGSGGPTKKPGPGTQRGWPGAPPPCWFGRPGRQSFSGAPQGXPSIGGGXFWGDGIGPWAKKKGPQKGGTPRGGGNPTRGGPRPPKGRTNPGGGG

SEQ ID NO: 243109 - protein, 137 aa, Zea mays
  unsure (1)..(137): unsure at all Xaa locations
  Clone ID: MRT4577_153299C.1.pep
PRVRSSLLKSSFAGSRLPAXATRTKRGSSLVATGPPGPGPGPTCPSSSSSSSNRPYNLTSFGLTPFKDSTFSGKMTVRYMTDMFTIPDTDFDIVGAGSAGLSCAYNLSRDPAVHIAIVAHSVSPGGGAWLGGQLFSA

SEQ ID NO: 243110 - protein, 261 aa, Zea mays
  unsure (1)..(261): unsure at all Xaa locations
  Clone ID: MRT4577_15329C.1.pep
GRARLSPGGFLSPFHPTGPELRMESSQSRKRTRQAYDCAAALPPEREVVARCGASPPWREDDRDGHYVFDLGENLTRRXNLEQNGRRFGFSAICXPLLVGIFVIILMKRATSWVFVGTFGRVLECWDRETREYVAIKVVRSIRKYRDAAMIEIDVLNRLAENEKYRSLCVQIQRWFDYRNHICIVFEKLGPSLYDFLKRNRYRPFPVELVREFGRQLLESVAYMHDLRLIHTDLKPENILLVSSEYIKVPSTKXNRKDEMH

SEQ ID NO: 243111 - protein, 265 aa, Zea mays
  unsure (1)..(265): unsure at all Xaa locations
  Clone ID: MRT4577_1532C.1.pep
MYAENGLPQNATSQYSQSNTNTFFDVSEPKMAHPTESMPPPSVASPYMHNVQHANVNHMPPQMVSIGGPYPSYVAATIGHVGVPPSAYGVDPAYTKATINPMSEQKDVMPEVYHKEAPHESIPPPNANAQVPLPTPALTNHAPVEQLQESGLPGQQFSNVHALPPRPKRVASRENISSKDPHSQNSLLNCKGPDLNIPAEEQPYHKDTHAEQAQFVKGDGITNPDLLXMEDGLAAFEPPPPVLNEGLXNVTNXVDGQAHTNVSKG

SEQ ID NO: 243112 - protein, 137 aa, Zea mays
  Clone ID: MRT4577_153300C.1.pep
NGNDDDTASCPVCLEDYAAGERAREMPCRHRFHSNCIVPWLEMHSSCPVCRFQLPATDDKGSCSSGDGGFVSVDADGEGNDNGGGDGRASIPGNAEPAEAEENGSRLPPSLQWLNSLFSPSAQSSGSGSGSSHHWEN

SEQ ID NO: 243113 - protein, 321 aa, Zea mays
  Clone ID: MRT4577_153301C.1.pep
MSINTVAIIGCGAIGASWSALFLAQGLKVQAFDINPASETYLRNFIRDALPVLSSIGLVKNNNAKPEDVVFTTTMSEALQDADFVQENGPERIDFKRRLFQDMGEMLPSQVIIATSSSGLTCSSIQEGMTAAASPERCVVGHPFNPPHLIPLVEVVGGNQTSSAVIQRTMKFYQDMGKQPIHLKKEVPGHVANRIQAAVMREVFHILQQDVCGVQDIDDAVSYGPGLRWGVMGPNTLFHLGGGEGGIEHFADHLLGPLQTWYAPENPVVDDSLKTKWIEGTRTAIDERGYGDLVKQRDEELVRLLNVRKDWDGYAKGAKDT

SEQ ID NO: 243114 - protein, 104 aa, Zea mays
  unsure (1)..(104): unsure at all Xaa locations
  Clone ID: MRT4577_153302C.1.pep
AVCERNPCLEPVDIWMNGGATCSGFSASLHSFGPYRMEGXSSXNDSPRVAANPYSWTKMASYLLLXVAAGVVYSYADHEDDYTANDTCGVADLYAFVPKWFAKY

SEQ ID NO: 243115 - protein, 82 aa, Zea mays
  Clone ID: MRT4577_153303C.1.pep
WSRRCDSESSAPSYSIGEIGAFLAMRLCTCMILVRMMVMFIWITTQAWAESSLGAVLSLCEIEVDVIYLRVSISRGRSEVAR

SEQ ID NO: 243116 - protein, 65 aa, Zea mays
  Clone ID: MRT4577_153304C.1.pep
RTPVRFPASIGVSLVLAGVSVFKPYPSCPLGGDIRYAPPWTKPNLLKASPCRHAPMFIFSQSDSL

SEQ ID NO: 243117 - protein, 36 aa, Zea mays
  Clone ID: MRT4577_153305C.1.pep
WYRVRMGGNRVGYRTIGLVYAQSCTLCSRCVILWVG

SEQ ID NO: 243118 - protein, 64 aa, Zea mays
  unsure (1)..(64): unsure at all Xaa locations
  Clone ID: MRT4577_153306C.1.pep
XLXKPSHCXLVQRFXXTXGTYLKXXXXQPHXYXXPSXAYRRWGAXSSAWRAVXGTXVXXGXAKP

SEQ ID NO: 243119 - protein, 56 aa, Zea mays
  Clone ID: MRT4577_153307C.1.pep
TWCDMFWFVPPLRFWHGVRCHRAQGISLVVWLCRPSFWVCRYMWQWVSFSSCFTQN

SEQ ID NO: 243120 - protein, 106 aa, Zea mays
  unsure (1)..(106): unsure at all Xaa locations
  Clone ID: MRT4577_153308C.1.pep
LLQIRAWVLARVPFNDTRSHILXTEYVATTWYAAPESCVSFFSKYTTSIDIMSRRGISAELATVKPLFPGKNVXVHQVDLMTDLLATPSAXSIRMIRHENARRCMN

SEQ ID NO: 243121 - protein, 181 aa, Zea mays
  Clone ID: MRT4577_153309C.1.pep
MGIGAVSDELLGTFVPIAVYWLYSGLYVALDGVGRLDGYRLHTREEAATKNVVSRAAVVRGVLLQQVFQVAVSLTLFAVIGDESGIGQKQPPALIIALQFITAMVIMDTWQYFMHRYMHINKFLYKHIHSKHHTLVVPYSFGALYNHPLEGLILDTIGGALSFLVSGMTARTAIFFFSFAT

SEQ ID NO: 243122 - protein, 112 aa, Zea mays
  Clone ID: MRT4577_15330C.1.pep
NFLGTLVIFFCFFHLFSNILLLCLHVSPGICSSSAQKYFRRATRLNWPEGAVSRESIRAVKKLDRLKDLVSRNAGHSKAELADLLYSILRFEPSERLTAQEALDHPFFRNPT

SEQ ID NO: 243123 - protein, 58 aa, Zea mays
  Clone ID: MRT4577_153310C.1.pep
LRPHLVAFKVQQRHNIVGGSNLLETSRLLCNSTGNVIHGNRQDQEQRMQVNSDGDNPG

SEQ ID NO: 243124 - protein, 258 aa, Zea mays
  Clone ID: MRT4577_153311C.1.pep
MGIGAVSDELLGTFVPIAVYWLYSGLYVALDGVGRLDGYRLHTREEAATKNVVSKAAVVRGVLVQQVFQVAVSLTLFAVIGDESSTGQKQPPVLVIVLQFITAMVVMDTWQYFMHRYMHINKFLYKHIHSKHHTLVVPYSFGALYNHPLEGLILDTIGGALSFLVSGMTPRTSIFFFSFATIKTVDDHCGLWLPGNILQALFSNNSAYHDIHHQLYGNKYNFSQPFFVMWDKILGTYMPYSIEQRKGGGIESKPAKLD

SEQ ID NO: 243125 - protein, 304 aa, Zea mays
  unsure (1)..(304): unsure at all Xaa locations
  Clone ID: MRT4577_153312C.1.pep
ARTAHGXLETLVRDTVEEATKPNLSDLFPVLARLDLQGRRRRSAEFIGRFYDFFDPIIARRVKARGSGEHVGDDFLDVLLQLHSMDQLSLQTVKSFLLDLFAAGTDTNTIAVEWTMAELLRHPAVMSKVRAELRDALGSKPCPDESDVGRLPYLRAVVMESMRLHPPSPMLVPHLAMADGAEVGGFTVPAGTKVIINLWAIMRDPASWAEPEAFVPERFVGASDADFRGTDRLEFMPFGAGRRACPGAPMATRVVTLLLASMLHAFEWRLPEGMKPGDVDVRDWFGTSLNMVTPLKAVPVPSSR

SEQ ID NO: 243126 - protein, 57 aa, Zea mays
  Clone ID: MRT4577_153313C.1.pep
GVIFFPFLFLNKWKPLIGELTSSFSKIKPLNGPYLLKGTKKPGFQPHSGDRKEPTRL

SEQ ID NO: 243127 - protein, 82 aa, Zea mays
  unsure (1)..(82): unsure at all Xaa locations
  Clone ID: MRT4577_153314C.1.pep
LAPELVFXKQYWTDGLVXQWSPLGTYMATVHRLGSQVWGGEIGFERLMRFAYFMVKLIDFFPGERFLVTFSFLVPYIPMIHS

SEQ ID NO: 243128 - protein, 56 aa, Zea mays
  unsure (1)..(56): unsure at all Xaa locations
  Clone ID: MRT4577_153315C.1.pep
RPPFXFFFFYFFSIFXKQTALGPSNLIYLKSPFLVTIWQGSPKAGALSNMTCLNHP

SEQ ID NO: 243129 - protein, 130 aa, Zea mays
  Clone ID: MRT4577_153316C.1.pep
MVKTSVLNDALNAINNAEKAGKRQVMIRPSSKVIVKFLTVMQRHGYIGEFEEVDDHRNGKIVIQLNGRINKTGVISPRYNVQLRDVEKWVVKLLPSRQFGFIVLTTSAGIMDHEEARRKHVAGKILGFFY

SEQ ID NO: 243130 - protein, 96 aa, Zea mays
  Clone ID: MRT4577_153317C.1.pep
AVVVPNLVTFSDRLVTMTMTLLLSLSLLGTMRRLAAAKHSLFHASSSRSPDNSTTRSSLILLLPSSFVLGLGMPPPPPPPSWCSVAHPSPSVARSR

SEQ ID NO: 243131 - protein, 138 aa, Zea mays
  Clone ID: MRT4577_153318C.1.pep
PAGEAPPSVAGFSGANKTPLVAPSATRLSPFFGGFIPPFGSPVFLSATPPLSSPHFLFFGSLFRLPRLSAFSFFLVCSVQLSPVPYFPQQPPLPMFPPRFYPPPYSQGWSPCRSRSAIPGCPPGWEKKKKKKITARLG

SEQ ID NO: 243132 - protein, 154 aa, Zea mays
  Clone ID: MRT4577_153319C.1.pep
MSCTIRYTLEIAPQGVPHALLLDCDMLWHTVASNVVSNAHAREHDGEGDSGSHSNWNLNLPLILLNKCMKELDEFLDEGKSKLMNTLIVGGGIEAAIENMTAHIKVDPASVVKSESNDKLIYNLLANDEINDDIDNVNDIVNGVLDYLEAYLDA

SEQ ID NO: 243133 - protein, 35 aa, Zea mays
  Clone ID: MRT4577_15331C.1.pep
SLSATQGFAPPPPLFPIIDPALFHTPVSIKIVVRR

SEQ ID NO: 243134 - protein, 67 aa, Zea mays
  Clone ID: MRT4577_153320C.1.pep
GGRITNKTSQIFEKAKRGGLFAIKPNGKKGMFFKGNKLGKPRVFPNLKGGKKRAKEINLGGTKKKNN

SEQ ID NO: 243135 - protein, 121 aa, Zea mays
  Clone ID: MRT4577_153321C.1.pep
GIGAADLVINSGPLHLLEVGEVVALTGQTVEVGEDHPSDAHVVEMVRRTRLRCTSGRSGRRDGGRHSLRCGTASQDQREEARGGPPQTGSGEQAMQRHSWRFYRLPVFLSQLVGDGRAGGV

SEQ ID NO: 243136 - protein, 132 aa, Zea mays
  Clone ID: MRT4577_153322C.1.pep
RSSPQFLYRQSKFFRGCQLNTRQTDPSPAVPMLVCVPGPPCEKNVVSFTPFLSPLLFPVGARGKVVLIPIKICLLSRSPSPPFSFGCNRLAPRPFCLPPPQKPELVVFLKKKKKKKKKKKKKKKKKKKQNPS

SEQ ID NO: 243137 - protein, 247 aa, Zea mays
  unsure (1)..(247): unsure at all Xaa locations
  Clone ID: MRT4577_153323C.1.pep
MAKAAPAAGGGIADILVTRDRDFLVRNSGEQVKISSIEASPVAIYFSNSWFPPSRWFTPKLIQVYKQLASQGKSFEVIFAWGDLKEKAFNEYFAKMPWLALPFSDIERREALDIRFKVTDTPHLVILDAKTGEVYTKDGVRIVSEYGVDAYPFTPDRINELKELEKEEKENQTIQIVLGTSTRDYLISNKGDNVPISELEGKYVGLFFVGVGYPPFIEFIDLLAKIYEKLKEVGXEKFESVAVSIYS

SEQ ID NO: 243138 - protein, 44 aa, Zea mays
  Clone ID: MRT4577_153324C.1.pep
GFFDVFVIFVEGEQPARFLFQLLLYCTGQTTPFTGAGDTNLKKE

SEQ ID NO: 243139 - protein, 125 aa, Zea mays
  Clone ID: MRT4577_153325C.1.pep
AVTTGDASDGGEWRLSVVDGVALASGNPRGGASDGALMAGERRRRTPRHERRRRRCTWRRSRIHPQIGAVWASFGDQLIRSVVSAASSGDVLLHPCLCMGPIGWTHIRNIFINYDVRCRYLYNFL

SEQ ID NO: 243140 - protein, 119 aa, Zea mays
  unsure (1)..(119): unsure at all Xaa locations
  Clone ID: MRT4577_153326C.1.pep
SAIREREVLLPPGLPPFKFWPKPPPSKDWKLQPRYPCGKVFFFNFNPPLSFKKFILQIPSPPFETKKFSPVSVKNPKKTRPPIPKGGLFWVLSNNTNNFAGLPPNRNKNPPGCXXXXKK

SEQ ID NO: 243141 - protein, 82 aa, Zea mays
  Clone ID: MRT4577_153327C.1.pep
ATYYAREKNKGENVKYLYWSATNTTAKAYYMTNTPVSQSAPNQRVTSLMYIPGPGWLFDTIDCNPQLKPLFQPKYRTTRLLE

SEQ ID NO: 243142 - protein, 145 aa, Zea mays
  Clone ID: MRT4577_153328C.1.pep
MEAYAPAGSYRPVCDTVVFVCLASASALIVFMVAVCFRNAFAANGYATAAVATNGAARATAANGRSRCGLAPSALSAIPMLAYQRGAGWAQCAICLALVRDGETVRLLPACGHLFHVECIDLWLRSHATCPLCRRGVVEAPVEKV

SEQ ID NO: 243143 - protein, 38 aa, Zea mays
  Clone ID: MRT4577_153329C.1.pep
REKLVCDRKEIHVHVHLGVSSSDVSEAKLCLELSDTIL

SEQ ID NO: 243144 - protein, 218 aa, Zea mays
  Clone ID: MRT4577_15332C.1.pep
MAQAAVEPALNGGSLIGRQPVVPRMKRKTPSELRGEQLKRRTSEKLGDDLLPSATLDRSNNGLRNTEQQKISKYINTRVTEVFPVRKARNLGKENSKDVLQNNEKVSKFVNGTPASNFASSSLLCGHGDTAKLNTFVPSMEAAKPGFKEVEKWSENALWSVSELQVGDEKQTGSNKFDMERVLKGFGACDAFVASGLNAPNGQVGGITFKSSDIALLI

SEQ ID NO: 243145 - protein, 120 aa, Zea mays
  unsure (1)..(120): unsure at all Xaa locations
  Clone ID: MRT4577_153330C.1.pep
TRRSHAPWPRVADAVGTVHHTAKTTTPPALMPIGKPLPRKKLCKQTLKLVRPASSAPCTLRARHTVXKVRTRVTSVVTIAGKXTPIDVMTHRPVLXRHGNVSYMCAPLKADLATEDPLRG

SEQ ID NO: 243146 - protein, 56 aa, Zea mays
  Clone ID: MRT4577_153331C.1.pep
GATMPAEERIIQLSLKGKAKIISIIRHSSWVVSIVVLILHSKMYPDKASSKSSLAT

SEQ ID NO: 243147 - protein, 58 aa, Zea mays
  Clone ID: MRT4577_153332C.1.pep
LRLLILDIKQMSEYRNDESIQTICDRRIALPLRNIPSNGISNLGVGEQHDMFPRTHCP

SEQ ID NO: 243148 - protein, 106 aa, Zea mays
  Clone ID: MRT4577_153333C.1.pep
MVNIPKTRNTYCKGKECRKHTQHKVTQYKAGKASLFAQGKRRYDRKQSGYGGQTKPVFHKKAKTTKKVVLRLECVKCKTKLQLALKRCKHFELGGDKKTKGAALVF

SEQ ID NO: 243149 - protein, 85 aa, Zea mays
  unsure (1)..(85): unsure at all Xaa locations
  Clone ID: MRT4577_153334C.1.pep
FVKNQVPHVKKGGGQKVLPPLNGLRGGGLFAPAKALDYLPIKKLGPLVXMGAPGPPGGRAQAIFSGEDKIVFPPFFSILSDIFRY

SEQ ID NO: 243150 - protein, 53 aa, Zea mays
  Clone ID: MRT4577_153335C.1.pep
EKSELSRNSTRVLHDVGRRSRASSKQYKVPAVTLYPFSATLSTCSSVVIPLLQ

SEQ ID NO: 243151 - protein, 59 aa, Zea mays
  Clone ID: MRT4577_153336C.1.pep
LVVLAQIGARRSNRDEGASRLGTPTALQLISSLEDAITITAYADPSWSGIEGGRTRTRG

SEQ ID NO: 243152 - protein, 112 aa, Zea mays
  unsure (1)..(112): unsure at all Xaa locations
  Clone ID: MRT4577_153337C.1.pep
GAADRTWDGGETCXGLCAQGAERGTSGWLGGSLRRLSRPASATSGQRRHGDVPAGGCKVQPRPSRDVGAQPAGWLVCHGEPRDRAEEGLGLGTGCGWLAAAQARMGATPLLA

SEQ ID NO: 243153 - protein, 118 aa, Zea mays
  Clone ID: MRT4577_153338C.1.pep
QGGGKPTHGREDKTRGKQNRGGAPGGKQKERGGKKARQPRPRRGLKTGNPGGRPTPGKNKTRPPGGLLKGPQNPKGPGKIGLFKNPNGGTREKRGVGVPREIGDGDWGGTKFSYRGGD

SEQ ID NO: 243154 - protein, 114 aa, Zea mays
  unsure (1)..(114): unsure at all Xaa locations
  Clone ID: MRT4577_153339C.1.pep
HFHRRTTQAQCEGEIRRTDSTGTXAWAKAKNEAGQHKVRLPRKKPGSRSLKADLQFCVRRIGRYLKKGQYSQYVGTGAHDYLDAALEYLTAQDLELDGNADTDNMKTRIIPRHV

SEQ ID NO: 243155 - protein, 567 aa, Zea mays
  unsure (1)..(567): unsure at all Xaa locations
  Clone ID: MRT4577_15333C.1.pep
RAPSPDSLSPSRVSLCFVLIESEFRMESSRSRKRTRQAHDCAAAPPPEREVVARGGASPPWREDDRDGHFVFDLGENLTRRXNLEQNGRRFGFSAICRLLFCXISVIILMKRATSWIFVGTFGRVLECWDRETHEYVAIKVVRSIRKYRDAAMIEIDVLNRLAENEKYRSLXYLRDLITXYNPILFLTXVPLQFVSCVQIQRWFDYRNHICIVSTSFWSIILVSKSQLPILRMHFFADVLVVYNIYLIGPPSTLYGMRDLSIEIMINRLXIVFLFFAREGSLIWSQIKNILYSMDINDFVXFEKLGPSLYDFLKRNRYQPFPVELVREFGRQLLESVACVLXLLLDSAHQLLANLVALASLFYCFKGAVLTIFSFVTDMHELRLIHTDLKPENILLVSSEYIKVPSTXGLGWSFPCDIWSVGCILVELCSVRSLHTLYFSSTSLVIVFLTSHFXGEALFQTHENLEHLAMMERVLGPLPEDMIRKASSSAQKYFRRATRLNWPEGAVSRESIRAVRKLDRLKDLVSRNADHSKVALVDLLYGLLRFEPSERLTAEEALDHPFFRNPT

SEQ ID NO: 243156 - protein, 557 aa, Zea mays
  Clone ID: MRT4577_153340C.1.pep
MAPPRPPPNPAGEQQPQLHGVVIITLPPADQPSKGKTVTAFAYTNDPPPPRSPPDPVMGYPAATEARRRPRRALSTRRVATAALVLGALAVAAYYCFYSDVAVQFLGMEQEEEQRNETRSFLLPLYPKARQGRALREFGDVKLAARRVDDGGRKARNRMEVAKAATARTNSTALLPIKGNVFPDGQYYTSIFIGNPPRPYFLDVDTGSDLTWIQCDAPCTNCAKGPHPLYKPAKEKIVPPRDLLCQELQGNQNYCETCKQCDYEIEYADQSSSMGVLARDDMHMIATNGGREKLDFVFGCAYDQQGQLLSSPAKTDGILGLSSAAISFPSQLASHGIIANVFGHCITREQGGGGYMFLGDDYVPRWGVTWTSIRSGPDNLYHTQAHHVKYGDQQLRRPEQAGSTVQVIFDSGSSYTYLPNEIYENLVAAIKYASPGFVQDTSDRTLPLCWKADFPVRYLEDVKQFFEPLNLHFGKKWLFMSKTFTISPEDYLIISDKGNVCLGLLNGTEINHGSTIIVGDVSLRGKLVVYDNQRKQIGWADSDCTKPQSQKGFPFFL

SEQ ID NO: 243157 - protein, 144 aa, Zea mays
  unsure (1)..(144): unsure at all Xaa locations
  Clone ID: MRT4577_153341C.1.pep
WPFEFMYRCAAGCWRVMAYFFLQCLCPRGDAWCLGGLMGSRSWKKRALKGLHHVEDGLVIYHLLVEWPAPRSPVGAPHGRGARGSIAVHLPLGRGYPGVPYQWVQSRPPPRVPRLYLKYSMCEWPVVSDSRIVTLQKKKXKKAA

SEQ ID NO: 243158 - protein, 106 aa, Zea mays
  unsure (1)..(106): unsure at all Xaa locations
  Clone ID: MRT4577_153342C.1.pep
RDNLIARHTNLDWYKSPTLSEALDQITEPKRPSDNPLRVLLQDEYKIAGIGTVPGGRVETVVIKPVMVITFGPTGLTTDVKXSDEMHHEALDDVLPDDNDGLNLKN

SEQ ID NO: 243159 - protein, 85 aa, Zea mays
  unsure (1)..(85): unsure at all Xaa locations
  Clone ID: MRT4577_153343C.1.pep
DFILLADVVAGIDLQPGVPDKHYWRFSSNGIYSAKFAYEIMFLXGSTSLAGFERVWSTWALAKCQFFLWLVLHNKCWTADRLAKR

SEQ ID NO: 243160 - protein, 90 aa, Zea mays
  Clone ID: MRT4577_153344C.1.pep
QRKDQLVQEYQGSSKVLNDAEQPPQDFNSGKLSDCAQTLAVSVRRMAETMKCCPSISAQQVLGDVRRPRHLGRGLSVRRQKKFSLLWSAW

SEQ ID NO: 243161 - protein, 85 aa, Zea mays
  Clone ID: MRT4577_153345C.1.pep
LVPPATATASEPVQADSRSQVAHSWWRQEVFLVRLHLYRCSGLSPLHLQCLRFARVMFCSPLGAYVFFVIPRLSSGVLSEYSLVT

SEQ ID NO: 243162 - protein, 130 aa, Zea mays
  Clone ID: MRT4577_153346C.1.pep
MVAASLAAWWERRGGGARRRERGLGPRPPTARGGGLPPRLCFAGRSRALPESRLCGAAQAAEYRAEAARLREALARGGLARDALAPPGAGAARAGAAGANLLGIRDTEMSSCVVASADLSSGRADVEEKR

SEQ ID NO: 243163 - protein, 50 aa, Zea mays
  Clone ID: MRT4577_153347C.1.pep
ASPPATRRQRPLPLRGPSGCSLTLACWRECCKRASPSSTKQVAFRLLDYN

SEQ ID NO: 243164 - protein, 234 aa, Zea mays
  unsure (1)..(234): unsure at all Xaa locations
  Clone ID: MRT4577_153348C.1.pep
LEAGRFGTDAKRPRLARSSSIAXSAPSPLSTPTRPPXAPLPLLRTTSLPTETEEERWRRREMQSRRRLEARRKRVERRNSMGSVSVAPADAVSGRRSNASQGSNSASTTEQGIGGSMFNQSADAKSPSTSDNRNXKRHASSDQSGREATKRXTATEQQPRLRTLGSLTTRTGSTSDIRKLMMEDMPMVSSKVEGPNARRIDGLLYRYKKGEDVRIVCVCHGSFLTPAEFVKHAG

SEQ ID NO: 243165 - protein, 86 aa, Zea mays
  unsure (1)..(86): unsure at all Xaa locations
  Clone ID: MRT4577_153349C.1.pep
ATSIFFHISYEPTSVALTHIESIRTWVVEHKLRTRGWIWFRGITGSIAYNWSRPNMKTSVTIMHARVHAQALTLXALAVAALVEYY

SEQ ID NO: 243166 - protein, 36 aa, Zea mays
  Clone ID: MRT4577_15334C.1.pep
VSHKSIHVQSGGLTFIHGANHRWREMKQGPDHLQTM

SEQ ID NO: 243167 - protein, 144 aa, Zea mays
  Clone ID: MRT4577_153350C.1.pep
GRKGRGVAVSFARSPPAVTLGAAPMITFGRLNEWLRWEGSLCAETCLRLDGFGKDWSIHTEGAGPDAWTHLALNGTADTSVFTGRTCRATVSISTSDSEAGVLFRPVWIVAGFTARLACLRALAVLVGAYAALSPQSLLLPLLG

SEQ ID NO: 243168 - protein, 62 aa, Zea mays
  Clone ID: MRT4577_153351C.1.pep
CVTSARLVDHGFRIIVRLVVVVLEKNVEINVCIRDAGHLVHLARHMAPVQCPRVGPRVRPRV

SEQ ID NO: 243169 - protein, 245 aa, Zea mays
  unsure (1)..(245): unsure at all Xaa locations
  Clone ID: MRT4577_153352C.1.pep
MHKASSLSELGFDSGGASSGFFRPVADGCPPATPTSSAAPHRRLTKVSVIGAGNVGMAIAQTILTQNLADEIALVDALPDKLRGEALDLQHAAAFLPRVRIVSGTDPAVTKNSDLVIVTAGARQIPGETRLNLLQRNVALYRKIVPPVAEHSPEALLLVVSNPVDVLTYVAWRLSGFPASRVIGSGTNLDSSRFRFLIAEHLDVNAQDVQAYMVGEHGDSSVAIWSXISVGGMPAFKSLRDSHRN

SEQ ID NO: 243170 - protein, 94 aa, Zea mays
  Clone ID: MRT4577_153354C.1.pep
ETTKTVFWNGPMGVFEFHRFSVGTKVVAKKLAELNGKGVPTIIGGGDSVPPVEKVGVADVISPFSPGGGASLELLEEKELPGVVGFNETAPVTV

SEQ ID NO: 243171 - protein, 75 aa, Zea mays
  unsure (1)..(75): unsure at all Xaa locations
  Clone ID: MRT4577_153355C.1.pep
GRWPELDGDKMLVGANFASAGVRILNDTGIQFANIIHISKQLRYFEQYQRRLAALIYPEAASRXEATPLVLITLG

SEQ ID NO: 243172 - protein, 35 aa, Zea mays
  Clone ID: MRT4577_153356C.1.pep
DGVPDGQCVQVGVVVLPQDPYLVGDSYVAVLPRYL

SEQ ID NO: 243173 - protein, 78 aa, Zea mays
  Clone ID: MRT4577_153357C.1.pep
SRDVIQLTVIKTTRSDVSMTYGHRPFGPTCGMPSWTPYLGIIPNVLSNLRDVRGSPISDTRVSVFAEQQATTITTDMS

SEQ ID NO: 243174 - protein, 628 aa, Zea mays
  Clone ID: MRT4577_153358C.1.pep
MSARLLRRVLQEREATPQDTDVADDDQSVEEEASPPRTSARNLFDLLDDGNGDGDEEDEKEDETEIIQAVSYTEQRHSVQKKANAVPETNKKSKKKKKKSKAEPSSTKAKDAQSLESILEDLCIEKNPIQQRAHQSDRAAGKEFETNEATHVASSVLAIDPKHLKGENEMRRIFGSKVVDSFENQRSMPSSSRQVRGARRVAHNPRKTLLVSPPSYWPPWDKSITMDLLEMKNGLNYFRYTYDPSVSHVQELFEKRQAANDLNAIAAILGKYPYHPESLLTFAELFKYSGEHQSSADAVEKCLFALECAWHPLFSPLQGNYQLKFNHDTNKPLFTALFSHMKNLDRRGCHRSALEVCKFLLSLDFDDPKGSLFCIDYFALRSQQYKWLEQFAEEYQCDNSLWLFPNFSFSLATARFYLECDAASEGSDDADKSTSLDLMKQALMLHPMVLRKIVDKAPLKDSSWTQILRNVFFGSAKPGSPSLEHMINIYVERHYIMWRFPELQNLLKEAALLVIESLKQDNREALDWACVRKEAFSSDKNEYSHLLVSDFTDTTPSLPPEELRPFMVGPGMLHEMPPVEQEAGPERLRAPREVAGRNPAVVFLESLLPWVDYGDNHQGANDDDNDDD

SEQ ID NO: 243175 - protein, 91 aa, Zea mays
  Clone ID: MRT4577_153359C.1.pep
ILKSQAISTSQRWTFHYICCCHSFSFYSTQQHQHTHTPRMHHLIISPNKTENTKAKHTRKPRQIGIIDVAIATGALQRQLASGRSHTHTHR

SEQ ID NO: 243176 - protein, 91 aa, Zea mays
  Clone ID: MRT4577_15335C.1.pep
HASGWYYGLKRRKCCKRAVKSRPNPRNYYRCSAVGCGTKKLIVRNSEYLCYVLTTYYGMHKHAKSCDCYLCPPPAARSADHYSSPTAERRW

SEQ ID NO: 243177 - protein, 47 aa, Zea mays
  Clone ID: MRT4577_153360C.1.pep
VRARTIAKYDDPAQPVNHRHTSNKVHFLVLAACSGSIFLSIKFFFMS

SEQ ID NO: 243178 - protein, 67 aa, Zea mays
  Clone ID: MRT4577_153361C.1.pep
HLAGAYINLPPDKYFLEDPDTRVMCLQITGAEDTMVLIGNFHHQNMPVVYNVENNKLLLGPAQCDKL

SEQ ID NO: 243179 - protein, 64 aa, Zea mays
  Clone ID: MRT4577_153362C.1.pep
MNFPTNDPTPDEVACSKCMHTQPPPDLKCAVCDLHIHRQCSPWDQGEEPVDSSNWSCGGCREWR

SEQ ID NO: 243180 - protein, 45 aa, Zea mays
  Clone ID: MRT4577_153363C.1.pep
LFWKTRKECHCIDADALLNELKNDVGSKDSEIGSSKGWRDRINIA

SEQ ID NO: 243181 - protein, 68 aa, Zea mays
  Clone ID: MRT4577_153364C.1.pep
PHKLKEKAIHQVWNLRFQGPQVIKPVGVFVRKPDRMGMMVAPPDPLKREYMVVLLRYETSRIQRKRSK

SEQ ID NO: 243182 - protein, 108 aa, Zea mays
  Clone ID: MRT4577_153365C.1.pep
GKHGRSGRQHHHWLGRLHDAVVQADGDESGREPGSQPEDWLPNRRRFYTPTYPVVDRRRPEHVELGMGRVQIPTVLLGNRSIVGRRRMDGINAAAPTSTNRKAHATHE

SEQ ID NO: 243183 - protein, 193 aa, Zea mays
  unsure (1)..(193): unsure at all Xaa locations
  Clone ID: MRT4577_153366C.1.pep
PGXTHAVXNWSLAXSLQQXVIKGPGHPPLLXLVXHYPMAXGXKXTTXXTTXVXXHKXXXEXXXAXXAXAGTRRGXRXXYHXXGHXVXXRXXCPPRAKKPEYXXEYQERXXXRXSTXHQXSXTSXRGPXXAXXAXXGAXXALSTXXSTXRRRKGTRXXTRPPXHKXSRXXRXXGXXAAPVGFXXGFSPFHXXHH

SEQ ID NO: 243184 - protein, 150 aa, Zea mays
  Clone ID: MRT4577_153367C.1.pep
AYPAPPRVPSAGYPPQGHDDKHDGVYGYPQQAGYPAGTGGYPPPGAYPQQGGYPGYPPQQQGGYPGYPPQGPYGYPQQGYPPQGPYGYPQQQAHGKPQKPKKHGKAGAGMGLGLGLGAGLLGGLLVGEAVSDIADMGDMGDMGDMGGFDF

SEQ ID NO: 243185 - protein, 73 aa, Zea mays
  Clone ID: MRT4577_153368C.1.pep
WWCAKDRACRKERVALQFWPSADRASTRGALGLRQQRDVAAPPSWYPHRLSGPPLMVTYADFLCTSSDSSYAA

SEQ ID NO: 243186 - protein, 81 aa, Zea mays
  Clone ID: MRT4577_153369C.1.pep
AAALSLTMNTAVLGFLGAGGHATASAGILHPSPLGVTGSSSSSPNSVADACRQRTDLTSTRTDLSWCSGRAVIPVPDRPST

SEQ ID NO: 243187 - protein, 493 aa, Zea mays
  Clone ID: MRT4577_15336C.1.pep
WGDRRVRYMLAEVGKIFYSLKYCQASLKVLKSSGRAPELEAWKQLFITLEDRIRTHQQGGYATNLAPGKIVGKLFTSLDKSLSRMMGTQSAPLPQLPQGAANERGVYSSPDTKVVNSQSVMSMAPLVSSASEQSMSEIGGNSVYGREVAHNRSISEPDFGKTPQQQGAAVSSKAQSTSGSGSSRFGWLVQKTIGLVSKSHRQAKLGEQNKFYYDEKLKRWVEEGAEIPAEEPPLPPPPTKVPFQNSVPDPNSNAPPTGGGYSSNPPEPSSGMPPMPPTQNQFSARGRMGVRSRYVDTFNKGGGGGGANAFGVATSYSKPAAPSMSGAKFLVPTPVNVASEQMAELGAHSETARQDESSSSPAMETSFSSPPSLIQMQSSIPRYPSGDNIPRYPSGDNIPRYPSGDNIPRYPSMDNVSSPTGSINSSMSRSRASSWSGTYPEQLSSTAASRSPDGQMTQSPSMPGRRPPHSRSNSASSSAQLNGLGEDLHEVEL

SEQ ID NO: 243188 - protein, 90 aa, Zea mays
  Clone ID: MRT4577_153370C.1.pep
YTNLARDIHGSWMHADGNTPEKGGTHTSCKHSATHNTHTLLYKERAFFHKQYYLLIIATKMLYGGYHDDRWHYYALKSLLRRPSQKMVEE

SEQ ID NO: 243189 - protein, 127 aa, Zea mays
  Clone ID: MRT4577_153371C.1.pep
FIRPALHARLVWTNEAMDNMVFLQRWLQKFPQYRGRDLYIAGESYAGRIGGGQGVYTIYTAIIQLAWSLFRSRNMHAINAGSNVMQGTTSRSSPRPWWEFNNKEEEGSLTSKCVALRNPVLGVANGL

SEQ ID NO: 243190 - protein, 446 aa, Zea mays
  unsure (1)..(446): unsure at all Xaa locations
  Clone ID: MRT4577_153372C.1.pep
AIEETPPPPSASKAPDVESATATEAAPSEATITEAATAKDANLESTFPDIDKILLDMAAEEAAAATEETMATVPGKEKDIAKDTSEEENFNFQNLIGQELSMAEKEELRDYAISCGYQSEAMLFGGIDDESLGCLRYRTAAKVVGTLSKSIGFPKLETDISRYRRQHIVGSLFYSNFKVKTFLRLFIVFNDEGVCXKLASTQSMLLSKALRMQQDLKDKKHEIIIEGLESKIKDQAAVLEKKDFELQTMEGLLAKAEAKIAKLDKELLSKSESFEQEKHRFDMKFEAEVKKSSNLQKSLKELQDKCLEFSNRCVQRLRQIFNSVGASSEKFIPSIEDLPGTFKHIKGEVDAPDEVIAGHGDFCALLASRGTAVAFMKSGCTHGKIVNRPNFSLSLADLIYIPSLAXSIGNRFIKQIWAKGGRSLAGDEARSHLKPDDEAEEHRVEA

SEQ ID NO: 243191 - protein, 138 aa, Zea mays
  Clone ID: MRT4577_153373C.1.pep
RVAECVTNWTLVSLNHDHQSCMDPSTITAPLVCSFAGHDGPFGAFCVKRIASAGLTEGLGDMRPLDMERAEDHIANKTREIVPGLIVGGMELSEFDGSARMGPTFGAMLLSGKRAAEVARQSLARVQVEDGEVTGLAK

SEQ ID NO: 243192 - protein, 72 aa, Zea mays
  Clone ID: MRT4577_153374C.1.pep
SSHSPLGLGSTASIFICIRARPWILIHQAGYVIRLIPRVSCRGYERLRRAHLISRLITNVVGSFRAPQHVTM

SEQ ID NO: 243193 - protein, 96 aa, Zea mays
  Clone ID: MRT4577_153375C.1.pep
GVLHDLGLRQERQPAAAETQQPLRQRSSASVPLHGAEGVGIRSAACDSESVLRHCSLQRRVGVGETEAALLAAVPERSVGSMRREAATSRADANGQ

SEQ ID NO: 243194 - protein, 56 aa, Zea mays
  Clone ID: MRT4577_153376C.1.pep
QSLWIWSSNKSCHVADEWLTVEAFLCKFGPPHHIQWVWRLQSSCPRKPSILASCRG

SEQ ID NO: 243195 - protein, 102 aa, Zea mays
  Clone ID: MRT4577_153377C.1.pep
SAKVSSGGLRWLGPFFKFQNGKIGPQSSLIFKPKMLFFVLSPLGKWRVPHSRPSNPRWWSKGLGRAQNYLRFRVFLRDFLVKFVELPRKTTCNGSSPPPLNK

SEQ ID NO: 243196 - protein, 138 aa, Zea mays
  Clone ID: MRT4577_153378C.1.pep
MVRSTVFPPVRGVYGARSLTLLACIDIQSIAEQHTARILCFCRRGSWGFAPCFSLQRPRAPRLRPGPCSYPILLFFASLFPALSFFSYKSVVGGTHVSSPPKIYSIYPRRDTHSQRPDRRISRLRRHVDGGGRGAAAL

SEQ ID NO: 243197 - protein, 57 aa, Zea mays
  Clone ID: MRT4577_153379C.1.pep
FLVTDKAHQVMDEDIFYNCNHYDIHPRPPPVMESGEITDVMTKARRMHRLPLSASCY

SEQ ID NO: 243198 - protein, 87 aa, Zea mays
  unsure (1)..(87): unsure at all Xaa locations
  Clone ID: MRT4577_15337C.1.pep
MLRRSCSIMAPKNNKLVAVVQQRDYXKNAVTKQNNLVAHHPFFSWCNNKEEGTDHRSXQELSLHDEXXDPPCSALITAGVVVTTRMI

SEQ ID NO: 243199 - protein, 115 aa, Zea mays
  unsure (1)..(115): unsure at all Xaa locations
  Clone ID: MRT4577_153380C.1.pep
MTDLDIQSPTDFEPFADANAXTLGAAAGXKGXVHASMKQRTAPKSLTTAYGWKNEFRYSKILKDLSKELCCNGTVVPHPEVGQCIHVLGDQIKNASNILVQAAIVKNEHINMHGF

SEQ ID NO: 243200 - protein, 77 aa, Zea mays
  Clone ID: MRT4577_153381C.1.pep
GALRPDGALKKWCNTAGMLFLVWCVRAWYTSPVRALCLCFKWFRFRFFLVVTKKKLYGLWVFHWPALRGFNQLILTL

SEQ ID NO: 243201 - protein, 77 aa, Zea mays
  Clone ID: MRT4577_153382C.1.pep
FTTKVVAKHPESRHATRGHPEPAGTKKAREPSGGAFKRTNPVYILQGGFLVTLAINVDSFIFFKNPPFFFFFFFFYY

SEQ ID NO: 243202 - protein, 53 aa, Zea mays
  Clone ID: MRT4577_153383C.1.pep
ESREVSWLSWSWPAVYPKATGGSYVLDIILSHATKYSQDGPSEHSTASRVQTR

SEQ ID NO: 243203 - protein, 88 aa, Zea mays
  Clone ID: MRT4577_153384C.1.pep
MSNSFQDLFEGRIDFEGQKSVENISKIALVAITLVSFIIGFVAQSLQLTFAIFGISTVALALVVIPPWPMFNKHPVTWAATVETKKSQ

SEQ ID NO: 243204 - protein, 121 aa, Zea mays
  Clone ID: MRT4577_153385C.1.pep
MSAEYKNTNVNEIAKKAEQELSSDSATKGHNVGLSTTESGVDTANVEGKFPGAEVKYGSAASGAGNNREIPLDEGGSIKANGQPTKAGDFAHGGVGAPEERNQTYINNNGGDDSIRGNIRN

SEQ ID NO: 243205 - protein, 453 aa, Zea mays
  unsure (1)..(453): unsure at all Xaa locations
  Clone ID: MRT4577_153386C.1.pep
DAWADAWADAWAQNGKALAXLALLCTSLAFTTCAGIRLELTHVDAKEHYTVEERVRRATERTHRRLASMGGVTAPIHWGGQSQYIAEYLIGDPPQRAEAIIDTGSNLIWTQCSRCRPTCFRQNLPYYDPSRSRAARAVGCNDAACALGSETQCLSDNKTCAVVTGYGAGNIAGTLATENLTFQSETVSLVFGCIVVTKLSPGSLNGASGIIGLGRGKLSLPSQLGDTRFSYCLTPYFEDTIEPSHMVVGASAGLINGSASSTPVTTVPFVRSPSDDPFSTFYYLPLTGITAGKVKLAVPSAAFDLRQVAPGMWTGTFIDSGAPLTSLVDVAYQALRAELARQLGAALVQPLAGTTGFDLCVALKDAERLVPPLVLHFGGGSGTGTDLVVPPANYWAPVDSATACMVVFSSVDRKSLPMNETTVIGNYMQQNMHVLYDLAGGVLSFQPADCSSI

SEQ ID NO: 243206 - protein, 57 aa, Zea mays
  Clone ID: MRT4577_153387C.1.pep
LCTTVRSLPCGSRAKHAYGLHALSITYLYHLCTDSVCPTNNAVLFYPLEPTIRTEMG

SEQ ID NO: 243207 - protein, 130 aa, Zea mays
  Clone ID: MRT4577_153388C.1.pep
MEEALDLDFSRTLLELDVKWWERERWRESRRLLVEGVGGTRVWNAGMEASREMQASTCSFSPETEATLQEHARNGGMWTRMKPGMRCPDARTRPLIVVPDDVIRPARLDDHGLLGQASAGRPKAALATAN

SEQ ID NO: 243208 - protein, 120 aa, Zea mays
  Clone ID: MRT4577_153389C.1.pep
LVTSHMDGDTEMHAYDERPLRCLRDPPLGGPGEDDDGRQRSPAAAAIWLDAHRRRRGAEVMASSLPAFSLSPRDLPISLYGARWFDVKIYLLGVGFEPTPFRTRTLIWRLRPTRPSQLNI

SEQ ID NO: 243209 - protein, 119 aa, Zea mays
  unsure (1)..(119): unsure at all Xaa locations
  Clone ID: MRT4577_15338C.1.pep
KIDIEDVDGQSHHGKAPNTTMMLNMVKKKVESDMSNWMSTDMCLLVCIQWLVPENLVCMVVVVIRGRARVLIGPCLIDDQDTEVYSFYQKRPLLEFLFLNGSTPCALLLYPLXSQHTVG

SEQ ID NO: 243210 - protein, 132 aa, Zea mays
  Clone ID: MRT4577_153390C.1.pep
HNPTGAAGASSWSPWPGSVQVQQLMYFVPQHDGLAAQPVAPWFGYSGSVPCAVFYPQAVGSAQEHQQASEPLDHKRAQRERSLTGSNMASSAASAAQNSDTAQSRHGPGQENTGDGCAALRAAIPRLAKCAS

SEQ ID NO: 243211 - protein, 84 aa, Zea mays
  unsure (1)..(84): unsure at all Xaa locations
  Clone ID: MRT4577_153391C.1.pep
NXAXKXXXNXXEDGKRQXXXRPXXKGXXKXXTXRQGHGXXGEXEXXXDHRXGKNXXEPNGRXNKXGGXSPRXEXGGKDXEGXXG

SEQ ID NO: 243212 - protein, 92 aa, Zea mays
  Clone ID: MRT4577_153392C.1.pep
KKSPKWCSCLKVVKCLKEVTHPAQDPWGFSPPPNYGVSRGTPGKDKIMSPTKEFPGQQNPNQTPRPATKASLVFFLPSLKKPRVVLPAPPVM

SEQ ID NO: 243213 - protein, 85 aa, Zea mays
  Clone ID: MRT4577_153393C.1.pep
CCSVYAITQTLQRIQQDIVAQKKTLGALMGQYQQRIWTPEPERLPPQLPHTHGGPILQPSPEQPFLTILHHQYTLIRWPKSHLAL

SEQ ID NO: 243214 - protein, 129 aa, Zea mays
  Clone ID: MRT4577_153394C.1.pep
MGLQWMLLTCVVGAEAAVAALLTLPAPRAVRAQIVGLTSMLLQPFAAVLPFAAFQLLDIYWKNEHRLICTGEMCTSEERVRFEKSIFKSQRNVILCVSVFILYWSIYRICKFNKDIKALEEVEKRIKDE

SEQ ID NO: 243215 - protein, 88 aa, Zea mays
  unsure (1)..(88): unsure at all Xaa locations
  Clone ID: MRT4577_153395C.1.pep
SFERAQHNAFIIAHRSLAHIDIIAQHLPLVTXMDFEHAGMQGYRLQLALVDGVLQQPYCQLLKQXLAHVNLQTIXTQQQQQFLPLLNH

SEQ ID NO: 243216 - protein, 48 aa, Zea mays
  Clone ID: MRT4577_153396C.1.pep
RAHHVPLRRAQMVLRHGRSRILNPGRDAPGTAGAGRHVCPHPHRHRLT

SEQ ID NO: 243217 - protein, 59 aa, Zea mays
  Clone ID: MRT4577_153397C.1.pep
IFAKNQSTLEIIAWGGVREINALFIETCWLVKVLVLYLVSTELWNGWNRHYHLNTCLCY

SEQ ID NO: 243218 - protein, 187 aa, Zea mays
  Clone ID: MRT4577_153398C.1.pep
MAQLLHEKRNPRSKLAEGISGSIMSRLASSPVLPLDDEDLLQEILIRLSPQPSSLPRASLVCPCWRSILSNHKFLCRFRKHHRKPPLLGFFARCLITKTTVFTSVLDSPDRIPAGHFLVPHSHNPSKRLRFMGCRHGLAVLFEMSLHSPMPTGLIVWDPLTGQQYNHLTMPPGLNGDKWKCWNTTVL

SEQ ID NO: 243219 - protein, 101 aa, Zea mays
  Clone ID: MRT4577_153399C.1.pep
SSRSFSSLTLCLLSPASAPRFSLSVSFHPSVPFPLILYPAHQLLLFLPLVEQLTHFLAFLSALCGSPPPRGVALWAIVLCLLLPWRHYVQLAGVNSVTPFV

SEQ ID NO: 243220 - protein, 48 aa, Zea mays
  Clone ID: MRT4577_15339C.1.pep
WVCPVGRSFLQCRCTEICFQFVSPLWWHLCQNFCLGRRRSKVSRALCF

SEQ ID NO: 243221 - protein, 284 aa, Zea mays; identical to SEQ ID NO: 242671
  Clone ID: MRT4577_1533C.1.pep

SEQ ID NO: 243222 - protein, 48 aa, Zea mays
  Clone ID: MRT4577_153400C.1.pep
CVSASCAVKIFPNNHLLEVSQNKKKKNKNKTNKKQKPKKQKKQKKKQK

SEQ ID NO: 243223 - protein, 81 aa, Zea mays
  unsure (1)..(81): unsure at all Xaa locations
  Clone ID: MRT4577_153401C.1.pep
NXXTFXHPLLXQSGGGGGNPPXPYASSIDGGGVTVPFPFXIRILPSPFMILATPAGRGITFWALFLFRGGDSXXLVFLLRL

SEQ ID NO: 243224 - protein, 82 aa, Zea mays
  unsure (1)..(82): unsure at all Xaa locations
  Clone ID: MRT4577_153402C.1.pep
LTSQYGPESGSPRVRTRLKSLTAAFHAXGVQCVADVVINHRCADYKDGRGIYCVFEGGTPSSRLDCGPDMIFSDVTLDSYGR

SEQ ID NO: 243225 - protein, 36 aa, Zea mays
  unsure (1)..(36): unsure at all Xaa locations
  Clone ID: MRT4577_153403C.1.pep
RHAXTARRMYRXWAPSPPCXEGKRTPPXRXDXVGGH

SEQ ID NO: 243226 - protein, 58 aa, Zea mays
  Clone ID: MRT4577_153404C.1.pep
IASCRPFFFLGWFFPLFLLSDTLLAHPISKSRDHFWFRSHNIRHISLHTFIDAVIYRD

SEQ ID NO: 243227 - protein, 177 aa, Zea mays
  Clone ID: MRT4577_153405C.1.pep
MTIFDDDDDAEPQLKVVDNYYFEKAKNEFVCFSTLPLKFDENDKVSGKGIYLRRYPADGAPAVYKQVVAWTVALNREQPKISVLSSEGYWIELDLLKPRKIYWKFARSALTTVQMLHFVKRQPRKLMISLSVHLREVFSKFETEEMEDALGKHHHIIKRCAERDPALMRSKILQSFI

SEQ ID NO: 243228 - protein, 1348 aa, Zea mays
  Clone ID: MRT4577_153406C.1.pep
MAEREEIRQERRAQQQLQQQFQQQQQQQQVPFPPPPPPVPPRDKHQEFMSHKPPTFASSPDPLDADDWLKSIEKMLNIAQCSDREKVLYASGRLIDPAADWWDSYTAAHDAADTITWVEFSTQFRNYHIPAGLMKIKKKEFLSLKQGNMSVSEYRDKFIQLSRYALDERLLDKALAIEHKRVQLGDLKRKAISQGQGSSSVCPRYVPPQGTPTRLGGPHPVQYAPQASPRTPPTRQATPNGTPTRPTGQKTDPTCFKCSQIGHYANACPMGNSGTPAKNKQQTPGKGYSIARVNQVSVDATPDGADIVLGMFYVNAIPATILFNSGATHSFMSTRYANTNEIPLLNMRKPMIVITPKGPIEANQMTRRLTLTIMGREFGATAIILEASSIDLILGMSWLRKAKAIIACGRGTIELTSPKGETFQVQFAVTTSSKRAIYFIPEEFVGDNIRVVTYFPDVFPEELPGMPPDREVEFVIDLLPGTAPISKRPYKMSVEELKELKKQLTELQEAGYIHLSSSPWGAPVLFVQKKDGSQRMCVDYRSLNDVTVKNKYPLPRIEDLFDQMRGARVFSKIDLLSGYHQMKIRPSDIPKTAFSTRYGLYEFTVMSFGLTDAPAYFMNLMNKVFMEYLDRFVVVFIDDILIYSKSESDHEEHLRLVLQKLRDNQLYAKFSKCEFWIDKVPFLGHIISNGGIAVDPVKVKEIMEWSVPTTVTEIQSFLGLAGYYRRFIEGFSKIAKPMTSLLEKGREFKWDEKCQDNFDQLKKRLMAPPVLIMPDLQKGFDIYCDACGQGLGCVLMQEGHVIAYASRQLRKHELNYPTHDLELAAVVHALKIWRHYIMGTKCQVYMDHKSLKYIFTQKDLNLRQRRWLELIKDYDLEIHYHPGKANLVTDALSRKEHGVTIELEPTLEQEIRKGQVGDAKIQEIKDLIMEGRVPDFTEDEQGTIWFNDRICVPEIDSLRETILKEAHDSDYSIHPGSTKMYQDLKQKYWWYGLKRDVAAHVAKCDVCQRVKAEHQSPAGLLHPLKIPEWKWEEIGMDFIVGLPRTPVGYDSIWVIVDRLTKVAHFIPVRTNYTGAKLVELYMTRIVCLHGVPKKIVSDRGSQFTSRFWKKLHESLDTRLNFSSAYHPQTDGQTERTNQVLEDMLRACALKHGGSWDKSLPYAEFSYNNSYQASLKMSPFEALYGRKCRTPLQKSYADNRRRLLEFKEGDHVYLKVSPIQGMRRFKVKGKLSPRFIGPFLILKRVGEVAYQLELLDHLSNVHDVFYVSQLKKCLTVPEEQLPMEDLSVQDDLTYAEYPIKILDTLTRVTRNKVIKMCKVQWSHHGEDEATWEREEDLRIDFPHLFPRPS

SEQ ID NO: 243229 - protein, 98 aa, Zea mays
  Clone ID: MRT4577_153407C.1.pep
SDSLANPLSNYFLFLKITLRGLSYFKKECIIHIFYTSYNYSYKISFHHYFQITPLPYHNPYFNYHCTLLTTLNICLKTNTNLIIKLINLSPFHPFSNT

SEQ ID NO: 243230 - protein, 63 aa, Zea mays
  Clone ID: MRT4577_153408C.1.pep
GRWADTWERRNAQPNPAVLLQSALLPRKKAVLFSSTTTLHSTRPMPSLLTYTLIPLDIVPSTP

SEQ ID NO: 243231 - protein, 64 aa, Zea mays
  Clone ID: MRT4577_153409C.1.pep
KQPGRRKQRARKASPRTLRGCFVSEIRATGFSVRGTPPPPRGGHLTKGSLGGGGHDLLFYFGPI

SEQ ID NO: 243232 - protein, 55 aa, Zea mays
  Clone ID: MRT4577_15340C.1.pep
RLISVNSASTIGLIRGRRTAHLLLAFMCSYIRTMLKPKDTRAELLREFQFHVMPK

SEQ ID NO: 243233 - protein, 54 aa, Zea mays
  unsure (1)..(54): unsure at all Xaa locations
  Clone ID: MRT4577_153410C.1.pep
DHRHMGVGGIDSWSPWVHEQYMLPPTRYAFSFRLCPLLPXSXSCHDIYRFQLPS

SEQ ID NO: 243234 - protein, 168 aa, Zea mays
  unsure (1)..(168): unsure at all Xaa locations
  Clone ID: MRT4577_153411C.1.pep
SFNHLFFFFLLAFSSFILFHLFFLPLHPFHMPIIIPRIIPPMTIMPLPNIMPTIKKPTIITPITIASMMPPTTIPTHNLPVLIPKXMPLSKTPKIIPPXIIIPNLIPPKIMPIMMPXMIIPNIITKPQFYSNSISHIIQQHQLPFMFKPTPMAISPKILQQPYVRTSF

SEQ ID NO: 243235 - protein, 307 aa, Zea mays
  Clone ID: MRT4577_153412C.1.pep
MDKSVAQEESSSEGYETPSDPFPTTRIDRAATRELLRDPTYDPQDHEEVLSQFRAMLEKAAARYQDAPEPTQDAPEPIQGAPEPTQGAPESTEITTERSRKRKQSDRNRGDRGLNKFPDKTYKITDVSLNGQPLAPEEALPKFRNALGFLVRDNLDITIRQWRDVSDDVKNQMWNKLITRSEMNTKFAKKGLDPTKKYKISAGQWAVFLKQRSSPDFISLSESNSELSKKNKYHHHLGTGGYKRQVPKWRQEDAVKKAAGLPTLSEQLGERTANWIRAKKPRETESGISFDDPTVEEAAKKHICNCS

SEQ ID NO: 243236 - protein, 879 aa, Zea mays
  unsure (1)..(879): unsure at all Xaa locations
  Clone ID: MRT4577_153413C.1.pep
MAAEPERSNGWGHRSMSSPTKEQGLGPDHMDKSVAQEESSSEGYETPSEPFPITRIDRAAARELQRDPTYDPQDHEEVLSXFVRCSKKLRHDTKTHRNRSKTHRNRPKAXEPTQGAPESTETTTERSRKRKQSDRNRGDRGLNKFPDKTYKITDVSPNGQPLALEEALPKFRNALEFLVRDNLDITIRQWRDVSDNVKNQMWNKLITRFILPGGLEELVKKYTMKQFAINFRNWRSEMNTKFAKKGLDPTKKYKISAGQWAVFLEQRSSPDFISLSEANLELSKKNKYRHHLGTGGYKRQVPKWRQEDAEKKAAGLSTLSEQLGERTANWIRGRKPRETESGVSFDDPTVEEAAKNIYAIAAKQSQGTFKPQRERDILTAGLGNPEHPGRVRGISSKEGWKEGFRPQWEAAQTSASIEGTTIPSSVASTGNKLRYPVDDITRPVECTLVIRYGINNQRTKKVATGLAIPGRKLHGNDIPEEYCRVEVTTVVQGYEDEMLDIPGPEGSGRSLTSDTVDLADLEESAKKAEAMAAKIKKPTKADYKNMPKKYVPGRPLLTFEKLRKVPANIKRLHDWYMRASSVGIDTISVNIPAHAFIGSNQKVVVAFEDMWLMMNLQRLDVQLVTIFALMQHDQQEILYGTNPNASASKRVGYLNPIKICEDNHTFRIGKGNKALQGLIDEEIEVRIQDLKKDFEARYTTYIGHAILQFQDRESIVAPYNFKDHWICFFIYPKVGKVLVLDSLHTEPSAYSKFLSILELAFRFYKLQGGKYDTSKKSVPLDIHYNWPCHKQPPGSVLCGFYVCEFMRMNGRYITNPGKVWWFGPGNHTALRMAGFAEFGPQNSAAEVLEGTGGDTWRDRGGCVKAKRLHVKDVALESKT

SEQ ID NO: 243237 - protein, 935 aa, Zea mays
  unsure (1)..(935): unsure at all Xaa locations
  Clone ID: MRT4577_153414C.1.pep
MDKSVAQEESSSEGYETPSDPFPTTRIDRAAARELQRDPTYDPQEHEEVLSQFRAMLEKAAARYQDAPEPIQGAPEPTQGAPESTETTTERSRKRKQSDQNRGDRGLNKFPDKTYKITDVSPNGQPLAPEEALPKFRNALGFLVRDNLDITIRQWRDVSDDVKNQMWNKLVTRFVLPGGSEELVKKYTMKQFAINFRNWRSKMNTKFAKKGLDPMKKYKISAGQWAVFLEQRSSPDFISLSEANSEVSKKNKYRHHLGIGGYKRQVPKWRQEDAEKKVAGLPTLSEQLGERTANWIHARKPRETEYGISSKEGWKEGFGPQWEGLYKKRDRYKEEMANYFKEETKKEFKGLMSEMLSNPPPELMQQLAMASAMSVQQMTTPHMQIIPAAQTPAATEGTTIPSSVASTRNKVRYPVDDITRPVSCTLVIRYGINNQRTKKVATGLAIPGRKFHGNDIPEEYCRVEVTTVVQGYEDDMLDIPGPKGIETLGQAIKNFILWPRRDVELVDWSNSSQAQPSSPSQIVVPIVHPSSPPQTSHAAPHPLSDPPSPHPHGGPPSPPHTSPFRDPPSPQPSPRPSKKSKVSIPKLVSPFDKKKKSKSTAGTVRFLKGIGRSLMSDTVDLADLEESAKKAEAMAAKIKKPTKADYKNVPKKYVPGRPLLTFEKLRKVPANIKRLHDWYMRASSVGIDTISVNIPAHAFIGSNQKVVVTFEDMWLMMNLQRLDVQLVTIFALMQHDQQEILYGTNPNASASKRVGYLNPIKICEDNHTFRIGKGNEALQGLTDEEIEVRIQDLKKDFEARYATYIGHAMLQFQDRESIVAPHNFKDHWIRFFIYPKVGKVLVLDSLHTEPSTYSKFLSILELAFMFYKLHGGKXHIQKRRXLDIHYNWLQPPGSVLCGFYVCEFMRMNGRYITNPGKWKWRFPLAPSTGGTEKRQ

SEQ ID NO: 243238 - protein, 75 aa, Zea mays
  Clone ID: MRT4577_153415C.1.pep
TRKRNQNSCHSTHHNESPTCLLCHIRESQSTHTPTKGSNHNSRLSGAVYTKSFNATPLQTMKKVYYVLCHRSVTL

SEQ ID NO: 243239 - protein, 35 aa, Zea mays
  Clone ID: MRT4577_153416C.1.pep
SHVSWKSQLKKVFELSRGDPESQDRRRVYNNGKAR

SEQ ID NO: 243240 - protein, 51 aa, Zea mays
  Clone ID: MRT4577_153417C.1.pep
WFVDERAVSILAGAPGCHAWTGRLLPGVHFPRSAYRTCHTDLGLLKVCKDL

SEQ ID NO: 243241 - protein, 59 aa, Zea mays
  Clone ID: MRT4577_153418C.1.pep
MSVKDDSFPSSAAFDAISAALQNEADRKDAIKQGAGLYAFTLKKDGKEASWHIDLKEKE

SEQ ID NO: 243242 - protein, 83 aa, Zea mays
  unsure (1)..(83): unsure at all Xaa locations
  Clone ID: MRT4577_153419C.1.pep
MAPPKPKSGXHXNINRGDVLTKRELPMRPSXREGKATKRVSMDRGLIREVAGFAPYEKRITELLKVGKDKRSLKLAKRKHGTH

SEQ ID NO: 243243 - protein, 132 aa, Zea mays
  unsure (1)..(132): unsure at all Xaa locations
  Clone ID: MRT4577_15341C.1.pep
GYYPQVYIGDGNTWSLGGCVKRLMLYEAPAAEDGDSDEEQGQLPKRGAIVLLCLCTFIHCNMDRVNMSNAKQPMSAQVGWNPQTDGIIQSSSLWGYLLTQIAXGIWADTVGRKTDLGFGVAWRAIATATTSV

SEQ ID NO: 243244 - protein, 62 aa, Zea mays
  unsure (1)..(62): unsure at all Xaa locations
  Clone ID: MRT4577_153420C.1.pep
MGAKICALLALLALSASAATSTLIPQGXQNYLFPAPAVGFXFPTIPFHMGQEALPASLLPSF

SEQ ID NO: 243245 - protein, 26 aa, Zea mays
  Clone ID: MRT4577_153421C.1.pep
TLNRLLSYNMLPMLEKDISRLLEADH

SEQ ID NO: 243246 - protein, 75 aa, Zea mays
  unsure (1)..(75): unsure at all Xaa locations
  Clone ID: MRT4577_153422C.1.pep
KRPEWEVMPTHRSGKTKDPFIAALXVGLFRGQIKRGAPSRFKGLAKKNKLLRIKKKLGNPPVYPEEKFRAPVEPS

SEQ ID NO: 243247 - protein, 56 aa, Zea mays
  Clone ID: MRT4577_153423C.1.pep
LAVFLQRWDWKNPVVAQLNNLAENANFASWPNKKKARTNRFSKKLYNLNGKWNPPF

SEQ ID NO: 243248 - protein, 61 aa, Zea mays
  Clone ID: MRT4577_153424C.1.pep
GFAMFQDMLIVIDTTCVVREQPIGVNTFNSQYVVWFRHIANLEPPVLEIPPKSIRERLAIK

SEQ ID NO: 243249 - protein, 659 aa, Zea mays
  Clone ID: MRT4577_153425C.1.pep
MAAAPPPPPDGQEKVIAAAQHIVKSLANSKNAADDMIRILSRFDNRFSLMSDLFPPPPTAVDSILEADEGTSQGEGDEPDLDPEGDAAARAEAEWDAAAEVVERWESPTADALVFDSREGEEYLAAAACLTGAPGPRAEAALQTAMARLEDEFRHLLIRGAPPLAAEDLQVSLLRRLSLTVPSFNSSAVDLDCPSFAQHHAAVAAEGVNEQQGGRSSASDDEISPYLIAPDTVSVLRDIADVMLRAGYAPELCQVYGEVRRDTLMECLAVLGVDKMSLEEVQRVEWGVLDGKMRKWIQALKVVVRGLLAEERRICRQILSPDMNTEEECFTQAAKGCVLQMLNFGDAIAIGKRSTEKLFRILGMYEALAEVLPELEGLFSGDAKNFIKEEAEGILLRLGDAVCGTIEEFANDIQGDTSRRALPGGEIHPLTRYVMNYVWLLADYNASLNKLLECWDTELTGVDNPNMTPLGHCVLMLITHLQCKINEKSRLYEDEALQNIFLMNNLLYIVQKVKDSELKTLLGDNWIRKRRGQIRQYSTGYLRSSWTRVLACLRDDGLPHTMGSSSTLKAALKDRFKNFNLAFEELHRTQTSWRVVDPQLREELKISISEKVLPAYRSFVGRFRGQLEGGRGSARYIKYNPDDLENHVSEFFEGRKSNA

SEQ ID NO: 243250 - protein, 154 aa, Zea mays
  Clone ID: MRT4577_153426C.1.pep
LLYIVQKVKDSELKTLLGDNWIRKRRGQIRQYSTGYLRSSWTRVLACLRDDGLPHTMGSSSTLKAALKDRFKNFNLAFEELHRTQTSWRVVDPQLREELKISISEKVLPAYRSFVGRFRGQLEGGRGSARYIKYNPDDLENHVSEFFEGRKSNA

SEQ ID NO: 243251 - protein, 75 aa, Zea mays
  Clone ID: MRT4577_153427C.1.pep
LWPMPPTFRICARLRPSFFFLIVRCDGTSIYSCCHMHVCLFFPVPLHRQVEIMSWRFPLKLPMFLQKWWFLFPAG

SEQ ID NO: 243252 - protein, 71 aa, Zea mays
  Clone ID: MRT4577_153428C.1.pep
LEPAGIYQQQNKAASCPPFVWVCSLQHMLVGSLSAPNRRPSSQETGDSFHGAKRMLPSCLRHGLCNEDGSL

SEQ ID NO: 243253 - protein, 160 aa, Zea mays
  Clone ID: MRT4577_153429C.1.pep
MRPAAAASTGGFHLVLPAAHRLPPSLPSISSRRGVRIRAAAAAGGGGALLGRPMEDVYKVRVERGEVARARMEALRVMETWSSWRTGGRCRMPWDWQVDQLVYIVSGEVKVIPAGAVHGDDYMHFVAGDLVRYPRWFEADLYFDGPYEERYRFLAYGDDN

SEQ ID NO: 243254 - protein, 388 aa, Zea mays
  Clone ID: MRT4577_15342C.1.pep
MDMASSSASAALLLAVSLAALHLCCRHGHGAGDAAGNGITAIYSLGDSITDTGNLVKEAPPGMFETIKHLPYGVTFGYPTGRCSDGLLMIDFLAQDLGLPFLNPYLGKNKSFDHGVNFAVAGATAVDPADQFNLPAVPVPFASKSLKVQLRWFKDFLKYTFGTDEEIRRRLQASLVLVGEIGGNDYNYAFFQAKPVAEVEKLIPGVVKTIVGAAKEVLDMGATRVIVPGNFPIGCVPGYLAMNAASSEPADYDSAGCLRELNDFAAKHNSRLRRAVADLQASYPGAAVAYADYFDSFLTLLHNASSFGFDAASTRKACCGAGAGEYNFDWRRMCGFPGTAACADPSTYLSWDGIHMTQAAYRAMSRLIYHGKYLEPQILSFPEKNGQT

SEQ ID NO: 243255 - protein, 60 aa, Zea mays
  unsure (1)..(60): unsure at all Xaa locations
  Clone ID: MRT4577_153430C.1.pep
CGLSYSSLYSSLCCGSIVYFLPCKIFFWFDSKEKNCAFWGVGEKKKKKKLPMSHCFXLLY

SEQ ID NO: 243256 - protein, 109 aa, Zea mays
  unsure (1)..(109): unsure at all Xaa locations
  Clone ID: MRT4577_153431C.1.pep
FWRGFASDHPELAYGQHKWRRXMAQDWKKGISWTEEELRMCLDGMRRLPKGDXNSMYKGFDTSRTVTLVASDADKYFLRXTIPGMKKRQGSLCNVGMTDYKDNQLPGPN

SEQ ID NO: 243257 - protein, 99 aa, Zea mays
  Clone ID: MRT4577_153432C.1.pep
GGGDCKSLHFQIPLNRTFKTGPHKLLAKKSCPGMAPFIFSFFSPTRWCQTWLFCKGKKHGLSRGEKTFCPMGDPHWSPPTLFTRGGGAFIKGPPRKKTF

SEQ ID NO: 243258 - protein, 175 aa, Zea mays
  Clone ID: MRT4577_153433C.1.pep
LEAGRDFSFFTSDIPTKKIAVVCKFVHFPVTCLCRVPHVMDAFAKSIHSLHNTPLTSSPSPPHDAADTATIIHQIYKGHPSNCPFTHNSNRQPAPMNHPASSSALAALQRYPFTLYTPINIELICGALRSSRHYLYWHIHPLDTVTSIRYLSLKHHERECKLPNRTFHTAFLRGW

SEQ ID NO: 243259 - protein, 46 aa, Zea mays
  Clone ID: MRT4577_153434C.1.pep
ATLALTRAWTRGFEAARHGASCLRSDPMTPSIGARTRYRASKQSAS

SEQ ID NO: 243260 - protein, 107 aa, Zea mays
  unsure (1)..(107): unsure at all Xaa locations
  Clone ID: MRT4577_153435C.1.pep
AFQQPIAQLHEXGLAHLTLQGMAAQQRQHFMSPLSHIAVVNPVADLQQRLHASNPLALANVAADHQHQHRRQFIPALSQLAMVNPAVYLQELPVSPLARSNAETEKQ

SEQ ID NO: 243261 - protein, 57 aa, Zea mays
  unsure (1)..(57): unsure at all Xaa locations
  Clone ID: MRT4577_153436C.1.pep
MPPAPPLDVIPPHGMDPYKHLPCSXSNCTFWTTNSRASRWNNNSALTVRQGGPILLE

SEQ ID NO: 243262 - protein, 42 aa, Zea mays
  Clone ID: MRT4577_153437C.1.pep
TFFVISLFPEALTLFSLLTFNLYNQLNYFMDAFLPTLIFVDY

SEQ ID NO: 243263 - protein, 197 aa, Zea mays
  Clone ID: MRT4577_153438C.1.pep
MTIPSAEGFLQASSCLPCTATEEREVVDALTKEAEKNVKHGDLRYLVSQSWWMEWQGYVGLVNYGESGTEQFPQATNRPGEIDNSKLVLAERINGSEEPELQRTLREGEHYTLVPQEVWQRLYEWYKGGPEIPRKVIFDNPTDKTYVVDVYPLCLKLIDARDDSEKVFRISRKAKVHELYSMVCSLMSVEQSEICHL

SEQ ID NO: 243264 - protein, 89 aa, Zea mays
  Clone ID: MRT4577_153439C.1.pep
YVLILRPQFSIPPSGAAGQTKGILSVPLALRSFQWRVQWHCCLSDSVCRLCNSLSFCNISRRLDAPDNETLTSESSSVSSLFFSMFFVI

SEQ ID NO: 243265 - protein, 83 aa, Zea mays
  Clone ID: MRT4577_15343C.1.pep
GSCTCRCIAAGHRRASRYGPATPSGASSFMLSRPYHQLLRPATRLGELVTVTRRARLPSLQLCTAIWLARLHRNFAGTGRWVD

SEQ ID NO: 243266 - protein, 101 aa, Zea mays
  unsure (1)..(101): unsure at all Xaa locations
  Clone ID: MRT4577_153440C.1.pep
MSKEDVLKVQTCVLKVNIHCDGCEKKVKKILHKIDGVYQSSIDAEQGKVTVSGLMDPATVIKKLNKAGKPAHLXGAXXGVGPLPLLGGGGGGGGVPPPLGG

SEQ ID NO: 243267 - protein, 80 aa, Zea mays
  Clone ID: MRT4577_153441C.1.pep
IIGAFRFLTFLSKESERPICLGHWNPKTSLGRQVPWMNVIIISQFSMQLLKGRFKQGMLSPNPQKGWHLENSVLKKRKPM

SEQ ID NO: 243268 - protein, 74 aa, Zea mays
  unsure (1)..(74): unsure at all Xaa locations
  Clone ID: MRT4577_153442C.1.pep
FHQLKQVEPQPRYQAIFGLVLQSILXKKPKKGQVSGLFAAQKNQQISGIFGLKKPNPCPXGSAGGVPPLKKYFF

SEQ ID NO: 243269 - protein, 79 aa, Zea mays
  Clone ID: MRT4577_153443C.1.pep
YSNRGVLQLFCFCFTAFENKGPTGLILENTGPVYLRFPENFSPQGFLRGFLGELNTTGADPPKILPKLGLTRGGGRSRM

SEQ ID NO: 243270 - protein, 31 aa, Zea mays
  Clone ID: MRT4577_153444C.1.pep
TASFHEYTFANQPSPRGRGHYGGTPAHLKGG

SEQ ID NO: 243271 - protein, 118 aa, Zea mays
  unsure (1)..(118): unsure at all Xaa locations
  Clone ID: MRT4577_153445C.1.pep
ILCFEYFILVSSEAICWLFPFSAFQVDAMLQKLEKEIDDVDARIGNRWQLLDRDCDGKVTPEEVAAAANYLKDTIGAEGVQELISNLSKDNEGDILVEDIVKLASQQXGNNEAERTAR

SEQ ID NO: 243272 - protein, 75 aa, Zea mays
  unsure (1)..(75): unsure at all Xaa locations
  Clone ID: MRT4577_153446C.1.pep
AGRAXDSCSPXSPSFLGPRTRQLASALDRIPLPCRHGRAGAAGRRGGRAVRRAHAAAPDLPPRPRVRSPPFPRSP

SEQ ID NO: 243273 - protein, 365 aa, Zea mays
  Clone ID: MRT4577_153447C.1.pep
MATRRELSLALLCVCLAACALAPGPADASKMVGVYELRKGDFSVRLTNWGARVMSVVLPDRKGNLADVVLGRDTVAEYVNDTSYFGPITGRIAQRVARGRFVLDGKVYHMHRNDGRNTIHGGDRGFSRSIWTVKEYVAGGESPHMTFYYRSFDGEQGLPGNVDAYVTYRVSGAYTLGVHMNATALDRATPVGLLLHVYWNLGGEGSGDVLGHTLRIRASRHAVLDDELLPSSGRVEPVAGTPLDFRAPAAIGSRIRRVVVMGGRAVGYDTNYVVDGEGMRPVAQARDPASGRALELWANQPTLQLYTGNSLNRTAGKGGRVYDRYAGFCLETMGYVDAVNHPEFPSLTLRPGQVYRHDMLYKFSF

SEQ ID NO: 243274 - protein, 56 aa, Zea mays
  Clone ID: MRT4577_153448C.1.pep
GGAPDSVHFFRLAQANSLRCLSPKPRAGQLSPDCSVCTGLTGEPTVGRTILTRHLI

SEQ ID NO: 243275 - protein, 38 aa, Zea mays
  Clone ID: MRT4577_153449C.1.pep
TKFLTFITSLALNLCKGPLKILFSNPKNIPLFIFNTSQ

SEQ ID NO: 243276 - protein, 67 aa, Zea mays
  Clone ID: MRT4577_15344C.1.pep
EISVRSDFRSACLIHKAGAPSNSVSGVMAVQVHRHRNMVRNGQAIRCAMATGKEQGSIFTASSGDQT

SEQ ID NO: 243277 - protein, 41 aa, Zea mays
  Clone ID: MRT4577_153450C.1.pep
PHYEGMSYIKIKSQHSSCKNCFLVFALVAKKKNIFRKGKDS

SEQ ID NO: 243278 - protein, 206 aa, Zea mays
  Clone ID: MRT4577_153451C.1.pep
MNTKKFRPPGDVVGSAALCDPSSPQQLSSSLHQEELENSATSSQQHCAGCRLHEDYTPWSALAQSCLGTDNAAFDCAESLFDYPPGMLLMPIARTHYQYQSSENDRCRPRPQRDAMETTPAQLHKQPLPPPPQQQQERDHGLFSFSNASTTWSRGGEPKTCSFSPLVAAPDTILPAMENQKVPLPGNCMDAPVTPRRRRRRQGASC

SEQ ID NO: 243279 - protein, 71 aa, Zea mays
  unsure (1)..(71): unsure at all Xaa locations
  Clone ID: MRT4577_153452C.1.pep
IXXVLKTNLLLKXVSFPWFTLKHXXLGTNFXXCSNTFSLVSGQVXNAPNHFEILFSLNFSSKFQKFXQLVG

SEQ ID NO: 243280 - protein, 1037 aa, Zea mays
  unsure (1)..(1037): unsure at all Xaa locations
  Clone ID: MRT4577_153453C.1.pep
MESQRYNYGSGAGTGGKIRRYPPSRAVAASPYARPATAPTHAXNRHGGGXSHEGGWLSRIIXPAPRXPSLLVQLQHVSTSASRAGPVANARPAASXEPPSPLPPPLVDDRPECEENGGVAANNLCTENPQSCTKEEEENMLRNSDDHGGTALEELLKQRTFTRSEFEYLANLLWSKTIGANSLKLEDGNVRKMIVYDKENASEYSNLPLNFSTTTFSADDQVATPAEIAKAYMGLKSSKGSPLRLRLHDPSSMPITSMEVSMSQKAKPPTIPLAQGSRLHTSKTSDCLESNYTTPNGVICKMSSSPYFKSGVSSKELFGSVSSHYQTSNSVHTFGRQVLKRKSTVSNEFVSAGPIRRIHQRYNRTSPLLETQLGYRRYPVGYGSKLEGSEQLARTQKRRCLDKVGDASLSSVEDKTNVNYPGQVPEKSAEMATKILKQLDTLVPSQKENTSETKQKHESAIYFEEDVSRQKKVQAERDLLEPSPSEVEYSLPDGIASNKSISQITLNKEKPPAFSSRGNAPNLVLSDEIGRSKMSTPGNGFTFPAPTVNNAYSQGPPTPTLTSPILTVEKQPSVFCSASVTSAQSDPRISKSVLGGPVTQKLESKLNGDNQRVPSKNSGQVASFTSNPVFKVDGPGHASNSVLSAVQSYNTSTGSVSFQSAGSSTISTNLTSNITQSCSTGGSFTFSNTRFGSLSATSNMFAAKSLALSCTASPGASLGFPPVHTASSPAAHRKSEAANSSISFSSMQQFGIAGSSTVQDKSKAVDSSTPFGFPQKFDTVSSASEDMSKADSPEPTFFSGNHNVQSENCSSLFTQSPGNNLSSKSSENLNSGSSHSFADSPVGSATMCSSPSNSNSLFSWAAGSGARSAPPSSPATSSSFAFSSSPAFSAQPVFASKLTTPASLSYGSPNTGPATSPFSSMPSAVFSFTSATPSIPNPSPTTPIFGDPTVQMNGGNIVIDRNGSPSPATSPFGLPSSSPSTPTFSTPATQFASSTSGSPGVFEIGKYSQASSGGFSMGPSGGNDKSNRRIVRVKRRK

SEQ ID NO: 243281 - protein, 112 aa, Zea mays
  unsure (1)..(112): unsure at all Xaa locations
  Clone ID: MRT4577_153454C.1.pep
KAQLSNAKPTGKEGNNKRAXXPPXRANDXNAXTPXAATXXAPRSPXAXATPGAXRENPGRGGXQXXXPAARTHPPAETXRAQSDDAEAEAKEEAAPATTPAPKXKAAATASP

SEQ ID NO: 243282 - protein, 77 aa, Zea mays
  Clone ID: MRT4577_153455C.1.pep
LSQKIKKSLKKKKQKKKKKEKLKTEKNILKKKNSSNIPILPYHYTQNHSPYFKKLLLTLTPIVPNPTIFNPTAYSLS

SEQ ID NO: 243283 - protein, 96 aa, Zea mays
  unsure (1)..(96): unsure at all Xaa locations
  Clone ID: MRT4577_153456C.1.pep
AQPVIYSTIFAGTLITALSSHXFFTXVGLEINMLAFIPVLTKKINPRSTEAAIQYFLTQATASIILLIAILFNNILSGQXTITNTTNQYSSLIIIM

SEQ ID NO: 243284 - protein, 67 aa, Zea mays
  Clone ID: MRT4577_153457C.1.pep
KKTVNPRLYNGANGFPPFRFREGVEERVVGGNSSSGGFILLVVVPLLDYLKEFERNLQNGPSRNGTV

SEQ ID NO: 243285 - protein, 40 aa, Zea mays
  Clone ID: MRT4577_153458C.1.pep
LLLCCCDKILQSRRPTSDHIPWPRLINTIYVLSISSDTLE

SEQ ID NO: 243286 - protein, 77 aa, Zea mays
  Clone ID: MRT4577_153459C.1.pep
PFSFPESTPHHRPTTEIFKMIQRLPNLTTKILLSSVSYPYEPSPLFIFPLFLILSQYQLLLPHIPISISITTLNYHL

SEQ ID NO: 243287 - protein, 166 aa, Zea mays
  Clone ID: MRT4577_15345C.1.pep
RLLKTLKLQCIGTGDDALDAIGSFCPLLEILSLNNFERFTDRSLTSIAKGCKNLTDLVLTDCQLLTDRSLEFVARNCKKLARLKINGCQSMESVALEHIGRWCPRLLELSLIFCPRIENSAFLEIGSGCSLLRTLHLIDCSRITDDALCHIAQGCKNLTELSIRRG

SEQ ID NO: 243288 - protein, 81 aa, Zea mays
  Clone ID: MRT4577_153460C.1.pep
RQASSAPVTRRSTQPCPCGRPGSPRWRTLPLDPLCVKESLPLVVTHMLAVPNDSPIDVTDLHGRDTVGRITGGIEGYADLD

SEQ ID NO: 243289 - protein, 52 aa, Zea mays
  Clone ID: MRT4577_153461C.1.pep
LGPTAATRSPPPATTPPEYRAERLGSASSNQPRNSKFNPSFPASGPRMNDSI

SEQ ID NO: 243290 - protein, 49 aa, Zea mays
  Clone ID: MRT4577_153462C.1.pep
NPWTPRTRSLTTTTRPKSRRWSKWPSIARSLYHVGDLDDYYAGRYVLIR

SEQ ID NO: 243291 - protein, 44 aa, Zea mays
  Clone ID: MRT4577_153463C.1.pep
PLHPHIHIHCTPHLRIHLLAQLIYIGTVNKQNCHTHPSSITSKQ

SEQ ID NO: 243292 - protein, 51 aa, Zea mays
  Clone ID: MRT4577_153464C.1.pep
FVFLERGAGKNYTLARIGGAHTSNGFFLRIERTVGTIEGAFRSRLGKRNDS

SEQ ID NO: 243293 - protein, 206 aa, Zea mays
  unsure (1)..(206): unsure at all Xaa locations
  Clone ID: MRT4577_153465C.1.pep
FFFFFFFFFLGFFFFFWGFSLFLCFKLFLVSNGMGPQGENQNLWRGPPHPGPKKWGDPPQGDNPGPXPGKPGPQIRDRKPKGGIRPXAQGGPPGGAPRGQEPQPKKNRKGPGVPDPHGGGPPGEGGPPQKKNKPPPGXPPPGAGGQKKRPRGGPGGKPPXQESAPKKAQGGQKPPPGGGGPPPRGGGTKTGPPRGPARGGGPRNPG

SEQ ID NO: 243294 - protein, 156 aa, Zea mays
  unsure (1)..(156): unsure at all Xaa locations
  Clone ID: MRT4577_153466C.1.pep
MILGAVAVAMLGSICNDVTIMDIHMAVTPIELSLIALLLRTCEAGTQSDHFPLTARALKNVXTGHASKDVLMSKLHANMGRLIDEPIVLETLYAISTPCCKDLGNRSGVIPYSPKTSINVVKPVPDWILCSYVLSRTYLQMGCRFKEYHQAFWPIT

SEQ ID NO: 243295 - protein, 80 aa, Zea mays
  Clone ID: MRT4577_153467C.1.pep
LKQMCQNMKNQESEKKLKEAFCEVDKDHNVFITDDEIRHDMTNIEEKLTDEEVDEMIREADVDGDGQINYEEFVKVMMAK

SEQ ID NO: 243296 - protein, 80 aa, Zea mays
  unsure (1)..(80): unsure at all Xaa locations
  Clone ID: MRT4577_153468C.1.pep
NIWRGLHFIWRNFSNAMDQQVTSPIDFNITFPRLLNLSIDMSLEFPVKQTDVFGILHRPEMELKKLALDSSFXKKTYMAF

SEQ ID NO: 243297 - protein, 201 aa, Zea mays
  Clone ID: MRT4577_153469C.1.pep
WWSSRSCRPPWSRGNRVGSPCRATSGCSGWIRLLGRRRLEPLYVTVQRKLGKALLGWHAARALADYGMVLPWKEAFGPEAWEEFVGRHVVPYLRQGLRALHVTPPKQDDGGFAGVMRWASVVPAQDMAQLLEEEFFGKWQAALCRWLWAAKPTAGEAVAWHEGWKRLLTPELLAEERVRVPIEAGLEKISRAAQGLQIIGV

SEQ ID NO: 243298 - protein, 62 aa, Zea mays
  Clone ID: MRT4577_15346C.1.pep
CRNSTLKRFPLVPVLAVSHTAIDLGSMLAVSPVRICFKFIFIGKKGVLCLAQPVNLPNPGNF

SEQ ID NO: 243299 - protein, 126 aa, Zea mays
  Clone ID: MRT4577_153470C.1.pep
RNTISVRANDRARRNLFFFGPKALRGGGGFFINITHTQGLWAASFDAGGRAIFARGSVPNPGSNNFVHRDWGGRLVWSQERGHSLRSGHRGVGSVVGGTLGGAVPRGPCWGRLHAHGCDWDRRGPL

SEQ ID NO: 243300 - protein, 85 aa, Zea mays
  unsure (1)..(85): unsure at all Xaa locations
  Clone ID: MRT4577_153471C.1.pep
SLMFQTSIGPTGISVGXMXPETRTGFFXNCKDQFYYNDQKLFFVGDQIGQAMTNENSGRKGLLRVREITVAEIAHSVDPEDKGHP

SEQ ID NO: 243301 - protein, 52 aa, Zea mays
  Clone ID: MRT4577_153472C.1.pep
GIIRVSLPSIHKCSIQWTALQNGTSVPSVVTEIFNDTLTSQWRMVTFLSRFH

SEQ ID NO: 243302 - protein, 116 aa, Zea mays
  Clone ID: MRT4577_153473C.1.pep
PVFFFYFFFFFFFFFFFFFFFFFWKKTQETRRGLPKTHLPLANKWPQFLCKGGYKKRTVLTKNDTFPIFQGFFYQPGKQYNSFMLNRRKNPTPDNTRDSMPDASHQRGGWGEQDPK

SEQ ID NO: 243303 - protein, 83 aa, Zea mays
  Clone ID: MRT4577_153474C.1.pep
VLLCLRWMRLLFMFVIMLVCIRMLFILFVRLRMILFRRVSRLSRIQLKVLLVLLWLCLMVLVRIVLLMFRLLMRRLRLWWTGR

SEQ ID NO: 243304 - protein, 263 aa, Zea mays
  unsure (1)..(263): unsure at all Xaa locations
  Clone ID: MRT4577_153475C.1.pep
MEAYAAGAKFDCLLFDMDDTLYPLSLGINLACRKNIQEYMLKKLRIEESQVPRMCLDLYREYGTTMAGLKVLGYDFDYDDFHACVHGTLPYEKVKPDPVLRQLLLSLPQRKIIFTNSDKAHAARVLEKLGLQDCFQGIVCFETLNPPPPTETEXTVASAGTILCKPSLASMEAVIEIAKLDAERTVFFDDSARNIAAGKAAGFRTVIVGSSALVPGADVALESIHNIKEALPELWEVAAAAAAGDRVDAVLRSTTAVETTVIA

SEQ ID NO: 243305 - protein, 116 aa, Zea mays
  Clone ID: MRT4577_153476C.1.pep
CLHGTSICVQGAGNRWKLLQTRARQKGRVIYEGHAQLDERQERGGPGEPCDPAERCDRQCRDHRELLKHPLQDRLFLPSYESTPSCEVLARLTTSHMLNTAPGWHKMCENRPLYDS

SEQ ID NO: 243306 - protein, 411 aa, Zea mays
  Clone ID: MRT4577_153477C.1.pep
LVPRAGRAQFAQNLHDLLLESGALLPSDLLSDQNNHDIHEKESKGWLLVAQTTQNLPNAFVAKDSSSPDEDEQPRAENTEAAIRDLDLHGHTASVISNEDQMVAEGSLVNMSGSSNGNLDTLSWSSVKTISSVIDDVAEYEIPWEDLDIGERIGLGSFGEVYRADWNGTEVAVKKFLDQDLSGVSLEQFKCEVRIMSRLRHPNVVLFLGYVTQSPNLSILTEYLPRGSLYRLLHRPNSRIDEVRRLKMAFDVAKGMNYLHSSHPTIVHRDLKSPNLLVDKNWVVKVSDFGMSRLKHHTFLSSKSTAGTPEWMAPEVLRNEPSNEKCDVYSFGVILWELATMRVPWSGLNPMQVVGAVGFQNRRLEIPKDVDPQVASIISSCWDSDPSKRPSFSQLLSPLKQLQHLVVTESC

SEQ ID NO: 243307 - protein, 65 aa, Zea mays
  Clone ID: MRT4577_153478C.1.pep
MSAHTLGVMKSLSVPRSLIHLFRSAGRCSTSVIFVVVASRLATPTLGVPLRRSFDIKRLSSYGSV

SEQ ID NO: 243308 - protein, 41 aa, Zea mays
  Clone ID: MRT4577_153479C.1.pep
FPLRGGGTLSKQGGGMVEQYIPLLRGRQPTRYFPFEFLYVL

SEQ ID NO: 243309 - protein, 400 aa, Zea mays
  Clone ID: MRT4577_15347C.1.pep
ARAAVRGVFASERRLCFHIFHDLPISTTTISAASASATHDIPFAEAVKGAALQLFGFTEAISIGRRSPEKLFKIIDLHDALSDLLPDVSDIFAASKVTESIYVQAVEIRSRLADAVRGILSEFENAVLRDPPKTAVPGGTIHPLTRYVMNYSSLICDYKVTLSELIISRPSASARLSAEGNELAPSLADLELPELENQLPLASHIVWIIVVLEHNLEGKAALYKDPALSHLFMMNNVHYIVHKVKDSPDLWSMIGDNYLKRLTTKFTMAATNYQRTSWLKILNCLRDEGLHVSGGFSSGISKSALRERFKSFNAAFEDAHRVQSGWCVPDNQLREELRISIAEKLLPAYRSFLGRFRHHIENGKHPELYIKFSVEDLEIAVSDFFEGVPPSPHNRRKSHG

SEQ ID NO: 243310 - protein, 110 aa, Zea mays
  unsure (1)..(110): unsure at all Xaa locations
  Clone ID: MRT4577_153480C.1.pep
LEHSKTHQAYLTHHNLTTIAENFLSFLALSALKTISTNAYITLHRSISHIANITQILIPVTSMGYEQPDPQAYNLQLIIINSVLNLPIIXITKXSLLHLNLHTISTDPTP

SEQ ID NO: 243311 - protein, 64 aa, Zea mays
  Clone ID: MRT4577_153481C.1.pep
KTAFWFWINNVPPLFPQGFGPPIRAINGALECNGNNPPQIKGGVGFYKQFFQQFRVDPGPTLPF

SEQ ID NO: 243312 - protein, 93 aa, Zea mays
  Clone ID: MRT4577_153482C.1.pep
NEGYAGAEIHTGCFQHLMSQSVLSFSQCLLFKGGTDRTPYFTERNHLQKKKEGIAYRKEFLLPLPCPIDHRHKLARLYALGEERDLNRIGLNL

SEQ ID NO: 243313 - protein, 154 aa, Zea mays
  unsure (1)..(154): unsure at all Xaa locations
  Clone ID: MRT4577_153483C.1.pep
ALFSRRVISMAAGAVVTNVLGVARLIMPEEEIAQVASISANGEREIGELTAKAMDKDGXEGVITIADGDTLYTELDDAEGMKLDRIYIYPHLITNSKTNKRELSDPFILIHDKKGSNIHAEVIALEMAFNKHKPLLICAEDEGSEALXTMIINK

SEQ ID NO: 243314 - protein, 46 aa, Zea mays
  Clone ID: MRT4577_153484C.1.pep
QTGQDVFQIPSSVTGLLYGEDRDGDRRTFTLIFIDYANEHCPGTQY

SEQ ID NO: 243315 - protein, 87 aa, Zea mays
  unsure (1)..(87): unsure at all Xaa locations
  Clone ID: MRT4577_153485C.1.pep
DACADYWQRVVLYTSQHYTDISELLDQRXAVXTLESCLSDXFRMARHLSCSLLPRIRRAAXRAKDRTMNDXHRMVTISWIFYRTDDV

SEQ ID NO: 243316 - protein, 44 aa, Zea mays
  Clone ID: MRT4577_153486C.1.pep
SHACDDIPVGGWFLLRCATHRTWYGIDATIVLLKERSVPMIRIL

SEQ ID NO: 243317 - protein, 105 aa, Zea mays
  Clone ID: MRT4577_153487C.1.pep
MGACASVHKDPGHPKKQFLDSPTKAKAANGKGGGGGGVAPVGDGFGDLKSKVDAEAEQLRAEFNPKNPDSGFDSEVWCYHRINRFWRSVSFLGVGDLERKTIYGS

SEQ ID NO: 243318 - protein, 113 aa, Zea mays
  Clone ID: MRT4577_153488C.1.pep
MGACASVHKDPGHPKKQFLDSPTKAKAANGKGGGGGGVAPVGDGFGDLKSKVDAEAEQLRAEFNPKNPDSGMRVCFFGLFLKRCSDLYLPIISYCSFLKFFGGKEQMGSQLSM

SEQ ID NO: 243319 - protein, 100 aa, Zea mays
  Clone ID: MRT4577_153489C.1.pep
SRKSNITKRFFAEVHYDPNPIVEVCIVIEEPLDKYRRSCAFCPANWDILHPVGSRKFLCGNDKDRIEQQLKPRVLSEYLGMPFTCCPASPIQEKKGKKKF

SEQ ID NO: 243320 - protein, 130 aa, Zea mays
  unsure (1)..(130): unsure at all Xaa locations
  Clone ID: MRT4577_15348C.1.pep
FFSPATLVLICYCFLFEQCLRKNAMELEKKEQKEKELRAQIIAEAEEFKKAFFEKRIQNCASNMVNNREREKIFVASQEKFHANADKQYWKSISDLIPHEIATIEKRXKKDRDKKPSVTVIQGPKPGKPT

SEQ ID NO: 243321 - protein, 279 aa, Zea mays
  Clone ID: MRT4577_153490C.1.pep
YRQLERVIVCLDRDKCETFQDSITWARLKFEDYFSNRVKQLTFTFPEDSMTSSGAPFWSAPKRFPRPVEFSSSDPSQLSFILAAAILRAETFGIPISEWAKTPNKLAAEAVDKVIVPDFQPKQGVKIVTDEKATSLSSASVDDAAVIEELIAKLEEVSKTLPSGFHMNPIQFEKDDDTNFHMDVIAGFANMRARNYSIPEVDKLKAKFIAGRIIPAIATSTAMATGLVCLELYKALAGGHKVEDYRNTFANLAIPLFSIAEPVPPKTIKHQELSWTVWD

SEQ ID NO: 243322 - protein, 42 aa, Zea mays
  Clone ID: MRT4577_153491C.1.pep
GVRFFKKKDFSREIYILKGISTRENLQDGEFYIHSSEQVLFK

SEQ ID NO: 243323 - protein, 306 aa, Zea mays
  unsure (1)..(306): unsure at all Xaa locations
  Clone ID: MRT4577_153492C.1.pep
TTKCELKAEDNKPWGSTSTSATSSSSSSAASGPGGGGGAHVLLLPYPGAQGHTNPLLQFGRRLAYHGFRPTLVTSRYVLSTTPPPGEPFRVAAISDGFDGGGAAACPDIAEYYRQLEAVGSETLAELIRTEAAEGRPVRVVVYDPHLPWARWVAQAAGVPAVAFLSQPCSVDVIYGEVWAGRLPLPVVDGKELFARGLLGVDLGPDDVPPFAARPDWCPVFLRATVRQFEGLEDADDVLVNSFRDIEPTEADYMSLTWRAKTIGPTLPSFYLDDDRFPLNKAYXFNLSNSSGLCLAWLDKQHSFSC

SEQ ID NO: 243324 - protein, 85 aa, Zea mays
  Clone ID: MRT4577_153493C.1.pep
MATKRLGLLALLALFASATNAFIIPQCSLATSFIITQGLPPVSLMGFEHPVVQAYKLQQAIAASRLKQPIFQLQQQTLGHLTNQT

SEQ ID NO: 243325 - protein, 98 aa, Zea mays
  unsure (1)..(98): unsure at all Xaa locations
  Clone ID: MRT4577_153494C.1.pep
SDKLSDDYWCWHVHFYSDDYYICIVVVVCFLXRFGFELFHFCNFLFFLLDWLLVFVIFFFFLYFFFFIIFFFFVGLFYFXFFFIFIYLIFFYFVYYLF

SEQ ID NO: 243326 - protein, 57 aa, Zea mays
  unsure (1)..(57): unsure at all Xaa locations
  Clone ID: MRT4577_153495C.1.pep
PRKSRMLLAVLLLFFCYPLVSHLSVPASLTNLVTSQFPVPYLVLVFFPEKGKRGAXK

SEQ ID NO: 243327 - protein, 83 aa, Zea mays
  Clone ID: MRT4577_153496C.1.pep
LARAVLTGYSFARTTDTPLREIYECTPVKDLDLNFIFRLQKHRYQQFQRQVVRDCEFLEQEDIMDYSLPVGVHCKDTRDRLLT

SEQ ID NO: 243328 - protein, 120 aa, Zea mays
  Clone ID: MRT4577_153497C.1.pep
QCNRPRPCPRGDQCYGPGDRGSRHSLSLWFQRLVAAFFLTGQVFLHILQGRINRRNTLEQMNMVGPESMAIALITAGFVGMVFTIQVAREFIYYGATTTIGGVLSLSLTRELAPVLTAVV

SEQ ID NO: 243329 - protein, 87 aa, Zea mays
  Clone ID: MRT4577_153498C.1.pep
SRKKKKKKKKKKKKKKKKKKKKKKGKKNIKDHKLKNAKHTKSINSFLREYLNSIPVALVLQPPVLGGTLSFTQLISACTPFPFCPLA

SEQ ID NO: 243330 - protein, 78 aa, Zea mays
  Clone ID: MRT4577_153499C.1.pep
PIIFLTRSSTQCDSHEWSDVTFGHELPSSTFCNIPTVSLGEATAKVFSVQSASMRCFHVTRCHRREALPRASNLVTDD

SEQ ID NO: 243331 - protein, 141 aa, Zea mays
  Clone ID: MRT4577_15349C.1.pep
MGKNNKRKREPTPPSEDFGDSEYSEEEFSSEFEGSPAPVPPPASSDDSDDSQGIAAEVWTYIRAVERSGLAGSDESEYSSDEEDSSEEDGGGDGEGDDDDDDDGGDGGDDDGDGGGRGGNGGSSRGSGGGGSSKGSNKASG

SEQ ID NO: 243332 - protein, 152 aa, Zea mays
  Clone ID: MRT4577_1534C.1.pep
PGPWRYSFVRPSLWNCLRITLLIHHTSQENICNIVLGSDLVVAQLLHQLRPGYHRRYPGRRRRRLRHHRLPAAGPPLLTVSPLVLPDPARSPRPHDLVASGLGSISWACSCRWIPQRRGGLGTRGCGRRGKSRPEDDEARQSPRPEEDFAGR

SEQ ID NO: 243333 - protein, 115 aa, Zea mays
  unsure (1)..(115): unsure at all Xaa locations
  Clone ID: MRT4577_153500C.1.pep
WCVFNQWCLTRYGVDIGRKNEPLPAKKDNAEGQQVEPPPEETKNNSHVHRELNKAKDGRTLGLLIEEPFASGRLVASFFSRPGQCGXVHWTLVEGKKLEFVMYQLQRKQDKSAVA

SEQ ID NO: 243334 - protein, 163 aa, Zea mays
  unsure (1)..(163): unsure at all Xaa locations
  Clone ID: MRT4577_153501C.1.pep
MALTNVFVVLLGTALAVLPFSPADAGVVGVSYGRLGNDLPDTASVVKLLKKSGITSVRLYDANSKVLKALANTGITAMVMLPNDKLAAAAADPSSARRWVRRNVAAYYPATQIHAVAVGNEVFEEXKNLTGQLVPAMSNVHDVLVKLGLDGAVKVSTPIAFTA

SEQ ID NO: 243335 - protein, 117 aa, Zea mays
  unsure (1)..(117): unsure at all Xaa locations
  Clone ID: MRT4577_153502C.1.pep
KKRQKQKSGGPRRGTGGKEKEGGRPPQPGRAKRPKKXGGPQGAPPQXPDKKGGATGAPQAKKQKGEKRGRAPRGERPRXNPGSPGARTGPPPXKRGEPRGRKKRKPPGPDQRERGKP

SEQ ID NO: 243336 - protein, 118 aa, Zea mays
  unsure (1)..(118): unsure at all Xaa locations
  Clone ID: MRT4577_153503C.1.pep
APDHYLFLFQNTKPGRHHEGGASAPRYCGWGAHCTXTHTSGGCGCQPPPAGHLPAPEHMPPAVHLPPPVHIPPSEHLPTPVHLPTPVHVPPAVHLPATPCHYHTQPTRPQPDTQTHPC

SEQ ID NO: 243337 - protein, 212 aa, Zea mays
  unsure (1)..(212): unsure at all Xaa locations
  Clone ID: MRT4577_153504C.1.pep
MAGAARALGFMYRMAVPASAAVFLGSQALYDVKGGTRAVIFDRLSGVKEEVINEGTHFLIPWLQKSIIFDVRTKPRNIATTTGSKDLQMVSLTLRVLHRPNVKALPKIYQNLGADYDERVLPSIGNEVLKAIVAQFDAAELITQREAVSDRIRNDLTLRAAEFNIXLEDVSITHMTFXREFTKAVEQKQIAQQDAERARFIVERAEQERQAN

SEQ ID NO: 243338 - protein, 335 aa, Zea mays
  unsure (1)..(335): unsure at all Xaa locations
  Clone ID: MRT4577_153505C.1.pep
MGTLIRPGPAASPLPIASPSSSSAHVAVVGGGXRGACGIGCRCRWRCSGPRVXAVLATRWRRRRGMVVRSDVVAGGAAAAAAGDSTRALPGQQLASRVRGVCFYLVTAVAAIFLFVAMVVVHPLVLLFDRYRRRAQHYIAKIWATVTISMFYNLEVEGMENLPPNSCPGVYVANHQSFLDIYTLLTLGRCFKFISKTSIFMFPIIGWAMYLLGVIPLRRMDSRSQLDCLKRCVDLVGKGASVFFFPEGTRSRDGKLGVFKRGAFSVAAKTGAPVIAITLIGTGKLMPSGMEGILNSGSVKVIIHRPIQGNDAETLCSEARNVIADTLLLHGYGAH

SEQ ID NO: 243339 - protein, 130 aa, Zea mays
  Clone ID: MRT4577_153506C.1.pep
FEAPVPWVCRARVLFPQLFWRFAPPNGGPEWLGLPPNRVLVGGVLPVGGSFTPFFGAFISLVGGPMGGFFSFVGRAFFLFSIVGSSIPFWGGGLGSGPLFFGLAFPGNGFVPALPPLWPMAPPVKKVQGS

SEQ ID NO: 243340 - protein, 65 aa, Zea mays
  unsure (1)..(65): unsure at all Xaa locations
  Clone ID: MRT4577_153507C.1.pep
YSDAHQASGWYNMLRSGFIQINNQIAMDASIFPTSSYCDSQVYIKILIXIDHKEVNWWMHFIKDY

SEQ ID NO: 243341 - protein, 64 aa, Zea mays
  Clone ID: MRT4577_153508C.1.pep
PKTAAYRCSWLTAPGFFYLTKTPGKWEPNSLFKLDFPGHNFYFILPVGFSCLCYDVINELMVLL

SEQ ID NO: 243342 - protein, 212 aa, Zea mays
  unsure (1)..(212): unsure at all Xaa locations
  Clone ID: MRT4577_153509C.1.pep
IRHEDKDKILFLKRRALPPLSDIAKPEEKLAGLRIDGNSNTRSRMSFYTGISIHKLLDDGTLGPEKEVHGYPVGARINFVTWSQDGRHISFSIRVDEEDSKSGKLRVWIADVESGEARPLFKSPEIYLNAIFDSFVWVNDCTLLVCTIPATRGDPPHKPSVPSGPKIQSNESKNVVQARTFQDLLKDEYDAXLFDYYATXXQLVLASLDGTV

SEQ ID NO: 243343 - protein, 67 aa, Zea mays
  Clone ID: MRT4577_15350C.1.pep
FVGNLLASIVTMIEARVWIVVKSSTFVMVISLRRVKPPFICWCLPSFRVMISLAKHPVLLKTLVSFG

SEQ ID NO: 243344 - protein, 61 aa, Zea mays
  Clone ID: MRT4577_153510C.1.pep
RAPPVTRVQPGLKKGGCPPWKGVKKGFRKNKVQRVSPPSKPMWGKKILFFQPKNCLFFQKN

SEQ ID NO: 243345 - protein, 104 aa, Zea mays
  Clone ID: MRT4577_153511C.1.pep
FHPGEISVPIFHALWKVRKILCCIPSNVSAFVLFLFLATTTQNIQGLGKDASGIKEPVQAKSVDVRAGLGSQQRKADPILEAKAGDSYKTIIQKKAMARFKEMS

SEQ ID NO: 243346 - protein, 59 aa, Zea mays
  Clone ID: MRT4577_153512C.1.pep
TLGKDGSGIKEPVQAKSVDVRAGLGSQQRKADPILEAKAGDSYKTIIQKKAMARFKEMS

SEQ ID NO: 243347 - protein, 58 aa, Zea mays
  Clone ID: MRT4577_153513C.1.pep
STSGTFPSTESFFSSSSSSSEISLIRCLFGQHPHGVAHSPRVFLFFYFLVFFSFYCIF

SEQ ID NO: 243348 - protein, 47 aa, Zea mays
  Clone ID: MRT4577_153514C.1.pep
KKPSSSRRLAALIDHIPYAKGTRETHMCLVGHACMHGMLMSYRCTCR

SEQ ID NO: 243349 - protein, 74 aa, Zea mays
  Clone ID: MRT4577_153515C.1.pep
EIPDIKSDITVPVTDHKTPYVFQHLRVISTGMHQCTTHNWTAYNLLTESRQLLKRYSYIRAVQSSIQGLQLQRK

SEQ ID NO: 243350 - protein, 142 aa, Zea mays
  unsure (1)..(142): unsure at all Xaa locations
  Clone ID: MRT4577_153516C.1.pep
MAPQMLASPALLALCASATSATQIPRHLPPVMPLSTMNPXCVTHRMTHHGTDNLTTCPTMMLRQLMAIPLTTTPGMTPHMTTPXMMSPSMRPSLSXPPPPPSMVAEKTMAHSDCDTDKHITPAQQIPVVINPVTTTIPTKDL

SEQ ID NO: 243351 - protein, 72 aa, Zea mays
  unsure (1)..(72): unsure at all Xaa locations
  Clone ID: MRT4577_153517C.1.pep
NXXXXXNGKPNQNSFFLKTPAAKKVFTKKRVQRGYPGTPTINRAAPGHKLPLDPTHKTGTIRLYHPQKFGAR

SEQ ID NO: 243352 - protein, 131 aa, Zea mays
  unsure (1)..(131): unsure at all Xaa locations
  Clone ID: MRT4577_153518C.1.pep
HFQSGGMHISLQKKKKGGTXWSFPNKGQGILGPYSADQKQKRLMLQRFQEKNPGFDFSQAQFSGTCPNPRTFMGGIPPKLNPPPAYVRFYYIPGIFINATGGLIMSVKRLGSVMEKNVMCGPFVCKPILGA

SEQ ID NO: 243353 - protein, 125 aa, Zea mays
  unsure (1)..(125): unsure at all Xaa locations
  Clone ID: MRT4577_153519C.1.pep
GFVGGSSSPTRAAPAFSSLVAAQRSSLSSFLLCRAPAPGSALLLPVPISHGGSLCPATGAFDYLSPDFXAGALXSAGCPRARLPPPPALVVLTPFRRRQLLKRTSGGALCTGADGPRAGAGRSAV

SEQ ID NO: 243354 - protein, 146 aa, Zea mays
  Clone ID: MRT4577_15351C.1.pep
MGKNNKRKREPTPPSEDFGDSEYSEEEFSSESEGSPAPVSPPASSDDSDDSQGIAAEVWTYIRAIERSGLEGSDESEYSSDEEDSPEEDGDDDDDDEDDDRGDGGGDGDGGGRGGNGDGRGGNGNGKGGNGGSGGGSSKGSNKASG

SEQ ID NO: 243355 - protein, 96 aa, Zea mays
  unsure (1)..(96): unsure at all Xaa locations
  Clone ID: MRT4577_153520C.1.pep
GIRKRXXXXMXLSRRXRWCXEXEEXXRTCXSNGSXVXGFRLYSXQXPXTNAPGIVIYCHYXPVSGLGNXRAXXLPXDVVAIXQAXSXESNPNSXSX

SEQ ID NO: 243356 - protein, 182 aa, Zea mays
  unsure (1)..(182): unsure at all Xaa locations
  Clone ID: MRT4577_153521C.1.pep
MGAPVHGALALFLLLLVGAGAAPEETAPQEPTLPATGSGATGAAAVGVNSNSVLVALLDSHYTELAELVEKALLLQTLEDAVGKHNVTIFAPRNEALERDLDPEFKRFLLEPRNLRSLQALLLYHVLPTRLPSDSWPAASHPTLSGEEVELAPXAGDGAEMRVGHADVTRPDAVLKPDGVIH

SEQ ID NO: 243357 - protein, 144 aa, Zea mays
  unsure (1)..(144): unsure at all Xaa locations
  Clone ID: MRT4577_153522C.1.pep
MDASAYTVYGLDGASLASRPELSSRFTRRIRPAGRNPLMSRNLHRNGMITCMTFPRDWLRRDLSVIGFDLIGCMGPSSVPRINGNSLTGLFFSRIAQETGHLPTPPAATSQFXLRLATCYLSLCIMLTFAQSGVKGMTYDYFEK

SEQ ID NO: 243358 - protein, 128 aa, Zea mays
  Clone ID: MRT4577_153523C.1.pep
LMSRCSLYSYQRRIVLSTDQELSLSEICRYGRYQCVPAYHRCRTSGWQAGSLSNSTRSSSRLRSSAAVISSKASGSSTGIMSGSEDAHTHRLIHRHTKVTEHLTSDQQQSRREELEIGRQLPVDRTRS

SEQ ID NO: 243359 - protein, 77 aa, Zea mays
  unsure (1)..(77): unsure at all Xaa locations
  Clone ID: MRT4577_153524C.1.pep
MAHAYCCTFLXILLAIILPPFGVFLRFGCYRIEFCICVMLTILDYDPGIIYPMYVIVALDFDQHDSEYDTHDYSIWL

SEQ ID NO: 243360 - protein, 162 aa, Zea mays
  Clone ID: MRT4577_153525C.1.pep
RLLLAAAAGSGSFSYFAVFRNYPLVAALLGFAVAQSIKFFVTRYKENRWDPKRLIGSGGMPSSHSATVTALAVAIGLQDGFNCSLFATATIFASVVMYDASGIRLHAGKQAAVLNQIVCELPSEHPLSETRPLRELLGHTPTQVVAGALLGCTIATAGQLFL

SEQ ID NO: 243361 - protein, 244 aa, Zea mays
  unsure (1)..(244): unsure at all Xaa locations
  Clone ID: MRT4577_153526C.1.pep
MGDGGADDASSPPPHDGGFSYLAVFHNYPLVAALLGFAVAQSIKFFLTWYKENRWDPKQLIGSGGMPSSHSATVTALAVAIGFQDGFSCSLFATATIFASVVXISSPFQPMFLLKSTRGFTSSILIEKKTGHLYCCRLDAIFSLVGRYSVACGHIVHTFMLTSSNFXSHEFIFCDLAXMYDASGIRLHAGKQAEVLNQIVCELPSEHPLSETRPLRELLGHTPTQVVAGALLGCTIATAGQLFL

SEQ ID NO: 243362 - protein, 164 aa, Zea mays
  Clone ID: MRT4577_153527C.1.pep
CCIQKKASCTWYDNYILRFPREISGPLIHRANYSMKRGRYEKNNSGECAEARSHTSSFWLASMASMYRLNQKRRMDRDAGGALDQQQCVRGLDPDLAPSNNCVSIPTPLSSQLSVPASPSARGLAAAARTLKTCTKKMTSNTTLAVFIVVAIIVVDAVISDGCV

SEQ ID NO: 243363 - protein, 36 aa, Zea mays
  unsure (1)..(36): unsure at all Xaa locations
  Clone ID: MRT4577_153528C.1.pep
QYREPVPRSAXSYGPQLPYLRRMLARSALDMQPTRR

SEQ ID NO: 243364 - protein, 102 aa, Zea mays
  Clone ID: MRT4577_153529C.1.pep
APLVAGFAKINPKVGFGKGVLPKIEKDLELGIAKSGVPELKKEGVWAMEPPLKGGGFPNEGMPDVRKLAIRNFREAWSPIPFGALQIPPPPGVFFFWGWAPS

SEQ ID NO: 243365 - protein, 143 aa, Zea mays
  Clone ID: MRT4577_15352C.1.pep
MGKNNKRKREPTPPSEDFGDSEYSEEEFSSESEGSPAPVSPPASSDDSDDSQGIAAEVWTYIRAIERSGLEGSDELEYSSDEEDSPEEDGEGDDDDDDDGGDGGDDGDGGDRGGNGGSRGGNGGSSRGSNDGGSSKGSNKASG

SEQ ID NO: 243366 - protein, 73 aa, Zea mays
  Clone ID: MRT4577_153530C.1.pep
MPRNGGDSQNGPIEGQPIVHGNAGDASKVPEHTKNNVAPAPELEKGGAIEGMNASGGGNKADQAEPSVAGQKN

SEQ ID NO: 243367 - protein, 59 aa, Zea mays
  Clone ID: MRT4577_153531C.1.pep
RPWLMTGKLSLSPYKAMLLNKCPSEVGRRPWVAWEYKLCPFNSLRALHRRRESIVRQNM

SEQ ID NO: 243368 - protein, 62 aa, Zea mays
  Clone ID: MRT4577_153532C.1.pep
WMSFLLLSVLPSPTMSPMRRKNVGQRSMTRNDGEATIVASSVRGQRGEDFGMVDRHRLQLQV

SEQ ID NO: 243369 - protein, 47 aa, Zea mays
  Clone ID: MRT4577_153533C.1.pep
NSAISCHLAPLPAVTTGPRTNLNNLCLPLTYISPPHHVFLKKKKTNA

SEQ ID NO: 243370 - protein, 111 aa, Zea mays
  Clone ID: MRT4577_153534C.1.pep
VPLFLPGFTTEPFPPFPRISAEVSALRNLRGPPHFPYFGSGVTACILPIGSSGSESVMCSFPCVLDALGGSVGLPFPPIPRSWFIFSVLGLVFSVFTPPHQALFFPQPKPF

SEQ ID NO: 243371 - protein, 101 aa, Zea mays
  Clone ID: MRT4577_153535C.1.pep
RADANMQIFVKTLTGKTITLEVEPSDTIENVKAKIQDKEGIPPDQQRLIFAGKQLEDGRTLSDYNIQKESTLHLVLRLRGGIIEPSLRQLAQKYNCDKMIC

SEQ ID NO: 243372 - protein, 97 aa, Zea mays
  Clone ID: MRT4577_153536C.1.pep
NHAVCEGARQEDKKKVKENGEGKTAVVISCSVFHRSCSFKTFFRFSSLNLVTSALIARYKIRLFLAFLSSFFFSSLPFRFTHGISDIRCLYILWFNL

SEQ ID NO: 243373 - protein, 398 aa, Zea mays
  Clone ID: MRT4577_153537C.1.pep
MLSALMDYLKSCWGPASPAGRPRKGSDATGRQDGLLWYKDGGQVVDGEFSMAVVQANNLLEDHSQVESGPLSTSEPGLQGTFVGVYDGHGGPETARYINDHLFNHLRRFASEHKCMSADVIRKAFRATEEGFISVVSNQWSLRPQLAAVGSCCLVGVVCSGTLYVANLGDSRAVLGRLVKGTGEVLAMQLSAEHNASYEEVRRELQASHPDDPHIVVLKHNVWRVKGIIQITRSIGDVYLKKPEFNREPLHSKFRLQETFRRPLLSSDPAITVHQIQPTDKFIIFASDGLWEHLSNQEVVDMVQSSPRNGIARKLVKSAVQEAAKKREMRYSDLKKVDRGVRRHFHDDITVIVVFFDSNAMTTAAWSRPSVSLRGGGFPIHSNTLAPFSVPTELNNSY

SEQ ID NO: 243374 - protein, 79 aa, Zea mays
  unsure (1)..(79): unsure at all Xaa locations
  Clone ID: MRT4577_153538C.1.pep
MADKICCVLMLLGIAGSAAAATILPXMXEAIIAFLTSSLLSPAASYVXEKPILQHYMIQQAIAGSILPLSSLLLQQSSV

SEQ ID NO: 243375 - protein, 117 aa, Zea mays
  Clone ID: MRT4577_153539C.1.pep
ETKVSSCFIPPFAPLEQGFPLLGLPRVGRLLPLFPGQAVPPPPLLAVFFFKRGPPFFPHWQAAFPRALFFFFFPPARPVSFFFLGPWALFFFFLLAPSFGPPGFSFFSFGSFFFWLF

SEQ ID NO: 243376 - protein, 101 aa, Zea mays
  unsure (1)..(101): unsure at all Xaa locations
  Clone ID: MRT4577_15353C.1.pep
RQINDPAARRPGRGFKDEXGGDHDNAQDHGGNNHTAQVTTTEKSRRQPQANGKQTNAQAAEDQIERPGRDKGMATNRALEHKNHDTQPSRDPNVKEAKAEG

SEQ ID NO: 243377 - protein, 121 aa, Zea mays
  unsure (1)..(121): unsure at all Xaa locations
  Clone ID: MRT4577_153540C.1.pep
MAAAAFDAYTDKNAIFRRLKAKPENKMCFDCNAKNPTWASVTYGIFLCLDCSXVHRSLGVHITFVRSTNLDSWTPDQLKMMAFGGNNRAHAFFKQHGWTDGGKVEAKYTSRAAELYRQMLN

SEQ ID NO: 243378 - protein, 115 aa, Zea mays
  Clone ID: MRT4577_153541C.1.pep
KSKEAPGAAPPPPPQGPPGFEKATPPQPLKGELLASQVWTALASLTLEENLGLTCLPPLVFLGPQGEKKRGGVLKKGGFPRFFLFGGLFLFPLWVLFPISPRAGGVFLFIFPSAR

SEQ ID NO: 243379 - protein, 418 aa, Zea mays
  unsure (1)..(418): unsure at all Xaa locations
  Clone ID: MRT4577_153542C.1.pep
MAAAAFDAYTDKNAIFRRLKAKPENKMCFDCNAKNPTWASVTYGIFLCLDCSAVHRSLGVHITFVRSTNLDSWTPDQLKMMAFGGNNRAHAFFKQHGWTDGGKVEAKYTSRAAELYRQMLNKEVAKSAITDNALPSSPVTVSEASKPSDDFPEFKLSDAPAPPAENLNGKHEPKSPKSAPRSPKAATHPTFATSVKKPIGAKKVGGKTGGLGVRKLTTKPNESLYEQKPEEPKPAIPALTAPTAKGGPSLHSRFEYVDNEQSSDSRTGGSVSRVSGHVAPPKSSDFFQEYGMGNGFQKKSKXNASKAQVEETDEARKKFSNAKAISSSQXXGTXNREEKEAQLSLQKFAGSSSISSADXXGRNDADNSNLDLSAADLINRISFQASQDLSSLKDIAGETGKKLTSLASNFISDLDRIL

SEQ ID NO: 243380 - protein, 421 aa, Zea mays
  unsure (1)..(421): unsure at all Xaa locations
  Clone ID: MRT4577_153543C.1.pep
MAAAAAAAAFDAYTDKNAIFRRLKAKPENKMCFDCNAKNPTWASVTYGIFLCLDCSAVHRSLGVHITFVRSTNLDSWTPDQLKMMAFGGNNRAHAFFKQHGWTDGGKVEAKYTSRAAELYRQMLNKEVAKSAITDNALPSSPVTASEASKPSDDFPEFKLSDAPAPPAENLNGKHEPKSPKAAPRSPKAATHPTFATSVKKPIGAKKVGGKTGGLGVRKLTTKPNESLYEQKPEEPKPAIPALTAPTAKGGPSLHSRFEYVDNEQSSVSRTGGSGSRVTGHVAPPKSSDFFQEYGMGNGFQKKSSNASKAQIEETDEARXKFSNAKAISSSQFFGTQNREEKEAQLSLQKFAGSSSISSSDLFGRTNVDDSNLDLSAADLINRISFQASQDLSSLKDIAGETGKKLTSFASNFISDLDRIL

SEQ ID NO: 243381 - protein, 185 aa, Zea mays
  Clone ID: MRT4577_153544C.1.pep
ARVDAICKKYERYDTDKHGDPFSRLYAAVDAGIDAAIEKSARAAKEKKNRAASVTLDADVRRTKARLLEEVVELQKVAARKVNGLSPEEKVSRAGLVAALPHRIHAIPDSHGGGATDQDAGWNARPGIELDDYSAERLEEGYFQTSEESEQFRREYEMRRMKQDEGLDFVSQGLDTLKNLAEDMN

SEQ ID NO: 243382 - protein, 78 aa, Zea mays
  Clone ID: MRT4577_153545C.1.pep
FFYIIFSFVILFFFLFFFFFFLRGNSDLDLDLYKNPQMCFCPQVHSSSTNKGSGKYHLFIRLLLTLTFLPLQHQWSGQ

SEQ ID NO: 243383 - protein, 140 aa, Zea mays
  unsure (1)..(140): unsure at all Xaa locations
  Clone ID: MRT4577_153546C.1.pep
AXGFLAFWACPVVLWGPVGGSRVAGGPLXXVVXPLSPGGGFXPLGLAXXPXAFAXLXVXXVXXGRLALFSLFGFFVPAXVXGXGPLXXLAXPXAXPVXXXAWAXAPXFVPGAACLPACPPPPLRLGLWGPAVPVFCACCA

SEQ ID NO: 243384 - protein, 93 aa, Zea mays
  unsure (1)..(93): unsure at all Xaa locations
  Clone ID: MRT4577_153547C.1.pep
RADFCSTDTNCRRNLIYTTLSARVATPNAVPLLSPSKIQQTDXFLSDFTLGAATTLYQIEGSXNRTCXGPSYWDYFCHNHPERILDRSNSHLG

SEQ ID NO: 243385 - protein, 116 aa, Zea mays
  unsure (1)..(116): unsure at all Xaa locations
  Clone ID: MRT4577_153548C.1.pep
AIFSFSITDTGDHIDKGGGDSTHLISEFSNCLNSIHAKLDHTHIHDPQITLHQFIFQKTHXKEPHLVTTKGKRLENNYAPYSAVNTTMPFHPIPHLLNFENAHATTTLHLTFLHLT

SEQ ID NO: 243386 - protein, 470 aa, Zea mays
  unsure (1)..(470): unsure at all Xaa locations
  Clone ID: MRT4577_153549C.1.pep
MDAATGNCSSSPLRIVICPWLAFGHMLPCLELAERLASRGHRVSFVSTPRNLARLPPRRHDVHLVPLPLPRVEGLPDGVESTNDVPPDKRDLHWKAFDGLAVPFAEFLAAACADEATRPDWVLADTFSHWAAAVALEHKVPSAMLLPSAAMIASCWHRPPSHAEQPRSAVFEEPAERXAGVLPYEWDKRAHFFGPQRASGMSTAQRCFLTLQRCRLLAMRSCPEWEPENFTVAAALLGKPLVPLGLLPPSPNGGRRREEDGGSTARCWLDAQPPSSVVYVALGSEVPLTVALVHELALGLELAGARFLWALRKPSGVADDADVLPPGFRERTCGRGLVAMGWVPQMSILAHGAVGGFLTHCGRNSLVEGLLPTRPLVMLPVVGDQGPNARAMERTKVGLQVARNGKDGSFDRHGVAAAVREVMLVEEARKVFVANALEMQRVVADKERHERYIDEFIRQLRSYSTPPAAS

SEQ ID NO: 243387 - protein, 122 aa, Zea mays
  unsure (1)..(122): unsure at all Xaa locations
  Clone ID: MRT4577_15354C.1.pep
GAKKSRLEEQQKAEKRTXEAKGEQFSPKWFNLTNVVSPTPWGGLEIYEYNGKNPEPRGAIDRSDVPDETNVPSVKFRPWQYGRSFFQRFSVGKNRHAYGHCVKHFQGWLCWFVGPTTGSLPL

SEQ ID NO: 243388 - protein, 46 aa, Zea mays
  Clone ID: MRT4577_153550C.1.pep
LASLERTVHTIFFHRSQKDSRNLHGSDPVLSCKISRFIHSSAKLVS

SEQ ID NO: 243389 - protein, 75 aa, Zea mays
  Clone ID: MRT4577_153551C.1.pep
MATAAASRLLKSCFAGSRLPAATRTTPASLVVATGPRGAGDGAICTSMSMSSSKPPYGLTSFRFSPIKESVVSRE

SEQ ID NO: 243390 - protein, 183 aa, Zea mays
  unsure (1)..(183): unsure at all Xaa locations
  Clone ID: MRT4577_153552C.1.pep
PHHPXQEWPEAGRSGRENAAPWLTFVRAPPIILLLVSPGPGKKKKVLRLLCYSVQVHMVEEEPSPGTKLSGSSRGCWQRECCSAERPGRQGLPSSSSDRSDDHPLPVSWRRVVSAGPAQWTGMARPAGTCFALRTCACPAGGRLRGCLLVRWCLPFFFFFFXXVLDSGKENFVRDRQGSGGQD

SEQ ID NO: 243391 - protein, 114 aa, Zea mays
  Clone ID: MRT4577_153553C.1.pep
MPIVSTTIILPPTLTKRQLLAAVASGSTLPKFATSAAAPHARRHFAIRRRDTPCELRDRLPIPRSSMADQKAGHYYVTIERKNGCSIDSTYDAQRRHRRCHDIYIHPSMPQCDM

SEQ ID NO: 243392 - protein, 104 aa, Zea mays
  Clone ID: MRT4577_153554C.1.pep
MGSLGSSTISSMNMAKQAASVVGGKTGVVAVADQQKEVPPRTMNCSSYTFHMPLHYPRYKKADYESMPEWRVDCLLREYGLPADGDLDSKRKFAMGAFLWPDQY

SEQ ID NO: 243393 - protein, 104 aa, Zea mays
  Clone ID: MRT4577_153555C.1.pep
MGSLGSSTISSMNMAKQAATTVGAKNGAVAVADQQKVEGPRTMNCSSYTFHMPLHYPRYKKADYESMPEWRVDCLLREYGLPVDGELDSKRKFAMGAFLWPDQY

SEQ ID NO: 243394 - protein, 114 aa, Zea mays
  Clone ID: MRT4577_153556C.1.pep
ILRAGSSSTIVGEPRTVTGTLGGPCQPARGVICGGIPRTPWQRWLTEDCSGANAFGSLDRSGYVCKAFRGLPLEGDSLSSESLAIDLHLVSSRGSGIGDRRPERCVRSEQKERR

SEQ ID NO: 243395 - protein, 94 aa, Zea mays
  unsure (1)..(94): unsure at all Xaa locations
  Clone ID: MRT4577_153557C.1.pep
GQSHLTLPQFTIGXFHDFYDISFMNGYNLPMAFSCRTSLRLVVTDPVCPHPYHNPPHMKTHACGANNSYQVTFCPVICSNKLCIHSLVIWISQE

SEQ ID NO: 243396 - protein, 71 aa, Zea mays
  Clone ID: MRT4577_153558C.1.pep
GSISAKSDTLDTYLTLDPVAMKDAADVCYPEPYYYMSTPPTRHRPAMSTILLLTWLRPRAGHQSVLPVGSP

SEQ ID NO: 243397 - protein, 74 aa, Zea mays
  Clone ID: MRT4577_153559C.1.pep
ENEQNVVEPKKKKKKKKKKKKKKKKKQKKKKKKKKKKKKKKKKKKKKKKKKKKKKKKKAGPETQGFVPLRGGKM

SEQ ID NO: 243398 - protein, 120 aa, Zea mays
  Clone ID: MRT4577_15355C.1.pep
VCKNRTSVKQISVSHLLIRLGFVLRPLSLGLIYISNTNPACSCVYICKFQFRPIHPPSRRLSGRRGFIRSHLPGEKSYYHAHANFFSTNYFIHYISSLQHTTIISSLHASAIEGTPKLLL

SEQ ID NO: 243399 - protein, 44 aa, Zea mays
  Clone ID: MRT4577_153560C.1.pep
SCSHQIRACLPCLWATSLVLPFLRGPSWAPRARAGHKREKPSSF

SEQ ID NO: 243400 - protein, 64 aa, Zea mays
  Clone ID: MRT4577_153562C.1.pep
EGEEADGEHDDRERDRHGQRYRSRRGQTGDSSGKTTPGVRSPRIWWLWPVTGLSPRRRGRGARA

SEQ ID NO: 243401 - protein, 71 aa, Zea mays
  Clone ID: MRT4577_153563C.1.pep
VNICVRLDRNILDDLFSRYYPRNPGVTHHGVQSGLNLHVLNNHHGQSAWALASHGRRGPHRSMMMHSLHLV

SEQ ID NO: 243402 - protein, 143 aa, Zea mays
  Clone ID: MRT4577_153564C.1.pep
FDVRIAEPDNHTAMPNFARLVNSADVMMGVHGAGLTNMVFLPSRAVLVQVVPFGGLEWLTRVTFKDPARDMDVTYMEYNVSLEESSLRDLYPEDHFYLKHPYDVHKKGWDAIKTVYLDKQNVRLNLTRFTRTLEQARDLLPTP

SEQ ID NO: 243403 - protein, 130 aa, Zea mays
  Clone ID: MRT4577_153565C.1.pep
VSRCTSDVKETEARRMNTTDLDLIHRNHIVSGYYYISTGGSRSAAANHYSPSALLWRSDSEKDLGDLKLPRPPFGPFLRRIPAPPSLRGGSARASRTFLPRCGGRASATAVDMSPETRGSTVRSLPVCLE

SEQ ID NO: 243404 - protein, 286 aa, Zea mays
  Clone ID: MRT4577_153566C.1.pep
MCSAAWTRSRTPCRSRRASRASTPASLSRSPASPRPQRRRRRSRRCWPSRRSPSTSAAASWPTGPGEPPAARWPRPPTCLSSWAPTTPWPKGTRARRTTPTTTWSTARCRTTARTSGTRRHRHCRSLDSAVLAACRGGTALGASDLLGPSRCLISVIAVLMVVISGHRFACSSGLSWPVSRDVVATCYMVPVYKIQICCVQKKKKKKKNKKKKKKKKKKKKKKKKKKKKKKKKKKKKGGPFKRNKINDPGLEKKKFSKRDTKIKLLGRFLKKGEGEKTWLNQNKMS

SEQ ID NO: 243405 - protein, 97 aa, Zea mays
  unsure (1)..(97): unsure at all Xaa locations
  Clone ID: MRT4577_153567C.1.pep
MVLVDKREGSQLDPITDSQTMLWRDLGHMEHNNACLCMVNGGTTVTQSLKQLVLDRIGGMAVVDESNLXASDLENTVLVDERCLGRPMAEAISLVAQ

SEQ ID NO: 243406 - protein, 154 aa, Zea mays
  Clone ID: MRT4577_153568C.1.pep
IWLVRKGLSSFYSGKSKSFTSLAEASTVAAAAKELAKPENPFNKRRRILANWSRRASCSSLATAAYLPPLLGPDHAVAEGDEGEEDDSDSDDVECSQLPPPHRGKNVRDARALPPLRLGGAGMRRRNGPNGGLGSFRSPRSFSLSDLHSSAEGE

SEQ ID NO: 243407 - protein, 363 aa, Zea mays
  unsure (1)..(363): unsure at all Xaa locations
  Clone ID: MRT4577_153569C.1.pep
MSSLNSLFNRSTFGTKCKTCLNLVISRIKLLRNRRELQLINMRKEMVQYLQTGQESIARIRVEHIIREQNILAAYEIVELFCEFVLARVPIVEVQKECPLELREAIASIIFASGRCSDLPELMHLRNLFTTKYGKEFVAGAMELRPDSSVNRTIIEKLSVKAPSGDSKLKVLKAIAQEXNIEWDSSNTEAEFNKKYEDLLDGSGSSVHQIQTPIIEGSVSSPVVSAPRDKTPALNSPVIDAEXTKFANLRLHQLEVQELVLSXGNVVTMGHHSPAEEMPSTSPSSSDALEKARAAIAAATRASAAARAAAELAKVXYKSMTPPVRARRVRKFNLATDHQDRLKCISLNKLLLYIPFVSTWHII

SEQ ID NO: 243408 - protein, 193 aa, Zea mays
  Clone ID: MRT4577_15356C.1.pep
MGRKLALLVGINYPGTKAELKGCHNDVDRMHKCLVDRFGFDEDNITVLLDRGSSGPQPTGANIRHALAKLVGDARRGDFLFFHYSGHGTRLPAETGQDDDTGYDECIVPSDMNLITDQDFRDLVQRVPDGCIFTIVSDSCHSGGLLDKAKEQIGNSTRQNQTQSREPEEERSHSGSGFRSFLKETVRDAFESH

SEQ ID NO: 243409 - protein, 78 aa, Zea mays
  unsure (1)..(78): unsure at all Xaa locations
  Clone ID: MRT4577_153570C.1.pep
LIVNISKPRSIAVDYNIFILSWVKKKKKKKKKRGEKKIFFKKKKKKXFFKKKKKKKKKKNLGWFPRLRGKFNKMGGRY

SEQ ID NO: 243410 - protein, 99 aa, Zea mays
  Clone ID: MRT4577_153571C.1.pep
FRGPPPFPGGALFLTNPLDVFPPFCLCGGTFPFFSPFFPFFGPPFSSLFLSCFLAPPCFFLNKLLVFFFKGQWPPWGGFVPFFLQGGPRISVINDPGFF

SEQ ID NO: 243411 - protein, 58 aa, Zea mays
  Clone ID: MRT4577_153572C.1.pep
MSSLNSLFNRSTFGTKCKTCLNLVISRIKLLRNRRELQLINMRTEMVQYLQTGQESIA

SEQ ID NO: 243412 - protein, 94 aa, Zea mays
  Clone ID: MRT4577_153573C.1.pep
LRVPNKTENTRNTEQQTETSKSARQATAPHRTHVRSISQQQQRHLNRGTHVRSIRLTPRSASPHAVPPIAAGAGLPAPQRLDLSCDEPPPSRPA

SEQ ID NO: 243413 - protein, 321 aa, Zea mays
  Clone ID: MRT4577_153574C.1.pep
MSSLNSLFNRSTFGTKCKTCLNLVISRIKLLRNRRELQLINMRKEMVQYLQTGQESIARIRVEHIIREQNILAAYEIVELFCEFVLARVPIVEVQKECPLELREAIASIIFASGRCSDLPELMHLRNLFTTKYGKEFVAGAMELRPDSSVNRTIIEKLSVKAPSGDSKLKVLKAIAQEYNIEWDSSNTEAEFNKKYEDLLDGSGSSVHQIQTPIIEGSVSSPVVSAPRDKTPALNSPVIDAEKHQVRESPTSPAGGARAGVVTKGNVVTMGHHSPAEEMPSTSPSSSDALEKARAAIAAATRASAAARAAAELAKVKITNQ

SEQ ID NO: 243414 - protein, 134 aa, Zea mays
  Clone ID: MRT4577_153575C.1.pep
HKPQEPRTRSAGSPVTMEHYERLGKIGEGTSGIVYKARDRRTGETVAIKRLRAGAGNGEGDAFEKTFRREVRCLEACRGHPCIVELRAAHRDPAGAFLVMEYAGQSLPEVMRARAERALPEPDARRVMRRLLEG

SEQ ID NO: 243415 - protein, 87 aa, Zea mays
  Clone ID: MRT4577_153576C.1.pep
TSPMHANRMQHHGAKPPTRVALEGTGDLTDCDEEASCSVPWRVAEPDNQKLTPESLERRRQVRRRADDDEKLSAAERVSDPKNTSSG

SEQ ID NO: 243416 - protein, 283 aa, Zea mays
  unsure (1)..(283): unsure at all Xaa locations
  Clone ID: MRT4577_153577C.1.pep
MATTDAAAAAAPAPAVSLDETKAKNVLRQVEFYFSDSNLPRDGFLRKTVEESEDGLASLALICSFAKMRSHLGLDATVKEDGVPETTVLAVAKVLRCSAALRVSEDGKRVGRANKLLKPDEIIVQIDSRSIAVSPLPHNVKLEDVQSFFAQYGKVNSVRLPKHVSDKRQFCGTALVEFSEEDEANNIMNNKLSFAGADLEIKTKKEFDAEMEAKKEAYEKSHPNTHANKNGHDEGYPXGLILSFKLKRILADGDTEXNGXXDKVDNSDDAXEGRFRLFGGIGE

SEQ ID NO: 243417 - protein, 112 aa, Zea mays
  Clone ID: MRT4577_153578C.1.pep
VGQATPGVKCLGLGPRRAHLGQSPARRPLATRPCASRGGGRAVGSSLPSDSLVRPRSHPPSPTGSTRWRSSRFCRGTRRRPAPRLATPTRYWERRSRQPVGRRACGGSRWEP

SEQ ID NO: 243418 - protein, 100 aa, Zea mays
  unsure (1)..(100): unsure at all Xaa locations
  Clone ID: MRT4577_153579C.1.pep
DPRITWLCNPVHKPRXLRGLPFAGKKFRCLLGKGNTPPKNRPSRRAPWKGNQTLFLRRYRLAPPFLCFATLEPPPCRLFAFLKGFGKFVSLLNFATCVTF

SEQ ID NO: 243419 - protein, 141 aa, Zea mays
  unsure (1)..(141): unsure at all Xaa locations
  Clone ID: MRT4577_15357C.1.pep
PTRPPTRPPTRPPGARVRXTPPPPPPVTRTTXPPVYGGQPPYAAPPVGYPADAPPPYGGGYGYGAAAPTAYGAEAAPLPAQQQKSSKMGMGTGLAVGAAAGLLGGLALAEGASYVEDKFEDRVAERVEEETFGDGDYDDDY

SEQ ID NO: 243420 - protein, 98 aa, Zea mays
  Clone ID: MRT4577_153580C.1.pep
IRLEDDSYGSKNQSSYGSSNRDNDDSYSSSNRKTNDDDFGSSNKTYGSGNTSSGYGGSSGRDDNDSYGSSERRNEDSYGSNDRESSGYGGSNRRSDDY

SEQ ID NO: 243421 - protein, 113 aa, Zea mays
  Clone ID: MRT4577_153581C.1.pep
RLFNERNYGLATRIWGQMVSQGCSPDVVTYTTSVRAYCNEGRLDEAENVVTEMKKCRTIVDAMAYNTLIDGHTSIGQTDRAVTILKHMTGVASMPNHLTFFILLRHLLQRRLA

SEQ ID NO: 243422 - protein, 174 aa, Zea mays
  Clone ID: MRT4577_153582C.1.pep
EDRPEFCLTHAPSTRPTRQATFPLGVASMLIAAKFEEISPPHPEDFCYITDNTYTKEELLKMESDILKLLKFELGNPTIKTFLRRFTRSAHEDKKRSILLMEFLGSYLAELSLLDYGCLRFLPSVVAASVMFVARLTIDPNANPWNMKLQKMTGYKVSELKDCIVAIRDLQLNR

SEQ ID NO: 243423 - protein, 109 aa, Zea mays
  Clone ID: MRT4577_153583C.1.pep
CLELTVARAGRLYHAAGGYRWCCPPVCSPRQRELDGMKLVCCVEVEDAVIGGNRLYCAKQMRSRDAECAQAKAESAAAREEGQIHGPAGWCVRLIGSVPRIVASVLEGE

SEQ ID NO: 243424 - protein, 117 aa, Zea mays
  unsure (1)..(117): unsure at all Xaa locations
  Clone ID: MRT4577_153584C.1.pep
LDYGCLRFLPSVVAASVMFVARXTIDPNANPWXEPKDLIDACKGLPCFSKFIYPAFLYIIIXNMKLQKTTGYKVSELKDCIVTIRDLQLNRKFPSLMAIRDKYKQHKFKCVSTLLPP

SEQ ID NO: 243425 - protein, 41 aa, Zea mays
  Clone ID: MRT4577_153585C.1.pep
EINNIDVIMHIQHLGVFGAHIGAEFIVVLLVNGIIGNNIPP

SEQ ID NO: 243426 - protein, 45 aa, Zea mays
  unsure (1)..(45): unsure at all Xaa locations
  Clone ID: MRT4577_153586C.1.pep
SAALLPGSFQKXRKFLPEISITALEHVWKIRQTIFCLAKQEIRLS

SEQ ID NO: 243427 - protein, 67 aa, Zea mays
  Clone ID: MRT4577_153587C.1.pep
HHMSTLDDPGMWGFKGFATSDAKLGRWVLTAEDICFKNVVMSYMFRLGNISFEDMDCCLLIEDYKAF

SEQ ID NO: 243428 - protein, 68 aa, Zea mays
  Clone ID: MRT4577_153588C.1.pep
TGLKCHMLNISGPPPGGRAIVFGQPLSFMVTKGTEGPLSRLKPKTSPPPRDPFQNVWGGIKIGPVWVW

SEQ ID NO: 243429 - protein, 70 aa, Zea mays
  Clone ID: MRT4577_153589C.1.pep
KSHPSIVISTSIALSTAYAYTSNPCVATSNDKYPWVHRLCQHVESYSMSLERPLTCACKPQYSFALYAVA

SEQ ID NO: 243430 - protein, 225 aa, Zea mays
  Clone ID: MRT4577_15358C.1.pep
MTVMELKALPLGFRFHPTDEELVRHYLKGKITGQIKNEVEVIPEIDVCKCEPWDLPDKALIRSEDPEWFFFAPKDRKYPNGSRSNRATEAGYWKATGKDRVIKSKGEKKKQHMIGMKKTLVFHRGRAPKGERTGWIMHEYRTTEPEFESGEQGGYVLYRLFQKQLEKTERSIPEEMDRSGYSPTPSRSTPDNMEANEEAITLINKESPESGLHGCPIELPGTIDT

SEQ ID NO: 243431 - protein, 61 aa, Zea mays
  Clone ID: MRT4577_153590C.1.pep
TYGLISGCWLNPPLAWTEARRPEQSSEQKDASFQFASTDTLQRLVGEIIRVVGFFQLPEGV

SEQ ID NO: 243432 - protein, 82 aa, Zea mays
  Clone ID: MRT4577_153591C.1.pep
VRHLLSIPVIARWKLSVEIIHEDRLRRSEWPRADHSGESSFLFRSCRLSLDGARWTPHRRVGGQKARIEESQEWSEQVGLVP

SEQ ID NO: 243433 - protein, 112 aa, Zea mays
  Clone ID: MRT4577_153592C.1.pep
ARGGIGEARRNGGEGEGGRAGSGAAAGGAGAGTPRVPTWRERENNRRRERRRRAIASKIFTGLRAHGNYALRRHCDNNDVLKALCEEGRWTREPDGTTYRKGCKPPGSRDPY

SEQ ID NO: 243434 - protein, 55 aa, Zea mays
  Clone ID: MRT4577_153593C.1.pep
MDIRKFFGVIPSGKKLVSETVKKNEKTKSDEETLKAKKGIKEIKVNSSRKEDDFK

SEQ ID NO: 243435 - protein, 93 aa, Zea mays
  Clone ID: MRT4577_153594C.1.pep
MVPMVVVVSPMQIELNVHVLVARACATRIVIADLRTVSACTVKRYVDLPSGEGSNADPPDEHGPHGHGGERVHGGYLSKLKTSHSRPASRYPM

SEQ ID NO: 243436 - protein, 68 aa, Zea mays
  Clone ID: MRT4577_153595C.1.pep
IRLVFVLALWIFGKVRFLWYLFYRWSIVAIDGEEFYFVEDLNCDPVNSTHSPNWIVARMLLSRNILWM

SEQ ID NO: 243437 - protein, 138 aa, Zea mays
  Clone ID: MRT4577_153596C.1.pep
ISRTRRRLISSRHALEMLSGLRLCGPMRKKKRMRRLKHAPTTRSLTHPSTLMVIVPAADYMSCVTILLRVRCPRRHVPSYFIVTVCHVLNELLLQTWTSVRHLSWFLAISRLLWSHDLDSVVGTYSDGAMFAANIELP

SEQ ID NO: 243438 - protein, 36 aa, Zea mays
  Clone ID: MRT4577_153597C.1.pep
GMNLANRLFFNQGTKPFQDNQLPPLKTGNPLINRLV

SEQ ID NO: 243439 - protein, 135 aa, Zea mays
  unsure (1)..(135): unsure at all Xaa locations
  Clone ID: MRT4577_153598C.1.pep
APSHSEKSTRHRRXGARAPPQDPGGGRGDGARRLRRLRLPRAPREEEGPQGRRGARRRKEAPLLRLIDPXVWSSLPXCATRACVRXLERPPCCAXVKKNPLLTHELGWKKKYEHVCVRMCLCMIVARGPKKCMQL

SEQ ID NO: 243440 - protein, 118 aa, Zea mays
  Clone ID: MRT4577_153599C.1.pep
RNPNPMGSFSRIWGQEVPPRLGSSAALRRRVSDGCALRQANAAGSLVRFLSGRRTSGACRNISGVGVLPWRNPSHTYLVHGISWEYPGAMAHGWKHAGDDDSFKRPVQNFKCIYLFVS

SEQ ID NO: 243441 - protein, 99 aa, Zea mays
  unsure (1)..(99): unsure at all Xaa locations
  Clone ID: MRT4577_15359C.1.pep
NKEENPPTRPQNTXXXXHREXEQQXNGAXPNXXXXQSTXXXXRTKAQEEXGGRTERTTXEDXDXARRAHXKGXKXPXPNQXEXQXEPPEXDEADRKQQH

SEQ ID NO: 243442 - protein, 195 aa, Zea mays
  unsure (1)..(195): unsure at all Xaa locations
  Clone ID: MRT4577_1535C.1.pep
MAEMAERSVAGELPEEPRPPHGEEDDEEEEEGDVCRICRNRGDEDHPLRYPCACSGSIKFVHQDCLLQWLDHSNSRQCEVCKHAFSFSPVYADNAPTRLPFQELIVGVGMKACHVFQFILRLAFVLSVWLMIIPFITYWIWRLTLVRSIGEAERLFLSHISAQLILSXCLHGFLLSAIIVLIFLGATSLRDYIRH

SEQ ID NO: 243443 - protein, 207 aa, Zea mays
  unsure (1)..(207): unsure at all Xaa locations
  Clone ID: MRT4577_153601C.1.pep
MEYGQQGQRGHGATGHVDQYGNPVGGVEHGTGGMRHGTGTTGGMGQLGEHGGAGMGGGQFQPAREEHKTGGILHRSGSSSSSSXYDSGYFFLLCARCFVLYIIIHELGLVIINXLIRGFRVXSEDDGMGGRRKKGIKEKIKEKLPGGHKDDQHATATTGGAYGQQGHTGSAYGQQGHTGGAYATGTEGTGEKKGIMDKIKEKLPGQH

SEQ ID NO: 243444 - protein, 100 aa, Zea mays
  unsure (1)..(100): unsure at all Xaa locations
  Clone ID: MRT4577_153602C.1.pep
PRVRGRVGGLVGRRVVKHIGKKLVGLRRFIHALXLSFWMTDRRHLHLLVGDLGYRLDLISKVHGLDKAAEYFGMVPKQLTKPQCYGYLLKCYVEAKAVDK

SEQ ID NO: 243445 - protein, 94 aa, Zea mays
  Clone ID: MRT4577_153603C.1.pep
SRRCSRPISRRPAPSAPRDDLSPAIWWRNGAAAGSEHPPAAAEAPARRAQDGSHRRRAATAAARPRRPRRPPPRDGAPRPRVGVLARENERGGE

SEQ ID NO: 243446 - protein, 259 aa, Zea mays
  unsure (1)..(259): unsure at all Xaa locations
  Clone ID: MRT4577_153604C.1.pep
MTAVLLPSLVVHTVAFLLQLPMGTSQTTEPEQQGCSPKACGSLNISYPFWLEEPGQPPCGSPPFQLKCNSSGAFLTHSMFQAYRVVNIFNENKSVHVVDENLPLAAGCPAPCFNISIAMEFMGAFAVSRANSELRFLSRCDEPVPEALPGFQRMPCDNSSFVGFRRRFGSYSYREHXXGAAATPPGCLVAVMPTVXRQTGTAGXYVAGLRNGFLLEWTAVSGXGDCSKCTASGGECMYPANGLAFSCNCPDGIHYPVSC

SEQ ID NO: 243447 - protein, 79 aa, Zea mays
  Clone ID: MRT4577_153605C.1.pep
MRLGPLLRSWLAPILPTYISGVTSRFQTTALSLKLLLMLGSMVLFLLCTMIIKRGRGSNQGGGDFFNTLHTLTLQLLFY

SEQ ID NO: 243448 - protein, 123 aa, Zea mays
  Clone ID: MRT4577_153606C.1.pep
PMASLQQQQFFLFSPLAMGNAPKNLQQRWLHHQLLHQIVPALTQQVGANPAAYLQQLFPFNQLIGSNFGGALQQGHRLLNPPGGATPWGAPFQQQQQLLPTTRFFLMTPPLWGQHPIVGGPLF

SEQ ID NO: 243449 - protein, 54 aa, Zea mays
  Clone ID: MRT4577_153607C.1.pep
TCHELHLFSSSQYQTGWVILTHGGSYLIRRCIVWDRMAMLHPLQKKSWAEPLKS

SEQ ID NO: 243450 - protein, 113 aa, Zea mays
  Clone ID: MRT4577_153608C.1.pep
HACSSAHALRRQPRPSPFTCAFGARSYDVTSNRSFYCPVPAYSLLRWPEGPGKPSDRCTQTKANILVTYTLSPTLSYNSFTTGRPTTMPNAPSCDNKPPTSYLANMCEDTTLH

SEQ ID NO: 243451 - protein, 74 aa, Zea mays
  Clone ID: MRT4577_153609C.1.pep
KPHPGPSTLAYILLCKPRVLSARSTRTKARSAGSCIGGQADFNAISWHPVRVMQKLSLISHEMVAENDCHLISW

SEQ ID NO: 243452 - protein, 76 aa, Zea mays
  Clone ID: MRT4577_15360C.1.pep
FSPVCLEGCPPLDLPSRVCNSFSSATPCLFMISQIVFFSPSFPMDVIVSPFFVQCIAVSPSSPGVLVFSPHNIRFP

SEQ ID NO: 243453 - protein, 113 aa, Zea mays
  unsure (1)..(113): unsure at all Xaa locations
  Clone ID: MRT4577_153610C.1.pep
PVKIDLIETYGNIAFNLHYYTDVQXLSYMQXHFEHDPTLFKFNKLTKDLCDSIDYNNLLNGSTLDIYDKEMVTNIAKTIDISNAYIFDSIDSFAHYVHNMAXGQXDWDYNGTQ

SEQ ID NO: 243454 - protein, 138 aa, Zea mays
  Clone ID: MRT4577_153611C.1.pep
MGSLSLATAPPNPRRDAIDLRKAFKGLGWDSTTGINILTPRDSVQRGLIQQEYRCMDHEELSHRISSELSGNHHKAMPMWILEPAGHDATASREVLNAAPMDPRSPTDIICSRTPSQSPIMKWIYHAQIRAPSLDNEL

SEQ ID NO: 243455 - protein, 51 aa, Zea mays
  Clone ID: MRT4577_153612C.1.pep
RHNPSELKTACRLHLQRTILLDSESSSIHPEQRAIDLAQQANEAVFYIGNV

SEQ ID NO: 243456 - protein, 87 aa, Zea mays
  unsure (1)..(87): unsure at all Xaa locations
  Clone ID: MRT4577_153613C.1.pep
MSGFGHNNKTSGSRVGPPVSRLCGNELLLASDARGCPSTKAQHTGQDMRLXPGQDXESMPAFALVNKATXLAIKHSLGQSHPVKLAP

SEQ ID NO: 243457 - protein, 92 aa, Zea mays
  Clone ID: MRT4577_153614C.1.pep
RRCTRAKLGIRLELCLMLASVTTPITWRLRIPVPKLKVPRGAPRRPHWLSRGGLFFCDECLDQESSTPFLCEGLNLHSALFFHPRQTCHAVS

SEQ ID NO: 243458 - protein, 49 aa, Zea mays
  Clone ID: MRT4577_153615C.1.pep
LDEALYNIQFEQHWLEAQTDRQAICKYPPFTFSLKYYLECFSPYAPCLV

SEQ ID NO: 243459 - protein, 96 aa, Zea mays
  unsure (1)..(96): unsure at all Xaa locations
  Clone ID: MRT4577_153616C.1.pep
MAANEAKGLLAAKTTAAKSDHKDKVNKVPISRSYGARLQLPVRRIHRQLKQQTHANARVRATXRLLSSHSLXYLTADVLELAANASKDLKVKRITP

SEQ ID NO: 243460 - protein, 63 aa, Zea mays
  unsure (1)..(63): unsure at all Xaa locations
  Clone ID: MRT4577_153617C.1.pep
IQKQGLYCIMLCTKKTPQCRTVGQFFLLLTCTHIWLLIGGQTNKANSRIYATSFGLLXHCRFL

SEQ ID NO: 243461 - protein, 104 aa, Zea mays
  Clone ID: MRT4577_153618C.1.pep
RFAPPGVFTILKKIGRAKVPTGGGKNPRPVVPLGGGLFAPPKKFPRWVERAFPNFFGEGGFSSGVPKGAKTGFGIGIGFFPAPPSQFQFGGGAFWSLKGGGPGF

SEQ ID NO: 243462 - protein, 164 aa, Zea mays
  unsure (1)..(164): unsure at all Xaa locations
  Clone ID: MRT4577_153619C.1.pep
TPAGSGPEFPGRPTRPGYGTQKSSLKIGEQRTGSEVIGRGGPRKADGPRPSLDYVELSPLAPSSPQRMRTLSRSTPERPTKQEDLERDLAQRSEERRKWFESTDGRTPETPSGDGSRRRLGAPLTDDQQSRLSEETEXKXQESEKLPVRENKRVPLTALRNRAH

SEQ ID NO: 243463 - protein, 52 aa, Zea mays
  Clone ID: MRT4577_15361C.1.pep
LVDRKESWLPLFFNPQKLIAVPKKTDSSCILKAYVTDVPKPPKPLNFTINHS

SEQ ID NO: 243464 - protein, 83 aa, Zea mays
  unsure (1)..(83): unsure at all Xaa locations
  Clone ID: MRT4577_153620C.1.pep
XXXXXXXXXXXXXXXXXXXXXXXXXXXDHIMDEIKLTIQIQLSDISVHALQVDYNKWHCEPEPVSPLISQVKNGSIVEVQCES

SEQ ID NO: 243465 - protein, 237 aa, Zea mays
  unsure (1)..(237): unsure at all Xaa locations
  Clone ID: MRT4577_153621C.1.pep
KKNKKKIRKKQKXKNKKKKTGKIKQKKKNKKKKXKHKXKKKKNKKKKKIKNKEKQKKEKKKXKKKKKNKKKKKNKKKKKKKKRKKKKKKKKKKKTRKXKKRKKIKNKNKXKKKKKQTKKNKSKKKKXKKKXKKKKKKKKNNKKNKNKKKKKKKIKKKKKKIKKKNKNNRKRNKSKXRKKKIKCKKXKNKKKINKXKKKNTPINKXKXQKKKNNTKKIPYIEQEEKEKKKINDKQITK

SEQ ID NO: 243466 - protein, 367 aa, Zea mays
  Clone ID: MRT4577_153622C.1.pep
GVDLSAVKQYYCRHKVCNMHSKEPRVFVAGIEQRFCQQCSRFHQLHEFDQGKRSCRRRLIGHNERRRKPPPGPLTSRYGRLAASLQEPGRFRSFLLDFSYPRVPSSVRDAWPGIQHGGDRMLGTVQWHGHQEPPHPHRSAAAGYGNHAAYNCHGGLVAGGAPMLSSAAFELPPGGCVAGVAATPACALSLLSTQPWDTTFPRPPVPSNARGRRLRRHPGGAVRHGEQLRGVERLDGLAGPRCRRRQERAASRRCSAPGPPRLRGGPLLRRARARPAGKRRAATPAARRPWRLRRRHLQPFHHQRDELVPVAALPAFIRSPRHEMWREHFCIGHHPGFVRLTLPFSFFQGGETGIPNHSRSTVNSLPV

SEQ ID NO: 243467 - protein, 132 aa, Zea mays
  Clone ID: MRT4577_153623C.1.pep
NLFPGALPKVWGAGPASGFLKPRRGGAPELRSARLKAPRKLVAGSLSRLRKKRSGSPGGSHHPPVVRGPLFLVGALSPPPVLGSGPLGHRGQSAGRPGTTSKKQKMGQRENKRKKKKQTKKKKKKKKKKNPQ

SEQ ID NO: 243468 - protein, 47 aa, Zea mays
  Clone ID: MRT4577_153624C.1.pep
SNAKNLTLQWKWLSRPIVHKGRRSYRIKSCFHVLCNLKDLFYECQST

SEQ ID NO: 243469 - protein, 64 aa, Zea mays
  Clone ID: MRT4577_153625C.1.pep
SMKLEAVNSRMSHPVETFPSKDLAPSAFDATGMIFGAQAPREYAQGAQSEWLHMQVGSSFDRGT

SEQ ID NO: 243470 - protein, 84 aa, Zea mays
  Clone ID: MRT4577_153626C.1.pep
GPKLHFCNFTQQPMLKRAQPMVGYREKVLRALTKAGGQRALICETQKRFTGYPPTAGPTETMVIRSKKKRGLSGPAVKPYKEAY

SEQ ID NO: 243471 - protein, 94 aa, Zea mays
  unsure (1)..(94): unsure at all Xaa locations
  Clone ID: MRT4577_153627C.1.pep
YELITGSVPYSHIGCRDQIIFMVGRGYLSPDLSKISSNCPKAMRRLLSDCLKFQREERPLFPQILATIXELLQRSLPKIERSASEPCLQRRQAD

SEQ ID NO: 243472 - protein, 51 aa, Zea mays
  Clone ID: MRT4577_153628C.1.pep
NLEVKTLDKDIKASRTKGRDWLLSDLAHAGTIADDNYLYGKYAHTMKDKFD

SEQ ID NO: 243473 - protein, 78 aa, Zea mays
  Clone ID: MRT4577_153629C.1.pep
RVRTCGPPRVISRVRGALSTSTSRKHRDALMVLHQGRHGKWSSGEFNGSDNGDELWDYVWIYDAFECGVHKHAPNVGC

SEQ ID NO: 243474 - protein, 60 aa, Zea mays
  Clone ID: MRT4577_15362C.1.pep
DDRACYKILDIPPLRSLYMLHQCGQPTFVLWALIKVLFCMYKGKNSALQLCFISDIHVHI

SEQ ID NO: 243475 - protein, 118 aa, Zea mays
  Clone ID: MRT4577_153630C.1.pep
QTDIISMVTLTLFNGTTLTDSQLSYYHAHSVCPRQIEGQWGFRRCHLNTTSCRNIWWLTLVLFGTPTSLVECPGCSTTWHTVSGQSTTPSRSDMIGYPTSLRLCTMNPVICQIISTLS

SEQ ID NO: 243476 - protein, 140 aa, Zea mays
  Clone ID: MRT4577_153631C.1.pep
PSSSFFFFFSPHPGRQRAHLQGQTPNFVTSSSLAASPSPWATPLGASTAQQSPAPSMGDLWTNIRADLAKMQASLRMVQQGLLQINATVQHEQQQLALSARLQTSAVVGIHHTGCCSRLPCTTESARDALADARGSLGDG

SEQ ID NO: 243477 - protein, 188 aa, Zea mays
  Clone ID: MRT4577_153632C.1.pep
MALASGTCRPLLGGPASTARLHLAVSSSSTACSIRFPRGAGGGRAAVSLRAPAPPAAAAATSGSIAPAISLTEKALKHLNKMRAERNEDLCLRIGVKQGGCSGMSYTMEFENRADASPDDSVVEYDGFAIVCDPKSLLFMFGMELDYSNALIGGGFSFQNPNATKTCGCGKSFATGKESEAAAKACNN

SEQ ID NO: 243478 - protein, 181 aa, Zea mays
  unsure (1)..(181): unsure at all Xaa locations
  Clone ID: MRT4577_153633C.1.pep
MGSRSKNEDDKALVLCQERKRFVREALDGRCAFAATHFAYIQSLRHTGFALRKFVEPEVPTDSSLFTSTSATPEPPTIMQKPMTISPSLSHHASDSFSPVPSPLSSGRFHVNHMKAGGNSVTTVKEKVIEPVTALXTSSPVRGQAIHDLDDSSTFEAPPGTPPWDYFGXLFQPVESQMSFP

SEQ ID NO: 243479 - protein, 79 aa, Zea mays
  Clone ID: MRT4577_153634C.1.pep
TPRPPARCPRELLLRPRNPPSRMRVLISYLLALLPALFYGAPPPAWNFLVGPSRCSSPSAPVPVHLVRPSFVPRSWFCS

SEQ ID NO: 243480 - protein, 113 aa, Zea mays
  Clone ID: MRT4577_153635C.1.pep
SELKSILGATKSTRRRHLDQVELLVVRLLLGYLFFSGQLGAQIGRPRRTAKQARRVLRRRTSGNSRTRATSCLHADDPWHQRTPTPLCPATQTPVATCSTRRRCSPLSSCGFG

SEQ ID NO: 243481 - protein, 71 aa, Zea mays
  unsure (1)..(71): unsure at all Xaa locations
  Clone ID: MRT4577_153636C.1.pep
LIGASGRTQHXXVLIVALALLALASSAAFNTSGGFGFQTPPFHLPPPFYIPPGCCXXXQXXPQPXQYPTQP

SEQ ID NO: 243482 - protein, 100 aa, Zea mays
  Clone ID: MRT4577_153637C.1.pep
SELKSILGATKSTRRRHLDQVELLVVRLLLGYLFFSFNELLLSNFYMLNTVILNHRLGQLGAQIGRPRRTAKQARRVLRRRTSGNSRTRATSCLHADDPW

SEQ ID NO: 243483 - protein, 65 aa, Zea mays
  Clone ID: MRT4577_153638C.1.pep
PPKLGGHGAQKRDQVFVSPPPLAAELWILMDGPRPGFSLRWVLTGPHFSVLSPPGGVLGPNYYAR

SEQ ID NO: 243484 - protein, 118 aa, Zea mays
  unsure (1)..(118): unsure at all Xaa locations
  Clone ID: MRT4577_153639C.1.pep
NVIRYFSTHALNFAFKGXFNTFFSSKKDLDGYSKRSAGNLAYGRSXAGALSLLVAYSLDYPRAQLANDAKAAHGXRERQANGLVDVYRTTLKSDSLAGLYHGFNIFCVGIIGYRGLYF

SEQ ID NO: 243485 - protein, 407 aa, Zea mays
  Clone ID: MRT4577_15363C.1.pep
MAAVFFHHVVGDLTVGKPEVAELHDTDTLDDAARAIAASPEGAVPVWRPRAAPDDPPSGARFIGMISALDIAAFVASAGVGDRSMRAVVGEVVQPNPALLREIDPGTRLIDALELMRHGVKRFLVRKSGSWKGITKRFSVLYNGKWLKNMESTSPSAASSSSTQLSPRSGSAEKFCCLSREDVLRFLIGCLGALAPIPLTQISSLGAINPQYSYVEASAPAMEAIQKIPQDPCAVAVVETMPDGTRNILGDISTYKLWKCDYVSAAWALANLSAGQFVIGADENGSTPISVFPEPPISPSSPVEEISPGRSPRAKKFSSRSIGFLNNTQMSAWRTRSMYHRGRSTPLMCKTTSTLAAVMAQMLSHRATHVWVTDAESEEDGVVVGVVGYTEIFNAATRSTCPSPTAS

SEQ ID NO: 243486 - protein, 50 aa, Zea mays
  Clone ID: MRT4577_153640C.1.pep
VRHRRLEPNLTIELIRRSIECYTFFMYLWNPFEGYHLGSGSRISVLHYMT

SEQ ID NO: 243487 - protein, 138 aa, Zea mays
  Clone ID: MRT4577_153641C.1.pep
MEEDLDTDDEGSWDLVGRDIRLKAAFLCIDLGRVIALCGGEERKKALTALANKLFYSMDELGDAVESKSLPLTQARYSDTADALREVVAVLALSLDLEFGPDDPVCRVRDHLHAASHAVWPCGCGCVYIIGSYLGWRL

SEQ ID NO: 243488 - protein, 266 aa, Zea mays
  Clone ID: MRT4577_153642C.1.pep
AAQAAGGSLPPPGTTISFINSHSFEAARSRAGGGGHSFEAARSRAGGGGGESEKMVILVVATASDPASIGPAAAFLAMPGWSPGPPIPEGMESFTNGNVRLLKHERSIVAEDDLDRRWQEATGEAVSEVIFLSKHTAVSNRPALTVHPIGVPHLREDETPPQGGRPGWAAVPNPRIGPWFRLMQKIAVEQGLVPEFEVTLEATHHGPVTSTPTMFVEIGSTEDHWGRQDAAQAIALDHIARGDSKQISYTRKFAALPNANSQMSCV

SEQ ID NO: 243489 - protein, 90 aa, Zea mays
  unsure (1)..(90): unsure at all Xaa locations
  Clone ID: MRT4577_153643C.1.pep
SXXAXPAIRXPGSVXXEDLPFTTXSGPLEGXAWAQPCXACXICFXLLVEGSDAPRRHXXEMERGTLKPPPRGKGDRRXRRXXNNDXACDP

SEQ ID NO: 243490 - protein, 49 aa, Zea mays
  Clone ID: MRT4577_153644C.1.pep
FLLLKNLSFLFPVFNTLNPIISTQTLHITSFFLYKLHIHPSLNKISTPY

SEQ ID NO: 243491 - protein, 96 aa, Zea mays
  Clone ID: MRT4577_153645C.1.pep
SSFVGGRPFFFFWVFFLRNIGSRMLWIREKMRLPRRGHPTKKCTERQSHIKPRCRAYPNCKEHAAPTKEKRRAPLTPGIYTYKGLEKLGGHETVSG

SEQ ID NO: 243492 - protein, 98 aa, Zea mays
  unsure (1)..(98): unsure at all Xaa locations
  Clone ID: MRT4577_153646C.1.pep
GRAGTIGSLTTVDSGQQDASDSHSSAEFTQYLQDGYCKISELDDCRELAEAVNDADSRSSHCEREKPDEYGDNDDLLGRVFAFSEEXRNYYSXLRLRY

SEQ ID NO: 243493 - protein, 72 aa, Zea mays
  Clone ID: MRT4577_153647C.1.pep
KFAPRGESQAKGEYLLIFQMSAPNSTRVFRKFLCPANKTPKSERGIINPRSAFSIIINQSGNSQLNDTAAFI

SEQ ID NO: 243494 - protein, 161 aa, Zea mays
  Clone ID: MRT4577_153648C.1.pep
LPGQLVEELIPHLAQNLDGSSPQFHVISKSLRCHGCYVTAELSGIALDPRSRRGGGGMSFATPFGVREKSVTSGSLAFVWYLRLPATRSTDTGGVVLALALARQVEEAETGERGRHGASSSMGDIVTRIEMCNDALCPVVGTVREREIEDEEWRSEGGLYS

SEQ ID NO: 243495 - protein, 58 aa, Zea mays
  Clone ID: MRT4577_153649C.1.pep
FVLLQSKALGHSSLIKYRTNLEATSIINPVTISRSETSTVNIMSKTSGPVLPPSRFHT

SEQ ID NO: 243496 - protein, 58 aa, Zea mays
  Clone ID: MRT4577_15364C.1.pep
NDLGIYIVLVLFHVMELLSKAALFLLVFFVSRNVREYLVFTHFYFSMQVLSKAALVLF

SEQ ID NO: 243497 - protein, 58 aa, Zea mays
  unsure (1)..(58): unsure at all Xaa locations
  Clone ID: MRT4577_153650C.1.pep
ESIRSFSKESKGGRGGRKKERYRKTKLVKIKDKXIIMXXGVDPYYKQSFXXXGMGCRK

SEQ ID NO: 243498 - protein, 74 aa, Zea mays
  unsure (1)..(74): unsure at all Xaa locations
  Clone ID: MRT4577_153651C.1.pep
PAVPAXHLQRAPTQNLQPASFVFLVHLLIGVHKGLRVRALLGASPARRVSSGEQFWRVMVAQSLSPTVRCESRP

SEQ ID NO: 243499 - protein, 54 aa, Zea mays
  Clone ID: MRT4577_153652C.1.pep
KINTLMKDPYPKTHPLTISKPRPPYIPSTSKPLQNTGGAPLKIPLRGPTLYCPP

SEQ ID NO: 243500 - protein, 54 aa, Zea mays
  Clone ID: MRT4577_153653C.1.pep
KITTQLIDYEVPSAIRSANHAIVTIKKVVSLITSITLRMFWHLPSVAQELLKAS

SEQ ID NO: 243501 - protein, 563 aa, Zea mays
  unsure (1)..(563): unsure at all Xaa locations
  Clone ID: MRT4577_153654C.1.pep
MAAVLAVLVSAVAATSITAAALNTDGLALLALKFAVSDDPGGALSTWRDADADPCAWFGVTCSTAAGRVSAVELANASLAGYLPSELSLLSELQALSLPYNRLSGQIPAAVAALQRLATLDLAHNLLSGPVPPGVARLVSLQRLDLSSNQLNGTIPAALAALPRLAGVLNLSYNHFTGAVPPELGAIPVAVSLDLRGNDLEGEIPQVGSLVNQGPTAFDGNPRLCGFPLKVQCAGAAGADDDPRIPNSNGATDPGAAAEVGRRGGPRQPRRRRSSPAVPVLAAVIVVAXRRCGSAVAVPAAVRRRRRGXGKESGKEKGGGAVTLAGSEDRRSGGEEGEVFVAVDDGFGMELEELLRASAYVVGKSRGGIVYRVVPGRGPAVAVRRLSEPDDGDSDGSGSGSGWRRRRAFEAEAAAIGRARHPNVARLRAYYYAPDEKLLIYDYLPSGSLHSALHGGPTASPTPLPWSVRLSIVQGAARGLAYLHECSPRRYVHGCIKSSKILLDDELRAHVSGFGLARLVAGAHKAAGGGHSKKLGSAACALRGGGAASYVAPELRAPGGAPA

SEQ ID NO: 243502 - protein, 121 aa, Zea mays
  Clone ID: MRT4577_153655C.1.pep
AAPFFFFFFFWGRTRGHLSKHIRANIIKARHHKQNGPGLKSRSEHTGQARAYNQMDRPPLCLLWGPLICPPSGLLSACPLLLSYHACPFRPFLPFVRSRGLFLGCWRGHLLGSFGRVRLKN

SEQ ID NO: 243503 - protein, 57 aa, Zea mays
  Clone ID: MRT4577_153656C.1.pep
LSAPMNNKFMLLKKLCQLKFYKNPQLPSENFTCVVPASSVRIYTMLIIQLLYTLNPR

SEQ ID NO: 243504 - protein, 194 aa, Zea mays
  unsure (1)..(194): unsure at all Xaa locations
  Clone ID: MRT4577_153657C.1.pep
MGGVGAASLALLPLPLLLLLLLFRAEASALHGTILPNPAPSPSSPPEARSFGPRISPSYPPRALSPGSDIDVRPHSHKPPHHRESNQGPSPSSTEGCSTYICTEPLTATPIGSPCGCVEPISVIVDLDLAPYLLFMSIAELEVEVAAGTFLKQSQVKIMAAVASIQDDQKTRVTIYLXPLREXFDTYTASLISD

SEQ ID NO: 243505 - protein, 58 aa, Zea mays
  Clone ID: MRT4577_153658C.1.pep
EDKFCRVWTNRDTQSSHSTLMPADSHSVGCTSNPNLQEMAKTSRNDEQPHYSVSSADL

SEQ ID NO: 243506 - protein, 46 aa, Zea mays
  Clone ID: MRT4577_153659C.1.pep
LVVTRNRLEDDWLKGTDDASLRVLRLALNLFHVLFYFELSRSYCLL

SEQ ID NO: 243507 - protein, 88 aa, Zea mays
  Clone ID: MRT4577_15365C.1.pep
WGIYTFPKLHPISHYRIIDEEGEAIKRQKRCPPSLRDLKMKFYYYQVMAPWSPKKKIPNDVPEGAVLIRAHTTTTDLFSLLWPNQVNL

SEQ ID NO: 243508 - protein, 120 aa, Zea mays
  Clone ID: MRT4577_153660C.1.pep
AGEQLGYLVGASSGGAGRLVGEREVGAEVVGEGQRGRDAAPLHLAVDGCKAPGLRRVVSPDLRGPEGPGYLTVVLALSALVAHAVATSTQDTCTRAKRRKDEPDDPVLGSLSRPAWLDAA

SEQ ID NO: 243509 - protein, 98 aa, Zea mays
  Clone ID: MRT4577_153661C.1.pep
VSLYISRSSPQLQVAFSQVLAACSQQFLAFMEVAAVAYHDHCTMHILGPIKQLAGVNRSPLVIQRTEVSELLARCALREHLLPRAPMSSVQPTWYDQG

SEQ ID NO: 243510 - protein, 60 aa, Zea mays
  unsure (1)..(60): unsure at all Xaa locations
  Clone ID: MRT4577_153662C.1.pep
FRSPEPPRLMHRYHHLLHGLLTSLDNIMQGIRSNIVQLASSLLALAARHXRSFTSRLRRY

SEQ ID NO: 243511 - protein, 74 aa, Zea mays
  Clone ID: MRT4577_153663C.1.pep
PRGPASRDETADERRASEGGPRTPRVAVARTLCRRRGVTAGVRCAADARSRPARRRPWLEERGEGREKREGRDR

SEQ ID NO: 243512 - protein, 150 aa, Zea mays
  unsure (1)..(150): unsure at all Xaa locations
  Clone ID: MRT4577_153664C.1.pep
MSGSKVSPVEGVSKPDRKDHSRLXFADRVAHVPRFXENLGAGHNVALSSGAKDAPDHVQDVGRSHPVGAMMHQVLVGRIHAXTPIPSKVQDTRLVQPPFHPDRSPQFVSEVLQVVVPLAILGLGASVRYITQADSAWFVYHSSKGMLAVP

SEQ ID NO: 243513 - protein, 187 aa, Zea mays
  Clone ID: MRT4577_153665C.1.pep
NNYGNKDDSGDDCDGSSDDGDGSSDDDVTDQICALCDDGGHLLSCDGPCKRSFHPTKKDGRESKCESLHYTSAEVKRIGTYLCANCKNKQHQCFRCGELEPSHGPNAKVFQCNQASCGYFYHPKCIAQLLDPNATDGELERRIMAGMSFPCPIHWCFKCGHMENKAQRALQLAVCRRCPRAYHRECL

SEQ ID NO: 243514 - protein, 38 aa, Zea mays
  Clone ID: MRT4577_153666C.1.pep
FLLSSWAFGAISIGKIISSCSIRVVHASKLTTPCCFMQ

SEQ ID NO: 243515 - protein, 59 aa, Zea mays
  Clone ID: MRT4577_153668C.1.pep
TSGSMSASSGQLSNSTRICCCLNSNSCTYESVNCVSCWDAGVDISGTIWGAGHVHPSVD

SEQ ID NO: 243516 - protein, 105 aa, Zea mays
  unsure (1)..(105): unsure at all Xaa locations
  Clone ID: MRT4577_153669C.1.pep
LVITHARSGSIFETLRLGIPLILVVDEDVMDNHHSELPEELAARKHVFCARARPLAETIRAMDLXTLLPYQPRDANPVVSLINRVLGYPDDRRIYSDALQSMWIR

SEQ ID NO: 243517 - protein, 90 aa, Zea mays
  unsure (1)..(90): unsure at all Xaa locations
  Clone ID: MRT4577_15366C.1.pep
DPYVRIKCFDTHRIISVEDHAYIQINIDPLDTNGLYEGWFTTSAFSRXVKXAQGESYSCSDRLSRNNNADIMHYKLHLVYQEMHTDLTIF

SEQ ID NO: 243518 - protein, 76 aa, Zea mays
  Clone ID: MRT4577_153670C.1.pep
LLYTGPLILNDLPATSPPLLTSTVCHNLPLLPSRLLPSLPSRIELPYSLAFHLSTAPHPALPYQQSINVQHLALLP

SEQ ID NO: 243519 - protein, 130 aa, Zea mays
  Clone ID: MRT4577_153671C.1.pep
MNCSMPGLVAYALFFTLLFTAPATSTAGLTMRADLTHVDKGRGFTRWELVSRMAARSRARAASLYHRGGHYGDPVTATVVRMPAEYLIHLNIGTPRPQRVALTMDTGSDLVWTQCTPCHVCFDQPSPMFH

SEQ ID NO: 243520 - protein, 178 aa, Zea mays
  Clone ID: MRT4577_153672C.1.pep
PQQLAEFLEGIESECFREDAAFENLEAKPFLQVYQSVLNSKATEDSLCNFAKWEPCHGKFKFRHPWSQYQKLGALCRECASSMEALSSYVVTLARTEYPEAHPELCSQQVRTACRQMSLHSAKALRELTAAMRTMTTTVPSPASVHVSAAIKAAKGLRDGLSSEGADLVRAMHVAVIA

SEQ ID NO: 243521 - protein, 88 aa, Zea mays
  Clone ID: MRT4577_153673C.1.pep
APYCHGSVRSCYQSGCLPVPNSNHLLFPTLMCELVVQTNAFTLPMDSQISGCAVHSACREPPVWVCIWPLGTIPGLKSCPSGRLKTNK

SEQ ID NO: 243522 - protein, 58 aa, Zea mays
  unsure (1)..(58): unsure at all Xaa locations
  Clone ID: MRT4577_153674C.1.pep
AVAWDKIQEADELVIEELTMFPELKNAYXEKHPKRLAASPNDLRWPSEGQETNNLLKT

SEQ ID NO: 243523 - protein, 116 aa, Zea mays
  Clone ID: MRT4577_153675C.1.pep
NDGARKFITGTLLASGAWQDLGKAPVQAAVEFTYLLEGCQFNLKVNQATLQIPDRQAVSALLFAGNFNYSLNNPNPQERVSVAKQYIEAWQSDLDTFRGIVHEKFLAEQQPQTVFG

SEQ ID NO: 243524 - protein, 394 aa, Zea mays
  unsure (1)..(394): unsure at all Xaa locations
  Clone ID: MRT4577_153676C.1.pep
GSSNEISPVYSLWATFMGLYIANYVIERSTGWVLTHPLTISEYEKLKKQLKPDFEDMVPWYSGTSTDLFKTVFDLMISVTLFVGRFDMRMMQAAMNKTPDEANSHDLLYDHLDGKDELWFDFIADTGDGGNSTYAVARLLAQPLLVINSDDSRLTFPRGQLLLVGGDLAYPNPSSFSYERRFFCPFEYALQPPAWYKPEHIALEKPELPLGVSELRRYRGPQCFMIPGNHDWFDGLNTFIRYICHKSWVGGWFLPQKKSYFALKLPNGWWVFGLDQALHGDIDVYQFKFFAELCQQKXQVGESDSVIIITHEPNWLLDWYWGDSTGTNVAYLIREYLRGRCKLRMAGDLHHYMRHSCIESKEPVHVQHLLVNGCGGAFLHPTHVFENFRVFYGN

SEQ ID NO: 243525 - protein, 183 aa, Zea mays
  unsure (1)..(183): unsure at all Xaa locations
  Clone ID: MRT4577_153678C.1.pep
TQAVQAIGQTLAEMQQPPPPQPQVQVQMPQVPRDKRVEFMRGHPLSFXHSAGPMDAKDWLHTSQCNDRKKVLYGPRLLRGVAQSWWESYLATHADPEAITWKEFRDNFRLYHVPEGLMIVMKEEFLAFKQGPLSVSEYRDKFLYLSCYALEDVNTDAKRQYHFLRVLVDPLHYQLMNHTFPTF

SEQ ID NO: 243526 - protein, 31 aa, Zea mays
  Clone ID: MRT4577_153679C.1.pep
YVHVSLAFPTKVHTRRAFDACDMVRIRAYVS

SEQ ID NO: 243527 - protein, 112 aa, Zea mays
  unsure (1)..(112): unsure at all Xaa locations
  Clone ID: MRT4577_15367C.1.pep
SLTTVNLNGNQKXPPRNSEREPQGGGPQPRDVQPENTGKPPVSXPPPRPGETHXPPPKGGEGNTPWAQEKTGAPSNKGPQEKPRGGDPQGNRPPPGGGPQFKKDPTSNRPPI

SEQ ID NO: 243528 - protein, 132 aa, Zea mays
  Clone ID: MRT4577_153680C.1.pep
RGGGAPKKKQEDIFLKKEEGKQAGGAPGGGFSGGPKIQGPNPGPTIKLRRLGPPKHLATPRGWAALAFAKGERFVFTFFWAPLNGPPLPFFSAPIILIWDFWGGKFLAGFSLAPFPRGRGNPDGFFLWERGV

SEQ ID NO: 243529 - protein, 129 aa, Zea mays
  Clone ID: MRT4577_153681C.1.pep
VVGNRCGVGHACVAGSPAGRSGCYGTRGCRLPAGPARFEAVVQTRTSASSRRRPASSGHSNAGGSSAAAVAVARAPSTLVSLLRMCVHGGAERCCRTADGEAEIPEARVLLIISIAVLRSLNECSRPAS

SEQ ID NO: 243530 - protein, 116 aa, Zea mays
  Clone ID: MRT4577_153682C.1.pep
LGWSLTIWVYQGSQGAFTQPGPFPARPRTWVSSRSVEKAIVLLRKPSYIKQRGPSLQGLFNPLNLFVQHPRRLRQAPLVKVFMEPIPLLGPPNSQYDNVLTHNGGSHPGCKGRVLS

SEQ ID NO: 243531 - protein, 60 aa, Zea mays
  Clone ID: MRT4577_153683C.1.pep
PIFHGILNATRLQMTSVEVIVLKSYMLQRMMMVDANLLCGNTEMIFTVLLIFKICQTYGV

SEQ ID NO: 243532 - protein, 105 aa, Zea mays
  Clone ID: MRT4577_153684C.1.pep
PPRSIWIENTRPTPNVKVNVVDLEWPDLIIKKCFFVFWRQKLGRLPSNLGPCCLVKKGLRGICFFALLKNKKLCALLKGQQTKTWGIPNAPCLGKKKIKFGGSRK

SEQ ID NO: 243533 - protein, 199 aa, Zea mays
  unsure (1)..(199): unsure at all Xaa locations
  Clone ID: MRT4577_153685C.1.pep
STILYATLAIKILCLLMLLDLSAGAHSGTMSTRSASRSVPISCPLACHEDLLTXAHSRYVEHPHLQPYXIQQRVSHQLATCMTLVAAASLSLLHQXTLXVHEWTQYMRAHQLQQLXLANLAAYSQHQQHLTFNQLWSLXLLSYVQQQALPFSQLPAAYPEQLLPFNQLAAWNSTAXLXQQQQLLPFRQLAGVSPATFLT

SEQ ID NO: 243534 - protein, 110 aa, Zea mays
  Clone ID: MRT4577_153686C.1.pep
PRVRPRVRPRVRPRVRPRVRENGEDGLIYVGNMVNPATLEQIFGVSSPPALPAQRALEQFDNELSRKVNEVVNEIRRQRCSYLRLRQCRRGEPSGIFAVILVEDTTPGVF

SEQ ID NO: 243535 - protein, 295 aa, Zea mays
  Clone ID: MRT4577_153687C.1.pep
MVLPLRLIPRLAAAARLTPATSCAPRLLLRRAPLPPALAMASAYSAGYGAGRRLLFRQLFEKESSTYTYLLADVADPDRPAVLIDPVDRTVDRDLNLIKELGLKLVYAMNTHVHADHVTGTGLIKTKLPGVKSVISKASGAKADHFVDHGDKIHFGNLFLEVRATPGHTSGCVTYVTGDADGQPSPRMAFTGDALIIRACGRTDFQGGSSEQLYQSVHSQIFTLPKDTLLYPAHDYKGFTVSTVEEEAAYNARLTKDKETFKTIMNNLNLSYPKMMDVAVPANLVCGIQDPPPKI

SEQ ID NO: 243536 - protein, 53 aa, Zea mays
  unsure (1)..(53): unsure at all Xaa locations
  Clone ID: MRT4577_153688C.1.pep
MATSSVLXLHLLSCAXXASTAARASXAPAVAATTAQSXEESFGRKGXRFVADP

SEQ ID NO: 243537 - protein, 54 aa, Zea mays
  Clone ID: MRT4577_153689C.1.pep
TTVVTSWLDGKHVVFGEVADEASMQVVKELEALGSSSGSVRSATKPTIVNCGGD

SEQ ID NO: 243538 - protein, 214 aa, Zea mays
  Clone ID: MRT4577_15368C.1.pep
MQRDAGSGDRTPGTPSPTHGGRLRHRKRSNEVPSDVNTTNGANLLLNDQNKYKSMLVRTYSSLWMMAGVVFLIYMGHLYIWAMVVVVQIFMAKELFNLLRKANEDRQLPGFRMLNWHFFFTAMLFTYGRFLSHQLVNTMTSDKLLYKLVSRLIKYQMFICYFLYIAGWHWTQGVQSDNDIWSISLLVDVFRNVGRRSSAIKPPQTGLCLVSFLE

SEQ ID NO: 243539 - protein, 73 aa, Zea mays
  Clone ID: MRT4577_153690C.1.pep
PGEHTKMCRPAPHTSCRALRPLTNGGSRNSSCLCYNDGVWTVLRRAHIVREMIERLYQLGFLRPHNHELPIRR

SEQ ID NO: 243540 - protein, 161 aa, Zea mays
  Clone ID: MRT4577_153691C.1.pep
AAVREVHQLGLAQLGFGDLEDLGEFLEVLFVGWGVAVEHGGGGDFFAAEVFGDGLEGEVLGFLCVEEDAAVGGESGGDGLIERCDRLAAGGTLYGHLCCCCSESVSLLVQERRGRSDSRSRRDQRSSARSDSQGRDKRRGHCDYVKILIRMKIRSLFPAGL

SEQ ID NO: 243541 - protein, 73 aa, Zea mays
  Clone ID: MRT4577_153692C.1.pep
LVFAMAGDTYYACVRLSHRIAANRAFSSPSHLHVLSSGCNQHVMCSLTQLRQVHLYQPSLDYAILLYANLIWS

SEQ ID NO: 243542 - protein, 64 aa, Zea mays
  Clone ID: MRT4577_153693C.1.pep
KKKKKKKKRGNKIKKKKKKKKKNKKKKKKKKKKKKKKKGGAVLGVPGFLPRACEVLFFFWGPLI

SEQ ID NO: 243543 - protein, 235 aa, Zea mays
  unsure (1)..(235): unsure at all Xaa locations
  Clone ID: MRT4577_153695C.1.pep
MAAAESARVQEAQKLAKSDPRKAEAIYKDIISKAPSTTSDAATREYETALVSLGEIYRDEKKTQELVNLVKESRTVFSSFAKAKSAKLVRQLLDLIKEIPDSTDIEISVTKDCIEWATAERRAFQRQDLEVRLVALQMAKQSYYEALGLINNLLRELKRLDDKLRLVEVQLLESRVYHALGNIPKARAALTSARTSAASVYTPPMLQXNLDMQSGMLHAEDKDFNTAFSYFIEAL

SEQ ID NO: 243544 - protein, 46 aa, Zea mays
  Clone ID: MRT4577_153696C.1.pep
VGRRRPVLVLRRGKEREARLMRYREKRKSRRFDKTIRYASRKAYAE

SEQ ID NO: 243545 - protein, 94 aa, Zea mays
  Clone ID: MRT4577_153697C.1.pep
FRAIWGDSGSRCDAQRSEELMCDDHWYCSSLYLQWLAAVLVLLHCSCFAHHLPLVFFDAALWRVDGVAIDCDRHPATRRRRRRQMRSILSSADS

SEQ ID NO: 243546 - protein, 508 aa, Zea mays
  Clone ID: MRT4577_153698C.1.pep
MHRARPTAHANDPDAPYAAAAAMLLEPKLEDEELPLQQLASPGTFVSLDQLMPPVTAPAEPRPLEALLHGPQLPPFLSKTYDLVNEPSLDGVISWGAAGNSFVVWDPSTFARDVLPHNFKHNNFSSFVRQLNTYGFRKVHADRWEFAHEDFLRDSKHLLKRIVRRRSSPTKQCSVQPGSSSGESSLDPELHTLRREKNALLEEVARLKQEHRQTIEQMSTLNHRLESAEDRQRQMVSFLAKLLQNPSFVRKLKLHREKKEIDSTRVKRKFLKHVPHGSVESGESSSQHAGESGSYFAVSSPMATTTSVHDDITELQNFLLEDDDLNFGMDSENTGLEGTEAPDDIGELIQGFDTQEELDLGSGAELQEMPPASGSLAQDPTIGRFKGKNVLCPGLDATSSEGDCLSPLPDNMGLLSGTMLGTAGSMMAADDEQIWGVDASAALQSSCSGTSQQAFGSHVSDPYLMDIANRPERFWELDFQALDEADLQLDKCAIDDPALQQQPSMKKP

SEQ ID NO: 243547 - protein, 33 aa, Zea mays
  Clone ID: MRT4577_153699C.1.pep
MAHGEVAKEDRIARPGRLRTLQDTRADSALGRQ

SEQ ID NO: 243548 - protein, 60 aa, Zea mays
  Clone ID: MRT4577_15369C.1.pep
IKQHTVVPSLLAHGLLIRINIKHPWMDALKHALLEQKLTRQLCQMHLKDLGSRNGLKQQE

SEQ ID NO: 243549 - protein, 82 aa, Zea mays
  Clone ID: MRT4577_1536C.1.pep
HHACAGTSVKGYATPKVCVTEEPFDRLWKGRSRLTSWCGEIVFAIAASKALIAGDRFLHGLLTYILHVLLLLICGNTPDLDK

SEQ ID NO: 243550 - protein, 106 aa, Zea mays
  unsure (1)..(106): unsure at all Xaa locations
  Clone ID: MRT4577_153700C.1.pep
ILGAQNPPSLQLKKLSRFVHFLRERPQVPXRQNLPGRLARVFLQVPPPQPFCRQDRKDGPCLHGQLVQQAPQLNXLLCTLQTELNKPHQFFFFFFNSWLPKLIFHG

SEQ ID NO: 243551 - protein, 80 aa, Zea mays
  Clone ID: MRT4577_153701C.1.pep
SSPGTASTRSRHTGPLPRPPPSPTTPACGGTPSARGTATPASDAFSLTHEDRVRCDTVQGTGNTESTRYTRLAPDAMRID

SEQ ID NO: 243552 - protein, 65 aa, Zea mays
  Clone ID: MRT4577_153702C.1.pep
AFFFFLFFFLLNTHTVFMTLRIFSVFPHMLMCVDLLGCSTLFIVCGGVAVFFHGHDSVVGLVGRV

SEQ ID NO: 243553 - protein, 146 aa, Zea mays
  unsure (1)..(146): unsure at all Xaa locations
  Clone ID: MRT4577_153703C.1.pep
KKKPPGGQWPPTWGPPPPKLGPPSPKTPPIGPPPVGPFGLPPNLKVRFLSLATARGSPVKFLVGSPFFPFRLLKKSFLGVGFFLKFWVSPPPPRGPFFSKTFFFKTPGLMFFFFKFNSFPRVLGQKKKKKKKKKKKKKKKKPRPPX

SEQ ID NO: 243554 - protein, 69 aa, Zea mays
  Clone ID: MRT4577_153704C.1.pep
HVAHLYKAATILLGVWQGAATDLGETKDEEASGTQLCLRGHTRSPSGPPSCCPATATPLLRSCSLARPT

SEQ ID NO: 243555 - protein, 46 aa, Zea mays
  Clone ID: MRT4577_153705C.1.pep
LMELIPKWVHMTDIQQKRGGFHEKMNEPSNILHKCSNGCKGIIYEL

SEQ ID NO: 243556 - protein, 62 aa, Zea mays
  Clone ID: MRT4577_153706C.1.pep
GVVGGVGSIVIGLPPFVMGRLNHLTSFLLGTGIGIGGVVVSRMLSEEKLWLRLNKRLDGRKR

SEQ ID NO: 243557 - protein, 387 aa, Zea mays
  Clone ID: MRT4577_153707C.1.pep
MGEPDACALWRALNAVAARQPLEIPEAEEFSARSPGAPDIVRAQGEGGAEAGGEADLGGAFGGRDPRDLSSGTVDHGPERVSILERLRPGFSFVCPDRDFSFLLSKRSHGLTDLAPRKALKTASASAAGAALGLAVQLTFSQGAPQRGAQAAPVAVERVPEAGSSAEAVIVLEEAASADVASGPPDMSPVLAPVAAEAAAVPVGERPVVADAEMAEASALGLAFWLLAELESALDESTRALTGAAEQREADHAAMSEAVSNFCQVFGFGDVPSGSSPQSRLQALGDHVHGRLREALHHGVRRAFAVLASHYVVDLERVSEGYCLPDEDEAALAEVQRLDAVAAGPSAVLATTFEAEILPPAPSSEAGVDFAEGGDEAEGAAPSAGGA

SEQ ID NO: 243558 - protein, 65 aa, Zea mays
  Clone ID: MRT4577_153708C.1.pep
PPPPPQAEHRGASSSRDRARSLRRPSRGLAVLGAPVGSFRQVPCEQRASNRNMRCGATRLGRRKS

SEQ ID NO: 243559 - protein, 282 aa, Zea mays
  unsure (1)..(282): unsure at all Xaa locations
  Clone ID: MRT4577_153709C.1.pep
WIPPVSGAAPXPPPGYIMSFVSFHERGFGVLASRFMRAILHHYRVELHNLSPNSISQAAIFEALCEGYLGIAPHWDLRTHLFFADLFASPTGERKVRQEPSSQPPSGLMPSVPGAGTPRSRPEERGQSKRVLDPSTRGVEVTPGSQAEASVPREPSPTPAAQESDPQVAVAVPGQSVSRASKAPKARVVPKLPARRTSAAPSGVEIRETSPQARLIMARSGSEGRRQLLRFRTREASDPFFVLDDEREEQSWGELREYAEATVGSLRSSLEVFCRDVPKILQ

SEQ ID NO: 243560 - protein, 59 aa, Zea mays
  Clone ID: MRT4577_15370C.1.pep
WGMGLAGYATLNIQTIKSNFMSNNERIYWFLRNILGPVMHINAQNACSPLCTLIKTFPS

SEQ ID NO: 243561 - protein, 79 aa, Zea mays
  Clone ID: MRT4577_153710C.1.pep
RSSVGVRVRVLEHPSPPPLVEEEEKARAREERNVVFSLSTPPAPMPLPVVSGLPSTGVQRRVLVGLCAAVSSSQGLVPN

SEQ ID NO: 243562 - protein, 892 aa, Zea mays
  unsure (1)..(892): unsure at all Xaa locations
  Clone ID: MRT4577_153711C.1.pep
MADRVTIISPRDPWPFSTVTAGDLEDLVAEGLLRPLSDERQPEWIPPASGAAPSPPPGYIVSFVSFHERGFGVPASRFMRAILHNYGVELHNLSPNSISQAAIFVAVCEGYLGIAPHWDLWTHLFSAELFASPTGERKVRAAVRAGGCILQLRQSRASLYIPAILASSNKGWQRRWFYLRNDGELLPPFSQRVVTVAADAWRHGTPHERQKNLEPLLKALEALRKGGLTAVGVIAAIHRRRVLPLAERRLPLWEMTPEADLEGSRMSSDPLPFDVLHRRVAVTLGKPDTSAFSQPLMRPDQGCVTLEVGWHKPSWPRVPEDAVDRAARRVAAEEKKKKKDPEKARARERMRARDALEKLRRRQEREGLPREPSPETPDDDDDDEDDDEDDDMAARLGFSPGLRLGLESSSQPPSGLAPAXGSPSPGRPRCSXARVVPKLTARQTSAAPSGVEIRETSPQAQLIMARSGXAIVLVEAADADVASAPPDMPPVLVPVATEAVAVPVGERPVAADAEMAEASALGASEEGGVETRSVPPSGSLVPARRSSEGRRQLLRFRTREASDPFFVLDDEREEQSWDELRECAEATVGSLRSLLEVFCRDVPKILQDLTDLSAAKSSFIRHEVDIWGSLRSLRTSLAGATARLSQQGTEVADFRLLCADLRAEAAAARAEAAAARAEVRRQQSEFDQVINERDQSRGRAAEAESRAGALAADLAVAQVAASEQRARAGELESALDESAEAHAEALAGAAEQRKADHAAMFEAVSDFCRVFGFGDVPSGSSPQSRLQALGDHVRGRLREALHHGVRRAFAVLASHYVVDLERVSKGYCLPDEDEAALAEVQRLDAAAAGPSAVLATTIEAEILPPAPSSEAGVDFAEGGDEAEGVAPSPGGA

SEQ ID NO: 243563 - protein, 847 aa, Zea mays
  Clone ID: MRT4577_153712C.1.pep
MDSPVGGAAPSPPPGYIVSFVSFHERGFGVPASRFMRAILHHYGVELHNLSPNSISQAAIFVAVCEGYLGIAPHWDLWTHLFFAELFASPTGEKRVRAAVRASGCTLLLRQSRASLYIPAILASSNKGWQRRWFYLRNDGGLTAAGVIAAIHRRRVLPLAERRLSLWEMTPEADLEGSRMSSDPLPFDILHGRVSVALGKPDPSAFSQPLMRPDQGCVTLEVGRHKPSLPRVSQDAMDRAARRVAAKERKKKKDAEKARDCERRRARDALEKLRRRQEREGLPREPSPEMPDDEDDDEDDDEEDDMAARLGLSPGLGLGKGPSSQPPSGLMPSVPGVETPGSRPEGRGQPERVLDPSAGGAEATPGSQAEASAPREPPPAPAAQGSDPQVAVVAPGQSASRASGVPKARVVPKLLAKRTSVAVPGAEIQETSPQARLIMARSGKRSHGLTDLAPRKALKTAPACAASATPGLAVQLTSSQGAPQQGAQAAPVAVERVPEAGSSAEAAIVIGETADAGVAPCPPDVPAMPAPVATEVAVVPVAERPVAADAEAAEASALGASEERGVETRSVPPGGSLVVVRRSSEGRRELLRFRTREASDPFFVLDNEREDQSWDELRECAEATVGSLRSSLEVFCRDIPKILQDLTDRSAAKSSFIRREVDVWGSLRSLRTSLAGATARLSQQELESALDEFAQALAEALAGAAEQRETDHAAISEAVSDVYRVLGSGDVPSGSSPQSLLQVLGDHVRGRLREALHHGVRRAFAVLASHYVVDLERVSEGYCLPDEDEAALAEVQRLDAGAAGPSAVLATTFEAEILPPAPSPEVGMDFADGGDEAEGAAPSQGDA

SEQ ID NO: 243564 - protein, 570 aa, Zea mays
  Clone ID: MRT4577_153713C.1.pep
RLSKICLQEISIFDQISFEKWSYPLPTLIKEEVLPKICDLQDRFDQLNALNIQLETEVAVLKDGMKELDEDLGTSRSELQKKVSELEQLDQKFSSVKEKLSIAVAKGKGLIVQRDSLKQSLLEKSGEIEKLTQELQLKETLLKELEAKLKSYTEADRIEALESELSYIRNSATALRDSFLLKDSVLQRIEEVLEELDLPEQFHSRDIVEKIELLSKMAIGTPFTLPDGDKGSSVDGHSESGVAMNVIDDEQNSNSNSVSDEVKSKYEELNRRFCELAEQNNMLEQSLVERNSLIQKWEEVLGQISIPPQFRMLEAEDKLAWLGNRFLEVEQERDSLQLKIEHLEDSSEMLIADLEESHKRISELSAEVVAIKAEKDFFSQSLEKLRFEFLGLSEKVVQDEFVRDKLRMDLSELRDKFAEKSEESRHYHEMDTEVHKLLNLVQNTLQDSTNSEISSGGISAVLCLGKMLKKLLDDYGTLLYKSTEGNFAERDIQLEDIKPSKDASKSDTGAYEKEMELNSLNNELDHAHNNLALAQQECDEAVEKAQSLMMEIETLHAQISKLQESDAEQM

SEQ ID NO: 243565 - protein, 647 aa, Zea mays
  unsure (1)..(647): unsure at all Xaa locations
  Clone ID: MRT4577_153714C.1.pep
MTPEADLEGSRMFSDPLLVDDLHRRVAVTLGKPDAGALSQPLMRPDRGCVSLEVGCHKPSRPPVPEDAVDRVARRVAAEKRKEKKDAKKARAHERTRARDALERLRRRQERDGLPREPSPETLDDDDDDEDDDEDDNMAARLGLSPGLRLGQESSSQPPSGLAPSVSGAGTPGSRSEERGQTEGVLDPSAGEVEVTPGSQAELPVPREPSPVPASXGGDPQXKRTHGPTDLAPRKVLKTASASAAGAAPGLAGQLTSSQDAPQRGAQAAPVAVERAPEAVSSVEAAIALGEAASAAVASGPPDMLPAMAPAAVEAVAVLAVERPIAADVEMTEASLLGASEEGGAGPRPVPSSDSLVPARRSSEGRRQLLWFRTREASDPFFVLDDEREEQSWDELRECAEATVGSLRSSLEVFCRDVPKILQDLTDLSAAKSSFIRREVDVWGSLRSLRTSLARAIARLYQQSTEVADLRLLCADLGAEAAVARAXELESALDKSTRALAAGXTELREANHVAMSEAISAFCRVFGFDDVPSGSSPQSRLQALGDHARGRLCEALHHGVRRAFAVLASHYVVDLERVSEGYCLPDEDEASLAEVQRLDATAAGPSAVLATTFEAEILPPAPSSEAGANFAEGGDEAEGAAPSPGNA

SEQ ID NO: 243566 - protein, 105 aa, Zea mays
  Clone ID: MRT4577_153715C.1.pep
MDAGRKRAVPEGTNGGAAVKRARESESVQTGVGSKSKPCTKFFSTAGCPFGSSCHFLHNFPGGHQAVSKMTNLGGPAVSAPQGRMPMGPGVPDGPPTPSLKTRLC

SEQ ID NO: 243567 - protein, 914 aa, Zea mays
  Clone ID: MRT4577_153716C.1.pep
MADRVTIVPPRDPWPFSTVTTEDLEALVAEGLLRLLSGDSQPEWMPPPSGAAPSPPPGYVVSFVSFHERGFGVPTSRFMRAILHVYGVELHNLSPNSISQAAIFAAVCEGYLGIDPHWDLWTHFFSAELFASPTGGRRVRTAVRAGGCILQLRQARAPQYIPAILASSNKGWQRRRVAVTLGKPDAVALSQPLMRPDRGCVSLEVGHHKPSRPPVLEDAVDRAARSVAAEKRKEKKDAKKARARERTRARDALEKLRRRQERDGLPREPSSETPDDDDDEDDDEDDDVAARLGLSPDLRLGLGSSSQPPSGLVPSVSGAGTSGSRSEERGRTEGVLDPSAGEVEVTPGSQAELPVLREPSPVSAAQEGDPQVDVAAPGQSVSRAPRAPKERMVPKVAARQTSVVPLGVEVRETSPQARLIMARSGKRSHGPTDLAPRKVLKTASASAASVAPGLAGQLTSSEDAPQRGAQAAPAAVERAPEAGSSVEAVVALGEAAGAAVASGPPDKLPALAPAAAEAVAVLAVEPPVAADAKMAEASLLGASEEGGAGPRPVPSSGSLVPARRGSEGRRQLLRFRTRGAPDPFFVLDDEREEQSWDEFRECAEATVGSLWSTLEVLCRDVPKILQDLTDLSAAKSSFIRREVDVWGSLRSLRTTLARATARLSQQSAKVADLRLLCADLGAEAAAARAEAQRRQSELDQVTGERDQSRGRAAEAESRAEALGVQLAEASARAGAFAADLAVAQAASSEQRARAGELEAALDKSTKALAQAAEQREADHAAMSEAISAFCRVVGFDDVPSGSSPQSHMQALGDHARGRLREALHHDVRRAFVVLASHYVMDLERVSEGYCLPDEDEAALAEVQRLDAAAAGPSAVLATTFEAEILPLAPSSEAGVDLAEGGDEDEGAAPSPGDA

SEQ ID NO: 243568 - protein, 826 aa, Zea mays
  unsure (1)..(826): unsure at all Xaa locations
  Clone ID: MRT4577_153717C.1.pep
MADRVTIIPPRDPWPFSTVTAGDLEDLVAEGLLRPLSDERRPEWIPPVSGAAPSPPPGYVVSFVSFHERGFGVPASRFMRAILHHYGVELHNLSPNSISQAAIFVAVCEGYLGIAPHWDLWTHLFFAELFASPTGERKVRAAVQAGGCTLLLRQSRALLYIPAILASSNKGWQRRWFYLQNDGELLPPFSQRVVTIAADAWRHGTPHERQKNLEPLLKALEALRKGGLTAAGVIAAIHRRRVLPLVERRLPLWEMTPEGDLEGSRMSSDPLPFDVLHGRVAVALGKPDPSAFSQPLMRPDQGCVTLEVGWHKPSLPRVPQDVVDRAVRRVAAEEKKKKKDAEKARARERLRARDALEKLCRRQEREGLPREPSPETPDDDDDDEDDDEEDDMATRLGLSPGLGLGRELSSQPLSGLMPSVPGAGMPGSRPEERGQSERVPDPSAGGVEATPGSQAEASVPREPSPTPAVQESDPQVAVVVPEQSVPRAPKAPKARVVPKLPAKRTSAAPSGVKTREISPQARLIMARSGXFCRDVPXKILQDLTDLSAAKSSFIRREVDVWGSLRSLRTSLAGATARLSQQGAEAADLRLLCTDLRAEAAAARAEAAAARAEVQRLQSEFDRIVNERDQSRGRAAEAESRAGALAADLSVAQVAASEQRARAGELESALDESAKALAEALAGAVEQREADHAAMSEAVSDFCRVLGSGDVPSGSSPQSRLHVLGDHVRSRLREALHHGVKRAFIVLASHYVVDLERVSEGYCLPDEDEAALAEVQRLDAAAAGPSAVLATTFEAEILPPAPSSEAGMDFAEGGDEAEGAGPSRGDA

SEQ ID NO: 243569 - protein, 143 aa, Zea mays
  unsure (1)..(143): unsure at all Xaa locations
  Clone ID: MRT4577_153718C.1.pep
EVLLTHGDEPWIRRLCALVQSXARKRVLGICFGHQVLCRALGGKVGKARNGWDVGVRXDVCARPPXGLAFPGDLVEELELPRSASLVEVHQDEVWEIPPAVTMLAYSEKTXVEVFAVGEHALGVXGHPEYLSNPTHLIDSLPT

SEQ ID NO: 243570 - protein, 678 aa, Zea mays
  Clone ID: MRT4577_153719C.1.pep
MTWRTSLLRVYFALSLMRGSRSGFPPERNRPVPAAGEVGCHKPSRPWVPEDTVDRAARRVVAEEKKKKKDVKKARARERTRARDALEKLRRRQERDGLPREPSPETPDDNDDDEDDDEDDDMAARLGLSPGLRLGQESSSQPPSGLAPSVPGVGTPRSRPEEQGQSEGVLDPSAGEVEVTPGSQAEVPVPRRPSLVPAAQEGDPEVAVAAPGQSGSRASRVPKARMVPKLAAGRTSAVPSGVEIRETSPQAQLIMARSGKVLKTASTSAAGAAPGPAVQLTFSQDAPQRRAQAAPVAVERVPEVGSSVEAAVALGEAAGADVASGPPDMPPALAPAAAEAAAVLVGERPVTADAEMAEASPLGASEEGGVETRPVPPSGSLVPARRSSEGRRQLLWFRTREASDPFFVLDDEREEQSWDELRECAEATVGSLRSSLEVFCRDVPKILQDLTDLSAAKSSFIRHEVDVWGSLRSLRTSLAGATARLSQQGAEVADLRLLCADLRAEAAATRRGLALWLFAELESALDESTRALAQAAEQREADHAAMSEAISDFCRVFGVGDVPSRSSPQSRLQALGDHVRDRLREALHHCVRRAFAVLASHYVVDLERVSEGYCLPDEDEATLAEVQRLDAAATGPCAVLATTFEAEILSPAPSSEAGVDFAEGGDEAEGAAPSPGDA

SEQ ID NO: 243571 - protein, 151 aa, Zea mays
  unsure (1)..(151): unsure at all Xaa locations
  Clone ID: MRT4577_15371C.1.pep
HEGAKALDVGSGSGILTACFARMVXXVGKVIGIDHIKELVDDSINNVRKDDPVLLSSGRVQLVVGDGRMGYAEEAPYDAIHVGAAAPVVPQALIDQLKPGGRLILPVGPAGGNQMLEQYDKLQDGSVKMKPLMGVIYVPLTDKEKQWSRWK

SEQ ID NO: 243572 - protein, 570 aa, Zea mays
  unsure (1)..(570): unsure at all Xaa locations
  Clone ID: MRT4577_153720C.1.pep
MTPEADLEGSRMSSDPLPFDVLHGRVAVALGKPDPSAFSQPLMRPDQGCVTLEMGWHKPSLPRVPQDAVYRAARRVAVEEKKKKKDAEKARARERMRARDALEKLRRRQEREGLPREPSPKTPDDDDDDEDDDEEDDMAARLGLSPSLGLGQGPSSQPPSGLMPSVPGVGTPGSRPEERGQSERXPKARVVPKLPAKRTSAAAPGVEIRETSPQARLIMARSGXAQAAPVAVERVPEAGSSAEAAIVLGEAADADVAPGPPDVPAVPTPVATEAAAVPVGERPVAADAGTVEASALGASEEGGVETRSVPPGGSLVAVRRSSEGRRQLLRIRTREASDPVFVLDDEQEDQSWDELRECAEATVGSLRSSLEVFCRDVPKILQDLTDLSAAKSSFIRREVDVSGSLRSLRTSLAGATVRLSQQGAEVADLRLLCTDLRAEVAAARAEAAAARAEAQRQQSEFDRVVKERDQSRGRAAEAESRAETLAADLAVAQVTASEQRARAGELESALDESAKALAEALAGAAEQREADHAAMSEVVSDFCRVLGSGDVPSGSSPQSRLQVLGDHVRG

SEQ ID NO: 243573 - protein, 153 aa, Zea mays
  Clone ID: MRT4577_153721C.1.pep
PTLPRRRPVDSFRRAGMPLDSLMCNAAIYRATARTPTFSTDGYERSVGVNHVDDLLLERLLLDDMQKNDYPDRRLVILGWMTGNTNTVAGNIPPKDGLGDLREPQVGLRGQNGSAMIDGYESFDGVKEYRDSMICNMLTMDDLQRKYHEETGI

SEQ ID NO: 243574 - protein, 174 aa, Zea mays
  unsure (1)..(174): unsure at all Xaa locations
  Clone ID: MRT4577_153722C.1.pep
MTLSLCTRLNEYGNDHLLRNVVFPMKSKFLKYWRDIPMLYAFAFILDPRAKIRGFHNNLRILSGLTGTDYSTFYSNVKSELSVMFTKYDDKFGAVKLXAHSYNIYXLVRGNNSGAGSMDLKMSILPPNLSRGTLASELLPTASSDACISSVDSELSSYLDSDTLXKFDDDFNPL

SEQ ID NO: 243575 - protein, 93 aa, Zea mays
  unsure (1)..(93): unsure at all Xaa locations
  Clone ID: MRT4577_153723C.1.pep
DLVAVLTHKGRSAASGLYVGWVKQDSRKWIXFDDATPLSRKEESILGPSSADGWPMAYLSLFKAVHGELQKMGRTGFCFFVLRLLTLVCPAPE

SEQ ID NO: 243576 - protein, 83 aa, Zea mays
  Clone ID: MRT4577_153724C.1.pep
ARRGAVSWGGGGGKKKESVVAACCPFEMRALSVAGGSRGSAVTVGLDPLVATIPSGCVGTPSGVSAVGCGRAGRYAEQCFIVG

SEQ ID NO: 243577 - protein, 74 aa, Zea mays
  Clone ID: MRT4577_153725C.1.pep
QYLSFVTGNGNIIKSHLQCFKVSVVHGVYIEKSLKILMCIYEHNCSTYDKAHGTKEITKDMVSKHLIVYYLTIK

SEQ ID NO: 243578 - protein, 413 aa, Zea mays
  Clone ID: MRT4577_153726C.1.pep
ETLEIKLAAANEKLKRSNMTASETMTEYENMKKMLESVQSRLEEAEQTILEGENLRKKLHNTILELKGNIRVFCRVRPLLPNESGAVSYPKNGENLGRGIELLHNAQGYSFTFDKVFDHSASQEHVFIEISQLVQSALDGYKVCIFAYGQTGSGKTYTMMGNPELEDQKGMIPRSLEQIFQASQTLNSQGWRYKMQASMLEIYNETIRDLLATNRMAAQDVGASKYSIKHDTNGNTNVSDLTIIDVTSINEVSSLLRRAAQSRSVGRTQMNEESSRSHCVFTLRIFGVNEGTDQQVQGVLNLIDLAGSERLNKSGATGDRLKETVAINKSLSCLSDVIFSIAKKEEHVPFRNSKLTYLLQPCLGGDSKTLMFVNLSPEASSTGESLCSLRFAARVNSCEIGIPRRQTQMRSSQ

SEQ ID NO: 243579 - protein, 682 aa, Zea mays
  Clone ID: MRT4577_153727C.1.pep
EDESKPKDVAKQTVNGDVTIADEGSQKSQDSSSKTKPGKSVLIKQEERETGVVSARVLSRYKNALGGIWVVSILFFCYALTEVLRISSSTWLSIWTDEGSLKIHGSGYYNLIYGILSFGQVLVTLARAGWLIISSLRAAKRLHDAMLRSILRAPMVFFHTNPLGRIINRFSKDMGDIDRNVAVFVNMFMAQISQLLSTFVLIGFVSTMSLWAIMPLLILFYAAYLYYQATSREVKRLDSITRSPVYAQFSEALNGLSTIRAYKAYDRMANINGRSMDNNIRFTLVNMGANRWLAIRLETLGGIMIWFTATFAVMQNQRAENQKAFASTMGLLLTYTLNITNLLTAVLRLASLAENSLNAVERVGTYIELPSEAPPVIEDHRPPPGWPSSGVIKFEDVVLRYRPELPPVLHGISFVINGSEKVGIVGRTGAGKSSMLNALFRIVELERGRILIDDCDTSKFGIWDLRKVLGIIPQAPVLFSGSVRFNLDPFNEHNDADLWEALERAHLKDVIRRNSLGLDAEVSEAGENFSVGQRQLLSLARALLRRAKILVLDEATAAVDVRTDALIQKTIREEFKSCTMLIIAHRLNTVIDCDRLLILSSGQVLEFDSPENLLSNEGSAFSKMVQSTGPSNAEYLKSLVFASGEERSRREEIKVQDIQRRWVASNRWAEAAQFALAICLTL

SEQ ID NO: 243580 - protein, 82 aa, Zea mays
  Clone ID: MRT4577_153728C.1.pep
GFTTPKTVFLGGGGSHQNGLNKNDWVRGHWSSPPLIEKIHHFLVLFGDPFKHYWVDTNPGETQKPPHGNGRVLWGFAILLGP

SEQ ID NO: 243581 - protein, 74 aa, Zea mays
  Clone ID: MRT4577_153729C.1.pep
VSRVYQKNVCLGGHKQMRRVQDLCQVGIFPLNRDCGQVEILTFLHTHVGEHPLAQIRAAHKKGIRVTRNKRWPP

SEQ ID NO: 243582 - protein, 56 aa, Zea mays
  Clone ID: MRT4577_15372C.1.pep
FFFFFFFFFFFCFFFFFFFFFFFGGKLWKNFTDLNPLPKPKFLFYKINPLFGTGNI

SEQ ID NO: 243583 - protein, 87 aa, Zea mays
  unsure (1)..(87): unsure at all Xaa locations
  Clone ID: MRT4577_153730C.1.pep
KRISATFSSHXNELIALFSFYFHHGKKILXXHXXLSLFYSLFYIYKEKYAPFEDILRAAQEAIVLPPWVALAIRPRPGVWDYIRVNV

SEQ ID NO: 243584 - protein, 76 aa, Zea mays
  unsure (1)..(76): unsure at all Xaa locations
  Clone ID: MRT4577_153731C.1.pep
VLFVVYGGVFSGVKSLRQEVNFFLVVQLDEWLGWCKIQLLQFALSTYVTPGVAMTGEVPAYIVSKGXSRKRSGKAC

SEQ ID NO: 243585 - protein, 34 aa, Zea mays
  Clone ID: MRT4577_153732C.1.pep
RANEVRVQRSSFLEEVCGFPEIRKSISKAWAYAP

SEQ ID NO: 243586 - protein, 99 aa, Zea mays
  Clone ID: MRT4577_153733C.1.pep
PDRIFLSSIGLPLFGSQGLSSPKKRVSTRGTLGGQSGYLKVWVKTFGIPLSNCPVQRLLASVTKAGDPELWGGLWPPKRLSPKSEFLPFYFHLRLSSFW

SEQ ID NO: 243587 - protein, 83 aa, Zea mays
  Clone ID: MRT4577_153734C.1.pep
RRQLGKQVAERTTGSVKQGARAGTESMFLKLENVSVSSSRSWSAVSSPCATATQRRQPRSKCLWKQCESCGFPITFLHSYMGL

SEQ ID NO: 243588 - protein, 71 aa, Zea mays
  Clone ID: MRT4577_153735C.1.pep
MHAYVSSEFGSRHRRRIKLKQGDFAHKAFGATESDIEETLKRLVLQLGKAREEVFDALKNQTGDLVFNGQP

SEQ ID NO: 243589 - protein, 59 aa, Zea mays
  Clone ID: MRT4577_153736C.1.pep
ASGNKRRVLFFFFFFFFFLQSSVNSMGYCSSIYRQPQWFIRYYIYALNDYIQSLQNITR

SEQ ID NO: 243590 - protein, 774 aa, Zea mays
  unsure (1)..(774): unsure at all Xaa locations
  Clone ID: MRT4577_153737C.1.pep
MGTSGSKGIDGVGAVSGVGAGAAGLGGVGAGGDGGEGAAAEAWHGGAQLYVSLKMENALISGDLVPHVYGSEPIIGTWDPSRALAMERELASMWVLSFVVPPDHETLDFKFLLKPKDAETPCIIEEGPTRLLTGGMLEGDVRVALFKLNGDDEVLEFGVVNKADLVSPLELAASWRVYKENFQPSKVRGIPDISINVTPTNGAEEGSAATLELDLEHYVVPSPPTAPPNGYAANLAATPASVIQTEALLTNDILLSDGIQSPSSVSAKLEDCTNHKNIEAWATDSSKKIQNSGLIESKSVGTFTPMQKLDGQKGLFVDRGVGSSMLPKSASACSLASGFSFGSAKTMPEAAGAVAAAAVADRLHGSKEDRKLAIVLVGLPARGKTFTAVKLTRYLRWLGHETRHFNVGKYRRLKLGANQSADFFRDDNPEGIEARNEVAALAMEDMIDWMNGXGGQVGIFDATNSTRKRRYMLMKMAEGNCKIIFLETICNDPNIIERNIRLKIQQSPDYAEQLDYEAGLEDFKERLINYEKVYEPVGEGSYIKMIDMVKGQDGQLQVNNISGYLPGRIVFFLVNSHLTPRPILLTRHGESLHNVRGRVGGDTVLSETGELYAKKLANFIEKRLKCEKTATIWTSTLQRTILTASPIVGFPKIQWRALDEINSGVCDGMTYEEIKKIMPEEFESRKKDKLRYRYPRGESYLDVIQRLEPVIIELERQRAPVVVISHQAVLRALYAYFADRPLREVPEIEMPLHTIIEIQMGVTGVEEKRYKLMD

SEQ ID NO: 243591 - protein, 227 aa, Zea mays
  unsure (1)..(227): unsure at all Xaa locations
  Clone ID: MRT4577_153738C.1.pep
SGMFCWAHSLFPTLCAKSSGNPLARDLVLQLLERXTERFEAAYPMIKELALAGPPGSKTVKQASQQLLPLCAKAMQENNAELTREAVDVFIWCLTQNAESYKQWERIYLENIEASVAVLSKVVIDWRVVSSKLSSEALKATVKNFKAKNEAALESTTDAGKQASIKEADKHCKVILGKLARGSTCLKSSLVGIALAVAASLVLSSPDMDLPLEWEKIQAMVSSHLSF

SEQ ID NO: 243592 - protein, 136 aa, Zea mays
  unsure (1)..(136): unsure at all Xaa locations
  Clone ID: MRT4577_153739C.1.pep
GYAANLXATPASVIQTEALLTNDILLSDGIQSPSSVSAKLEDCTTHKNIEAWATDSSKKIQNSGLIESKSVGTFTPMQKLDGQKGLFVDRGVGSSMLPKSASACSLASGFSFGSAKDHAQFGFIIINMSSMKLVLL

SEQ ID NO: 243593 - protein, 45 aa, Zea mays
  Clone ID: MRT4577_15373C.1.pep
AHCLAELNTMPYETICERSKYLAGLFNIATKHITVGCNHNIQENM

SEQ ID NO: 243594 - protein, 56 aa, Zea mays
  Clone ID: MRT4577_153740C.1.pep
DSPPPCTVVMGFTLEPLGGGSLLKFLVLPGSCPVSAPSALHCFPFIGPKVPLNPTK

SEQ ID NO: 243595 - protein, 91 aa, Zea mays
  Clone ID: MRT4577_153741C.1.pep
KLLQQIVPALTQLIVANPVAYLQKMFPFNQLIMSNFVGALQQRHQLFNPLAGGNPLVVAFLKKQQLLPNNRFFLKKPVLSRQQPIVGGALF

SEQ ID NO: 243596 - protein, 435 aa, Zea mays
  unsure (1)..(435): unsure at all Xaa locations
  Clone ID: MRT4577_153742C.1.pep
MAMDDLAGASSSSSMAAAASSDPSHGWQTVSYPKRNRKQAQPPRTTAPDLALQSNGKPGGVFDAVEKRSQERHRALQQQLASRAADLDDARIAAATGAAYSDDDDSDEAAAPRQEGEVKKPKKPKVKKPKVTVAEAAVLIDAENLAAHLFEISASYENQQDIQLMRFADYFGRAFAAVSASQFPWAKMFKESTVSKMVDIPLCHISEAVIKTVSDWISQRSSDALGDFVLWCIDSIMSELSGPSAGPKGSKKVAQQSPRAQVAIFVVLAMTLRRKPDVLVNVMPKIMGNNKYLGQEKLPIIVWVIAQASQGDLVSGMFCWAHSLFPTLCAKSSGNPLARDLVLQLLERILSVTKARSILLNGAVRKGERLVPPVSFDLFMRATFPVSNARVKATERFEAAYPMIKELALAXPPGXKTVKQXITQLLLCVQSMQET

SEQ ID NO: 243597 - protein, 83 aa, Zea mays
  unsure (1)..(83): unsure at all Xaa locations
  Clone ID: MRT4577_153743C.1.pep
AKLPPGGPFAPLGLARAPARAPFLRVKGFKTGRLPFFSMLAFFIRAXVPGEGPVGTLARPLRAPLGNNLFPVFSGPPEGPPPL

SEQ ID NO: 243598 - protein, 112 aa, Zea mays
  Clone ID: MRT4577_153744C.1.pep
KQKMFLFSPLLVANAPKNLQQKLLQQIVPALTQLVVANPVAYLQQLFPFNQLNMWNFVGGLQQRHQFLNPLAVGNPLVGAFLKKQQLLPNNRFFFINPVLSRQQPIVGGAIF

SEQ ID NO: 243599 - protein, 448 aa, Zea mays
  unsure (1)..(448): unsure at all Xaa locations
  Clone ID: MRT4577_153745C.1.pep
VAAAAVADRLHGSKEDRKLAIVLVGLPARGKTFTAVKLTRYLRWLGHETRHFNVGKYRRLKLGANQSADFFRDDNPEGIEARNEVAALAMEDMIDWMNGGGQVGIFDATNSTRKRRYMLMKMAEGNCKIIFLETICNDPHIIERNIRLKIQQSPDYAEQLDYEAGLEDFKERLINYEKVYEPVGEGSYIKMIDMVKGQDGQLQVNNISGYLPGRIVFFLVNSHLTPRPILLTRHGESLHNVRGRVGGDTVLSETGELYAKKLANFIEKRLKCEKTATIWTSTLQRTILTASPIVGFPKXLVTRFRSLLKELLLCKYSKIARLVLFXIQWRALDEINSGVCDGMTYEEIKKIMPEEFESRKKDKLRYRYPRGESYLDVIQRLEPVIIELERQRAPVVVISHQAVLRALYAYFADRPLREVPEIEMPLHTIIEIQMGVTGVEEKRYKLMD

SEQ ID NO: 243600 - protein, 75 aa, Zea mays
  Clone ID: MRT4577_153746C.1.pep
VFFNSLYRVVIFISKLCSRFVIVKPKFSFPSKHAGLFVGLPPKGVAEIIKLAATFVYKVFGQLLNKAAEVILKKA

SEQ ID NO: 243601 - protein, 94 aa, Zea mays
  unsure (1)..(94): unsure at all Xaa locations
  Clone ID: MRT4577_153747C.1.pep
PSSHPSVYRLTNSLQSRLRLLPRTAARGDAGKIKKGNSGNCTLSVLAPIPLLFSPPELSSLMSEPSPLDGSYNLDPRLPTRPPTRPXTRXXTRG

SEQ ID NO: 243602 - protein, 140 aa, Zea mays
  Clone ID: MRT4577_153748C.1.pep
KFAVEEILRRWKSESGHKRRSLGGSPRFKRAAAHRREDSHATDMISDASDRPPKPTLSIGQILSMKLMGPDGYDKSVWDDKTGEIPEISLGQIINRSGVLCREDVAARRRISGKRKKFALTGLSVLLAKQSKNKKKRESF

SEQ ID NO: 243603 - protein, 52 aa, Zea mays
  Clone ID: MRT4577_153749C.1.pep
QSQNLNMTPICSKFRGSLEFCDASPGLCLFGWLVYAQVNGSRGGSCGFTGLC

SEQ ID NO: 243604 - protein, 95 aa, Zea mays
  unsure (1)..(95): unsure at all Xaa locations
  Clone ID: MRT4577_15374C.1.pep
MDWTWRILFLXVAAATGAHSQVQLVXSGAEVKKPGASVKVSCKASGYTFTDYFMNWMRPAPGQRLEWMGWINAGNGNTKYSQKLQGRVTITRDTS

SEQ ID NO: 243605 - protein, 56 aa, Zea mays
  Clone ID: MRT4577_153750C.1.pep
ICHLPKLEYRHQHSAIQMNLQLYLLMTTMLVLAKLRIQKTLGPLQESRTQNRYAIR

SEQ ID NO: 243606 - protein, 178 aa, Zea mays
  unsure (1)..(178): unsure at all Xaa locations
  Clone ID: MRT4577_153751C.1.pep
KKKKKKKKKKKKKKKKKKKKKKKKKKFDLRPVTPLGAIFAGFFSLVGPVGGAFWGPFLPFRGPFYFSLAFFLPRGVWETLGVAPFFPFAEFPLFAGWFXAQGACPVRLSHRFFFLFGDWPXPCGGAFCAGGLGVPPRVTVPLAWAFFPPLFAFFFSFFPPFAGFPRQVFSWGFLWGFL

SEQ ID NO: 243607 - protein, 191 aa, Zea mays
  unsure (1)..(191): unsure at all Xaa locations
  Clone ID: MRT4577_153752C.1.pep
MAMGKAGAPRASAAQLAALGISLLCAVAGPAAAHNCDCQTNVCCNKIGYCDTTDEYCGDGSQSDPCRSDGGGGGKGGDEANVTSVFTSSFFNGINNHAGSGXCEGKNCYTRSAFLSDGKEYPRFAHGGTQEHGKREIAVFFAHATHETGHFCYISEINKSNGYCDPTNRQWTCASGQKYYWCGPLHISWNY

SEQ ID NO: 243608 - protein, 137 aa, Zea mays
  Clone ID: MRT4577_153753C.1.pep
STSEAVSLVATAWRQGHRAIGAITQPELKIFRVEGLQNKGGQALEAAVRISKRCQDLIYHQVKEDRIFTQNIQRDLSVQRRYIIGLHPSFPSREIFFFICKFFLPYLLFRNKNSCSGVRSFVRKKKKKKRPLFFFFF

SEQ ID NO: 243609 - protein, 575 aa, Zea mays
  Clone ID: MRT4577_153754C.1.pep
MAAQVVAAAGTPVARPLGGGSGADALRPAATMPRERRTGAVAARGRRESQVVSVISRAPRPDAGVLPVSPDDDAAVKEEANFQHLKAIQQLATAANGVWSKPNVRRKTKIVCTIGPSTNTRDMIWKLAETGMNVARLNMSHGDHASHQKVIDLVKEYNASHADNVIAIMLDTKGPEVRSGDLPQPIFLESGQEFTFTIKRGVGTDTCVSVNYDDFVNDVEVGDMLLVDGGMMSFLVKSKTEDSVKCEVIDGGELKSRRHLNVRGKSATLPSITDKDWDDIKFGVDNQVDYYAVSFVKDAQVVHELKDYLKSCNADIHVIVKIESADSIPNLHSIITASDGAMVARGDLGAELPIEEVPLLQEEIIRMCRSMGKAVIVATNMLESMIVHPTPTRAEVSDIAIAVREGADAVMLSGETAHGKFPLKAVKVMHTVALRTEATIPGGETPADLGQAFKNHMSEMFAYHATMMSNTLRTSIVVFTRTGFMAILLSHYRPSGTIFAFTDEERVRQRLALYQGVCPVQMEFSDDAEKTFGNALSYLLKHGMVKDGEEVALVQSGKHPIWRSQSTHNIQVRKI

SEQ ID NO: 243610 - protein, 94 aa, Zea mays
  Clone ID: MRT4577_153755C.1.pep
GPLVFIGEWVNEWDVQNASQYEYQKFGSAQLDVYANATFGWSYWTLKNDMIHWDFEWNIKNKYLLFSGSSMLKTPSFLLLLALGWGIHLIIMPR

SEQ ID NO: 243611 - protein, 111 aa, Zea mays
  unsure (1)..(111): unsure at all Xaa locations
  Clone ID: MRT4577_153756C.1.pep
MLAVFSAQVVEVPAALLAAGSRTPSPTTKVSHLVXRFLAASEPAVSVQFGHHSHLAYFHTNHALLRPRSFAAQDQVFXLIERVLHTLSRLNHAHGLSCKGANEVLLAMDAY

SEQ ID NO: 243612 - protein, 75 aa, Zea mays
  unsure (1)..(75): unsure at all Xaa locations
  Clone ID: MRT4577_153757C.1.pep
GKGIQETPLGEEGALESPYFSLVLLGGLKKNSLATSTQGRRAGRGNALEKIALYIHRGIFIAHKLGMIRPPAXEP

SEQ ID NO: 243613 - protein, 72 aa, Zea mays
  Clone ID: MRT4577_153758C.1.pep
LHKKIFFVKHSTFTPPNPCLGSHINLYNTTSRLYKLSKTHYTLYKPKGPNNHWLTFLTFFSVSLEKLFKLQN

SEQ ID NO: 243614 - protein, 496 aa, Zea mays
  unsure (1)..(496): unsure at all Xaa locations
  Clone ID: MRT4577_153759C.1.pep
MGKQQQAPPARRSPAMSAPPPPKRRKKKGRPSLLDLQKRSLRLEQQQLPQGRRSNRRSAGSADEDDDGPASGSGRREKKLRLVMGLHDGSAKGEKMRKATDGREEPSDSGPTTPLPNKKLLLFILDRLQKKDTYGVFSEPVDPEELPDYHDIIKHPMDFSTIRKKLDKEAYFNLEQFEDDVFLITSNAMCYNSPDTIYYRQARGIQEIAKKDFENLRQDSDASEPEPEPEREPKPEPEPEEPKPQPRRGRPPNKNNAKQKVGKPPAERATADFSGATLATAANIGRHAQADVDLSRRVMDKAMIADVLRASFANLRNEHNWSGERKFEXLKLTQVMGVHXAKTGKRPILMEDSRRSTYYETQPSSSIYELPVSSSYNGTEKLLVPVGVQLPQSYSHSLARFAAQLGPVGWEIASRRLERSLAPGTKFGRGWVGDGETPPNPFQTPVLAAFSETMAPPSSIAASGEQPSMKSPTHKQACTGSISHRLGSPELNVPLR

SEQ ID NO: 243615 - protein, 93 aa, Zea mays
  unsure (1)..(93): unsure at all Xaa locations
  Clone ID: MRT4577_15375C.1.pep
WTYIYVITRRRGGDDHTDTWLKSRHMFHRGCNPTIXVDMVLIDESYARGAVPSGASTGIYDALELRDGGSXYLGXGVVKAERNVNNIFVPINC

SEQ ID NO: 243616 - protein, 41 aa, Zea mays
  Clone ID: MRT4577_153760C.1.pep
EGCEHAASHFRVGCPINHLARRLPVRVRLLPQEMQLNVSVD

SEQ ID NO: 243617 - protein, 88 aa, Zea mays
  Clone ID: MRT4577_153761C.1.pep
MSDDGQELVTKPFKFVTAGTDARFPNQNQTKHCWQNYVDYHKCILAKGEDFAPCRQFWLSYRSLCPSGWYQRWDEQREAGNFPVKLDA

SEQ ID NO: 243618 - protein, 100 aa, Zea mays
  Clone ID: MRT4577_153762C.1.pep
RAARAARAPGEDPLFLESFPRPRLPIHEKELYTLPSKHLGNLFFQPYISLKTNSSNVLLKTTLSKKSTIPSTLLQNIHFRMSFFSDIFNFLSQELFELNT

SEQ ID NO: 243619 - protein, 105 aa, Zea mays
  Clone ID: MRT4577_153763C.1.pep
MVRKAKVEFDERPPDDFDPKNPYGDPVAMLGYREHLVREKWIQIETAKIIRDRLRWCYRIEGVNHHQKCRHLVDQYLESTRGVGWGKDHRPADLHEPKKVVEVEE

SEQ ID NO: 243620 - protein, 109 aa, Zea mays
  Clone ID: MRT4577_153764C.1.pep
QLEIQSKELVSPALTSGRLCPSVVNFFPGASTRSPHLPRPFTERPGIPGPGLLLCPWGMCPLHIFSAITPWALGPYPFQPSLLLRLQSTAQLIQMQTTVPAIGSLAGNS

SEQ ID NO: 243621 - protein, 62 aa, Zea mays
  Clone ID: MRT4577_153765C.1.pep
SIDDRISCVCFIFLHSELFRFERLAVVASHDLIYNSAFKVRKGSKAPVIDTPSLDQDSVGLG

SEQ ID NO: 243622 - protein, 41 aa, Zea mays
  Clone ID: MRT4577_153766C.1.pep
LLGPLGDHTFTHLDVFLRVVEQPLTFVVSLTLWSRPRGVSL

SEQ ID NO: 243623 - protein, 95 aa, Zea mays
  Clone ID: MRT4577_153767C.1.pep
CPCQRRRLRLAGRRLGRTSSGGRARCWMEAGRRRSLPFLGALVPLCFDLALFLVRFRRKYTARLLLKPTTVTELNTALAQLNSSSGYCKEERTYS

SEQ ID NO: 243624 - protein, 145 aa, Zea mays
  unsure (1)..(145): unsure at all Xaa locations
  Clone ID: MRT4577_153768C.1.pep
MSKSQSESVKDAISQIVGDAKDKNKKLTETEELQHXGLNNYDPQKDKRFRGSVKLPHMPRAKMNEGLLGDAQHVEEAEKMGLDFMVVDALQKMNKNNKLVNMLANKYHAFLASEAILKAIPXRLLGPGLNKAGEFPTLVTHQESL

SEQ ID NO: 243625 - protein, 133 aa, Zea mays
  Clone ID: MRT4577_153769C.1.pep
HGSDRLGKHSLLLGDTGETANTAPERITDRCHPTRMSSTVHEPRTGGRADPDQLPGRPHTYLHPGKTSTCIHHRDRHRRRGQPYQQRYPHAATHPTSPSPTPESACVITAYYCHREIFKVEHHWRDTATPTTG

SEQ ID NO: 243626 - protein, 91 aa, Zea mays
  Clone ID: MRT4577_15376C.1.pep
VFAKVLEKGEVMVFPRAMVHFQMNVGDEPATVYGTFNSENPGIVRIPATVFGSGIKDAVLERAFGLEPEELRRLQKRFGPPPKTKTAEMDD

SEQ ID NO: 243627 - protein, 105 aa, Zea mays
  unsure (1)..(105): unsure at all Xaa locations
  Clone ID: MRT4577_153770C.1.pep
LPFSKIYIAXPRQFLPFNLVAALNYHAYCQQQPVVPISQLAGVSRSPLRXKPQWWRICRPAAXAAGTLSQGQRWKPVNQRGMTNPAAFYXQQPIIGGASLSFNKG

SEQ ID NO: 243628 - protein, 191 aa, Zea mays
  Clone ID: MRT4577_153771C.1.pep
MRRSIANKQQQQQASVCTQGLSGMDLEQTDEALSVNDQSAERRPTVAGGAMRWLDLTLAVTAPRDEFSATTDGDSSSADSDGEPPAKPVPVPSSSPSPSAPAPHKVFSCNFCMRMFFSSQALGGHQNAHKRERSAAKRSSAPSPAYQYQYHHLHAAQRMVMAGLPLEAHAALVRAALRVSPASAIIQKGDA

SEQ ID NO: 243629 - protein, 134 aa, Zea mays
  Clone ID: MRT4577_153772C.1.pep
GENHVPPFFGPPHFFFFRGGGKNAEWENGRGGAHTPHIGHQTRVRSSLPPHYLGLPMVYIGGESNPRDFVGPPCMLLLGLGGSLRPQGDRSSSSPISRKRGLFFPLAGGGGLLLLPGVLRRVFGLLFGGGLGER

SEQ ID NO: 243630 - protein, 78 aa, Zea mays
  Clone ID: MRT4577_153773C.1.pep
AHLNEQPPPNIVAGHATSHTGTADHVIFWGQANAGPQEGLEHLHEGLQRDHLGREDRHQGLPLLRAQGVWELQEEVEV

SEQ ID NO: 243631 - protein, 138 aa, Zea mays
  unsure (1)..(138): unsure at all Xaa locations
  Clone ID: MRT4577_153774C.1.pep
GYLEAGREPENEPEXEEIIPGPPLPPECNTELHTDYGGTAVRWGLTHHKESAADCCQACIDQAKRARPGALKCNIWVYCPSEYGCYSPDKYEHKHQECWLKQADHPRLNFKDRYPEPYRDSHPTAPVVVPWMSGVITA

SEQ ID NO: 243632 - protein, 255 aa, Zea mays
  unsure (1)..(255): unsure at all Xaa locations
  Clone ID: MRT4577_153775C.1.pep
TEVSLEILQRLHDLGEGSNTTEQQEAIEAWRVGKLKDMRSASSKNLSNFGLSNEDSRMVRRALEFNWQMLLEDIGLWIPPTIYHIEHDDKPENEPEDEEIIPGPPLPPECNTELHTDYGGTAVRWGLTHHKESAADCCQACIDQAKRARPGALKCNIWVYCPSEYGCYSPDKYEHKHQECWLKXVKISHHTLECVSLWFLKLSKISMMTDLLECYXMEHADHPRLNFKDQYSEPYRDFHPTAPVVVPWMSGVITA

SEQ ID NO: 243633 - protein, 51 aa, Zea mays
  Clone ID: MRT4577_153776C.1.pep
LVTYHEKGLCPRDTFCLFSKHCGLLHGTALRFLSISTLTASSDHSRAAESR

SEQ ID NO: 243634 - protein, 143 aa, Zea mays
  Clone ID: MRT4577_153778C.1.pep
HKHACTRTRHGVSETCHSSSVFQYLRRTEHRAHTCHGLQLGQPDGSVVREPFGDKLQVTTTSRVDRHKSWSPERTLSESGHITRIYTPKHAQSLPPNQNSNQGPSKPTRNYGACGAHAQDTARAQEHQRPDASELRWPAQPRG

SEQ ID NO: 243635 - protein, 140 aa, Zea mays
  Clone ID: MRT4577_153779C.1.pep
SMSPVPVWGVYPGCGEAGNDDFLFFAGFWRSPWRLCPVFPPPMARPLSPLWRPNPGPLSPCSRFPPSPPPALLVFPLGARPRGGRPPGAPASGGSPLGVVGLGGPPPPRLLRPLLFPFSLSPLWLSWVPFFVLFVWVIII

SEQ ID NO: 243636 - protein, 81 aa, Zea mays
  Clone ID: MRT4577_15377C.1.pep
DRAHLRDLQNIVVRSGLILTLYIQRVICITDMQIPILSIAANGMINIVEDWELSGMVFYIRILRLIAEDVRAKDIRSHVGD

SEQ ID NO: 243637 - protein, 61 aa, Zea mays
  Clone ID: MRT4577_153780C.1.pep
MNKDLNISLTKKKKKKKKKKKKKKKKKKKKKKKKKKKKKNKKKKKKKKKKKKGGAFLKYQI

SEQ ID NO: 243638 - protein, 95 aa, Zea mays
  unsure (1)..(95): unsure at all Xaa locations
  Clone ID: MRT4577_153781C.1.pep
PSYRFXXIPCPPPXSPKSLSSXXXAEFPLLPAXXXSXRXRLRLSLPXQGAXASXXXVRXXSXXXVHXQLCRLRSTXXXSPXGSXRXXTXXGVRTT

SEQ ID NO: 243639 - protein, 109 aa, Zea mays
  unsure (1)..(109): unsure at all Xaa locations
  Clone ID: MRT4577_153782C.1.pep
ERSSIAELTSANCYRTEHLGRPENCALHQMAEHIYIAGLFLTXPPDSIQLVSEHAATYIMVFLMNLSATFICEFFRDAQEKVLLYADYIFHYQTEAEIFAKVRXWQTDN

SEQ ID NO: 243640 - protein, 58 aa, Zea mays
  Clone ID: MRT4577_153783C.1.pep
MGTRGAALLLLAAVLLLQALLPGSTKGLTRVALKKLTDRPERTCSRAPLRRGETKSPT

SEQ ID NO: 243641 - protein, 159 aa, Zea mays
  Clone ID: MRT4577_153784C.1.pep
MEPQVTLNVTFKNETQSFLVSDPENTTWADVEAMVKVSFDLNTIQIKYLDEENEEISINSQGEYEEALKMANIKQGNQLQMQVHEGYHVVDEALPKNVVENQAAARTGKKPLAHYSSLVRVLGSDMKTTEEPAPEQCSSAPCDTDQPQDKPPDWFTSYL

SEQ ID NO: 243642 - protein, 134 aa, Zea mays
  unsure (1)..(134): unsure at all Xaa locations
  Clone ID: MRT4577_153785C.1.pep
GAGGLDLKLHLSPPAPPARGTEGAAAPSLSSDEEWSSSSSPPSSCLSSESEREXSAEPQPRXQWSDSPEATSMVLAACSRCLMYVMLSEADPRCPRCRSPVLLDFLHHAARNSNVSREDDGDHSRGCGGRNRRA

SEQ ID NO: 243643 - protein, 90 aa, Zea mays
  Clone ID: MRT4577_153786C.1.pep
YGDEHGDEHGRRSLVSYFCFRTGRLLRRFVFAYSPFHRKVVSISRHFAVLVRLRRRAFLLLILFGSKGGFTFDLLSYFVSDFDKDEISNE

SEQ ID NO: 243644 - protein, 67 aa, Zea mays
  unsure (1)..(67): unsure at all Xaa locations
  Clone ID: MRT4577_153787C.1.pep
GFIDCLRAXDKLGDLKLLSSGRTPRLAMWPKRSSALDVAKEVTPDPVHIAEYAKVLQARSAAVPASN

SEQ ID NO: 243645 - protein, 95 aa, Zea mays
  unsure (1)..(95): unsure at all Xaa locations
  Clone ID: MRT4577_153788C.1.pep
RKWGPGGYLPRGWAISARPHPGCPAIKPWARCSIKRQRRPSPMRVAPQVRRATFLSSGLFKNQKEXKQPPAAIVSRWTHSASSALRWSPNRTRGR

SEQ ID NO: 243646 - protein, 452 aa, Zea mays
  unsure (1)..(452): unsure at all Xaa locations
  Clone ID: MRT4577_153789C.1.pep
VHLEVWPGRPIAAYLIYRCLVHWRSFEEERTVVFDRIIQKITAALEVSSRAVASNTYETTDFMSARNENLIFFSFFCRRCQARDNNDALAYWLSNSCALLVLLQRTLKINGVAALARQRRRASSXQGATGKXFWNLRILKPESXKPDLAAGKPRSSSRXQLICGLAQVYQSEARYPTSAFKQQLTALLEKVYGMIRHNLKKELSPLLGLCIQAPRTFVVVSPRGSCSQGTDLAQQASMAHWQSIIKILTNSLDVLKSNYVPPFLICKMFTQVFSFINVQLFNSLLLRRECCSFSNGEYVKAGLDELEHWCFWLTEEYAGSAWDELKHIRQAVTLLILDDKHSRSLAEITDDFCPVLSMQQLYRISTMYCDDKFGTLGIPSEVVSSMRTKMIEGSSSSPSAHDDINSFLLDDDFSIPFSVDDFTKLIVHVDVADMDLPPLIQESSGGGSKMGH

SEQ ID NO: 243647 - protein, 28 aa, Zea mays
  Clone ID: MRT4577_15378C.1.pep
HSFFFFFFFFFFFFFFFFYCHMIIKLSH

SEQ ID NO: 243648 - protein, 487 aa, Zea mays
  Clone ID: MRT4577_153790C.1.pep
MGLVKEGVDMEEGTLEIGMEYRTVSGVAGPLVILDKVKGPKYQEIVNIRLGDGTTRRGQVLEVDGEKAVVQVFEGTSGIDNKYTTVQFTGEVLKTPVSLDMLGRIFNGSGKPIDNGPPILPEAYLDISGSSINPSERTYPEEMIQTGISTIDVMNSIARGQKIPLFSAAGLPHNEIAAQICRQAGLVKTLEKGKHAEGGEDDNFAIVFAAMGVNMETAQFFKRDFEENGSMERVTLFLNLANDPTIERIITPRIALTTAEYLAYECGKHVLVILTDMSSYADALREVSAAREEVPGRRGYPGYMYTDLATIYERAGRIEGRTGSITQIPILTMPNDDITHPTPDLTGYITEGQIYIDRQLHNRQIYPPINVLPSLSRLMKSAIGEGMTRRDHSDVSNQLYANYAIGKDVQAMKAVVGEEALSSEDLLYLEFLDKFERKFVTQGAYDTRNIFQSLDLAWTLLRIFPRELLHRIPAKTLDQYYSRDASH

SEQ ID NO: 243649 - protein, 191 aa, Zea mays
  unsure (1)..(191): unsure at all Xaa locations
  Clone ID: MRT4577_153791C.1.pep
APPRPLLXEXYVRGCGGVXRQNPGRGWENGGMGPGSFHHYGCACPHCLHGQRTSPQEENIPMARYFARQHESYRFEMSPSVSSDYDRRSVASSLYSHRSVSKRRAEYFRKKAEHICRPVDGAAPFSVCSSCYKLLQMPTEKCIGRKQNRFQCGSCCQIVSLKHDEEKVFPLHRDYPYMRPETEQSSSDQMR

SEQ ID NO: 243650 - protein, 103 aa, Zea mays
  Clone ID: MRT4577_153792C.1.pep
CPVLSMQQLYRISTMYCDDKFGTLGIPSEVVSSMRTKMIEGSSSSPSAHDDINSFLLDDDFSIPFSVDDFTKLIVHVDVADMDLPPLIQESGGGGGGGSKLGH

SEQ ID NO: 243651 - protein, 177 aa, Zea mays
  Clone ID: MRT4577_153793C.1.pep
MAGRDREPLVVGRVVGDVLDPFVRTTNLRVSYGARTVSNGCELKPSMVVHQPRVEVGGPDMRTFYTLVMVDPDAPSPSDPNLREYLHWLVTDIPGTTGAAFGQEVICYESPRPTMGIHRFVLVLFQQLGRQTVYAPGWRQNFNTRDFAELYNLGPPVAAVYFNCQREAGSGGRRMYS

SEQ ID NO: 243652 - protein, 49 aa, Zea mays
  unsure (1)..(49): unsure at all Xaa locations
  Clone ID: MRT4577_153794C.1.pep
PVFLVGVWAHTWIXWVGPFMGGPLFGLVXEALFLAKGGHEPFPRYNTNF

SEQ ID NO: 243653 - protein, 126 aa, Zea mays
  unsure (1)..(126): unsure at all Xaa locations
  Clone ID: MRT4577_153795C.1.pep
NQITCVVRISELQKHIRLSFFSLYLSLSLFIRTRLIPSGLVALQVPPFLICKMFTQVFSFINVQLFNSLLLRRECCSFSNGEYVKAGLDELEHWCFWLTEEYAGSAWDELKHIXQAVTLLILDDKH

SEQ ID NO: 243654 - protein, 45 aa, Zea mays
  Clone ID: MRT4577_153796C.1.pep
LEFLDKFERKFVTQGAYDTRNIFQSLDLAWTLLRIFPRECFPLNH

SEQ ID NO: 243655 - protein, 190 aa, Zea mays
  unsure (1)..(190): unsure at all Xaa locations
  Clone ID: MRT4577_153797C.1.pep
MAWLAVARFFSMGLVKEGIDMEEGTLEIGMEYRTVSGVAGPLVILDKVKGPKYQEIVNIRLGDGTNRRGQVLEVDGEKAVVQVFEGTSGIDNKYTTVQFTGEVLKTPVSLDMLGRIFNGSGKPIDNGPPILPEAYLDISGSSINPSERTYPEEMIQTGISTIDVMNSIARGQKIPXLFSAAGLPHNENAA

SEQ ID NO: 243656 - protein, 126 aa, Zea mays
  unsure (1)..(126): unsure at all Xaa locations
  Clone ID: MRT4577_153798C.1.pep
NPSRCSPSSPSAHRFGESWEEAPPLWISYAMNPQRFIVPGGGQEPXXEISRLGCVSTPVGASEFLAEPGCRRWSRSALWTGFNSWSETVITLPCCLYHLVLRLAQIGLGLGCQNGQRARLRQCTAA

SEQ ID NO: 243657 - protein, 487 aa, Zea mays
  Clone ID: MRT4577_153799C.1.pep
MGLVKEGIDMEEGTLEIGMEYRTVSGVAGPLVILDKVKGPKYQEIVNIRLGDGTNRRGQVLEVDGEKAVVQVFEGTSGIDNKYTTVQFTGEVLKTPVSLDMLGRIFNGSGKPIDNGPPILPEAYLDISGSSINPSERTYPEEMIQTGISTIDVMNSIARGQKIPLFSAAGLPHNEIAAQICRQAGLVKTLEKGKHAEGGEDDNFAIVFAAMGVNMETAQFFKRDFEENGSMERVTLFLNLANDPTIERIITPRIALTTAEYLAYECGKHVLVILTDMSSYADALREVSAAREEVPGRRGYPGYMYTDLATIYERAGRIEGRTGSITQIPILTMPNDDITHPTPDLTGYITEGQIYIDRQLHNRQIYPPINVLPSLSRLMKSAIGEGMTRRDHSDVSNQLYANYAIGKDVQAMKAVVGEEALSSEDLLYLEFLDKFERKFVTQGAYDTRNIFQSLDLAWTLLRIFPRELLHRIPAKTLDQYYSRDASH

SEQ ID NO: 243658 - protein, 58 aa, Zea mays
  Clone ID: MRT4577_15379C.1.pep
VNPKLNMCKIDQAQQDKIHSMDVNRSSCTVCYKFGISCPQKHKFPQKRILKFEFFWNP

SEQ ID NO: 243659 - protein, 85 aa, Zea mays
  unsure (1)..(85): unsure at all Xaa locations
  Clone ID: MRT4577_1537C.1.pep
LLDLLAPDLPAPTLRGAYNLLLRSACRAGELLLDCGLLLEMRERGVTPDSFSHYTVLAALTRXGHLGEGVTMLALREDDGVAPDL

SEQ ID NO: 243660 - protein, 52 aa, Zea mays
  Clone ID: MRT4577_153800C.1.pep
PPCGGDTGHHPAPRRRPVLGGQHGRDPGGSSGSLHFSDLNFLWSSYAMADCS

SEQ ID NO: 243661 - protein, 107 aa, Zea mays
  Clone ID: MRT4577_153801C.1.pep
PFGGGGNLLDRGVYKKKRGPIFITGGGGTIYFQAPKKLNYGGGYFSNINYRTRKKRAGKKKMGGTLVRDKTIRSVGLTWGGRRFDLLGGVTLVMLKQSLGGKKRKGG

SEQ ID NO: 243662 - protein, 487 aa, Zea mays; identical to SEQ ID NO: 243648
  Clone ID: MRT4577_153802C.1.pep

SEQ ID NO: 243663 - protein, 86 aa, Zea mays
  unsure (1)..(86): unsure at all Xaa locations
  Clone ID: MRT4577_153803C.1.pep
NPPQPTRDXKIFXSSLXYYIXXXSFGSFILNRRYSTLXXYXXISFLYLFFFTYSLFDDXLITVTTLTHYFFFCFTITLNLSILFIL

SEQ ID NO: 243664 - protein, 62 aa, Zea mays
  Clone ID: MRT4577_153804C.1.pep
MLTKFETKSNWVKGFAFHSCRRWIQSSLHSSVIQMRDYRMGTVLNRFDEHDEPIRGIHFHAT

SEQ ID NO: 243665 - protein, 84 aa, Zea mays
  unsure (1)..(84): unsure at all Xaa locations
  Clone ID: MRT4577_153805C.1.pep
NTGYGTQSTPQGYGSTGGYSSSQSSQSAYGQQSFYPGYGQLPAPSSTSXSYGSSSQSSSYGQPQSGSYSQQPSYGGQQQSYGQQ

SEQ ID NO: 243666 - protein, 63 aa, Zea mays
  Clone ID: MRT4577_153806C.1.pep
ECRQELHRVCSMWVNDQSVRYVSWSHLGRHWFIVIIPISLSVVRWSHSVQSHPFIYFRFVSDP

SEQ ID NO: 243667 - protein, 35 aa, Zea mays
  Clone ID: MRT4577_153807C.1.pep
SLQAFLLQAKKHCVISNGLTLLKAPTTRGDRESGR

SEQ ID NO: 243668 - protein, 49 aa, Zea mays
  Clone ID: MRT4577_153808C.1.pep
MRGVASSFYNGNPPNNFVKKKKKKKKKKKKKPKKKKKKKKRKKKKKKAP

SEQ ID NO: 243669 - protein, 194 aa, Zea mays
  unsure (1)..(194): unsure at all Xaa locations
  Clone ID: MRT4577_153809C.1.pep
PRVRPRVXLCNRMLYSMTEXGCAPDLSSYNTVMYGLIKEERLEEAFRMFCQMKKILXPDYATLCTILPSFVKNGLMKEALHTVKEYILKAGCNVDKSSFHSLMEGILKKAGVEKSIEFAENIASRGILLNDFFLCPLIRHLCKHKKALEAHQLFNKFKGLGVSLKTGSYNSLIRGLVDENLIDIAEDLFTEMKR

SEQ ID NO: 243670 - protein, 66 aa, Zea mays
  Clone ID: MRT4577_15380C.1.pep
DDLFYDLLWILTCIWLFSWLSCSLLCIMACTMSISKAMSQAMSLSSMLAFLYVFVYIRIDIRLEDS

SEQ ID NO: 243671 - protein, 111 aa, Zea mays
  Clone ID: MRT4577_153810C.1.pep
KHEHFLQPSRVNANILEVDADVDTEETKEADLDVHLDDCNDVDESKSLDVDEDIGAKEAAKVVVETRNNAEARLEENRDCDLELNDDREQDLDLTTSPDCNFEDGNDLDKD

SEQ ID NO: 243672 - protein, 48 aa, Zea mays
  Clone ID: MRT4577_153811C.1.pep
PTPRSRIPDPPCRFGGRVPPPKGLRLNITSPIRSHLKSLATRSQPSWN

SEQ ID NO: 243673 - protein, 92 aa, Zea mays
  Clone ID: MRT4577_153812C.1.pep
MDYELDTMSRSNFGSSINLSEWFNDADFDSNIGCLFDGCSAVDEGGKDGVGLADFSLLEDFSLFEAGDGQLKDVLSDMEEGIQPPTMISVCN

SEQ ID NO: 243674 - protein, 90 aa, Zea mays
  unsure (1)..(90): unsure at all Xaa locations
  Clone ID: MRT4577_153813C.1.pep
MDATNKATGHGGATGPAGNHGGAPAGAGAGGVQQLQATRDDRKTDGGLGRSGGPTGNHGGAPAVGXGRRXEKKGVVENIKEKLPGAGGQQ

SEQ ID NO: 243675 - protein, 155 aa, Zea mays
  unsure (1)..(155): unsure at all Xaa locations
  Clone ID: MRT4577_153814C.1.pep
VNPGKDAGAHPGNHPRQRGGNQKPEXKNGKKGGRKKGXKTGPKAKKRRNQKPKKKTPGNQKGEQTGKKRGGQTDKKPDGKPAGPPAEKKGAKPGKRKRPKRGQRGVKNRPPKGATGEPPKPPGPERPSAGGPKEGPPRXGQNRVPPGVKKPEKRR

SEQ ID NO: 243676 - protein, 230 aa, Zea mays
  Clone ID: MRT4577_153815C.1.pep
MGMVASMCTEPIKRHRVERDLDGKVADALRERTRSRQRTFRSVNSITMRLPRFKEGLRDVKNIFDQYDEDSDGTIDSEELQSFGSRVRVHMSEEEMSNLHRYCDIDSRKGVQFQEFVVLLCLAYLLFGPDVTRRVSEFESGKLNYVFDELIDAYIFFDKDGDGMLRRRDVTHRMNEASHQERTPSHITAQLFKEMDLNRNGKVNLKEFLYSMIRWAGLGTEDDGSDEASP

SEQ ID NO: 243677 - protein, 141 aa, Zea mays
  unsure (1)..(141): unsure at all Xaa locations
  Clone ID: MRT4577_153816C.1.pep
MAGDWQELGQAGAIGLLFAFLVAKLISTGIAFKEDNLRITRSPPTSPIAAAEAAPPVPSHYGSTDGGRGSDSNWKGVESPHLDEEFSAASAFIGGSAAFGTKVPKEAQLPLYGLXKTPPGGPCPXPQPSGLKLKARAKGKA

SEQ ID NO: 243678 - protein, 181 aa, Zea mays
  unsure (1)..(181): unsure at all Xaa locations
  Clone ID: MRT4577_153817C.1.pep
WTWTYPTQVSVLCSFADEDSDGTIDSEELQSFGSRVRVHMSEEEMSNLHRYCDIDSRKGVQFQEFVVLLCLAYLLFGPDXHATRTFRSSSPAXLNYVFDELIDAYIFFDKDGDGMLRRRDVTHRMNEASHQERTPSHITAQLFKEMDLNRNGKVNLKEFLYSMIRWAGLGTEDDGSDEASP

SEQ ID NO: 243679 - protein, 47 aa, Zea mays
  Clone ID: MRT4577_153818C.1.pep
GMFGLTPRPPHRATLFKPQCGGRFGRRGLVAVWRRRRHIKHALSIQS

SEQ ID NO: 243680 - protein, 47 aa, Zea mays
  Clone ID: MRT4577_153819C.1.pep
HGFASLRIKEDSWCVGTIYSRCHEISLAHYSFHMFTRVFQVCSLSFV

SEQ ID NO: 243681 - protein, 92 aa, Zea mays
  Clone ID: MRT4577_15381C.1.pep
EPFPTRGHPRSTRCTSFLSTRSRPMRTGAAALISASAAAASFGRAGPEAAVRVRRDVTAKMRIARDIAAISPARLGTSRAAEIFLGFFSHAS

SEQ ID NO: 243682 - protein, 65 aa, Zea mays
  Clone ID: MRT4577_153820C.1.pep
CREPLLGRWSHMDQHTTTTLYSALRTYGEVLAVQYHTLSADAYVLRVLLMYLFHSRGHADTPPRR

SEQ ID NO: 243683 - protein, 51 aa, Zea mays
  Clone ID: MRT4577_153821C.1.pep
PNVKAKIYVGAIAICWALWLSRNDVVFNKSPIQTYLQVLFRGTYWCRFWGM

SEQ ID NO: 243684 - protein, 39 aa, Zea mays
  Clone ID: MRT4577_153822C.1.pep
YQPRVSRNHDCSSDGYIGTVVGMPSGMALASVLLNRKHE

SEQ ID NO: 243685 - protein, 74 aa, Zea mays
  Clone ID: MRT4577_153823C.1.pep
CSLGRSPSKVKAVVSDPVRRVRTVILFRPDSVDPPDNSRSYGSLGIDNFACCISRPPAISSRGRTGCSHAITRA

SEQ ID NO: 243686 - protein, 83 aa, Zea mays
  Clone ID: MRT4577_153824C.1.pep
VSSFVQEIATRQLNIVTGRVWKPFFFGALKRGGQVPCLVKEFMRKDIKVCEYIGLNRILIHIKDAFFLFFQGPVMRCVLAMHI

SEQ ID NO: 243687 - protein, 143 aa, Zea mays
  Clone ID: MRT4577_153825C.1.pep
WFLSKKKGKKKKKGGRAPAHQRRPRRRARSSPRSASSDAGSSRPPASRPGGGGELAQANILPLCSSSCLFGVGFVSVRVLLSNPGERVGAGVRVEAVSAAVAGGVSVVRSISLPYVWGWWWPEWCCSGAVFCVSLSRSRNAMQ

SEQ ID NO: 243688 - protein, 171 aa, Zea mays
  Clone ID: MRT4577_153826C.1.pep
RFLPLPPFSQNPGQVGKKPPWDFKTKGRHKTLVLTNGFLFQVLSKIPGNFPKVQKFFFPPPLALGNPTKGSPLTGGFLGPPVTFPPKKGFGSKFLGRFVFHLAKITPRGPPPRVSPFFRGGGAAKPNQVFVKAHLKMFGWANGFSKKGFKIVSKTLGDKLGRFQGIGSGGA

SEQ ID NO: 243689 - protein, 114 aa, Zea mays
  Clone ID: MRT4577_153827C.1.pep
RLVQMNEDGGRVAHCADECSLNDSILINGSRGGSMFKYIMLIFILIGRPCPNPMIYLTDPPSLRFRLRAFRVHVNLVDLRRAPRSISTTTTATTSSPNRQRSKQAHKSAQRFQA

SEQ ID NO: 243690 - protein, 88 aa, Zea mays
  Clone ID: MRT4577_153828C.1.pep
RPGPSLSSPFSSSLSIVTKNMSPYPSDSPKEPPTMAPVHRVHKTGLPRASRWQVGLVMAPRRRRKCGVATTAGLRRHRHNRCVCTVQK

SEQ ID NO: 243691 - protein, 70 aa, Zea mays
  Clone ID: MRT4577_153829C.1.pep
ALDIAARLDTAFIGSPRGMPGITRARSRVARTILSWRSRHTITDRDLTRTHFSVSCATSTQATRMSLAGS

SEQ ID NO: 243692 - protein, 35 aa, Zea mays
  Clone ID: MRT4577_15382C.1.pep
HFKDTLAASICIPDHFIHSLTRYRSCLCKLTLSNS

SEQ ID NO: 243693 - protein, 458 aa, Zea mays
  unsure (1)..(458): unsure at all Xaa locations
  Clone ID: MRT4577_153830C.1.pep
MGLMTGVRTLEMNPHMYPEVDMINEEGPIQMGIDDVLVHLEKQDVSLFEVELDRKYKQVDMTRWDIQQFGNELHEFLQHKRYLIVVDDIWDARSWETIRYALKDNNRGSRIIMTTRNFGVVTKVEEVYKLKPLSNGNSKKLFYKRIQSHEGENVDGELSTQIIDKCVGTRLAIMAIASLLLQRQQRKXITRLGRFCCSKSKTMRLGYFPKSKLIFXYLKPLLLGLYIIPGDAILYTQARIWELLGERLVRHVDQXGXSLYEVGERGAKKLVNRCVIHPIEGIYARFVEEFRIRDIVFHLIRTLTRDEDFITLLDCIGLLLFSVSLRREKKTGGPHSNCKLRRLAVRNHRMLCFEDTMDTSEVLRSLNIIXSVIXIKPPLKSFKVSRMLCIEYNILHINLKHLGNLLHLKQIPVIDTSVDVLPKEMWHLSSLLTMVLSQGLQGDTLQFVQGTVVGNCMV

SEQ ID NO: 243694 - protein, 95 aa, Zea mays
  unsure (1)..(95): unsure at all Xaa locations
  Clone ID: MRT4577_153831C.1.pep
QNTSLRLLARDRSHGRSPRSHAYSWPVLLLADVLAAAQDVLADGHDVVCLTGSTLPMEVXQDRGALVTIYLPWSDHCTNVVPDSHTFVARLTIGT

SEQ ID NO: 243695 - protein, 464 aa, Zea mays
  unsure (1)..(464): unsure at all Xaa locations
  Clone ID: MRT4577_153832C.1.pep
GSTLRPVCCVLSIENNYVPISLKHLGSXLHLKLLEIFYTPIDELPKEIGHLRSLQTLTLVRTGLDELPPVVCSLTRLMCLIALGFERLPTNRMGNLTSLEELRLHRVVGRSATQALVAELGKLTRLRVVSIAFSEQLEESSQEALVQSLSNLRGLQELALLSEMPQRGSDTWGDWEPPRQLRILFIKYIDFSRQPRWISRSCLPRLCSLSLVVYALEAQDLDNLARLPELQYLTLDGLSWPPRYTVGPDDFRNLRFCDVSTTFEFRKGAMPRLEVLHFGVYAGYWSWEKXCAVRAVPNEXVIEDLDLDLDNVLLLQQVMVKVDCSGATAAQVEEVEAVVMRAVENHANRPTIVMDRVYEQNILSDEEREALLWRHIEEDCCVRTMKDKSDAFFISQLRRYRHLQKAIIFIDCSGASMCEVQKVEAAFRHAAEVHPNHPSIELIRTNTDGMASSSSDHPNTEPRN

SEQ ID NO: 243696 - protein, 201 aa, Zea mays
  Clone ID: MRT4577_153833C.1.pep
RVSSGLQGYWSWEHNGVPLEQFPVMDVIEDLDLGLDNLLSLEQVIVKVNCLGATAAQVQELEAVAMGAVENHANRPTIKMDRAYEENILSDEKLEALLQQHIELELEGGVLQLKDKPDAFFISQLRLYRHLQKAVISYDCAGASMCEVLKVEAACRHAAEVHPNHPSIELIRTNTDEMASSSDHPNTEVCPSCLNVQPSRR

SEQ ID NO: 243697 - protein, 504 aa, Zea mays
  unsure (1)..(504): unsure at all Xaa locations
  Clone ID: MRT4577_153834C.1.pep
PVRFWADVGRHGPTHGRRRAETSEGLAQKSGGEEKRRGSALLRSHGRPRYLIVVDDIWDARSWETIRYALKDNNRGSRIIMTTRNFGVVTKVEEVYKLKPLSNGNSKKLFYKRIQSHEGESLDGELSTKIIDKCGGIPLAIIAIASLLVERSREEWSEVYDKIGHGNEDNTTKIMSYSYYDLPPYLKPCLLQLSIYPEDYLINAKVAIWMWIGEGLVHLEKQDVSLFEVGERYFKELVNRSMIQPREDKYDRFIQEFRIHDIVFDLICKLSXDEDFITLSGQHSSQDSLRREKKTGVPRSDCKLRRLAVRNQHVQRFPEETMDMPEVLRSLSITDYNIAVMAPIDSFRVCRVLHIENNYVPINLKHLGKLLHLKFLQISGTTIDELPREIGHLRSLQTLILADTGLDELPPAVCSLTRLMCLIALEFERLPADRMGNLTSLEELRLHXXLARSATQALVAELGKLTRLRGGQHRLFRAARGELARSIRAISVQSAGTPGTRAFV

SEQ ID NO: 243698 - protein, 60 aa, Zea mays
  Clone ID: MRT4577_153835C.1.pep
ISPIIVTVALSTYGNHSGVYKMSLATPPRDISKLYQHYEVYRWIRARLHQNMPSPVRGYS

SEQ ID NO: 243699 - protein, 52 aa, Zea mays
  Clone ID: MRT4577_153836C.1.pep
SLSQLWRRRLTDWRPYERRGSSFRVVCSEKKIKTDKPYSIGAGLTADIARQR

SEQ ID NO: 243700 - protein, 196 aa, Zea mays
  unsure (1)..(196): unsure at all Xaa locations
  Clone ID: MRT4577_153837C.1.pep
MASADEANAAAEGTEGKNWQRKGKHKKEKPWDDDPNIDRWTVEKFDPSWNEGGLLEVSSFSTLFPQYREKYLQETWPIVKGALKEFGVSCELNLVEGSMTVSTTRKTRDPYIILKARDLIKLLSRSVPAPQAIKVLNDEMNCDIVKIGSIIRNKERFVKRRERLLGPNLSTLKAIEILTGCYILVQGNTVAAMXSF

SEQ ID NO: 243701 - protein, 464 aa, Zea mays
  unsure (1)..(464): unsure at all Xaa locations
  Clone ID: MRT4577_153838C.1.pep
LRSFRVCRVLCIEYNSVPISIKYLGKLLHLKFLEICGTPVDELPKEIGHLRSLQTLLLVNIGLDELPPTVCSLTRLMCLIAEGFKRFPADRMGNLTSLEELRLRMVVGRSATQALVVELGKLTRLRVVDITFSEQLEESLQEALVQSLSNLRGLQELTLLFKMTRWGSDMWGDWEPPRQLRRLIIEGIIVFSRQPRWINRSCLPRLCYLSLMVHTLEAQDLDNLARLPELQYLTLDGLSWPPRYTVGPDDFRNLRLCKVGTTFEFCKGAMPRLEVLQFGVFAGYWSWEEXCAVRAVPNEXVIEDLDLDLDNVLLLQQVTVKVDCSGATAAQVEEVEAVVMRAVENHANRPTIKMDRAYEENILSDEKLEALLRRHIEKHCCVRTMKDKSDAFFISQLRLNRHLQEATIFIDCSGARMCEVQKVEAAFRHAAEVHPNHLSIELIRTNTDGMVSSSSDHPNAEPRN

SEQ ID NO: 243702 - protein, 85 aa, Zea mays
  Clone ID: MRT4577_153839C.1.pep
KGAHQLANQNFLVNEFIPQTPDFLTSLFFHAEDPPSLRSKPLHVLFLDTHTPPPFFPNPSLLFAIFTISAIPHPIFYPSSPGPPS

SEQ ID NO: 243703 - protein, 88 aa, Zea mays
  Clone ID: MRT4577_15383C.1.pep
MGCATSTEARRDMVRTGAGAPPRRSFSLPSVDRQRLRLKTVSMLGNLGLAGSSARHSSSCRHATLSVEDLMKSDNDHAADAVLLGDDA

SEQ ID NO: 243704 - protein, 363 aa, Zea mays
  unsure (1)..(363): unsure at all Xaa locations
  Clone ID: MRT4577_153840C.1.pep
PRVRGSLFVVGEXIFKELVNRSMIQPIEDKYDRLVEVFRIHDIVFDLIRKLLKDEDFITLLDSGGQHSPQASLRREKKTCVPRSDCKLRRLAVRNHHVQRFPEDIMDIPEALRSLNIIYCNIAIMTPLHSFRVCRVLCIEYSYVPISLKHLGKLLHLKFLEIFNTPIDELPKEIGHLRSLQTLILVDTGLGELPPAVCSLTRLMCLIAYGFERLPADRIGNLTSLEELQLHRVVGRSATQDLVAELGKLTRLRVVRITFSEQLEESSQEALVQSLSNLRLLQELVLFSEMPERGSDMWXLGXPRQLRRLIIEGIVFSRQPRWINRSCLPRLCYLSLMVHTLEAQDLDNLARLPELQYLPGRPL

SEQ ID NO: 243705 - protein, 81 aa, Zea mays
  unsure (1)..(81): unsure at all Xaa locations
  Clone ID: MRT4577_153841C.1.pep
TPPEGDAMADLYPRFRCPSCIHRITGXCRIDXNNLXGEASCLFSHENFSTTVNALTDPIDIYREWIDESDRDNNVECYDNA

SEQ ID NO: 243706 - protein, 214 aa, Zea mays
  Clone ID: MRT4577_153842C.1.pep
MPEGGSDMWGDWELPRQLRRLIIEGIVFSRQPRWINRSCLPRLYSLYLMVHAVEAQDLDNLARLPELQYLMLFGFSWPPRYTVGPDDFRNLRFCEVGTTFEFSKGAMPRLEELQFGVYAGYWSWEENGVSFEQFPTKDVVKVLALGLDNLLLLEQVTRPCLRLRCYCRTSGGGGGRGHACRGKSCQPSNHKNGSSIGRKYPIRPRLGGSASATH

SEQ ID NO: 243707 - protein, 85 aa, Zea mays
  Clone ID: MRT4577_153843C.1.pep
LRASPLEIKHPLKLGCPVLVGIRHVFPRKRVFKFMEACIFNSWGLDSHWDNWECSPGYELILANEQTPNSSVKTCFCRFNILATS

SEQ ID NO: 243708 - protein, 110 aa, Zea mays
  Clone ID: MRT4577_153844C.1.pep
RINLMLSSSASCGGIDIFRKPLFSSTVRVPASVRCRKWKQLIDMQPRFIRTIQVSNLSEQTPTEWPPPHLTIPTQSPGIDDSVCQTLPTQQQVNVSCLSTKERGPVQQVD

SEQ ID NO: 243709 - protein, 54 aa, Zea mays
  Clone ID: MRT4577_153845C.1.pep
ESRHRCYNLFSSCAVAETMNQQHQDMTERSGGCASIRHQCIGTNCTFWYTGPTP

SEQ ID NO: 243710 - protein, 123 aa, Zea mays
  unsure (1)..(123): unsure at all Xaa locations
  Clone ID: MRT4577_153846C.1.pep
KSPNRKPHRDPSHTAAKEQGAHHRGDTRSKRPSXPRRRLRTQKPPMRPRPRQRRAGPRTRTGPPRMASTARTDTNQAAQPPEGEPPPEGTPPQGRPANPRHNPHRKDQTPKGAPPPPKTRPKP

SEQ ID NO: 243711 - protein, 91 aa, Zea mays
  Clone ID: MRT4577_153847C.1.pep
HINYITCVHLPVQCDFRLRTTNLTSPANACNHLAEQDLSLPYLNNSRLPAAGLEGLDIPSYQFLSSVLGWSDEEAISSVFVLISSILGWLG

SEQ ID NO: 243712 - protein, 44 aa, Zea mays
  unsure (1)..(44): unsure at all Xaa locations
  Clone ID: MRT4577_153848C.1.pep
SLHLQAELEDLVEANGXXAVRKDHWHARXRRATQRTSSRQTAAA

SEQ ID NO: 243713 - protein, 122 aa, Zea mays
  Clone ID: MRT4577_153849C.1.pep
RHRPGINSRADDLIQTAAAHNKGGGLIKRREPSLPRKTQRGQEPHGGPKPADKRRGKSTQKPNKKRQSQTTDTTAPTKAPKPRQEAHPDEKRRGHHHGEGRETGERHGAKRPRRHGPRTEHR

SEQ ID NO: 243714 - protein, 94 aa, Zea mays
  Clone ID: MRT4577_15384C.1.pep
PNFWKKPLKVIPLFPKFRKVGLEKTFLKKKKLGKPKKMEKISKKLKKEFPILPKKLINTLFWVKKTKVKVKFFNNQPKNTPMKKKGGPFWGLGF

SEQ ID NO: 243715 - protein, 117 aa, Zea mays
  Clone ID: MRT4577_153850C.1.pep
LAKKTLASDATATPKSRVTRRKTLCDITNLSKRKPVDVPGEPACPEAPAPADAGGLEGFAQLVEEKAELVRLLAARDEIIELSRAEIQKLRLANWELGRSHSQLMAVVNLGRKLLKV

SEQ ID NO: 243716 - protein, 45 aa, Zea mays
  Clone ID: MRT4577_153851C.1.pep
MVYPPEFPPQKKKKKKKKKKKKKKKKKKKKKKKKKKKKKKKKKKK

SEQ ID NO: 243717 - protein, 136 aa, Zea mays
  Clone ID: MRT4577_153852C.1.pep
INQHISSLYQIIRRTSEQSIYADTLSWAGKGAGPCNPKVSLNKASSSRAASAANSLHRCSRSIRIAGLHAHGHEQSAPGNRIILITYLAGCTLGYHRHEDVPPPDHGMRRKIWHPNPLPISPELQRKWRGLRTETG

SEQ ID NO: 243718 - protein, 215 aa, Zea mays
  Clone ID: MRT4577_153853C.1.pep
MALDSVPSYPSDLGSSGRATRTQQRIRKEERTWTADTYAPYDDGHQWRKYGEKKLSNSNFPRFYYRCTYKTDLKCPATKQVQQKDMSDPPLFTVTYFNHHSCNTTSRPIGSAPDTTEQSSSRRAVSICFGSHATGEQPTFLTLPGTLQSPASTTNQQSDRGAYGHQFQWTDTSPSAGDAPVKMETDSLAGTDASSGAASGHALSRTLLPIGQSRC

SEQ ID NO: 243719 - protein, 69 aa, Zea mays
  Clone ID: MRT4577_153854C.1.pep
GFISQYLSSYQISFAPAGSSPIQAGQISLPSPCPRRINPVGFLSPLKLQSDHITFVRCNNIVPYMHCLM

SEQ ID NO: 243720 - protein, 114 aa, Zea mays
  Clone ID: MRT4577_153855C.1.pep
MGNCLVIQDRKEIKIMSVGGGGGEVLKMPSPTGSLSKAADAVVVDADAAAAGAAAVVRVKLVISKQELKKVLDREGVSLDDVVSSLVLRNRELEEVCCGGWRPALESIPEGSDL

SEQ ID NO: 243721 - protein, 260 aa, Zea mays
  unsure (1)..(260): unsure at all Xaa locations
  Clone ID: MRT4577_153856C.1.pep
MAEASRYQILVRLLDGRTHCLRFSTPTVSGAALLDAVSALSRVPAASLRLVTGRLDISPSSVLASFPDGQFPSASALLRLRGGKGGFGSLLRGAASKAGQKKTSNFDACRDINGRRLRHVNAERRLEEWRAEAADRQLEKLAEDFLKKKAKESGRGGARAAEVDKYLEKYRKDAESCVNAVEESVRASLGKRKAVPKPRDAKKLKIWMGKKKVADDESDSDSDSDVDDNEGADAKPIALDHGNYSMXNKSEEEKVIWLQF

SEQ ID NO: 243722 - protein, 62 aa, Zea mays
  Clone ID: MRT4577_153857C.1.pep
QRMLLLLLHISDRCYSSILVTPILMWNYRDYVRASHRLMYAKGLQSSSSPSSRSIRLFLCPI

SEQ ID NO: 243723 - protein, 209 aa, Zea mays
  unsure (1)..(209): unsure at all Xaa locations
  Clone ID: MRT4577_153858C.1.pep
MEAHGDQRWLVDCLTATLDTARDVRAFAEESLRQASLLPGYGAALTKVTINKEISFGLRQLAAVLLKQFIKQHWQEDEENFVPPVVSASEKVVIRQLLLTSLDDSNGKIRTAISMAVAAIGQQDWPEDWPELLPVLLKLIGDQSNGNGVRGALRCLALLSDDLDDMCVPKLVPELFPSLYRLISSXHLYENSLRAAFCIVHSCSMLGSM

SEQ ID NO: 243724 - protein, 304 aa, Zea mays
  unsure (1)..(304): unsure at all Xaa locations
  Clone ID: MRT4577_153859C.1.pep
PNSALDPWLTRANFVSYSESCRRRMRGGASAQKRSPSDKFGGGETVLEIVQASQFARDIVTAAGATNREPPRTPKPAPKTRKPATGELTPLRVRRAREKQSHRRGAATRGADAATPPSRSRVRSQIQFEPVSSVAVGRPFVSANRVSPKNRPWAKKAVMFPNPMFHASTSAATDPCATPSPSKKQKRLYKTRSPVVARQTPHKFLVKXSSPSALGSKLRMHGKALPARXSPPSVKAQASPAKTRCCSFSPSRLATRLMSPIKARLSLGRSRDSGVGVGGGPMSGLKQWPGVSLTVRVLSKISSR

SEQ ID NO: 243725 - protein, 118 aa, Zea mays
  Clone ID: MRT4577_15385C.1.pep
MVSRLLLGRIGIQSASRLSGGHRGFSGGEALRRSIPPAVDRSVCGNAYVPQTKTDDIGRTEHEPQHLVRFSDPQVARQHQEFVQLLDRMLDAIRNPQSLAQMERRRLASGVKVLDDDI

SEQ ID NO: 243726 - protein, 385 aa, Zea mays
  Clone ID: MRT4577_153860C.1.pep
MVARSPNAKPDRQKAAALAAAAALNPALLRETLKKVDRCMARLQELQYTVAGGAKVVSGVSLSPRSTRGYLRTSLRCKQETVRMRGGASAQKRSPSGKFGGGVGGEGAQWRRMSLPAMLLGETVLEIVQASQFARDIVTAAGATNREPPRTPKPAPRTRKPAAGEPTPLRARRAREKQSHRGGAATRGADAATPPSRSRVRSRIQFKPVSPVAVGRPSVSANRVSPKNRPWAKKAVMFPNPTFHASTSAATDPCATPSPSKKQKRLYKTRSPVAARQTPHKFLVKSPPSALGSKLRMHGKALPARPAAVSPPPPVKAQASPAKTRRCSFSPSRLATRLMSPIKARLSLGRSRDSGVGVGGGPMSGLKQRPGVSLTVRVSSKISSR

SEQ ID NO: 243727 - protein, 98 aa, Zea mays
  Clone ID: MRT4577_153861C.1.pep
IGELRKLPMGWRERLTQKPYYFARGPSKATGLTRLLHVLEREPFEEILPQPNLRATQPAEDVHVDTQLLGALHLQISDLRVLLETNIDFPTYRTYLRI

SEQ ID NO: 243728 - protein, 91 aa, Zea mays
  Clone ID: MRT4577_153862C.1.pep
VAASSGALCAQANWPREGLVVRSDALPLALVQPWLPPQSGRRIYLRGDVSLDAQIRPRGNAWEGHVEVRSKEGGVRLGENRNTVGDTTRGE

SEQ ID NO: 243729 - protein, 80 aa, Zea mays
  unsure (1)..(80): unsure at all Xaa locations
  Clone ID: MRT4577_153863C.1.pep
IFSGVIGDVFGEIDSLETRDLAFNAFXSDLPRSFSSLTRLGYVYLQDNEFTGSGILLAGLPLASLNIENNHFSGYVAGTF

SEQ ID NO: 243730 - protein, 113 aa, Zea mays
  unsure (1)..(113): unsure at all Xaa locations
  Clone ID: MRT4577_153864C.1.pep
PTRSEGSERFPLRDQEPETIDHLLVGCVFERNFWFMLLGQVNLQSFTPQVGEENVMQWWKSCSDQLQQIARKGFNSLIILGLWTIWNHRNRCVFDGLSPNLETAIXRADEERE

SEQ ID NO: 243731 - protein, 62 aa, Zea mays
  Clone ID: MRT4577_153865C.1.pep
IRLEIVYSVFLEIGATSNWGGCIAPTGQSLSESTYLCPLVSWIAATCRKTYSENGDESKTAG

SEQ ID NO: 243732 - protein, 80 aa, Zea mays
  Clone ID: MRT4577_153866C.1.pep
SRHHEMMSMMDHETDEEDEDAEGDENVEEDDADHAVDDADVEMDEGDDEIGDDGEDGGVGGEMTPDEDPDATSYSSVSTQ

SEQ ID NO: 243733 - protein, 426 aa, Zea mays
  Clone ID: MRT4577_153867C.1.pep
MGDDAELEEGEACGCGDDTAFVDPDVALSYIDEKLQDILGHFQKDFEGGVSADNLGSKFGAYGSFLPTYQRSPLPQTRSPPKAGNITSKSPFHQSNEDLSQKPPAVAVSSTPQSNGPVVPFSGDSTKKEIRPSTKSERGSVSHDSYGPSKCSDQNRLKVRIKVGSDNVLARNNAAIYSGLGLDISSPSSNEDSPDGRGSLSPEVNNVPHESPQTILQIMTCFSVPGGFLLSPLPANILQLTKKVVSSSKKWESNVDVENVQESYEGHVAKKVKSDGNKKRLIDAKNSKNKNDISAVMKKEIDMELVAGQKIVSEALKISLLSDPRAMDAKGENRLEEEPAENNLVGIRDARLKERCTKTDSMTVKVEPAKAEAMECLENSSFGSSEMDLSAVKGKSKPKTEKGEATLEDRNTTNDKDLISDRKQKK

SEQ ID NO: 243734 - protein, 80 aa, Zea mays
  Clone ID: MRT4577_153868C.1.pep
VLRPFAFMTGVDEPTSLFMYGSTRISSRCALRSSPFYDLGFPSAQVLSCGSRETAFRLSCQVRFSYSRQFVLSRSSVPSL

SEQ ID NO: 243735 - protein, 416 aa, Zea mays
  Clone ID: MRT4577_153869C.1.pep
MARKRKASDSAAGIDGVHSLPPPLALASTDACAWASSGGTSMAAVAEAAAAQQQRRGRKRFVGVRQRPSGRWVAEIKDTIQKIRVWLGTFDTAEEAARAYDEAACLLRGANTRTNFWPRPSPASSVAVAAAAHPAPPPPTPPPLPGLMGSPTQPPALPSKVTNLLLLRLRARNNQQQLLLNATPARQQEAAAAALLQGPLCAEPYGGGEECAFQVDDFLSYDCGSDENSSQEIEDEEEEEEEEEEEEEELDFQFMDQQTASPGAGCEGGLCSPFEVVAAELGGAVEAGGGEPATAVQELMMSRMDYERKISASLYALSGVSECIKMRLGAAAGGHAVRDQLSGLREACRKKQREIVQQQHEQEPSMDTAEDVKPPREERSPGDGAPEATSSSSEASHGDSDGDMLLWSSLDLAPIC

SEQ ID NO: 243736 - protein, 53 aa, Zea mays
  Clone ID: MRT4577_15386C.1.pep
LGKLLGGVTIAHGGGLPNINPVFLPKKTAEKGSSVGSKEAKSPQKAAQSPQKA

SEQ ID NO: 243737 - protein, 128 aa, Zea mays
  unsure (1)..(128): unsure at all Xaa locations
  Clone ID: MRT4577_153870C.1.pep
CVPSVSRSTPRPPTRPPTRPPTRPPTRPAASDVEYRCFVGGLAWATDDHSLHNAFSTYGEALESKXIILDRETQRSLRFCFVTFSTEEANRNVIEALSVTLLNRIQIHVIQDPAKDEIETDEPVLSAR

SEQ ID NO: 243738 - protein, 226 aa, Zea mays
  Clone ID: MRT4577_153871C.1.pep
MRLIVHPRGPSPGRRGPGGGGSGGEGCCVPLSVGGSSPEGATFALLVPALASRRMLNHARCLVLDTMPSFSVAPDEPTLAALISAYGRAAIPQEAVKLFRMMPNIGVPRTALSYNAVLKAILCRGREAMARRIYNAMIADGVAPDVSTYNTLIWGFGLCKKMETAVRVFGDMKGHGVTPDVTTYNTLLNAWVRAGDLESARKVFDEMAGEGTDRNSVSYNVMIKGY

SEQ ID NO: 243739 - protein, 83 aa, Zea mays
  Clone ID: MRT4577_153872C.1.pep
DCTPVVIDFTAAWCGPCRAIAPLFVEHAKKFTQVVFLKVDVDEVKEVTAAYEVEAMPTFHFVKNGKTVATIVGARKDELLARS

SEQ ID NO: 243740 - protein, 62 aa, Zea mays
  Clone ID: MRT4577_153873C.1.pep
QKKLGILNPGTGFFLPSKHLKTVVAFGPLIADIYHASLNLKHLHILPNFKKKNLPQYKWLAH

SEQ ID NO: 243741 - protein, 124 aa, Zea mays
  Clone ID: MRT4577_153874C.1.pep
LIQKKNLIIVWRKLPRQKVVVLKQCQEFILAPGGSQYPQMKDHRLLGSRRMRQATTHSTPRPRRPRRRWQPRCATAWTRQSSWRSGGAGGDAAAAEEEEGEGVEWWRAPAVVRTAPHLGGGRIC

SEQ ID NO: 243742 - protein, 103 aa, Zea mays
  Clone ID: MRT4577_153875C.1.pep
MELCQTCATFQVVIDFTAAWCGPCRAIAPLFVEHAKKFTQVVFLKVDVDEVKEVTAAYEVEAMPTFHFVKNGKTVATIVGAKKDELLALIEKHAAPAPASASA

SEQ ID NO: 243743 - protein, 89 aa, Zea mays
  Clone ID: MRT4577_153876C.1.pep
LKGPISCDGYPRAVTRVLSNIQGVETLYIHLTDHTVTIKGNVNPDDLLHTLSKSGNRTSYWEGEATAPNAAPSSGAEAAPGTDAEAPTA

SEQ ID NO: 243744 - protein, 59 aa, Zea mays
  Clone ID: MRT4577_153877C.1.pep
YPAMLIGNRMHGHCPDHKGAFGECQFLCCDQSFLTSFRSHVNERGWLLSSHKCLYVMLL

SEQ ID NO: 243745 - protein, 110 aa, Zea mays
  Clone ID: MRT4577_153878C.1.pep
FAGILSFLLFVSGVRTLFALLGAGAEGSAGMSSAGLVGATEEGSIGVVHDGKKTSNNLLVLSSLLSMLSQSKLVRGCCDCELCYQINLYLATIYLVQPIVSYINLWYGYS

SEQ ID NO: 243746 - protein, 66 aa, Zea mays
  Clone ID: MRT4577_153879C.1.pep
SMFCLQAVMNDNHDSAAKRGLGTIAPPQFPLAPPLRVLSPTPRPQFLYRIPHHSAWGHHKFQYLIG

SEQ ID NO: 243747 - protein, 75 aa, Zea mays
  Clone ID: MRT4577_15387C.1.pep
LLNSSRFYFPDTDMALKPPLNNGWHQLKSHHHISLCLVPTTPSFTPLHPTLWPHHIYHSLSLLLPFHPMSRPHHI

SEQ ID NO: 243748 - protein, 47 aa, Zea mays
  Clone ID: MRT4577_153880C.1.pep
AVSSRLYLADPLLGGGISLLIATNGHWRGANPHRYGSPGSPNGGDPR

SEQ ID NO: 243749 - protein, 143 aa, Zea mays
  unsure (1)..(143): unsure at all Xaa locations
  Clone ID: MRT4577_153881C.1.pep
KAAALASSTMALSSTAFAGKAVNVPSSSAFVYFPLTMRMTAGGGEPAAASGSPWYGPGRVLSLGXLSGVPPFYLTVVFPGVFCCHSXFLFSVPFTFSFFPSLFVFLSLFSLLFSLLCFFPFLLSLFFLLFSLFPLVLCLLPFL

SEQ ID NO: 243750 - protein, 221 aa, Zea mays
  Clone ID: MRT4577_153883C.1.pep
MAARAADENRRPGVGRPAPCVRDMGSRRALTDIKNLVGVAPNPCAVAKKPVLQKSRRDEKKTALPSSRPMTRKFVASLASKEQPECQPTRADQRKEAIGDGTVDIDVELDEPVEDSDSDIDMGDETENKDIMNQDESLMDIDSADSGNPLAATEYVEELYKFYRENEAKSCVNPDYMSSQQDINSKMRAILIDWLIEVHYKFELMDETLFLTVNVIDRFLE

SEQ ID NO: 243751 - protein, 83 aa, Zea mays
  Clone ID: MRT4577_153885C.1.pep
EKRGGVSPPQSGGGLFVISDTLSRGRALGSLWGARPRERIHPGLGILFAPGEKKTIEEALAPPLTPGGDWNLPPQKNPRDFFF

SEQ ID NO: 243752 - protein, 71 aa, Zea mays
  unsure (1)..(71): unsure at all Xaa locations
  Clone ID: MRT4577_153886C.1.pep
KYIYIAGFFLTVSPDSIQLVAEHAAANNKVVLMNLSAPLNREDIREAPEKVPPEADHNFGNETDAKNXSKD

SEQ ID NO: 243753 - protein, 47 aa, Zea mays
  Clone ID: MRT4577_153887C.1.pep
CHIPVTKYFPVHFCSAWTLLQYIPICISYRSLVHFLNHLAMCMSFCH

SEQ ID NO: 243754 - protein, 153 aa, Zea mays
  Clone ID: MRT4577_153888C.1.pep
VDFSFDYRAATQFWRNKVLEVAKDFPEYTFAVADEEDFATELKDLGLSESGEEVNAAILDEGGRRFAMEPDDFDADALRDFVTAFKKGKLKPVIKSQPVPKNNKGPVKVVVGKTFDSIVMDPKKDVLIEFYAPWCGHCKQLEPVYNSLAKKYK

SEQ ID NO: 243755 - protein, 119 aa, Zea mays
  unsure (1)..(119): unsure at all Xaa locations
  Clone ID: MRT4577_153889C.1.pep
GIPVWACYAAEPMARRGPVKTHSXHHSKGGLWARTRLLLQRSGGADGICKTGDEANSACCTCTPRRQLAQFTIRRRREPRLLLYVGDPRLQPRPCDFSRRTTSDPGGQIIHLHRRIISF

SEQ ID NO: 243756 - protein, 47 aa, Zea mays
  Clone ID: MRT4577_15388C.1.pep
AIITHETLSTQKMEFRTGSKPYYRDVPSPVGAGLTRTKFLQEIERGR

SEQ ID NO: 243757 - protein, 61 aa, Zea mays
  Clone ID: MRT4577_153890C.1.pep
CNICQCQLNYFLYIYEFQPSTNIEGILVFLIQKNPINNSNNLGKQTGLLRLYNPDYIILQK

SEQ ID NO: 243758 - protein, 62 aa, Zea mays
  Clone ID: MRT4577_153891C.1.pep
AMVAARDRDDWINSVVAGLGTGALFRAANGPRSAVVAGAVGGVLAGAAAAAKQVGKRYLPAL

SEQ ID NO: 243759 - protein, 89 aa, Zea mays
  Clone ID: MRT4577_153892C.1.pep
SFILIRLRFFLQSPADLFLQRPSSSPALISLCSPSPIVAQPVENASAALSNHRQRSAILIFSRAFFFYAQQVICSLDIFSAKQSLSPAV

SEQ ID NO: 243760 - protein, 70 aa, Zea mays
  Clone ID: MRT4577_153893C.1.pep
AVRVDGTMVVSAIPRGTEVVVHAIAGLLAPPESVVGSTLDPLEEVIHYSRSLLSSSGRRNARPSFTIHYT

SEQ ID NO: 243761 - protein, 108 aa, Zea mays
  Clone ID: MRT4577_153894C.1.pep
KLKTSRSYAGKRTTQTQIDYQFLTLHIPFFNGHWQWQGKNLHSHEFLESPRKYMSFSLSSDKKQGKQKISGRLEWKGENPLRLTFQSLFAQDPKFLFNSPPVLLLPFC

SEQ ID NO: 243762 - protein, 61 aa, Zea mays
  unsure (1)..(61): unsure at all Xaa locations
  Clone ID: MRT4577_153895C.1.pep
MGQTSLXPLFQLSKGQSVKGTNLLAVSLVKKKAPVGPKKQTASPRGWANXLNQGAQKVSRL

SEQ ID NO: 243763 - protein, 46 aa, Zea mays
  unsure (1)..(46): unsure at all Xaa locations
  Clone ID: MRT4577_153896C.1.pep
FKPPPPLYIXRPIILNAIHQTGYWRLMTLTNVTMVAQPLHISKFGS

SEQ ID NO: 243764 - protein, 92 aa, Zea mays
  Clone ID: MRT4577_153897C.1.pep
LHKQTTLPKVDINPIFCYIFLSKTSTTHDIPLAFISRAVLNTLMSDAYLFISHTHTVVHSYSRYNPLTNEYFKRILSFCSYNLFQDKNCKCS

SEQ ID NO: 243765 - protein, 66 aa, Zea mays
  Clone ID: MRT4577_153898C.1.pep
DDVGTTYRSRVLLCLPTRRRRIEGVMHKRNYGRTLTYRRRVPALQSTHASADIHDATSELVKADFC

SEQ ID NO: 243766 - protein, 115 aa, Zea mays
  Clone ID: MRT4577_153899C.1.pep
QGFLLNQGRPFECSLSEHLVLLPLHVFNPFPSTRWCSLQLHHFLMLPLLVASFFHRFQMMLGEIKGPQRDPSVVDDMCDTSSGDLTALFGVCLPIPGGSCYYQKAGRPQHSPGDR

SEQ ID NO: 243767 - protein, 76 aa, Zea mays
  Clone ID: MRT4577_15389C.1.pep
QQNKNTRLQARAGKGGGVHRGDGHSARAATGTILQDCAQASIEELWGRYHSPRASSDCENRNVEPDMVLQAIAAGK

SEQ ID NO: 243768 - protein, 65 aa, Zea mays
  Clone ID: MRT4577_1538C.1.pep
KPVSLDGVYFFGGGVCLSPKNGALIITSPQGNFFFYPATIFFPKMFKGFLGFKAPQKCSIDFPGF

SEQ ID NO: 243769 - protein, 157 aa, Zea mays
  Clone ID: MRT4577_153900C.1.pep
TTSSSTSSLSASSTTASSSSGSSTSASASASSHPSSASVSTSASSASSFTSSSASGSASGSASFSISSSFCVSSSAATGTASASASASGSSSASASGSSTLASASAAASSGATAVATGVSTSVASSVATSVAVWTSAVAMGDDQKADDYTTECLATS

SEQ ID NO: 243770 - protein, 65 aa, Zea mays
  Clone ID: MRT4577_153901C.1.pep
RSQMVGGGDSFSLHRLLRRLVTALHRLLRGSSVPFASQTDRERERRETGEMEERRSRRESITPAG

SEQ ID NO: 243771 - protein, 115 aa, Zea mays
  unsure (1)..(115): unsure at all Xaa locations
  Clone ID: MRT4577_153902C.1.pep
RLGKGVAERHRKGLRDNIQCITKPSXRRLXRRGGEKRISGLIYDETRGELKIFLQNVIRDAVTYTEHARRKIATAMHVGYALQRQGRPLYGFLRLIGATAAAGRGKSLGSRSINL

SEQ ID NO: 243772 - protein, 63 aa, Zea mays
  Clone ID: MRT4577_153903C.1.pep
TKYLAQVSFACFLRVHPSRFLRHTRFGFAGACQMNGQTPMVLAAVALRPCCNRLISSASAAAA

SEQ ID NO: 243773 - protein, 107 aa, Zea mays
  Clone ID: MRT4577_153904C.1.pep
SARAKSEPNFLWLVSNQLLVATFQLLKHVLHLKHIMHRNKRSIQQLITLMVTSLLEMDMENYATTTYGLLYHQVLIRARKWHRYLSLLLWQTRMLLLPHSINVLWQE

SEQ ID NO: 243774 - protein, 53 aa, Zea mays
  Clone ID: MRT4577_153905C.1.pep
KRGHTLIQLERKCSWKQSIINATEKMDIWDQSSHDMTESEFHGDILENVTVKT

SEQ ID NO: 243775 - protein, 190 aa, Zea mays
  Clone ID: MRT4577_153906C.1.pep
SPSPPSLSDHCISSPPGRRSDGAMDIKVCGVCGSGSNSALIVKCVRCNDYEHRYCMKVVARVSPQEWYCAKCQEHTNRGPKPSQGGQTELQKPCHGRDMTSERETSKLHLSQSSVVHQIISPKSLNRFENAKVKFISSEEVALLSRERPPSVTSRFTLSQPSKASSPPTTKHLSNMNCVSPSRVIKMCKP

SEQ ID NO: 243776 - protein, 127 aa, Zea mays
  unsure (1)..(127): unsure at all Xaa locations
  Clone ID: MRT4577_153907C.1.pep
MCPQLRWKTSQRRTLTLPQLTNNSKYLPIIEHRSDVESHESTHSGKTSSYICNQNDXSRAYGKDRSSGPSGKRRETDTQFKVSKQRTRLAHRDPYRRLWKAQFDESRMYGLEGDLIYHARXTLQYGA

SEQ ID NO: 243777 - protein, 70 aa, Zea mays
  Clone ID: MRT4577_153908C.1.pep
THSSADSSCQSLSGLVLSVYHHGVCNFSIIPSLNLNFLLLRSVLAILHQYSYICHCTHSIHHKFFYFILS

SEQ ID NO: 243778 - protein, 162 aa, Zea mays
  Clone ID: MRT4577_153909C.1.pep
MKSRQKKKTNLFAFAAIETTLWSIEWGIAELVPHMNLNDGKLAGFDIPAESKILVNAWFLANDPKRWVRPDEFRPERFLEEEKSVEAHGNDFRFVPFGVGRRSCPGIILALPIIGITLGRLVQNFQLLPPPGLDKIDTTEKPGQFSNQIAKHATIVCKPLEA

SEQ ID NO: 243779 - protein, 92 aa, Zea mays
  Clone ID: MRT4577_15390C.1.pep
MNKLLMVLLALAVCLVSANAFVKRDAPAAPAAEQNPLKDIQKTLEDFGKAISDNVQQVLNPDAIKEKIAEANQKLKEVMDNLKPAPKQPAAA

SEQ ID NO: 243780 - protein, 87 aa, Zea mays
  Clone ID: MRT4577_153910C.1.pep
QTLVFCNPAPVNLGFPYTIAQIFACHGPEFLIFLFFTPFFFFFFFFFFFFFFWQTLIFVMIVELILIISLITYTCTNVPRCNVRAYN

SEQ ID NO: 243781 - protein, 502 aa, Zea mays
  Clone ID: MRT4577_153911C.1.pep
MDLALLEKALLGLFAAAVLAIAVAKLTGRRYRLPPGPRGAPVVGNWLQVGDDLNHRNLMALARRFGDIFLLRMGVRNLVVVSTPELAKEVLHTQGVEFGSRTRNVVFDIFTGEGQDMVFTVYGEHWRKMRRIMTVPFFTGKVVARNRAGWEEEARLVVEDVARDPAAAAAGVVLRRRLQRMMYNDMFRIMFDRRFDSDDDPLFNKLKALNAERSRLSQSFDYNYGDFIPVLRPFLRGYLNRCHDLKTRRMKVFEDSFVQERKKVMAETGEIRCAMDHILEAERKGEINHDNVLYIVENINVAAIETTLWSIEWGIAELVNHPAIQSKLREELGSVLGGAGVPVTEPDLERLPYLQAVVKETLRLRMAIPLLVPHMNLNDGKLAGYDIPAESKILVNAWFLANDPKRWVRPDEFRPERFLEEDKSVEAHGNDFRFVPFGVGRRSCPGIILALPIIGITLASLVQNFQLLPPPGLDKIDTTEKPGQFSNQIAKHATIVCKPLKA

SEQ ID NO: 243782 - protein, 92 aa, Zea mays
  Clone ID: MRT4577_153912C.1.pep
CISSKTDIICKYMWSGLICSCMVNLNKQSYYLINLMGQGASFGRPWDEYLKDLTSNVFDGSIDMVRSKVLTPQSGRETFFYSNALNDKVRSK

SEQ ID NO: 243783 - protein, 501 aa, Zea mays
  Clone ID: MRT4577_153913C.1.pep
MDLALLEKALLGLFAAAVVAIAVAKLTGKRYRLPPGPPGAPVVGNWLQVGDDLNHRNLMAMAKRFGDIFLLRMGVRNLVVVSTPELAKEVLHTQGVEFGSRTRNVVFDIFTGKGQDMVFTVYGDHWRKMRRIMTVPFFTNKVVAQNRAGWEEEARLVVEDVRKDPEAAAGGVVLRRRLQLMMYNDMFRIMFDRRFDSEHDPLFNKLKALNAERSRLSQSFEYNYGDFIPVLRPFLRGYLNRCHDLKTRRMKVFEDNFVQERKKVMAQTGEIRCAMDHILEAERKGEINHDNVLYIVENINVAAIETTLWSIEWGIAELVNHPAIQHKLREELASVLGAGVPVTEPDLERLPYLQAIVKETLRLRMAIPLLVPHMNLNDGKLAGYDIPAESKILVNAWFLANDPKRWVRPDEFRPERFLEEEKSVEAHGNDFRFVPFGVGRRSCPGIILALPIIGITLGRLVQNFQLLPPPGLDKIDTTEKPGQFSNQIAKHATIVCKPLEA

SEQ ID NO: 243784 - protein, 58 aa, Zea mays
  unsure (1)..(58): unsure at all Xaa locations
  Clone ID: MRT4577_153914C.1.pep
MNRWSQVTTRWPRRTDNEIKNIXNSRVKKKLWQKGIDPNTHKPLAEVKHNKADPTSST

SEQ ID NO: 243785 - protein, 51 aa, Zea mays
  Clone ID: MRT4577_153915C.1.pep
FTLTITLPVTLFDTLSTTHFREDSITRTDDHIQVHVLKPIRPRLRKTTTDE

SEQ ID NO: 243786 - protein, 68 aa, Zea mays
  Clone ID: MRT4577_153916C.1.pep
SFMSKRHLLLSCYLKNVKQHILYFSYVLNNKTLVIPRFGVFSHWGYFSRVFLSFSCFLKIKGIPFILY

SEQ ID NO: 243787 - protein, 82 aa, Zea mays
  Clone ID: MRT4577_153917C.1.pep
KKTNHRALLRTMDERERTFLTLGGNHIIIRAGMCMHDNAGLAAPNDRSFTARGSSRQTFCHGGGGRAFQSRPRACRRGRGWG

SEQ ID NO: 243788 - protein, 163 aa, Zea mays
  unsure (1)..(163): unsure at all Xaa locations
  Clone ID: MRT4577_153918C.1.pep
VFPASLPHTGNQLLNHSVITWPVKTTSLSPDXTLLAVVVNDRDALLGDXRSGKATSTLGGQKDYSFTTELHPDRRTLRIVNQDKTCRMRHTPNLTTXLVALLSNMRAIRCMRYYSDGRILGLXEPADFVHVYRVDEDYKKPAENKLFGEVSGITLIPLDESLL

SEQ ID NO: 243789 - protein, 163 aa, Zea mays
  unsure (1)..(163): unsure at all Xaa locations
  Clone ID: MRT4577_153919C.1.pep
HSSPKKQKASKRNSGKSSLRSLILTKLYGKDCQKEKMLPVAPKLLRTMSRWVRXKEHRXDGEATASGEGAANSTKSSTQKAGEKTNPHQATXSDPEGRGADTSAALLLKIDDVRTKRKKSHRSISMDGILHKVPYGKKASGDVISEGLPRSASATYDRDGAKP

SEQ ID NO: 243790 - protein, 93 aa, Zea mays
  Clone ID: MRT4577_15391C.1.pep
REPSVRRRVGALRRHRARMQRRLRHLRHLPRLASRAPALLLVSLCERVCSIYMSSSSSSIRGIDRTGAAPLCYEPSQSTSILHRLRKLRVVVC

SEQ ID NO: 243791 - protein, 68 aa, Zea mays
  Clone ID: MRT4577_153920C.1.pep
HTHCPTTHIPVITTTNNREGQLGHSTRRTASQLHTTRTVHFPLTIILYFELPSIHPTLWPMNLTDPAN

SEQ ID NO: 243792 - protein, 87 aa, Zea mays
  Clone ID: MRT4577_153921C.1.pep
GAFFFFFFAKRRLCYIHVLNAIAVKIISQHREHAIILLPQLLPMSNRDCFAHAITVFEPDHSKCDVATGLRWQINDLGYLILPEPGR

SEQ ID NO: 243793 - protein, 191 aa, Zea mays
  Clone ID: MRT4577_153922C.1.pep
MAFQDRKMSPKRIAKRRSPPADAIPKSKKVKDTRAAASRRVPGARSCQGACGPSPPDQKTRPVSHRSHSTEPGLVLTLGQGDVGQLGLGENVMERKKPALVSIPEDVVQAEAGGMHTVCLSKSGQVYSFGCNDEGALGRDTSVEGSEMVPGKVELQEKVVQVSAGDSHTAALTDDGRVFLWGSFRDNNGVI

SEQ ID NO: 243794 - protein, 126 aa, Zea mays
  Clone ID: MRT4577_153923C.1.pep
TPMETDTAYVTTCSTSSSSGLMKRRLTSPETGACRRARRTSVCWVRATVDDTRLPRPKGARHVHTSYGGSLQPYMSCVITTSAARPTSPSRWSSRSASRMRPRPIGSSRTSERTRYSSCYYHRQLQ

SEQ ID NO: 243795 - protein, 87 aa, Zea mays
  Clone ID: MRT4577_153924C.1.pep
AARCSCVLSQLEIKIAVSGLRKLWLVCAIYWYTRGLVVACQDYRSVMLVVYCRLWCWPLGVLIFVSARSWYTGYKYRHKPSLEPWFS

SEQ ID NO: 243796 - protein, 102 aa, Zea mays
  Clone ID: MRT4577_153925C.1.pep
PLLAGPRARACLLNRSARIPFLPRCSSTTGRASPSLSALAYSPDVPLLWPCLVVFMDMDSIDIFIVARHCDLPTPCHTRPPPRLTPAAEQQHARHSLISLTV

SEQ ID NO: 243797 - protein, 178 aa, Zea mays
  unsure (1)..(178): unsure at all Xaa locations
  Clone ID: MRT4577_153926C.1.pep
VDPASVASAVSXTCGGWGCQTPPAHXLPPAVXMPAPFYLPPQQQSXAWQYPTQPPYFCPCQQVGSWGGGSVSSPFLGQCVELLRHQCSPAATPYGSPQCQALQQQCCHQIRQVEPLHRYQATYGVVLQSFLQHQPQGELEALXMADHGAQHVTAXMCGLQLQDAGLCXCNVSGGGVYY

SEQ ID NO: 243798 - protein, 66 aa, Zea mays
  Clone ID: MRT4577_153927C.1.pep
REQTKGTTGVPTPNPKVERTLTRRQKRTVTRYYRLIRQLGRRRMGPHMSSMIRRNLRLSEQNHIRT

SEQ ID NO: 243799 - protein, 143 aa, Zea mays
  unsure (1)..(143): unsure at all Xaa locations
  Clone ID: MRT4577_153928C.1.pep
AKKRAFGAQSRGDGALRKKGFPVTVDGFTPGPKLGPTXHXVVSNKNLFWLRXGQLSXAFEGPQAFRAFRPNWGKTFFKEXGRGLVCFQGFRKPPTPFFRGGHLSPKTXEVVHAFREALETGGKFPGVGPPKSTQLDFSVWLDK

SEQ ID NO: 243800 - protein, 110 aa, Zea mays
  Clone ID: MRT4577_153929C.1.pep
RPGLEPPSSRGDCRVRRRSRLRLASHSLVATDGSKSKGPCCLGSSRPNQAVDSEESRCRCPRLLPTPSPTPSRPGQHTLALLAGEGWAEDALPGPCQLTATWLLLAVAGK

SEQ ID NO: 243801 - protein, 84 aa, Zea mays
  Clone ID: MRT4577_15392C.1.pep
THSRGFNMLLPSSSASAYAVPEGPITTDYTYTSAFVRNDSCPIHRPMFALLQDMSNADKGRPAALCNTQAINLTLTSAINTMHS

SEQ ID NO: 243802 - protein, 80 aa, Zea mays
  Clone ID: MRT4577_153930C.1.pep
MGFMLRVRLASFFVGAAAAAAGGGYFLYKDYKLANDSLALKVKCLQDSTDTRYEALEKRLAALEGLQSPEAAPDVDTPSD

SEQ ID NO: 243803 - protein, 117 aa, Zea mays
  unsure (1)..(117): unsure at all Xaa locations
  Clone ID: MRT4577_153931C.1.pep
MADPVTIAAVGWGIAAVGWLVSPIITRLLNKAFSYLGVDGAKKLKELETKVLQLELLMEAXEESPRRNQLERLFQDLRSAFYEVEDILDDVEYCSLGRAALSLSHPGDSWIPRACLL

SEQ ID NO: 243804 - protein, 738 aa, Zea mays
  unsure (1)..(738): unsure at all Xaa locations
  Clone ID: MRT4577_153933C.1.pep
STQNFAAFELAKRGSNVDKRQIVAENSRGAVTTVAPPRLVIGREKDRVKVISMLRETLDDGQRDRSGAKPYSTIGIYGVPGSGKSTLAXYVCAHEEDNIHFDIIIWVHVSQKFSVQAVLRETIEQVTGKPGPQFAGATALQKRLKAEIRXKRFLLVLDDVWYSKNGNRHDDLQQILSPLNVAKAGSKILATSRTLDALLALGATRRIPIRDLDDGAFLNLFMHYALDFASIDERDRGEFQMVGAEIAKKLKRSPLAARTVGRQLCIRPNMEFWRNTRDRDLLDETMGALWWSYQHLDEQVRRCFSYCSIFPRRRWLDPEYLVRLWVAEGFVTASRNTGEELEAVGRGYFDELVSASFLQPVDGDKERYTIHDLLHDLVSKVAGSDCFRADNGWEGEFPQDVRHLWVENCKLDLIAHKITRLKKLRTLFISAGENGTPVEEKALLENIFTGVTTLRVLQITPWTAGTLSFPASVGRLKHLRYLSVGRHIGGTKVILPSTVVLGLYHLQLLDCPSVAFSSCEDIVKGLFGCTGMSQDSFQLIKIYINXEVIQLGXSGAPIRNNRTGPKLVSLRHLLCSSGSLNVPNIGRIVSLRTLRCFRVKKKAGYELWQLKHLNKLEKKLVIRGLQNAGRKGEAPEANLAAKERLTTLALEWDSDALLSCGADLQAEVLEGLCPPLHXLEKLRLCWYGGSRYPDWIVGVRCLCLYRCSRLGAFHGENISNAHGRLVHMVYILNHHHSF

SEQ ID NO: 243805 - protein, 52 aa, Zea mays
  Clone ID: MRT4577_153934C.1.pep
MSCFGRGPPFSGRSCPILFAPLFLFGFKFCFNNCHVLFPVWVRCLMPAAGCF

SEQ ID NO: 243806 - protein, 232 aa, Zea mays
  Clone ID: MRT4577_153935C.1.pep
PTRRRGRGRTYRLDQPGAPASPAMPSSTSAGGGAIPAGPPSTLSPNAAPYTFLARQSRAPPGRLQDGDAPRLIDNNFVLYGEDNSSYSVPLAAQSGMKQSDTVYSSSSHGTHQGQPSSARGIPVGVYPSPTSSIAIVSEPSVTIGSDFNQHLVPLTSGKGSRQPRVTIRSPPNKTSETNNTIFGSVSKLAIRKNDESNKETGKHVSFSRNLQLGSPAHGNGNSNGAMALSKS

SEQ ID NO: 243807 - protein, 113 aa, Zea mays
  Clone ID: MRT4577_153936C.1.pep
MKLSQFLSVAAVCGFAAASPIPDNAIAERENLYPRPYTLKMGGDAFKKRENLYGRPYTLKMKDDALEKRENLYTRPYTLRMEGDAFKKRDPQNTYGKAYTLKMKDDGFEKRDE

SEQ ID NO: 243808 - protein, 74 aa, Zea mays
  Clone ID: MRT4577_153937C.1.pep
KKVKKISNKSVETGKIVIFKVLKHVHTYICISSKYMSIIYYHIYYIIITHTITIIQSYTLPHYAHHSILLNPHL

SEQ ID NO: 243809 - protein, 111 aa, Zea mays
  Clone ID: MRT4577_153938C.1.pep
GGVVIDKDSKSMQPLSNKKENDEVFIKLGSDKDALKKKENAERDERAKKSVSINEFLKPAEGERYYGGRGRGRGRGDRGGFRGGYGEGHRSAAPPASEIKDHIQFPTLGRK

SEQ ID NO: 243810 - protein, 77 aa, Zea mays
  Clone ID: MRT4577_153939C.1.pep
SGSSCITATIVHRIRHRPIDTLVYVISVPSELNSEGHSIRRSRQSTGLSGSFARVFECVAVLDIGALLMINDHIAHA

SEQ ID NO: 243811 - protein, 230 aa, Zea mays
  Clone ID: MRT4577_15393C.1.pep
MGFTDLVSDAGLTLLNSYVRTRSYIVGYSPSQADVKVFQQIKEIPAPEKYPYAWRWYNHILTFQGEFDSLPGDPTKEFTAYGPESSELPLNPAKAPEKEAEDDEDIDLFGSDDEEEDAEAARIKEERLAEYNKKKAGKTKPAAKSIVTLDVKPWDDETNMDELKANVLSIEKDGLVWGASKLVAVGFGIKKLQINLVVEDEKVSLDELQQQIEEFEDHVQSTDIVAMQKL

SEQ ID NO: 243812 - protein, 177 aa, Zea mays
  unsure (1)..(177): unsure at all Xaa locations
  Clone ID: MRT4577_153940C.1.pep
SADSIDAIAPVMGYAHSSVNSNVGSAXITGGYVYRSMTDPCLNGRYLYADLYPESMWAGTETPDGSGVYNVSTMAFGCSKSSPIPCDFAAGSSLPSLGYIFSFGEDNAKDVYLLTSKGVYRVVDPAECDYACPVKSSAPGAGTPPPGAAPSSALRARAPALATLLAGVLLGFLCFSF

SEQ ID NO: 243813 - protein, 59 aa, Zea mays
  Clone ID: MRT4577_153941C.1.pep
NKQENYMNYIIGAWTINKSCRTLNYLQKLVRMIYHKNYAKYPNRSHKWEDQWKNETSAN

SEQ ID NO: 243814 - protein, 70 aa, Zea mays
  Clone ID: MRT4577_153942C.1.pep
LLHHGGEQYLFDIHNILNTTLGSPHKKPNLNIHDTPLLLTSTINIRSVLPSNTINIRIQSSSYHKHFQLI

SEQ ID NO: 243815 - protein, 167 aa, Zea mays
  unsure (1)..(167): unsure at all Xaa locations
  Clone ID: MRT4577_153943C.1.pep
LQLHQAAPLPGSSASDAPQNPIAFLHPTHLSLAVSSEXENPILQPYRSQQVITTGIITISTLIIQQTSRLLHQYXLGPISPQKITGQQLQQLXIRKHLRALTHQPISRDLPFKQLDALKSASNMRRQQLPYRQIPAVYPQQFLPFNQLGALNSPAYXNSXQLLPFRQ

SEQ ID NO: 243816 - protein, 396 aa, Zea mays
  unsure (1)..(396): unsure at all Xaa locations
  Clone ID: MRT4577_153944C.1.pep
MLAAAWRLSQRAVTSPLLGIGRSQIRNPFSTMASLSPAAASPKRLRVYSSAAADGDGAGSGKRVGTHNGSFHCDEALGCFLIRLTSQFAGADVVRTRDSQILDTLDAVLDVGGVYDPSRHRYDHHQKGFSEVFGHGFNTKLSSAGLVYKHFGKEIIAKELGVNEDHEDVHCLYLAIYKSFVEALDAIDNGINQYDTDQPPKYVNNTHLSSRVGRFNLDWTDPDQSLXNLNAAFEHQLVLAENAAFEQAMVLAGSEFMESVRFHVKSWLPARSIVLECLLSKGNIDPSGEIMVLDRFCPWKLHLFELEEELKTDPLTKYVLYQDERSKSWRVQAVAVAPDRFESRKALPEKWRGMRDDELSAETGIPGCVFVHMSGFIGGNKTYEGALEMARAALKF

SEQ ID NO: 243817 - protein, 106 aa, Zea mays
  Clone ID: MRT4577_153945C.1.pep
MPSSPQTPPPPVGRTAAHGGRHKHDDDDPSTPRGFCAKYFSRESCLLLALVTVLLVVLPLVLPPLPAPPLALLLVPVAMLAVLLVLALMPAAAGGRNEAVDPASYL

SEQ ID NO: 243818 - protein, 84 aa, Zea mays
  unsure (1)..(84): unsure at all Xaa locations
  Clone ID: MRT4577_153946C.1.pep
GKIEHPRGWRKNPKAFAELKVKEEKKGRPAKFSKXGFLGEAMVTGKGRLKNPADQKKDPGKKKEGGKATKLGPGKKGQGERKEN

SEQ ID NO: 243819 - protein, 116 aa, Zea mays
  unsure (1)..(116): unsure at all Xaa locations
  Clone ID: MRT4577_153947C.1.pep
MSASCXPLSVFXAFXCMSSSPLFVGGLSSGSVASSLWGGCRGCGPVVVAVPFLARASGWSGGFGFVPYTSSVAASAAVSAMVGLALVGRCLRVLPARVRPGGFLCFGGSGGGGFGG

SEQ ID NO: 243820 - protein, 57 aa, Zea mays
  Clone ID: MRT4577_153948C.1.pep
KTSKHQLFHKHILGILAAQVHVIEFLLIMQHGYKLTCPRAIQHYFREKICNLSFQTR

SEQ ID NO: 243821 - protein, 77 aa, Zea mays
  Clone ID: MRT4577_153949C.1.pep
RPKSTPGLRGGRGPPFFQKRKRKKRKDPPLLFVKKLCKNTPLFWKPSLFYLGHPQFYFGTTFFTGSIHLQAFLYKTW

SEQ ID NO: 243822 - protein, 60 aa, Zea mays
  Clone ID: MRT4577_15394C.1.pep
ARPPFSGAALFFFFFFFFFFFFFFFFFFFFFFFFFWGQKASLNCFEQNFFGFHSLPLFET

SEQ ID NO: 243823 - protein, 116 aa, Zea mays
  Clone ID: MRT4577_153950C.1.pep
GERTVSTIPGSDPCEQRVGVVTTEELRLLVAPGACVAESGVESSILLIRMSVTVWKPLPVTDATPVHAPSTPFLTYAGGQGPWNSGEDEAGVPVNHSLDESRNRGAATVGAPVGRP

SEQ ID NO: 243824 - protein, 98 aa, Zea mays
  Clone ID: MRT4577_153951C.1.pep
GSPTSSPVTERRCGGSAREDRRGHSRSRRGTGRSGTTGMMGERSKIRGAIRAVPYAVGNDPDGRQHQDTAAGTDDDPAPPHSRGEVHGALSEARRQNH

SEQ ID NO: 243825 - protein, 92 aa, Zea mays
  Clone ID: MRT4577_153952C.1.pep
RRLGRVPRGRLSRQYGHRRGLRTSLAFHRPPARQSSSLLWRQFRFPRPPGRLTRGVLRLRRVRLPGGRGRTHGGTLGGYYNGSLEYCWRLRR

SEQ ID NO: 243826 - protein, 219 aa, Zea mays
  unsure (1)..(219): unsure at all Xaa locations
  Clone ID: MRT4577_153953C.1.pep
MVGLGFPRSKEAARSHAVSFLLGAALPTALLFFLASDRLGDGLSTISHSWGNGPAGDDEANQHAMFKGLAELLPRVAMDDRTVIITSVNEAWARPGSLLDLYLDSFRNGQDTAHLLGHLLVVALDARGFRRCQAVHPHCYLLLNVTSSVDMSSAKPFMSTDYLELVWTKLVFQQRVLELGYNFXLFTDCDMVWFRNPFQHFXVYAXDLSCSSDNFKASP

SEQ ID NO: 243827 - protein, 88 aa, Zea mays
  Clone ID: MRT4577_153954C.1.pep
GGGPHRCTICRRGFATGQALGGHKRCHYWDGASASVSLSASGTGSSGVTLRNFDLNLMPVAENAGMKRWVEEEEVQSPLPIKKRRILD

SEQ ID NO: 243828 - protein, 77 aa, Zea mays
  Clone ID: MRT4577_153955C.1.pep
MAQPLVVNKDDYLDEEEYYSPFLSIDKGAVLQEARVFHDPQLDTRRCCHVITKLLYLLNQGATFTKVEATEVFFATT

SEQ ID NO: 243829 - protein, 203 aa, Zea mays
  unsure (1)..(203): unsure at all Xaa locations
  Clone ID: MRT4577_153956C.1.pep
CIHPSSPRTSAPEQSPHPPPRSXASPHQWHPPPAPPCPLPWPSSMTQLQPAPSPLALSCPYPGPPCRSPSPSQRQRECPHPPQTPPPLPPPQPNCLAHRSICRRSSTRPPRASSPGTSSRLRPLCASXYRPELGPLPEPSPXPPNXAPSSTRPASVRPTPSTPCSPPTSTTRRAWWQSSRGTKAPSASSSTRSRSHLRRRSSP

SEQ ID NO: 243830 - protein, 51 aa, Zea mays
  Clone ID: MRT4577_153957C.1.pep
LVRDARCAHVLGHEMVRRVAGSCRPSQVMDQRSIPLGDIYIYIYIYIYIYI

SEQ ID NO: 243831 - protein, 75 aa, Zea mays
  Clone ID: MRT4577_153958C.1.pep
HGYCARVRAAFARSLSLSSSLVHFHTSVGLCCQLSTQWRRFGAPLGHPFPGAVGGSLAHDTVCSTGSAHVRTPTR

SEQ ID NO: 243832 - protein, 62 aa, Zea mays
  Clone ID: MRT4577_153959C.1.pep
DGLLQYPPGPVQNIYRSSLYIFHRYTDKIIYYPIFYNGSSYIARTLRSTNSQMKYINKTPQK

SEQ ID NO: 243833 - protein, 68 aa, Zea mays
  unsure (1)..(68): unsure at all Xaa locations
  Clone ID: MRT4577_15395C.1.pep
YAAXAPAXISYLSSPFGFRHRQRRHTAASTQLLQPAHPWPFVGGGIIISSAIWSSNGVTAAGLRVCLV

SEQ ID NO: 243834 - protein, 51 aa, Zea mays
  Clone ID: MRT4577_153960C.1.pep
RVLFIHGPYFFPIRSFPFLTPFCFYCMANGGAWKNSKKKQNKKKKKKKKKR

SEQ ID NO: 243835 - protein, 68 aa, Zea mays
  Clone ID: MRT4577_153961C.1.pep
GSRTPSDRTVKKEDSDDSLVDYGEGVNGQFNEDGSFIGQYSGKKEKEPAEGNESSEAPSPVNAMNSFV

SEQ ID NO: 243836 - protein, 95 aa, Zea mays
  Clone ID: MRT4577_153962C.1.pep
QPGDYRPHLVLHEKVSCKIYISRMTYPTPGSSPQDSHAKLKSSPAGSGVNSIKTNSLSAHGGQSDNMDLIFSRLQNELLRSQETYADLGFLKQGL

SEQ ID NO: 243837 - protein, 83 aa, Zea mays
  Clone ID: MRT4577_153963C.1.pep
MAGKGGSTNLEKEQMFGMAEKEMEYRVDLFNRLTQTCFNKCIEKRYKEAELNMGENSCIDRCVSKYWQVTNLVGQMLGNRPQM

SEQ ID NO: 243838 - protein, 42 aa, Zea mays
  unsure (1)..(42): unsure at all Xaa locations
  Clone ID: MRT4577_153964C.1.pep
QARMRDPNFKFSPELKLKPKSKLVSRKKWQKXQTRKRKNDRR

SEQ ID NO: 243839 - protein, 83 aa, Zea mays; identical to SEQ ID NO: 243837
  Clone ID: MRT4577_153965C.1.pep

SEQ ID NO: 243840 - protein, 58 aa, Zea mays
  Clone ID: MRT4577_153966C.1.pep
LRYHSQLVCKSQVQAYQFRTTVRIWKRSSPSHSCGNHVKMLHRLEANSSCVTAYIRST

SEQ ID NO: 243841 - protein, 47 aa, Zea mays
  Clone ID: MRT4577_153967C.1.pep
MSGWFHTSFYFGYTLMFCLGLGILCGADGYLGCTLFMRRTYRAITCD

SEQ ID NO: 243842 - protein, 102 aa, Zea mays
  unsure (1)..(102): unsure at all Xaa locations
  Clone ID: MRT4577_153968C.1.pep
GFLGPPKVLEGVKAPGKNPQMWPXGPKPPPPTPRXGGPFPKKAPPGFVPRAPQALANPSPPGVKYLSLFNDKKVNPCPVFLCPPLYSLPLVVSCVVVPPSLS

SEQ ID NO: 243843 - protein, 208 aa, Zea mays
  unsure (1)..(208): unsure at all Xaa locations
  Clone ID: MRT4577_153969C.1.pep
ALIFFDDILIYSPTFDSHLTHLSSVLHLLRKDQWKVKLSKCEFAQTSIAYLGHIISAQGVSTDPDKITVVQQWPTPANSKELRSFLGLAGFYRKFVRHFGMISRPLTDLLKKNVLFIWTVEHQQAFELLKQALSSAPVLALPDFAIPFCIYTDACNTGVGAVLMQRGHPLAFLSKSLGPKNQGLSTYEKEXLAILIAITQWRSYLQLA

SEQ ID NO: 243844 - protein, 54 aa, Zea mays
  Clone ID: MRT4577_15396C.1.pep
PHRYITPGVSNLAMICPLEFQLESIRSFCLMVFYGFCNYIWWVTGEVCCAMKQT

SEQ ID NO: 243845 - protein, 105 aa, Zea mays
  Clone ID: MRT4577_153970C.1.pep
QLFTSDWAMHRDGCAEPLSDPALDLEQLIPSHDRLSGQTRSDSTFCRSPRLPRRIWSSRHGLFHQKKSVDVRHVSPLCSGLAHFIEQYRGIDRFQPHQDSYRLID

SEQ ID NO: 243846 - protein, 95 aa, Zea mays
  Clone ID: MRT4577_153971C.1.pep
LGLGKNKKGHGHPRTKHNWETKRTKPRPVVNKRAGPFNLEFTLQWGFDPFAITGKPLKSSLFLTTLRPKNSYYTRGTHWGPPGSGTTTDCPGFFI

SEQ ID NO: 243847 - protein, 59 aa, Zea mays
  Clone ID: MRT4577_153972C.1.pep
WCCYICFLFFHLFFIFLHKKKPLSLRTYRLGGLQKPEKGWGPWFSWAPFVNFLKGGGFV

SEQ ID NO: 243848 - protein, 242 aa, Zea mays
  unsure (1)..(242): unsure at all Xaa locations
  Clone ID: MRT4577_153973C.1.pep
MSRTKHVSRGGVGEARTARECHLRLPPSRPAGPGTSTSTATNPLPTRLVGLAAPPQSPGRSMEVAAASARPVLRVAAICGSLRKASFNRGLLRAAAEVCEDSIPGLRIDELDISDLPIINTDLETGSGSGTVFPPAVEAFRAKVCQADCFLXRGKNCWADKAAAIVSAGGGFGGGRSQYHLRQVGVFLDLHFINKPELCVQAFQQPPKFDSDGNLVDAEIRERLKKVLLSLQAFTLRLQKED

SEQ ID NO: 243849 - protein, 137 aa, Zea mays
  Clone ID: MRT4577_153974C.1.pep
ENKGPPRPGGKGKAPPPPPGGGGPQKGAPSRGVGQSPAHQATGPLGGQRQVPHPGVGGQGFFPVWAWEDPPKRGPLSLSVDQIGVGFCGLFRWLLLSSPSPPGGSPRHGGASFLIPGGVLPVPGLPNLFLQSVFFFP

SEQ ID NO: 243850 - protein, 268 aa, Zea mays
  Clone ID: MRT4577_153975C.1.pep
MEVAAASARPVLRVAAICGSLRKASFNRGRLRAASGRAGTSTSTATNPLPTRLVGLAAPPQSPGRSMEVAAASARPVLRVAAICGSLRKASFNRGLLRAAAEVCEDSIPGLRIDELDISDLPIINTDLETGSGSGTVFPPAVEAFRAKVCQADCFLFGAPEYNYSIATPLKNALDWASRGKNCWADKAAAIVSAGGGFGGGRSQYHLRQVGVFLDLHFINKPELCVQAFQQPPKFDSDGNLVDAEIRERLKKVLLSLQAFTLRLQKED

SEQ ID NO: 243851 - protein, 176 aa, Zea mays
  unsure (1)..(176): unsure at all Xaa locations
  Clone ID: MRT4577_153976C.1.pep
MEVAAASARPVLRVAAICGSLRKASFNRGLLRAAAEVCEDSIPGLRIDELDISDLPIINSDLEAFRXPEYNYSIATPLKNALDWASRGKNCWADKPAAIVSAGGGFGGGRSQYHLRQVGVFLDLHFINKPELCVQAFQQPPKFDSDGNLVDAEIRERLKKVLLSLQAFTLRLQKED

SEQ ID NO: 243852 - protein, 143 aa, Zea mays
  Clone ID: MRT4577_153977C.1.pep
PLAAAGSATRVLRCIWFFSDSAAPPADARNCWPWSPHPPRRCPRLTTSRTRPSTSVALAATIAAPASWTSCAARPDRSMPALSTAPWNFSGNRRPYRGPLILDSRCRGIRVFFRSFGDDVCNPDSNHRSIRCLEFLWVTCGRT

SEQ ID NO: 243853 - protein, 47 aa, Zea mays
  Clone ID: MRT4577_153978C.1.pep
KHKGLGNVTPKASNPVWVFQWFTKAKSCFPLVKICMPRGPILYYKGK

SEQ ID NO: 243854 - protein, 345 aa, Zea mays
  Clone ID: MRT4577_15397C.1.pep
IDGYCKRGQVGKMYHVDALLKEMIQAGISPDVVTFNVLINGYCKEPNITAAIKVFQEMRQQGIPANVVTYNSLVSGLCREGKVEDSIKLVEEMEELGLACILSTMNIVLNGFCKKGMMVEAEGWVDGIAQRGMKPNVITYNTLVDGYRRLGKMKEAAAAKDAMAGKGISPNVKTYNCLITGFTTSRDWRSVSGLLNEMKEKGVKADVVTYNVLIGALCCKGEVRKAVKLLDEMVEVGLEPEHMTYNTIINGFCEKGDAQGAHEIRLRMEKRKKRANVVTYNVFLKYFCKMGKMDEANVVLNEMLEKGLVPNRITYEIINSGMIEKGYVPDISGYAADVSKNLTSS

SEQ ID NO: 243855 - protein, 67 aa, Zea mays
  Clone ID: MRT4577_153980C.1.pep
LLRQLLSKCFRFNNHGKYAPPSCFSPVEIFDPFEVPPSQTVHCQFAGFSLDVMKISVHGSLNLPCLI

SEQ ID NO: 243856 - protein, 84 aa, Zea mays
  Clone ID: MRT4577_153981C.1.pep
GRWPLAVFQPQIFPTPAKGCDYSFFEQNGEDRRAGNCSHNPGGLFCFIFSKIPRAGWVPASPPEYSFQKKNPPQVMSFVFPSYL

SEQ ID NO: 243857 - protein, 158 aa, Zea mays
  Clone ID: MRT4577_153982C.1.pep
LGTSRPAGNPLGVAESTCNCKPTKSSRAPTPPNRVASEIEQGLEEPGERPSEEEDQQQAGGGGEVVGVGGRGIYDDNPVEAGGATARLPDPIPAQVNPPPVSIPLNLKPQPVTPPSNNGVVTVAVCSDLVGLDAGGARFGSISLWLGFVSELQWVELH

SEQ ID NO: 243858 - protein, 87 aa, Zea mays
  Clone ID: MRT4577_153983C.1.pep
CFSSFAKRPNSDLTPLAAERSSLLALLALFASATHAPIIAQCYTCSMTHNSTVPPTRVFNGLLTPQCASIIGYNRRLGLAVNTNQWP

SEQ ID NO: 243859 - protein, 352 aa, Zea mays
  Clone ID: MRT4577_153984C.1.pep
HTAFAADDAIIAAAAAITSQPGRRFTSYPPARARGGCRLAPAAAARQATDDPGAAVSWPELVVPRHADFDDWMEKHPSALAAFESVLAAAKGKKIVMFLDYDGTLSPIVRDPDSAVMSEEMRDAVRGVAEHFPTAIVSGRCRDKVFNFVKLAELYYAGSHGMDIKGPTAQSKHTKAKAGAVLCQPARAFLPVIEEVYRALTASTAPIPGATVENNKFCLSVHFRCVQEEKWRALEEQVRSVLKEYPDLRLTKGRKVLEIRPSIKWDKGNALQFLLESLGFAGSNSVFPIYIGDDSTDEDAFKVLRNLGQGIGILVSKIPKETRASYSLREPSEVEEFLRKLVSWSKESRQRD

SEQ ID NO: 243860 - protein, 115 aa, Zea mays
  Clone ID: MRT4577_153985C.1.pep
MSDLLSYISKVMCIKARSEATQAGEDSGCPADECRVCLSKIRLGEATRRLPCRHVFHRDCVDRWLSSCKRTCPLCRVYVADGNKQPVAAKHTSREAQALADDLVIWFSTVLVPGF

SEQ ID NO: 243861 - protein, 68 aa, Zea mays
  Clone ID: MRT4577_153986C.1.pep
GKAIPLGVESFAPLATGKAKIPAKGGIPPDHQGLFFPGNHLEDGGPLAGSNFPKGGPPPLGLRFRGGF

SEQ ID NO: 243862 - protein, 115 aa, Zea mays
  Clone ID: MRT4577_153987C.1.pep
MSDLLSYISKVMCIKARSEATQAGEDGGCPADECRVCLSKIRLGEATRRLPCRHVFHRDCVDRWLSSCKRTCPLCRVYVADGNKQPVAAKHTSREAQALADDLVIWFSTVLVPGF

SEQ ID NO: 243863 - protein, 60 aa, Zea mays
  unsure (1)..(60): unsure at all Xaa locations
  Clone ID: MRT4577_153988C.1.pep
AHITPSGGLSSWXDGPIRXRNHPHXYRAVNSGIXVLVTVILWLCVVAPXPTNFFPPPPPP

SEQ ID NO: 243864 - protein, 210 aa, Zea mays
  unsure (1)..(210): unsure at all Xaa locations
  Clone ID: MRT4577_153989C.1.pep
MSIRRGSASSGAMRSNSIAADADLARMGYKSELPRHLSMLSVLGLSFAIMAVPYGLSTTMYITLTDGQSVTILWGWVLISLISVSIAASLAEICAVYPTXAGGVYYWSAMMSTPEWAPIAXLXGGWFNLVGNWTVTLSIXFGGAQLILSAYSLXWREDFAPTAWQKFSGFWAIMLVTFLIXXFGSKYLDLXHSFAFMNLGASGVIILITL

SEQ ID NO: 243865 - protein, 51 aa, Zea mays
  Clone ID: MRT4577_15398C.1.pep
MKSKPRRRRSRRKCRKAHFTARSSVCRVFMPTPLSTQLRHKYNARSIPIRK

SEQ ID NO: 243866 - protein, 75 aa, Zea mays
  Clone ID: MRT4577_153990C.1.pep
LHNLPSEKAAPVYNHSGATINGGYARSGNAGLAAFNKMGSYFHNSNGNGGEVKSYSNKSAETLALLDIFADKDDA

SEQ ID NO: 243867 - protein, 343 aa, Zea mays
  Clone ID: MRT4577_153991C.1.pep
MEGYDREFWQFSDQLRLQTTAFSGLSLGDSIWSPATGAGGRRNNNTDLLAASASAADAGKHNGVGLSLNDGGPGLIGSGKLAFGGSKAGRYNNLPSEKAAPVYNHSGATINGGYARSDNAGLAAFNKMGSYFHNSNGNGGGGGEVKSYFNKSAGRAASNNSHGHAGGGKKGGGGGKHGKNEGNGGAVAATDKRFKTLPASEALPRGEAIGGYIFVCNNDTMDENLRRELFGLPSRYRDSVRAIRPGLPLFLYNYSTHQLHGIFKAASFGGTNIDPTAWEDKKCPGESRFPAQVRVATRKIYDPLEEDAFRPILHHYDGPKFRLELSVAETLALLDIFADKDDA

SEQ ID NO: 243868 - protein, 78 aa, Zea mays
  unsure (1)..(78): unsure at all Xaa locations
  Clone ID: MRT4577_153992C.1.pep
LAXHSDYDSDVQTTGHYRLQDIPIQTTYYDKYIPTLRLPNRRALPSLPPRKRDFCIRTTNQKRDQLGANKTSTTKFHV

SEQ ID NO: 243869 - protein, 45 aa, Zea mays
  Clone ID: MRT4577_153993C.1.pep
FIFSSFFSPFLITLIVTEFCVLLYVAVHTKILWYIVKVLNKSVAL

SEQ ID NO: 243870 - protein, 60 aa, Zea mays
  Clone ID: MRT4577_153994C.1.pep
GCRLFGNSDPQDSLMPPDAVTPPPPTSQPNWLTLCLFPAGGSSQIHLSNTETSGRPCTRP

SEQ ID NO: 243871 - protein, 79 aa, Zea mays
  Clone ID: MRT4577_153995C.1.pep
DGKVKRIAPPYLQRVLVRVEFFGDQQQGRHVPLICPPGLFLGPCSTPPPWSGPYSMSIFSLEWVPIFSSVGPGLNVCLS

SEQ ID NO: 243872 - protein, 88 aa, Zea mays
  Clone ID: MRT4577_153996C.1.pep
WLVKDRDHLNTTPLAQRLQCARTSLRLARCLTIIYYCPTLLDLSAIYKDAQMFKQHAKHQAAAAAQGGAPTRGRSSADESTTAGAHNS

SEQ ID NO: 243873 - protein, 282 aa, Zea mays
  unsure (1)..(282): unsure at all Xaa locations
  Clone ID: MRT4577_153997C.1.pep
LLIAQHRSPLNTDAPKXSRAEKQARERRXLKSGLGMXLDNXNDXEKQIKAIEESFRAAKSRPVHQTKRGMQAEWVMPLLPDFDRYEEPFVMVNFDGDPTADSEQYNKLERPVRDECESRAVMKSFSVSGSDPSKQEKFLAYMAPAPHELARDLDDENDDIQYSWLREYHWEVRGDDKDDPTTYLVTFDKEEGAKYLPLPTKLVLQKKKAKEGRSGDEIEHFPVPSLITVSKTAHGGTMERGESSGMHVNSKPRRSHVDDDLDEHPKRTRVEDIDQYSEEYSE

SEQ ID NO: 243874 - protein, 161 aa, Zea mays
  unsure (1)..(161): unsure at all Xaa locations
  Clone ID: MRT4577_153998C.1.pep
GRPGKKKKKKKKKKKKKKKKKKKKKKKKKKKKKKKKKPGFSQRGVGFPPPSGWGSGGSPGFGFGGGRIKMAASNVKNRCFFGGLPWARKNHSLQNALRTXGEALKSKIFLNRKTKRPRGFGFVTFSTEEGMGNPIKGLNGKELNGRKITVKKAQSRXAREG

SEQ ID NO: 243875 - protein, 36 aa, Zea mays
  Clone ID: MRT4577_153999C.1.pep
LMAKFVLCHISVYQQLLSTNHTINYLRRHGAISNHI

SEQ ID NO: 243876 - protein, 91 aa, Zea mays
  Clone ID: MRT4577_15399C.1.pep
TTEGDTSLVCADEHHKVVHLIGTQGWIRCLHFSKEHEWSPLFVAVQDRAVSRSESLSLTYGTVKGVGHTAPQCMLRQSYDMPVRYVYADRL

SEQ ID NO: 243877 - protein, 97 aa, Zea mays
  Clone ID: MRT4577_1539C.1.pep
HLLAYFTLGRGGGGRSGLLSPLTCATYAGREAAEQAPLTCGYRLRIKRGLLGNHRPEQEGGGRKRSRNQFLRPPSPLLTYPLLTLRSFYLYSVLIRL

SEQ ID NO: 243878 - protein, 70 aa, Zea mays
  Clone ID: MRT4577_153C.1.pep
MLTRAREGLIQAERTAVAAADIACTKDEITYNEPLDLIRLSLDERIYVNLRLYRQLRDKPHANDQHLNMI

SEQ ID NO: 243879 - protein, 195 aa, Zea mays
  unsure (1)..(195): unsure at all Xaa locations
  Clone ID: MRT4577_154000C.1.pep
MVLVGEMLASAVIKEVVRRLPALLQAPVKGPAKMIRSFREDLDEMKMTLESIKATMAEAEKRSINDETARLWLKRLKRAAYDISDMFDEFEHGSAPGKKLQGPSWFEIMFSRDMAKKMKKMNKRLKEIAEQWKNYGRVSCEPKNDAAEEHETTSXLQSAVVGGRRAEKQAVINILLSSNNTYPQETISHCTVIHG

SEQ ID NO: 243880 - protein, 77 aa, Zea mays
  Clone ID: MRT4577_154001C.1.pep
MQQDNFASVQMLPMSFEGENGAAARVGMNGGGGYGFAYSPAMGVGHGVVSGHVQQQQINGGQFLKNSTTGGDYRPTM

SEQ ID NO: 243881 - protein, 103 aa, Zea mays
  unsure (1)..(103): unsure at all Xaa locations
  Clone ID: MRT4577_154002C.1.pep
LLLFGWAMPFHMPSGLGGILIMMTGHEDMEATWCALAERVVQIISASTKTIPKPETPTIYLQLPADLHAKIFQRAAEGARXCIDATNVAVTSLTEEGMLYVMD

SEQ ID NO: 243882 - protein, 54 aa, Zea mays
  Clone ID: MRT4577_154003C.1.pep
HASWYPVSIIVLRALGDPRHLRRDILRSRPPHPCCRPADSDKLYCGGLLRDLHE

SEQ ID NO: 243883 - protein, 168 aa, Zea mays
  Clone ID: MRT4577_154004C.1.pep
LRSKKLVWKKKKKRGAPPVLKLFGGAGRPQKLPVFPPVFPGVGQPPVQKTVFFFFNKFFNTCFWVPWGFSGNKGGCPFFHNWKPKPGGPKCPLIKGGGAYPNLGGGVFFFFLKTSLPRFPFWVKAPFIFWLWPSRFFFSPFIFYPVFVFGPNPLLTPPLFIFFFSPRA

SEQ ID NO: 243884 - protein, 41 aa, Zea mays
  Clone ID: MRT4577_154005C.1.pep
AMESRLVLFKLNFGKHAPRSKIGERQMSMNRCKLYYMEVDT

SEQ ID NO: 243885 - protein, 115 aa, Zea mays
  unsure (1)..(115): unsure at all Xaa locations
  Clone ID: MRT4577_154006C.1.pep
YSNLLSIFTAEAKSTGGTPSYISPYVLAIKEYHXKVTYLFSCLVTLYVILVLSYXPFNDPYQPNNFLKTLTLIITIHYSFPYFFQFSMNCMHLLSQIFIAKPYQRITIPDINNHP

SEQ ID NO: 243886 - protein, 232 aa, Zea mays
  unsure (1)..(232): unsure at all Xaa locations
  Clone ID: MRT4577_154007C.1.pep
GRIIHRDVKPTNILVNTRGQVKICDFGVSDNLVASIARTNIGCQSYMAPERISGGGYAQAGNSDGSYSVQSXDVWSLGLTVIECAKGAYPYPPEVTSTIFSQLSAIVEGEPPAMPEEGYSDTATDFGRSCLHKIPKQRPTYAMLLKHPWLIDFTKPQTITEEAEDGDEADKVAEAVGKIALNSTTEDAEVADWVNGVLQKERDGLKVCGPLRPALHTAPLDSVSPISSPNDA

SEQ ID NO: 243887 - protein, 131 aa, Zea mays
  Clone ID: MRT4577_154008C.1.pep
DAGAAEADEMVMWPPAPILDLARLAVDSGGDPGAIHRALDPTMLPVPDVEGSQKNKCHLTRTPYGRRFANEEINSYFAFLFELIVARAPSVGLNVSLNRYDLFHGHLFLASETGRLGILSPAYSRKRYKTS

SEQ ID NO: 243888 - protein, 209 aa, Zea mays
  unsure (1)..(209): unsure at all Xaa locations
  Clone ID: MRT4577_154009C.1.pep
MAAATVSVPRIKLGSQGLEVSAQGLGCMGMSAFYGPPKPEPDMIKLIHHAVAAGVTLLDTSDMYGPHTNEILLGKALQGGVKEKVELATKFAVSFADGKREIRGDPAYVRAACEASLKRLGIDCIDLYYQHRIDKKVPIEVTHMPRLQPENIVKNAKIFEHVNAMAAXKRMHTITASIGMGSPSGKRCLPHTWNNKNRELQPERGGAFL

SEQ ID NO: 243889 - protein, 92 aa, Zea mays
  unsure (1)..(92): unsure at all Xaa locations
  Clone ID: MRT4577_15400C.1.pep
NMTDHYRTQWVHANVTWHIKPTSDLPNHKGVLCGNKDLNXCPLKXLGTCGNVPMFKDGQSXRSCYQITCDKXHLXSGEHVVLHITNINYETI

SEQ ID NO: 243890 - protein, 93 aa, Zea mays
  Clone ID: MRT4577_154010C.1.pep
QPNGGGIKKGRDLENNGCVGIWVNMCKGPPQGFFPKEVGVPPPLNPNFENMSCEIKNGQGPPPLEKDPGLKQTFYPSLCSMLTPFAPACPKVQ

SEQ ID NO: 243891 - protein, 63 aa, Zea mays
  unsure (1)..(63): unsure at all Xaa locations
  Clone ID: MRT4577_154011C.1.pep
PTAADGLQLQDVTEIPSYWVSYTLLIIEFFFXYYKPHYMHLRCNSIHNLGFNITAGSTASYRR

SEQ ID NO: 243892 - protein, 346 aa, Zea mays
  Clone ID: MRT4577_154012C.1.pep
MAAATVSVPRIKLGSQGLEVSAQGLGCMGMSAFYGPPKPEPDMIKLIHHAVAAGVTLLDTSDMYGPHTNEILLGKALQGGVKEKVELATKFAVSFADGKREIRGDPAYVRAACEASLKRLGIDCIDLYYQHRIDKKVPIEVTIGELKKLVEEGKVKYIGLSEASASTIRRAHAVHPITAVQLEWSLWSRDAEEDIIPTCRELGIGIVAYSPLGRGFFCSGAKLVDSLSEQDFRKHMPRLQPENIVKNAKIFEHVNAMAAKKGCTPSQLALAWVHHQGNDVCPIPGTTKIENFNQNVGALSVKLTPDEMAELESCAAAGEILGDRYPQMANTWKDSETPPLSSWKSE

SEQ ID NO: 243893 - protein, 410 aa, Zea mays
  unsure (1)..(410): unsure at all Xaa locations
  Clone ID: MRT4577_154013C.1.pep
MAAATVSVPRIKLGSQGLEVSAQGLGCMGMSAFYGPPKPEPDMIKLIHHAVAAGVTLLDTSDMYGPHTNEILLGKALQGGVKEKVELATKFAVSFADGKREIRGDPAYVRAACEASLKRLGIDCIDLYYQHRIDKKVPIEVTSAVEGYNLTGEDNGLGLRTTXGVRPVRDSAPLTLNFWIELVSVSTLTPXHFLLDSXWSSFFPVXIGELKKLVEEGKVKYIGLSEASASTIRRAHAVHPITAVQLEWSLWSRDAEEDIIPTCRELGIGIVAYSPLGRGFFCSGAKLVDSLSEQDFRKHMPRLQPENIVKNAKIFEHVNAMAAKKGCTPSQLALAWVHHQGNDVCPIPGTTKIENFNQNVGALSVKLTPDEMAELESCAAAGEILGDRYPQMANTWKDSETPPLSSWKSE

SEQ ID NO: 243894 - protein, 75 aa, Zea mays
  unsure (1)..(75): unsure at all Xaa locations
  Clone ID: MRT4577_154014C.1.pep
XXFFFFNYSTTSNSLHNQNWHNNTDTTCWLADKNTNLILHILNAMTHDIYRTNSQLTIHFVPKLYHMNIKSTHFF

SEQ ID NO: 243895 - protein, 91 aa, Zea mays
  Clone ID: MRT4577_154015C.1.pep
GANVLGRFRDSADGTVRWCFGAPFMMVWVQGSGLLAFLTFSGYGDCLGAFALCWHVFLDLMLHFFVVTVSCGIVFLSRHWPLPLCINNNMG

SEQ ID NO: 243896 - protein, 159 aa, Zea mays
  Clone ID: MRT4577_154016C.1.pep
ISCILMACAHLAALRMGKQIHAYVTRHHEYEPSVYFVANCLIDMYSKCGDVDTARNVFDSMPKRNEVSWTSMMSGYGMHGRGKEALDIFDTMQKAGFVPDDISFLVLLYACSHSGMVDQGLNYFDIMRRDYDVVASAEHYACVIDLLARCGRLDKAWKT

SEQ ID NO: 243897 - protein, 164 aa, Zea mays
  Clone ID: MRT4577_154017C.1.pep
KKKKKKKKKKKKKKKKLKNKKKKKLLVLGRISPFRLVLGAILPPGGRFAPSCGGPYIPLGGGFSPLGGGGFWRSPLETPWRTPPFPPGAPSPFGPLRSPLKGPPHSPLQVVAPPFCELDPPCGGASRAGGVGVPRGVTPPLATALPPFLSPFCRFFLAALGGVS

SEQ ID NO: 243898 - protein, 135 aa, Zea mays
  Clone ID: MRT4577_154018C.1.pep
HCRNCFQIVRLIVISRPDRYFGLDSISSPDRPYRPISWRYGAINRADERSVDQQGSPLGVFGWPIINITSRPEPPSLLPWRPVPWRPEQLFFQDRRLPSLPLLSPFNTLLSPSEARTLLQSSCLQSSDLSSELPS

SEQ ID NO: 243899 - protein, 152 aa, Zea mays
  unsure (1)..(152): unsure at all Xaa locations
  Clone ID: MRT4577_154019C.1.pep
TRRAPQRARDPGRKKRERTALSSRPPTPARAKKEGRAXKRXPKEXKDPQKDPPTXXXAGGAXEDXXXXQATXTGPXDXPXAGGXXXANXXXPPXXPXKXPKXXXKTKXXQPXXNSKGRXGPDXPKEQRSPXXTXXKGPPXXXPRXTDPNPDD

SEQ ID NO: 243900 - protein, 57 aa, Zea mays
  unsure (1)..(57): unsure at all Xaa locations
  Clone ID: MRT4577_15401C.1.pep
MARTQSAVAVAVVAAVLLLAAAATTSEAAITCXQVSSGIARCLSYARXTGSCTSASC

SEQ ID NO: 243901 - protein, 351 aa, Zea mays
  Clone ID: MRT4577_154020C.1.pep
MGAATGPTKRSRVPSKRQEEEEEAMARAAGVEAQARRRPRLVGYEELPEYLKDNEYIRGHYRAEWPVRDALLSAFAWHNETLNVWTHLGGFLFFLALAVAGGWTEAADEAAPGIMRFVVTPPANASWGSAQHSGLPSHDGRASQSGVPRWPRTVFLVGAMSCLAISATAHLLACHSRRASVVFWQLDYAGISVMIVASFVPPVYYAFLCHPPARAAYLSAIAALGALVVAALLSPSCSSPRYRRLRAALFLAMGLSGVVPALHALWLNWGHAACYLALGLEVAMGLAYATGAWFYVSRVPEKWRPGVFDVVGHSHQIFHVLVLVGAVTHYVAVAVLIHWREKVAAACGAAS

SEQ ID NO: 243902 - protein, 76 aa, Zea mays
  unsure (1)..(76): unsure at all Xaa locations
  Clone ID: MRT4577_154021C.1.pep
KXLVXGSEPXFKLKXLXLFRGRXVPXFXXDEVYDXXLXEWXXVDISGEAQTERVXAXLXDQAPFAGEALLDAXCFK

SEQ ID NO: 243903 - protein, 41 aa, Zea mays
  Clone ID: MRT4577_154022C.1.pep
LYTLHGSTILKSLVYYDLTSHRDFCKYLCELVMLGDGNCGT

SEQ ID NO: 243904 - protein, 140 aa, Zea mays
  Clone ID: MRT4577_154023C.1.pep
WVTEKDIPSLPYVDAIVKETMRLHPVAPMLVPRLSREDTAVAGYDIPAGTRVLVSVWSIGRDPALWDAPEEFMPERFLGSRLDVKGQDYELLPFGSGRRMCPGYSLGLKVIQVSLANLLHGFAWRPPDGVTMEELSMEEI

SEQ ID NO: 243905 - protein, 90 aa, Zea mays
  Clone ID: MRT4577_154024C.1.pep
ILSILPLLTSRRPRNWHPTFGPTQGWPPPGGHTLTPYSLWYRELAPLTISTNVDTGLPAGLPTPMLMLGSRTSPRTLSHTITRYSKPLAC

SEQ ID NO: 243906 - protein, 235 aa, Zea mays
  unsure (1)..(235): unsure at all Xaa locations
  Clone ID: MRT4577_154025C.1.pep
LEAGREEIPLHCEIPTFNQSQYPRVVTEDFVSLPSXKANLGKDGXWHPSMDSGDXFPIFRITAGKLDILLAQDEEXSFGAHSHTLRGIVDIKILNHLINIRTPYCMDATPKTXADLNGGTLISYKRKDQFLDIAQVPXDHVNEFKSXIEKFNIFNTNNSWVNLYPINRLRKAEALEMEIIPNLQEADGGKVLQLKTXCDAAIQTFEQXIAINAPLSMLLPXKATSDLMLVHADLN

SEQ ID NO: 243907 - protein, 86 aa, Zea mays
  unsure (1)..(86): unsure at all Xaa locations
  Clone ID: MRT4577_154026C.1.pep
MPLPNDIAILNPPAEFEKLKHKRNRLDQIPNCFLMDVKSQGCYSITTVISHSXTEVVCPGCQTVLCQPTGGKAKLTEGCSIRRRGE

SEQ ID NO: 243908 - protein, 93 aa, Zea mays
  Clone ID: MRT4577_154027C.1.pep
RRGRRNGKDSQTARTVGCVSSPMQLTSPKVRPGPRVSNEDCREIYPATPETASAAAAEPTAATDPTSRCNRAIQKESSPVLQDLQIDRFRKHC

SEQ ID NO: 243909 - protein, 35 aa, Zea mays
  Clone ID: MRT4577_154028C.1.pep
IYSVHVTYDPQLAGDGLGEQQGCVRDQADQGQRFT

SEQ ID NO: 243910 - protein, 69 aa, Zea mays
  Clone ID: MRT4577_154029C.1.pep
KKTSRMPPPYLGPLKGRLFFFFFFFFFLGPKCSSSINIFILPYPNYKIRYGILHLASVCRTGVRRCVLL

SEQ ID NO: 243911 - protein, 91 aa, Zea mays
  unsure (1)..(91): unsure at all Xaa locations
  Clone ID: MRT4577_15402C.1.pep
SLCPLSAWPDPYPPALLFLLYILESGGQGREGTCQARPGAPGPDPHHADPGLQFLXMVPSIPDPECFRATLCVLLQCVLSVHPXLPSVPDT

SEQ ID NO: 243912 - protein, 227 aa, Zea mays
  unsure (1)..(227): unsure at all Xaa locations
  Clone ID: MRT4577_154030C.1.pep
MLPHTPSRTSGALRFKPHLPTKPPLLTSSSTATPASASTRGRLCAAAAATRRDLLVLVPSLVAASTVLQSLPLAASAAAADDKPAPPPPAQAQAPASPASPPPPPPADEPALSRVYDATVIGEPQAVGKEARRRVWEKLIAARVVYLGESELVPDRDDRVLELEIVRKLAAGCAEAGRSISLALEAFPCDLQEQLNRFMDGRIDGNTLRXYTSHWAPERWQEYEPLL

SEQ ID NO: 243913 - protein, 64 aa, Zea mays
  unsure (1)..(64): unsure at all Xaa locations
  Clone ID: MRT4577_154031C.1.pep
RSSGTPLPCHTRYGVISVSCHGLCHLACLSQSVRALXLLRVDIRSNSLFGSILLNPYAFAFYIT

SEQ ID NO: 243914 - protein, 77 aa, Zea mays
  Clone ID: MRT4577_154032C.1.pep
LPWVKKGFVTPKKGKAGVIINGGIGFSFERYLYLALTNFFGLPAFGASFCGPPNKKLCGGGGKKDKTPCLVSFPPCW

SEQ ID NO: 243915 - protein, 91 aa, Zea mays
  Clone ID: MRT4577_154034C.1.pep
PPPKNAQGDSFNISHPDLGGKRKAPTPRKKKKGNARKTSFIKIHPGPPNEDNASRNGNKERENSPKKGVKSTFKRGIFHPQFPSPPYRYRR

SEQ ID NO: 243916 - protein, 111 aa, Zea mays
  Clone ID: MRT4577_154035C.1.pep
LCTILRGICLIKLLDDGVFPCCLTTKEGLVLLTIARGMPPLTLVFILRAWDPSHGTSSRTRSRIPPGSRRAYETPLASSRSSSRRARPTIALSMSRSRATRGVSSFLSVRA

SEQ ID NO: 243917 - protein, 99 aa, Zea mays
  Clone ID: MRT4577_154036C.1.pep
EIGLPNMINLFQPEFYIQKRGYMHAVFQIKSRQLNVITGANYLAGGDRSIDFSTNFFSCSNSSFSWGSTFFYYTGARQLLGGWKFGRAIFIFIYNKRPG

SEQ ID NO: 243918 - protein, 102 aa, Zea mays
  unsure (1)..(102): unsure at all Xaa locations
  Clone ID: MRT4577_154037C.1.pep
TLFFFFFFFFFFFXPPHRNHHFSKSHKHKLKGTQLCLGSIFYVVSKKDTFPVCEVDSSSYFPARGQQNQRSLPCFKGTTPPNCLDDSLLTVARTALFGLRPA

SEQ ID NO: 243919 - protein, 155 aa, Zea mays
  unsure (1)..(155): unsure at all Xaa locations
  Clone ID: MRT4577_154038C.1.pep
MADGEDIQPLVCDNGTGMVKAGFAGDDAPRAVFPSIVGRPRGQKDAYVGDEAQSKRGILTLKYPIEHGIVSNWDDMEKIWHHTFYNELRVAPEEHPVLLTEAPLNPKANXREKMTQIMFETFNVPAMYVAIQAVLSLYASGRTTXXIVLDSGDGV

SEQ ID NO: 243920 - protein, 377 aa, Zea mays
  Clone ID: MRT4577_154039C.1.pep
MADGEDIQPLVCDNGTGMVKAGFAGDDAPRAVFPSIVGRPRHTGVMVGMGQKDAYVGDEAQSKRGILTLKYPIEHGIVSNWDDMEKIWHHTFYNELRVAPEEHPVLLTEAPLNPKANREKMTQIMFETFNVPAMYVAIQAVLSLYASGRTTGIVLDSGDGVSHTVPIYEGYALPHAILRLDLAGRDLTDSLMKILTERGYSFTTTAEREIVRDIKEKLAYVALDYDQELENAKSSSSVEKSYELPDGQVITIGAERFRCPEVLFQPSFIGMEAPGIHETTYNSIMKCDVDIRKDLYGNIVLSGGTTMFPGIADRMSKEITALAPSSMKIKVVAPPERKYSVWIGGSILASLSTFQQMWISKAEYDESGPAIVHRKCF

SEQ ID NO: 243921 - protein, 59 aa, Zea mays
  Clone ID: MRT4577_15403C.1.pep
VPAPPPASSPPPPPPPPPPPPPLPPLPFSFFLGPPNFFLVKRFLRVPTPGESLFPSFDS

SEQ ID NO: 243922 - protein, 378 aa, Zea mays
  unsure (1)..(378): unsure at all Xaa locations
  Clone ID: MRT4577_154040C.1.pep
MADGEDIQPLVCDNGTGMVKAGFAGDDAPRAVFPSIVGRPRHTGVMVGMGQKDAYVGDEAQSKRGILTLKYPIEHGIVSNWDDMEKIWHHTFYNELRVAPEEHPVLLTEAPLNPKANREKMTQIMFETFNVPAMYVAIQAVLSLYASGXRTTGIVLDSGDGVSHTVPIYEGYALPHAILRLDLAGRDLTDSLMKILTERGYSFTTTAEREIVRDIKEKLAYVALDYDQELENAKSSSSVEKSYELPDGQVITIGAERFRCPEVLFQPSFIGMEAPGIHETTYNSIMKCDVDIRKDLYGNIVLSGGTTMFPGIADRMSKEITALAPSSMKIKVVAPPERKYSVWIGGSILASLSTFQQMWISKAEYDESGPAIVHRKCF

SEQ ID NO: 243923 - protein, 102 aa, Zea mays
  unsure (1)..(102): unsure at all Xaa locations
  Clone ID: MRT4577_154041C.1.pep
GGGGVALVLPGGVEAAPGISPSLRNLLLSIVSGGVVLGAIVGAVVAVSNWGGGGXXCTQSTTRAHMHAAVHVALHAVRRLGVCSSCECVQRAICECFAVRMR

SEQ ID NO: 243924 - protein, 132 aa, Zea mays
  unsure (1)..(132): unsure at all Xaa locations
  Clone ID: MRT4577_154042C.1.pep
AQEEKMLMARSSKDKFEHLQSQYVDLTSENNALKTEIEELKSRLIELQRTQEIVMVQHVEECQVAEDKIRXLQGRIQKLLEDSTFAENHKQELLQKILKLESDNQELLGQMQSIMEEKSNNAESLHGEITKR

SEQ ID NO: 243925 - protein, 867 aa, Zea mays
  Clone ID: MRT4577_154043C.1.pep
MQKLSGLRSLEGFRSLVGSTSTAMKVANPRPSPDTGGISYGSFANLKITAEKLVKEQASVKTDLEMAHVKLRRATEQINIIEGKLQQALNENAKLKVKQTEDSKLWQGLDSKLSSTKTLCDQLTETLQQLASQTEQAEEDKKFFEEMLGKNSKALDEFNCLLRDLSTKLEYAEQKIISGRQEMLQIKQEKEEMDRSYKGQLYSNDTTIKEKDSLIKQLEGSLDDNKSRLIYLDSRLQCMEQELKLKDDVCISLKGNLASSESEKNSLELMNKGHILEIKKLCQDNKDLNELFSSFMVKVTELDKEHASMSSHVSRLISSFERFYEMAQEEKMLMARSSKDKFEHLQSQYVDLTSENNALKTEIEELKSRLIELQRTQEIVMVQHVEECQVAEDKIRRLESEAEVSASNINQLEKLASELQGRIQKLLEDSTFAENHKQELLQKILKLESDNQELLGQMQSIMEEKSNNAESLHGEITKRDQQVDTLENQINQLRSVLDEKEQLYLCSVQKEKTLEEQKLQVEALLSATECKLSDAKKQYDLMLEGEKIELSKHLKELSLKNDQAINEIRKKYELEKIEITNAEKEKAEKLIREIENKCNEKISQNKHDSERYLICLKEEHGTTVARIQQDNEHKESTLRAYHKEELQRIQSQAENEMRERLSLLRKEHEVQIKSLRMHHEEECQRMQEELELQKSKEEKQRALLQLQWKVMGESQRVDQEVNSKKEYSVSSIRRSDPYGRKEQEVQLVSPETNRKDVNLPGILQSPISNMLRKVEKVSQDIPKHRKVTHHEYEVETANGRITKRRKTRSTVMFGEPNSQKPLHNTTDKDVKKLKKVPTRSRAHPANIGELFSEGSLNPYADDPYAFD

SEQ ID NO: 243926 - protein, 79 aa, Zea mays
  Clone ID: MRT4577_154044C.1.pep
EQGNNQKFRVQANQKQHFQSFPLFQFFLNEPKKLLAVSFTTEPKQQLHPLIFLSIYNYVPFLFPQTRAGCRANTVPGSL

SEQ ID NO: 243927 - protein, 97 aa, Zea mays
  Clone ID: MRT4577_154045C.1.pep
PLIPGNLNLYLHKGKIRGLKPRGAGQGTTPTHSLFFGAQQENPQRDPTVATATGGARDAFSTPAHPKPKNTFQPVYPFFWAGRPGVGHGEPPLPGAG

SEQ ID NO: 243928 - protein, 75 aa, Zea mays
  unsure (1)..(75): unsure at all Xaa locations
  Clone ID: MRT4577_154046C.1.pep
GNAGRRPSKMSGPSVLPRNTFGGSVGAQDPSSHEPGLRDGRPKGGEGKQVASRTAQREQAPTSWXRKEKELSGAA

SEQ ID NO: 243929 - protein, 318 aa, Zea mays
  unsure (1)..(318): unsure at all Xaa locations
  Clone ID: MRT4577_154047C.1.pep
WRSCEAVLPVRLHRRLAPSILCGARSSPGLVLSQVEAMSAADAAGGKEAAPACDSCTGMPAVVYCRADSARLCLPCDRHVHGANTVSTRHARAPLCAGCRAAAAAAARHAXGGFLCASCRLGEEKDERDGGGAADSSSDDGGAVEGYAGCPSVADLATILGAGSAWEEPQTLRLESRSSGGELADEVIRQLVELARSEAAARAEMEQLTPWPSPELAAITGQYADFGALDADTAWHDDAAAIAAAVVPSTEEEQQAWIAAGCDVGACRTEEKARENDAALAEPCLSSFVEMSEICPASVVVTLSHGGDEGVDSSGKTA

SEQ ID NO: 243930 - protein, 89 aa, Zea mays
  Clone ID: MRT4577_154048C.1.pep
HTALGAGEGGLGVGYGVLEPDKRAHRGPRRKVVSIFCAVRLSGGVGALPLLLHVIRWATGSAPMSAGKRLGHQISWQGMWTRAPRQARV

SEQ ID NO: 243931 - protein, 42 aa, Zea mays
  Clone ID: MRT4577_154049C.1.pep
HHSGNDSTPTYLRMEDCRIPDGQRYSRNLNERQVTSILKMAC

SEQ ID NO: 243932 - protein, 191 aa, Zea mays
  unsure (1)..(191): unsure at all Xaa locations
  Clone ID: MRT4577_15404C.1.pep
MGSLANNIMVVGAXLRXLRAGGICGTPNVPXGPNITTNYNGKRLSAKATWNGQPXGVGSPDNGAAXEINNVNLPPYIGMTVCFNGPIFEDGKVCGSCYQVRCKEKPECSEHANTMYITDMNYQPITPYHFHLSGKAXGSLEELXINDNIRHSLIMYVEIRMVRYKYAAGDKMLHLIEKGCNINYLDELVNY

SEQ ID NO: 243933 - protein, 74 aa, Zea mays
  Clone ID: MRT4577_154050C.1.pep
HSFKTVKILRFQTGPNSSRTTDGHQQLLIIMLRDGTSVQLAVTSAARRYLLSQPCSSAPHASAHASAHASAHAS

SEQ ID NO: 243934 - protein, 433 aa, Zea mays
  Clone ID: MRT4577_154051C.1.pep
MKVEVVETTLVPPSEATPRHALWLSNLDLAVPKTHTPLVYYYPRPAGAGAGEEGKGEGEGSFFDPARLREALSRALVPFYPLAGRLAAGPGGRLEIDCTGEGALFCVARADFTGDEMFADFEPSPEARRLLVPFAASGDPPCVLAMVQVTFLKCGGVAVGTGMHHVTMDGAGAIQFIRAWTALARGEAPAWTPSHDRTLLRARSPPHVPACEHPVYSPAYLNGAPRPFVTRVYAVPPKLLAGIRSRCAPGASTYCAVTAHLWRAMCVARGLPAGSDTRLRVPANVRQRLRPPLPASYFGNAIVRDLVTVRVADVLSQPLGFVAERIKRAVARVDDARVRSVVDYLELESDKGNQAARGQFMPESDLWVVSWLGMPIHDADFGWGRPGFVAPAQMFGSGTAYVTQGRDKDDPINVLFALEPEYLHTFEKAFYGE

SEQ ID NO: 243935 - protein, 74 aa, Zea mays
  Clone ID: MRT4577_154052C.1.pep
KGSYTSRWGADLRVPVLTKLFCDVTDLQFINLLLIHCPLFKTGVIEKTPTFITFPFLHKFSLSKGALCFTAPKV

SEQ ID NO: 243936 - protein, 77 aa, Zea mays
  unsure (1)..(77): unsure at all Xaa locations
  Clone ID: MRT4577_154053C.1.pep
GIKEKIDFGMRYDXFKGVYXGMDFKVVIEGVGKSVDKGRRWKXSVGIKYRVXKEDVMKWFKVKXEGVILKKVKGNIF

SEQ ID NO: 243937 - protein, 51 aa, Zea mays
  Clone ID: MRT4577_154054C.1.pep
LPSIGILESQHTKIPKKQCITDCYRVTIWHEQELAMANTRARIEGRCTVTA

SEQ ID NO: 243938 - protein, 76 aa, Zea mays
  unsure (1)..(76): unsure at all Xaa locations
  Clone ID: MRT4577_154055C.1.pep
PRIQTASLAIYWQRQHWIHGFNHEYRQQNKGYLELTRDNQSTTTVNLMHKNVKFLVFISFLGXYIEPKKTLCGIVC

SEQ ID NO: 243939 - protein, 188 aa, Zea mays
  unsure (1)..(188): unsure at all Xaa locations
  Clone ID: MRT4577_154056C.1.pep
MCDLVARTGRHQQRYEDGRRLVAGCIPFRYRANNDETSGDKTKKLVEVLMINAXSGPGLLFPKGGWENDETVEEAAAREAIEEAGVRGDIVHFLGLYDFKSKTHQDACCPEGMCRAAVFALHVKEELNSWPEQSTRQRTWLTVPEAASRCRYQWMEEALLTGFSDWHDKWSIGDGGGGGANCVTRPNC

SEQ ID NO: 243940 - protein, 182 aa, Zea mays
  Clone ID: MRT4577_154057C.1.pep
MCDLVARTGRHQQRYEDGRRLVAGCIPFRYRANNDETSGDKTKKLVEVLMINSQSGPGLLFPKGGWENDETVEEAAAREAIEEAGVRGDIVHFLGLYDFKSKTHQDACCPEGMCRAAVFALHVKEELASWPEQSTRQRTWLTVPEAASSCRYQWMQEALLTGFSDWHDKWSRGGGGTNCDPA

SEQ ID NO: 243941 - protein, 47 aa, Zea mays
  Clone ID: MRT4577_154058C.1.pep
MIYRADLSKCRDYRRRHKVCEAHSKTLVVVVAGREMRFCQQCSSLFI

SEQ ID NO: 243942 - protein, 189 aa, Zea mays
  unsure (1)..(189): unsure at all Xaa locations
  Clone ID: MRT4577_154059C.1.pep
MCDLVARTGRHQQRYEDGRRLVAGCIPFRYRANNDETSGDKTKKVVEVLMINSQSGPGLLFPKGGWENDETVEEAAAREAIEEAGVRGDIVHFLGSYDFKSKTHQDACCPEGXMCRAAVFALHVKEELNSWPEQSTRQRTWLTVPEAASRCRYQWMEEALLTGFSDWHDKWSIGDGGGGGANCVTRPNC

SEQ ID NO: 243943 - protein, 115 aa, Zea mays
  unsure (1)..(115): unsure at all Xaa locations
  Clone ID: MRT4577_15405C.1.pep
DELDIEAGKLPVDQMIRLGRMLYMSTADGKGGGHKQNYLLFMEWDVKINPTSKYMACIKNDNRDQVKEQIKKADAXEDSIKMTTXSQLAQDTFLMGWWKXVXQGTLHGAADMKTN

SEQ ID NO: 243944 - protein, 74 aa, Zea mays
  Clone ID: MRT4577_154060C.1.pep
MARSGAMVSCMLLLVVAAQLLMVMMATQTAAAAAAAGDQRGAGRRLLWQVTCHYSACNCRTCPIYGWACCSTCC

SEQ ID NO: 243945 - protein, 52 aa, Zea mays
  Clone ID: MRT4577_154061C.1.pep
ISYYTSLIGVNLYQISFHNRLYRHTLNICVHKVQLDIINGSSNDPALGRTRN

SEQ ID NO: 243946 - protein, 72 aa, Zea mays
  Clone ID: MRT4577_154062C.1.pep
MARSGAMVSCMLLLVVAAQLLMVVMATQTAAAAAGDQRGAARRLLWQVTCHYSACNCRTCPTYGWACCSTCC

SEQ ID NO: 243947 - protein, 43 aa, Zea mays
  Clone ID: MRT4577_154063C.1.pep
TRTRGHRIRRPLARLRFGSELYPPRLAVVVTDSRIPRNKYWYW

SEQ ID NO: 243948 - protein, 73 aa, Zea mays
  Clone ID: MRT4577_154064C.1.pep
MARSGAVVSCMLLLVVAAQLLMVMATQTAAAAAAAGDQRGAGRRLLWQVTCHYSNCNCRTCPIYGWACCSTCC

SEQ ID NO: 243949 - protein, 106 aa, Zea mays
  Clone ID: MRT4577_154065C.1.pep
MQEKNLNRRGFIKTASGLALAPALGWLPGMAHAAEKEIVVGTWGGDYQNLLQQIINPIVAKQDVKVVYDTGNAVGRVTKLRAEKNSRRGSMDVALLGEVRQQANKI

SEQ ID NO: 243950 - protein, 74 aa, Zea mays
  Clone ID: MRT4577_154066C.1.pep
HLQRPVAFQVVCKRPTTPPVGNGAPTRPAAARRPGGLTQRHGPLGRERPNVGRGGRRPDAPVASLDRTRGRTRG

SEQ ID NO: 243951 - protein, 75 aa, Zea mays
  Clone ID: MRT4577_154067C.1.pep
GYDFQAIIYIYTIGPWRRKQEWKHINNCSSLPHCRQSVSAEHRPSCRCRHIQRYAYMIVDCPSEGLMCNQMPTDQ

SEQ ID NO: 243952 - protein, 83 aa, Zea mays
  Clone ID: MRT4577_154068C.1.pep
MDPKKVTTRASSSMDKATKASLIKKKGKAVLTDDTPSGTAENNKMEAVKSKHPRTDDPYPRRHHSHMQPVDVSITWSNEAYTS

SEQ ID NO: 243953 - protein, 225 aa, Zea mays
  unsure (1)..(225): unsure at all Xaa locations
  Clone ID: MRT4577_154069C.1.pep
MESGAYGAANAGGSFDLRRFLSQPQVVTRLVSMVLALIVFSCIFGEGYTNIHTSDQLYCVFNQNEDACRYGSAIGVLAFLASAFFLVVDAFFSQISNATDRKYLVIGDLLFSALWTFLWFVGFCFLTNQWAATKPQDVRVGADSARAAITFSFFSIFSXGVLASLAYQRYKAGVDAFIQNYVDPTPDPNTAYASYPSAXVENYQQPXFTQNVETTEGYXXPPPVY

SEQ ID NO: 243954 - protein, 90 aa, Zea mays
  Clone ID: MRT4577_15406C.1.pep
LKSPPPTCPPLRETKVLVPLAKKRPVKRAPYKAVLKSGPKMLLPRYRYGARNFFLSPGRPEKLDGMEPLACCRPPKSPVIPSKNFDLGIN

SEQ ID NO: 243955 - protein, 106 aa, Zea mays
  Clone ID: MRT4577_154070C.1.pep
YYGGALGVPQAAWRQTQSLLQRPQPSPGYCFGYRRGCGLRLSSCGASATSRSSAGGGAWDRLMPVRAPSRVWPSAERAQVSHIPPLGWCVPRGGASQLAAWLQPNS

SEQ ID NO: 243956 - protein, 81 aa, Zea mays
  Clone ID: MRT4577_154071C.1.pep
NPLFCFHDSQTVKGSTVPHTPFGYSPFYVQNIKQLKPVSQRVTSLANSSVVTTASKVASAFLTSFSGPMMNPAYSALLPLL

SEQ ID NO: 243957 - protein, 73 aa, Zea mays
  unsure (1)..(73): unsure at all Xaa locations
  Clone ID: MRT4577_154072C.1.pep
PCLDLLGVRGPNRARPGSNXRFLAPVVPGGVLAGELSLLSALPAGQLVKTPIKSNRSTKNVSSTTAPEKMRQR

SEQ ID NO: 243958 - protein, 100 aa, Zea mays
  Clone ID: MRT4577_154073C.1.pep
FCFDSPGGNQCVSREDYSLIQKKGLAVVDCSWARLDDVPFVRLRCTAPRLCMNLSTDREYIQKLLYILVCMLICLCTFKYVSLTHYPKKAQVLMPYCSFL

SEQ ID NO: 243959 - protein, 73 aa, Zea mays
  Clone ID: MRT4577_154074C.1.pep
NFKQLVEHVVGTLFIKVTLTPGEKGKGRGKNCNSQCHSSNGSKVGLVNIVAESTVCKRMDELVSFFIPSQYWP

SEQ ID NO: 243960 - protein, 120 aa, Zea mays
  unsure (1)..(120): unsure at all Xaa locations
  Clone ID: MRT4577_154075C.1.pep
ILRRAGSPLIRLLVLASGDARHFLPDEMTTGTKKAGISAKYVTTYGARLRKHINEVEVSQXHSKYFCDFCVKIAVKRQAGGIWGCQDCGNVDVDXSYTMNTANETTERSTIRGLPYHTEL

SEQ ID NO: 243961 - protein, 103 aa, Zea mays
  Clone ID: MRT4577_154076C.1.pep
NVFADMIKRGYVPDVVLYSIIIEGFVKALKLQEALRLYHKMLDEGVKPNIFTYSSLINGLCNDDRLPEAMGLIRDMIGEDLLLDNVLYTSKKKKNKKKKKKKL

SEQ ID NO: 243962 - protein, 266 aa, Zea mays
  unsure (1)..(266): unsure at all Xaa locations
  Clone ID: MRT4577_154077C.1.pep
CTLVFRHQLGSRHYHYKTDTSRHYTVILGSHRNKRLKIEVDGNTAVDVAAVGLCCSSSFQSYWISIYDGYISIGQGKHPSNNLLFQWLDPDPNPHVQYVGLSSWDKHVGYRNISLLPSAPPNSIFWTQIEYANVHPDADARDYVRKDNCGQRVLADFLENWDFSDAVFVGGTERKVVPAHKLVLCASGDFPFEIGDGATIVLPSASYPVLHSLLEYIYTGSTQIAEWLLSSLLELSSQXXVDPLMKWCKDIIDCLEVDKKPSRSGK

SEQ ID NO: 243963 - protein, 214 aa, Zea mays
  Clone ID: MRT4577_154078C.1.pep
RRGKMYHDMSTAGGLVAVALAHALALAVAVAVAVNISGGHVNPAVTFGALVGGRVSLVRAVLYWVAQLLGAVAATLLLRLATGGMRPPGFALASGVGDWHAVLLEAVMTFGLMYAYYATVIDPKRGHVGTIAPLAVGFLLGANVLAGGPFDGAGMNPARVFGPALVGWRWRHHWVYWLGPFLGAGLAGLVYEYLLIPPADAVPHTHQPLAPEDY

SEQ ID NO: 243964 - protein, 42 aa, Zea mays
  Clone ID: MRT4577_154079C.1.pep
GCTSRDSHACMTSAEASTVYEPGGSSGSEHGCTIEVPRSSAA

SEQ ID NO: 243965 - protein, 114 aa, Zea mays
  unsure (1)..(114): unsure at all Xaa locations
  Clone ID: MRT4577_15407C.1.pep
NLLQINGALPRYLXLGLEIVPPTSDSSTCICPGIQFSWFQEXXWLLXXLAXXCGLXPPGLLLPGCXLXRACSAALLWSXARXWXSFSAVVLXFPCFIRSLXCFLXFXNIYMAVA

SEQ ID NO: 243966 - protein, 266 aa, Zea mays
  Clone ID: MRT4577_154080C.1.pep
MSTATGVRPGRRFTVGRSEDATHPDTIRAAISEFIATAIFVFAAEGSVLSLGKMYHDHSTISTAGGLVAVALAHALGLAVAVAVAVNVSGGHVNPAVTFGALVGGRVSLVRAVLYWAAQLLGAVAATLLLRLATGGARPPGFALASGVGDGHAVLLEAVMTFGLVYAYYATVVDPKRGHLGTIAPLAVGFLLGANVLAGGPFDGAGMNPARVFGPALVGWRWRHHWVYWLGPFLGAGLAGLVYEYLLIPPADAVPHTHQPLAPEDY

SEQ ID NO: 243967 - protein, 91 aa, Zea mays
  Clone ID: MRT4577_154081C.1.pep
LICRCVYSNPAFRTKCSLLHAGCLEPRNEHKTKDLTQHRPSVELHRTGRNITRSRPGDGRLKTKRKHLGTDTGYTGGARGQTNSSPGTRGR

SEQ ID NO: 243968 - protein, 262 aa, Zea mays
  Clone ID: MRT4577_154082C.1.pep
MSTGVRPGRRFTVGRSEDATHPDTIRAAISEFIATAIFVFAAEGSVLSLGKMYHDMSTAGGLVAVALAHALALAVAVAVAVNISGGHVNPAVTFGALVGGRVSLVRAVLYWVAQLLGAVAATLLLRLATGGMRPPGFALASGVGDWHAVLLEAVMTFGLMYAYYATVIDPKRGHVGTIAPLAVGFLLGANVLAGGPFDGAGMNPARVFGPALVGWRWRHHWVYWLGPFLGAGLAGLVYEYLVIPSADAAVPHAHQPLAPEDY

SEQ ID NO: 243969 - protein, 87 aa, Zea mays
  Clone ID: MRT4577_154083C.1.pep
HGEYHGSGYRGPRFFAGIRRDSGGRWRPPGGGGRRFDASGGDEREGDVPYVGQVEACICRSADEQLGEGEEEEIPSRIPDPHRFTAG

SEQ ID NO: 243970 - protein, 52 aa, Zea mays
  Clone ID: MRT4577_154084C.1.pep
TLQVMNYNGLSLTDSHRSLRACTLDTKRISRSLQSLKRPILSLLHCKQVCIT

SEQ ID NO: 243971 - protein, 193 aa, Zea mays
  Clone ID: MRT4577_154085C.1.pep
MATKRDTESDGEGSNPVGGGATPPPLAAAPVVCLLRSAGDFGGGAFVGSIFGYGQGLITKKGFKGSFSNAGSSAKTFAVLSGVQSLVLCLLRRLRGKDDIVNAGIAGCCTGLALGFPGAPQALLQSCATFAAFSCIMEGLNKQQAAMARTLGGTAAMAVHEKCGVLPPFTLPPILDASDALASCCLALVKPKH

SEQ ID NO: 243972 - protein, 99 aa, Zea mays
  unsure (1)..(99): unsure at all Xaa locations
  Clone ID: MRT4577_154086C.1.pep
ICTQDFAAWRMTVPRSLVMIHCETTLMCDLLWTPSLKQFLXVVCEEIKQHLSFPLDQKGIPLSCVVVFLLILVVTTHTSSLCILGVKVKPWIFLVLDNN

SEQ ID NO: 243973 - protein, 39 aa, Zea mays
  Clone ID: MRT4577_154087C.1.pep
IEGTQTEVDSHIMKVVQQIVHQASAGHQIIVQNVTMDEE

SEQ ID NO: 243974 - protein, 72 aa, Zea mays
  unsure (1)..(72): unsure at all Xaa locations
  Clone ID: MRT4577_154088C.1.pep
MDASXAGXGGKAKKGAAGRKAGGPRKKSVTRSVKAXLXFPXGXIWRYLXKXRYAHXXGTGAPVYLXAVXXYL

SEQ ID NO: 243975 - protein, 69 aa, Zea mays
  Clone ID: MRT4577_154089C.1.pep
RIADREEWTRNTLELGLPLQSPRRFPPLEPKPNEQRGAQPHRWLPFKRAVALTRKSVSDAFSPDQATRH

SEQ ID NO: 243976 - protein, 66 aa, Zea mays
  Clone ID: MRT4577_15408C.1.pep
ILPYPSVFSYTCRWNRLTGNCTVIWKLCEMSSFFPWSITWRMILVIICRDAYQNPPLQTKKEKKKA

SEQ ID NO: 243977 - protein, 45 aa, Zea mays
  unsure (1)..(45): unsure at all Xaa locations
  Clone ID: MRT4577_154090C.1.pep
YIKNTRSNSTDSREEXXRLSRDSSSKNGWQAYFQKSKKEWVXXGI

SEQ ID NO: 243978 - protein, 47 aa, Zea mays
  Clone ID: MRT4577_154091C.1.pep
TLGLGSSQVVCFHAWMCVFSSSQPPVSQQFAFMSNRIFLLYASQSCL

SEQ ID NO: 243979 - protein, 168 aa, Zea mays
  Clone ID: MRT4577_154092C.1.pep
MPASSTPSALQHSLGPPTPRSESRKPPAMGCLGRCWDKCKWPLACFTALAAVIIIVVMVAAYSFAIQPSITVEDASLARFALATTPTTSLGYNLSLRLVVRNRNWATTMKNTEPLEAAYKFDGQQFDRVQVADKGDKHGPRKTRVYRLVTGQESGYVALGNAGVAAYK

SEQ ID NO: 243980 - protein, 207 aa, Zea mays
  unsure (1)..(207): unsure at all Xaa locations
  Clone ID: MRT4577_154093C.1.pep
MLPTPRTFLKRLALLVLDDRLVGLKKQIRFSPLAFASEPPVLNGDQTCPWPRARLGRGAAARRPEHPSSSPRALSSESSYPLCHASIVLPHPSLKHFFRVELGSISSSRSNSESPTLQLSSSARTCFHVASPPSIAEYIVEEELQVVLSIKLAXVVARSSDPPSQQLTTVERGQPSFVXTPTASFRMEKSHSPKFKTSSQLKCWHEE

SEQ ID NO: 243981 - protein, 101 aa, Zea mays
  Clone ID: MRT4577_154094C.1.pep
QDSEERGLKQYPDVSACMKSSTPYGGRPTWDRAFFAPKWPNRQIGAWKLPRTGCCRPWALRQYTHWGLQRREPTTAGGNARAGFITGPFLPPKTLRWPPPG

SEQ ID NO: 243982 - protein, 77 aa, Zea mays
  Clone ID: MRT4577_154095C.1.pep
FQRRYGYVCSRSKKNWIIIKLFGAGPPIFWPLIPRAGGTSAPRLVVCLSMLFTRQASLLAETQIPQYDPMNKKRAAN

SEQ ID NO: 243983 - protein, 61 aa, Zea mays
  Clone ID: MRT4577_154096C.1.pep
MAAKLAQLRTQVTRAAEFASKHGCSYCKEVMEKNKQYVVQPPTVEKCQELSKQLFYTRLAR

SEQ ID NO: 243984 - protein, 156 aa, Zea mays
  Clone ID: MRT4577_154097C.1.pep
EQVHILWNSVILVTSAYPIAYSGASKIPSLRSLGQGRRQLEGLGRLELSSSVLGSTAEEPVPSVHIRLFRSFRSLSASARPHVIFYIESSLRSYRHTLYQFIASGLSHLRRAAWLVVAPHLRCSERRCSHLVEERKQDDSHRLPRGICPGRLEVPN

SEQ ID NO: 243985 - protein, 57 aa, Zea mays
  Clone ID: MRT4577_154098C.1.pep
RYTLLILVGMLSTCKTEVWHGSSSCVARGLNCISCSYQTNWSMSCLLAPPARSVIKA

SEQ ID NO: 243986 - protein, 46 aa, Zea mays
  Clone ID: MRT4577_154099C.1.pep
LNGGKKKKKRGGVSLKKKKKKKKKKKKKKKKKKKKKKKKKKKTRGG

SEQ ID NO: 243987 - protein, 110 aa, Zea mays
  Clone ID: MRT4577_15409C.1.pep
SKIYVFLISPGHSRQQQIHRPQQLPHQHLNLFTTTDPAQRISFLPFIFYHQLRTRWGPSAVADPSGPFGHRSSFSRMVHRDPVFADSRTPVASVKLRGLRVSRPPSTQSA

SEQ ID NO: 243988 - protein, 58 aa, Zea mays
  Clone ID: MRT4577_1540C.1.pep
TLEFSLSGSSISTLKRCNTSKEKKMIQTMRTQEFTLEQLFLLGCVASFECGNGWYSSP

SEQ ID NO: 243989 - protein, 46 aa, Zea mays
  Clone ID: MRT4577_154100C.1.pep
TTPPAIASQLIISSSRKGRRNATQGSASASQEAAAMLLAESPRLNC

SEQ ID NO: 243990 - protein, 72 aa, Zea mays
  Clone ID: MRT4577_154101C.1.pep
IASAALLVTLNTGRSLYRLGRISFNNSRVITTAATMSNRCSESDQSRESDSLKLESSSASTGLANHKHKDVF

SEQ ID NO: 243991 - protein, 41 aa, Zea mays
  Clone ID: MRT4577_154102C.1.pep
GLNAYRTNPFTVFTPVKHFSVQGLTGVAIFAVYFPRIIRFF

SEQ ID NO: 243992 - protein, 165 aa, Zea mays
  Clone ID: MRT4577_154103C.1.pep
MSRGALSLYSVPGSPRASRVAKLVSAAAAAGMTRRNSEKPAPRPGPRAAPGRNPPQPGRKAPPPGPDRDDEGSMLERIAPTIAQGMVAGTGRAMEHRGGDAELGPRTISKETVASQDAAAAPAPPVMNADACSIHYKVFQDCLNNYGSEISNWHIYLDMLNERRR

SEQ ID NO: 243993 - protein, 94 aa, Zea mays
  unsure (1)..(94): unsure at all Xaa locations
  Clone ID: MRT4577_154104C.1.pep
WLGTFGLIYVLVYVLVYVLVYVLESNRVIGGDFFSVPYRRLXPSSSNYRIGRCGRCMLTSILRVRLRVIIRVSLLQLVMMVLPGFRVLYLYSLS

SEQ ID NO: 243994 - protein, 119 aa, Zea mays
  unsure (1)..(119): unsure at all Xaa locations
  Clone ID: MRT4577_154105C.1.pep
FFYGGPKINLRGRVLKPWEGENPXGVPHLNRLGKNPXFLRWGKKKKGPTGPPSQKVPHPNGEWDPPXLGALKPGGGXVPPRGPFTLARPLGPGXFGFFPFFLGPFGGFSLEILKRGAPL

SEQ ID NO: 243995 - protein, 43 aa, Zea mays
  Clone ID: MRT4577_154106C.1.pep
NLYVFLHFFTLKSRFKQIKSFRMVHLLRKTISMLPAKCIGFLI

SEQ ID NO: 243996 - protein, 77 aa, Zea mays
  Clone ID: MRT4577_154107C.1.pep
TNRIRYNTKLQIIIKQQRICVMLHRSYLRISIQTIITAIPNVIKYLQLIQLAIINIYQLLIPLTPDIQPICCSPRLH

SEQ ID NO: 243997 - protein, 49 aa, Zea mays
  Clone ID: MRT4577_154108C.1.pep
HFSLFVMMLPRFCYWCNAAQMAPPSTLYKTAHQWVALHTCVGQSLVSRQ

SEQ ID NO: 243998 - protein, 69 aa, Zea mays
  unsure (1)..(69): unsure at all Xaa locations
  Clone ID: MRT4577_15410C.1.pep
MKVLIVALALLALATSARSITSCGCRLQTPPVHLPSACYMPAPLYLPPQQHXHSWEYPTQPPXISPCQQ

SEQ ID NO: 243999 - protein, 175 aa, Zea mays
  unsure (1)..(175): unsure at all Xaa locations
  Clone ID: MRT4577_154110C.1.pep
MKEVAEERCLDPQLWHACAGGMVQMPPVRSRVYYFPQGHAEHAHGGGAADLAGARALPSLVLCSVTGVRFLADPETDEVFAKIRLVPVAPGEVEFREPREFSVDPEDAREKLSSFAKTLTQSDANNGGGFSVPRYCAETIFPKLDYRADPPVQTVLAXDVHGKVWKFAHXYRGTP

SEQ ID NO: 244000 - protein, 69 aa, Zea mays
  Clone ID: MRT4577_154111C.1.pep
FIICVRLSPSTHGDYLTLGSLKSGCDICACSGLRTVCSVDTGFILVLVERPYIQSSTTHATYTFVARCL

SEQ ID NO: 244001 - protein, 114 aa, Zea mays
  unsure (1)..(114): unsure at all Xaa locations
  Clone ID: MRT4577_154112C.1.pep
GSPPPRGASPGRGASTGRPGGPPRSGSGSSRKESPPPRIGPARFNPPPGGPSSSRFNPPGPXSPAEGKVRGVPPGPXKGTGRPXHHTPPPRGPTQTQKRQRKMKKPDTAQHWER

SEQ ID NO: 244002 - protein, 62 aa, Zea mays
  Clone ID: MRT4577_154113C.1.pep
GVDVADVADAMREAIFHIAALQPVEIDPEAVRPPKRRNVRISKDPTRSAPPPTRPSTRRGST

SEQ ID NO: 244003 - protein, 48 aa, Zea mays
  Clone ID: MRT4577_154114C.1.pep
SCCTRKASSRPLTLRTSSASPSSCRRTDVLGSSALRFLNLLLVLARFQ

SEQ ID NO: 244004 - protein, 55 aa, Zea mays
  Clone ID: MRT4577_154115C.1.pep
PNRKNGKLSSLNHEHSANNKAREQFQSLSVAQFLPAKQSGHGEKYHPLTCTKTLQ

SEQ ID NO: 244005 - protein, 225 aa, Zea mays
  unsure (1)..(225): unsure at all Xaa locations
  Clone ID: MRT4577_154116C.1.pep
SVSKKRGHQEIRTRLSGAVLKANTPLEVHASKMYTRKMFEIFGGILYESGSYDVEEIIPKKKYVVTHVKAEKREKWFKCRYEVNVSDNLGYFSCICGLFEHMGMVCCHSLQVMNVLRLKEIPSRHILKRWSIHGRDNLPDHLKHYQQDMGPPDAPTYRHSALXHPALEVVKMGDRNLESYKFMLDGLVDLRERGAEISTPNDGLGIAEQQVSKTGVDGGSNKKTK

SEQ ID NO: 244006 - protein, 217 aa, Zea mays
  unsure (1)..(217): unsure at all Xaa locations
  Clone ID: MRT4577_154117C.1.pep
DIVVSFVLAGKDSTSSALTWFFWLLAANXRCERRVYEEVASLSLHRYGVDDEGGYDELRGLHYLHAALTEAMRLYPPVPINSRVAAAGDVLPDGTTVRAGWFADYCAYAMGRMPQLWGDDCREFRPERWLDGGGEFVAVDAARYPVFHAGPRACLGKEMAYVQMKAVVAAVVRRFAVETVRAASMEAPPPYEVTVTLRMKGGLPVRIRRRESDAGRH

SEQ ID NO: 244007 - protein, 120 aa, Zea mays
  Clone ID: MRT4577_154118C.1.pep
KSFQHCLTVLIFVKLIAPSFIPRLGCRFTHLRSGFQLQILLLTVLPAVPPLRPFHRACHNISHLPWADSSVNRLRLPTEPVLGRWLHPNCTDTGHARPSVDSLKAPLVTVLDLWASLLVL

SEQ ID NO: 244008 - protein, 243 aa, Zea mays
  Clone ID: MRT4577_154119C.1.pep
CIQAPRANRVRSSRGSLKSIHCNSLARQASSLHWQNIVKCLDHTLETMKENYVAPVIIRKTFNQVFAYLNVQLFNSLLLRLGCCSFSNGEFLKAGLQDLEQWCSRTTEEYVGTSWDELQHIRQAVGFLVLHQKSHKILEEITNEICPVLSITQIYRIATMFWDDKYGAQGVSQEVIGKMRTMTTDDSITTPNSSFLLDDDSSIPISLDDIARLMLHIDPSDVEPPPLLRQNSQFHFLLQQHTD

SEQ ID NO: 244009 - protein, 74 aa, Zea mays
  unsure (1)..(74): unsure at all Xaa locations
  Clone ID: MRT4577_15411C.1.pep
PSVGRLNLFNNRNIVGAHLGVHILIWGDAFLGSRVLNSFVILGVTGAPSNVLIFGKLRNCAPFNXPLFKKFSSK

SEQ ID NO: 244010 - protein, 42 aa, Zea mays
  Clone ID: MRT4577_154120C.1.pep
KKLKPQNFFPKKKKKKKKKKKKKKKKKKKKKKKKKKKKKKKK

SEQ ID NO: 244011 - protein, 167 aa, Zea mays
  unsure (1)..(167): unsure at all Xaa locations
  Clone ID: MRT4577_154121C.1.pep
FFFFFFFFFFFFFFFFFFFFFLCVPARYPGAAQGGPRGGGGRAGEGRGRGGGGGKLVVRKNXNNKQTGRNKGXPEGQKEGGKERKXGGRKGRKPGKKTGRQKGEKNRQKAGKRGGANGXQGGQKWGKGNGRKGKGDTERAPKEGPKGGNPGXGQGGXGGKKGGNGGT

SEQ ID NO: 244012 - protein, 186 aa, Zea mays
  unsure (1)..(186): unsure at all Xaa locations
  Clone ID: MRT4577_154122C.1.pep
MDRSAEVLVLVSFFLQLFLFFTGGLRQRTRNPLLRCSIWVAYAGADLVAIYALGVLSRDANAMENGTASLWAPFLLIHLGGQDTITAFSMEDSSLWKRHVLNLLVQVTLALYAFFFFWKPSSTQVLFPGVLLFAAXIIKYGERTAALMQGDLSSSMVGGRAGHLPTQQIRAAAAAETSTRSREHLC

SEQ ID NO: 244013 - protein, 75 aa, Zea mays
  Clone ID: MRT4577_154123C.1.pep
AKPNAPKNCFPFTNSPPWFFSPQFFYPFRGFSASKEPEVPPKGAARMSLFFFPSAQTFLEVCQPLSPVVGSVSKT

SEQ ID NO: 244014 - protein, 60 aa, Zea mays
  Clone ID: MRT4577_154124C.1.pep
ILQVHKLLLHNAKTGMFCSGDIIAAYTNARMETLVLEMFDRVICTTNVKQNTGFDKNKGL

SEQ ID NO: 244015 - protein, 57 aa, Zea mays
  Clone ID: MRT4577_154125C.1.pep
IRDADCNPYSDNAGSEPDRVTQSNILPSYWISLRFSLALCGLEALSKYEHSVCSTQD

SEQ ID NO: 244016 - protein, 162 aa, Zea mays
  Clone ID: MRT4577_154126C.1.pep
CNLARSSSSFRRSLASGSEVRPPIGPSLAAAPTNLKERWLCLRRYGFLLASRSLGFWRSCLVSSPKTKRLVSALALAMSLWATVTEGLHRSKNIHHDMDYQCPTAKTGLFGGAAFLALDAALFWLVCQMLALNARADYLDEDDGKGEYGQIYAAQVDDGSKV

SEQ ID NO: 244017 - protein, 40 aa, Zea mays
  unsure (1)..(40): unsure at all Xaa locations
  Clone ID: MRT4577_154127C.1.pep
KVLALSACSXVSCVRXGIASPNQLRFVVELGEGSSVGVXV

SEQ ID NO: 244018 - protein, 225 aa, Zea mays
  unsure (1)..(225): unsure at all Xaa locations
  Clone ID: MRT4577_154128C.1.pep
RRVLWGSGVRAFRGGGREAISGSPTPHGGHLKCQTPPRLQQPTPPHTPHGGREETPLIYGPASGTPILGEDVVICTFPSDPTLAMGSLSIVALVVAAIVGHVAIFFPYSGKSVPRGALFQSTSLTVFFVVAELVSALALAMSLWATVTEGFYRSKNIHHDMDYQCPTAKTGLFGGAAFLALDAALFWLVCQMLALNARADXLHKDDAKGKYGQIYAAQVNNGSKV

SEQ ID NO: 244019 - protein, 95 aa, Zea mays
  Clone ID: MRT4577_154129C.1.pep
RHFVDWFVRYYKVLHQGRECPRRQDRQEEIHGHVLSIVRSRRRCVCPSPAVHHQVCIRLSLEECPVTSRDARCLLFKPCCFCFFMMLPYYYHSSA

SEQ ID NO: 244020 - protein, 260 aa, Zea mays
  unsure (1)..(260): unsure at all Xaa locations
  Clone ID: MRT4577_15412C.1.pep
MRRGLRRGLGILLVPLPHAPSRPPPISRAALLLRRLNGFSRHSFCSFPVGERAVEQFSDDEYDHEYEDLRPSSSVANIDEWRWKLSMLQRNAEEQEIISRDRRDRRDYDQIANLAKRMGLYSEMYGRVVVASKVPLPNYRPDLDDKRPQREVVIPLGLQRRVEGLVQEHLDRALLPLNKCGDNTKNGSDMTENANLDEQHDSLLDRSVMEKILQRKSIRMRNFQRSWQXIIRYEDGXFIVLLTQESPEGAKMLEFXRSLP

SEQ ID NO: 244021 - protein, 73 aa, Zea mays
  Clone ID: MRT4577_154130C.1.pep
AWLLQMQKEKGLVGDGKLTVLWDACGPPEASQGVNRWVIPTWTAWVKGKPCQYNWIHDAQTGGRYSLKEIGRS

SEQ ID NO: 244022 - protein, 130 aa, Zea mays
  Clone ID: MRT4577_154131C.1.pep
MVRVSVLNDALKSMYNAEKRGKRQVMIRPSSKVIIKFLLVMQKHGYIGEFEYVDDHRAGKIVVELNGRLNKCGVISPRFDVGVKEIEGWTARLLPSRQFGYIVLTTSAGIMDHEEARRKNVGGKVLGFFY

SEQ ID NO: 244023 - protein, 111 aa, Zea mays
  unsure (1)..(111): unsure at all Xaa locations
  Clone ID: MRT4577_154132C.1.pep
VAGKAPEHLRXNVLHQIAPGLTQPTVANRAADLQRLIPFNKMTVSNAAAYPQXRQQLLNPLAVPNPLVTAFLQQQQLLPYSQFSLAPPXALSWQQPIVGGACFRLHMRCNR

SEQ ID NO: 244024 - protein, 138 aa, Zea mays
  Clone ID: MRT4577_154133C.1.pep
FSSLQCLNTHTRVMIAWNCIRVIAGLHSESIQHLSISVVVSSSAEDRLKRERLALSLLMMSSVVVIHEFLLSLGILHPGVDSCHQVHRISKIRGGVHTLACGVELRREARGDGKDRGVGREMSTEEEDRKPVKILPGR

SEQ ID NO: 244025 - protein, 106 aa, Zea mays
  Clone ID: MRT4577_154134C.1.pep
TLHRGVNRVFNFRKTGKGVYPLQYTFRLITDRNGKKKDDVFLEFLKHRGAGERTLNPCLLHFPTRFCGFFPPLPVCNQGGTDSKAHDNGNVPDDQKTPKLFKGRRG

SEQ ID NO: 244026 - protein, 117 aa, Zea mays
  Clone ID: MRT4577_154135C.1.pep
FCIILAMLVPLIKRRTNAVDKKENKLFLQVLLAFSPSKNIKTFAVVFPGIGGSMFNQSADAKSPSTSDNRNQNDMLPPTKAAEKPLNGTATEQQPRLRTLGSLTTRTGSTSDIRKLM

SEQ ID NO: 244027 - protein, 33 aa, Zea mays
  Clone ID: MRT4577_154136C.1.pep
VDCTHRELWFTFSFPVRQTSIASGTLIKWTKAF

SEQ ID NO: 244028 - protein, 51 aa, Zea mays
  unsure (1)..(51): unsure at all Xaa locations
  Clone ID: MRT4577_154137C.1.pep
SLVVQCLVSGAVASTSTRVQSSIPXKKKKKKKGGRRLVSSSTRELIPDRYL

SEQ ID NO: 244029 - protein, 81 aa, Zea mays
  Clone ID: MRT4577_154138C.1.pep
HHINQNIIIQTTNRTHQTIHRIYSYRNIKTFESFSTSFSFATNFNPYKYIFLHMHNIDQSFPRLIYKIPSEQPPRVRERVG

SEQ ID NO: 244030 - protein, 85 aa, Zea mays
  Clone ID: MRT4577_154139C.1.pep
DIYRKLAPSTRRGTSGARIRTHVAGITLDSHLKTHSNINSMPENAVLIRTITPDSKSRQVEPKINDWASGEHGTHPSTAHSASVH

SEQ ID NO: 244031 - protein, 143 aa, Zea mays
  unsure (1)..(143): unsure at all Xaa locations
  Clone ID: MRT4577_15413C.1.pep
AEPRQRGHPHPQEERPQHPGPQRRGQPARARRPGRGEPAHTPAQPRPRKKRGERTPGEARSRGPAXAGATXXEGKXAPPPPQRGXGKEKKTRAAAQEEHAPARASAAVXAAGRRHRFPPPLPLLPPPAHWNGTVWGKDAGSNR

SEQ ID NO: 244032 - protein, 82 aa, Zea mays
  Clone ID: MRT4577_154140C.1.pep
ELRFLVNRETPPHDHLVVLPDFLFPLLFPMDYFLYLDHPHLHGQNDRQFHLQDHLLGLCKDYLHIDLDLNQDPSCSKVIQPP

SEQ ID NO: 244033 - protein, 76 aa, Zea mays
  Clone ID: MRT4577_154141C.1.pep
ASACCTRWNTTWPRAPRAGGANTVSARSTASASVASFGAAMPLPRSRSSGLTCHMIPGQGSTAQQADIDASVIRGV

SEQ ID NO: 244034 - protein, 73 aa, Zea mays
  unsure (1)..(73): unsure at all Xaa locations
  Clone ID: MRT4577_154142C.1.pep
NPTVYHLIHISNYGFRSPVTSDGNTNDDLXLPTDDTLVDHINEGFXSGKDLDGTVQSTIVEDQICALNDVGHK

SEQ ID NO: 244035 - protein, 96 aa, Zea mays
  Clone ID: MRT4577_154143C.1.pep
GGKAGPPHKCGHFPLRGSSSLETFFGLEKSPLGAFKNGGPFGGLPPLPIFWGVPQSFVVPFPPNVCPPVCLYGFVCMGALCKKLYPLIKVPGVSFP

SEQ ID NO: 244036 - protein, 84 aa, Zea mays
  Clone ID: MRT4577_154144C.1.pep
NKNVIPFCQSRQMRKQKASNNPWKTRDNPFTFLRLLCYKTSSSVHHTYEASSTKEEERRTQSFPHPPMFIHKHTHPYLSRFLIF

SEQ ID NO: 244037 - protein, 90 aa, Zea mays
  Clone ID: MRT4577_154145C.1.pep
MHCTVGDPFLALSPCGASTVLHGDRTVESPREIAPPPARGAGTPTPGTGAAGLFPLASARGGVWEAALPYALARCAPCTTTGHPSCWRRP

SEQ ID NO: 244038 - protein, 420 aa, Zea mays
  Clone ID: MRT4577_154146C.1.pep
MAAFHHLLPALLLLLLLPSTPEATSSALLGISYGRVGNNLPAATSVPQIVASLGVGRVRLYDADSTTIRAFANTGVELVVGVPDECLATVSNPTGAASWVRSNISPALPATKIAFLTVGNEVLTGVNSSSLSRYLLPAMQCLHDALAQAGLDKQVAVTTAHNLGVLATSYPPSSAYFRKDLLPMLCPILDFHARAGSPFLVNAYPYFAYAEEPTGVELEYALLEPGHAGVADPGTGLHYTNMLAAQVDAVYHAIAAANSAAARAVEVRVSETGWPSAGDANETGATPQNAARYNGNVMRLVAQGKGTPLRPAAPLRVYMFALFNENMKPGPTSERNYGLFKPDGTPAYELSYRLPLDNTTSSSSAGGSITGGGGYNGHGYGSSDNGGYYSISAAAKVTPGWWTWPQVAVAPCVAVLAMAL

SEQ ID NO: 244039 - protein, 124 aa, Zea mays
  Clone ID: MRT4577_154147C.1.pep
PHQTWRMRALACQALASHGPKQYIFLLPCLISRGRGTWSTSTFLYMMIAKRLEKKILALPDLQEAAGAGAAAGGRCRVRRASPLSTCIQADLPPTINSMAASPTYLSAVTEPHEMSTTKGEKIQ

SEQ ID NO: 244040 - protein, 58 aa, Zea mays
  Clone ID: MRT4577_154148C.1.pep
HRHQHLHMIPPQHALVHLIEDAGWNDSGCRGCYHNGAYYMDPMYDHMSVNANEKEGET

SEQ ID NO: 244041 - protein, 81 aa, Zea mays
  Clone ID: MRT4577_154149C.1.pep
LPLIAQHHHAGPPQPSPPAIRSTNAQAGRQAQNHTVPTHPASPKRHSRQTLLQHPHPPEPPTAQKLQQPKSGRTRRPHAAP

SEQ ID NO: 244042 - protein, 45 aa, Zea mays
  Clone ID: MRT4577_15414C.1.pep
IGSNKGFGFFNFVHKKDAEKAINKLNGYGYDTLIPRVEWGTPRPN

SEQ ID NO: 244043 - protein, 265 aa, Zea mays
  Clone ID: MRT4577_154150C.1.pep
IFRGAAALLSLQLPRRPELPPASPCARHGSRWFRLLARHGRLARPLALDSSTRHPSSSTSLYHCLEFAQLPPCVVLQPSSPRSLASMVDELSCWRACEAPWPRLPLPPSASSMPESGILVAPSLPSARCSLARLLQRRATLLGFPLCMRAEHRQPPCCLPIHGRCSPDLVPWCCARAAGWSSASSLSTGFTRTELCGLAFSVLVTAPLSRLNLVSSVPPTVDLVVKHERFTFSPLHRHLLSKKKILGRFGGKEKKAHVSLARCSK

SEQ ID NO: 244044 - protein, 104 aa, Zea mays
  Clone ID: MRT4577_154151C.1.pep
RNVTRRYSALRMGSDDRRWYCATHQVLVGWNWKYSDRECISAWRTTTIHHAGSLGVARRLTDVSYNCQCKYSCSTVYVGKGCCIAFRAGAIYRANRTLALGPKI

SEQ ID NO: 244045 - protein, 63 aa, Zea mays
  Clone ID: MRT4577_154152C.1.pep
WTSGISALDGEFQSASEVDFYIDKDMIHIADTKVARRYGDFFIRQIHKFEELNRTLKKMGQRP

SEQ ID NO: 244046 - protein, 98 aa, Zea mays
  Clone ID: MRT4577_154153C.1.pep
FTLIITFSRTASKQQPSVEVFRPPATSSSLFFFFTIPSSPRMISSSSSSSSMTVTIPTFICITFYHHYLIPYITLLSSTFFTSHISLISTLFIIFTTL

SEQ ID NO: 244047 - protein, 55 aa, Zea mays
  unsure (1)..(55): unsure at all Xaa locations
  Clone ID: MRT4577_154154C.1.pep
SGVINTWPKVNMFTRLGTIQPQEDDTCMAATAAXQXSSKQSIITHLSPSSVRLTN

SEQ ID NO: 244048 - protein, 66 aa, Zea mays
  Clone ID: MRT4577_154155C.1.pep
DFIRNPRLFLSFDLDSINFSSCSYIIVWSCYYYFLPLLRHSVLMLCMRLLQSFGNTLKLLSELVDA

SEQ ID NO: 244049 - protein, 188 aa, Zea mays
  unsure (1)..(188): unsure at all Xaa locations
  Clone ID: MRT4577_154156C.1.pep
LAGPFAGAALSVSMFAVGLFLSTXPDAANDLVQVPSMLFQGSLLLGLISRATLGYAALHAATVSIHPLVIAGWCGLTTTAFNMLPVGCLDGGRAVQGAFGKNALVTFGLSTYVMLGLRVLGGPLALPWGLYVLICQRTPEKPCLNDVTEVGTWRKALVGIALILVVLTLLPVWDELAEEVGIGLVTTF

SEQ ID NO: 244050 - protein, 105 aa, Zea mays
  Clone ID: MRT4577_154157C.1.pep
MAQASSSFSIVLLFLALVLVVEVSAGTANEELYRPAGAEGSVPIEQCPEKCDYRCSATSYKKPCLFFCNYCCNKCLCVPSGTYGNKEECPCYDNMKTKQGGPKCP

SEQ ID NO: 244051 - protein, 48 aa, Zea mays
  Clone ID: MRT4577_154158C.1.pep
RLRGNGASRRHIIYTDHTEDLTRPIRKVPIVTLDEHALQTIWQMTHIR

SEQ ID NO: 244052 - protein, 76 aa, Zea mays
  Clone ID: MRT4577_154159C.1.pep
MEWASAAYTAAALVCAAAACVVALAHIYRHLLHYAEPIYQRFIVRIIFMVPVNAQRSPLIPNPRGGRSGAELFRTG

SEQ ID NO: 244053 - protein, 91 aa, Zea mays
  Clone ID: MRT4577_15415C.1.pep
APCGVLKIATAAVHPLHCRLVCRHWPWRFAKSAGRNRSLARGDGEVWLRNHSRSQERRPVQLIPRLSTSLLPSPLRRASHRGSRGSVGGDC

SEQ ID NO: 244054 - protein, 192 aa, Zea mays
  Clone ID: MRT4577_154160C.1.pep
NNSDDEAHQFWRKQLPDDIIPDFTSFEKIEHEPEELSLAGLSLNAPPFYGTKASRLSREHQELSSSASNLELGHTNLFYEDNSQATFSTVGSSNWEQNYVGDLHFANENQDLQYDPTTGFTESFACEYVAASDGLFDPLEYLASQFPGFSAESLAELYYANGCDFNHTIEILTQLEMQVDPTSNQTMNLTPS

SEQ ID NO: 244055 - protein, 221 aa, Zea mays
  unsure (1)..(221): unsure at all Xaa locations
  Clone ID: MRT4577_154161C.1.pep
MSMKRHFAIFTTASLPWMTGTSINPLFRAAYLAKDGDKDVTLVIPWLCLRDQELLYPNNIVFDSPSEQESYVRHWIEERIDFRPSFSIKFYPGKFSKEMRSILPVGDITECIPDEVADVAVLEEPEHLNWYHHGRRWKNKFRRVIGIVHTNYLAYVRREKNGQLXACFLKYANTWVTRIXIIRLSGATQNLPRSVICNVHGVNPKFLEVGKIKLRQLQNGE

SEQ ID NO: 244056 - protein, 57 aa, Zea mays
  Clone ID: MRT4577_154162C.1.pep
MSMKRHFAIFTTASLPWMTGTSINPLFRAAYLAKDGDKDVTLAIPWLRLTDPELAYL

SEQ ID NO: 244057 - protein, 75 aa, Zea mays
  Clone ID: MRT4577_154163C.1.pep
VGCIVPSVRIHPLSDLEPFGPLHLPPHVILAIQILLTARFSPQLDSHKSLSERNLIIKQLCWLSQCRRKLKVPPE

SEQ ID NO: 244058 - protein, 44 aa, Zea mays
  Clone ID: MRT4577_154164C.1.pep
WYYIIIELCPHRCGRKKNMWNKTIKKIDWLIGSMRIIKLLDFNG

SEQ ID NO: 244059 - protein, 98 aa, Zea mays
  Clone ID: MRT4577_154165C.1.pep
GLSYTKLRVAIDRGRSSPCCHRREIAEEDTVIATDSIGVAALMEPSLEGISGCSRSCRGYQCLVIRKGEAGPRESLDETAAPPRCCYSLQARISTPKI

SEQ ID NO: 244060 - protein, 96 aa, Zea mays
  Clone ID: MRT4577_154166C.1.pep
RKTCTRSRKLGSCIAGALHSFDSVFYCRYYYRCVLYCVRQPTTTIRTIDQLHLMPTFCTCTYLVDCLLLQPLLGLQDQRTGDGPVLPCTVLLQGPS

SEQ ID NO: 244061 - protein, 175 aa, Zea mays
  Clone ID: MRT4577_154167C.1.pep
MTDVRPGWVMLDGFVFIRGANTSLPEKGYRPLRAQGTTSQGVNFDIALCLADPPDTSRLYVLSPSDASPDTACDILAAHGNHFLFVITYFLRSHETSNLRCYQDPFICSVISRDLPPLLKRLPAHTEPLIARKVDGAEITLQRLFFPGDAGLLCRDEQVFAVAQLDQLIPISDSN

SEQ ID NO: 244062 - protein, 95 aa, Zea mays
  Clone ID: MRT4577_154168C.1.pep
TVRGTVHLFIGIGRSLCKITFMSFIFSINLRTIYRGLNRIFLLKSVPLSIIEPKLPCAWLRHWFNLSSKPAFHIVYSFVPCPKVPAHILCFGKHC

SEQ ID NO: 244063 - protein, 46 aa, Zea mays
  unsure (1)..(46): unsure at all Xaa locations
  Clone ID: MRT4577_154169C.1.pep
VPSFGRXKKKQKKKKKKKKKKKKKIKKKKKKKKKKKTGGRGGGILF

SEQ ID NO: 244064 - protein, 87 aa, Zea mays
  Clone ID: MRT4577_15416C.1.pep
MPAPPHPTPLLPPAGEPFRVFVGYDPREHEAYEVCRRSLLRRSSIPLDVRPIRQAELRAAGLYTRARRPTESTEFSFTRFLTPYLAG

SEQ ID NO: 244065 - protein, 86 aa, Zea mays
  unsure (1)..(86): unsure at all Xaa locations
  Clone ID: MRT4577_154170C.1.pep
TFXMXXXIXFIFTFXXXFFFLTXFTXYFIYYFFLXFXFLYYFFIFLISIIFYFFYSIFFFTNFYFTFITLFYIISFLFYLYFFLTF

SEQ ID NO: 244066 - protein, 74 aa, Zea mays
  Clone ID: MRT4577_154171C.1.pep
ILRLFHLPSLTFDSTILYGTHGLFYHHLEQLLCLLLYHLSLITIIIKRKDFYYTLITSNKILLITSHYYMHHIR

SEQ ID NO: 244067 - protein, 67 aa, Zea mays
  Clone ID: MRT4577_154172C.1.pep
LALLIADLSQQNYSRRRRRGPPLKKSRGPRNQKKQGGATTNKDPPVDTRNPPRFPPSGPNRATNRPG

SEQ ID NO: 244068 - protein, 68 aa, Zea mays
  Clone ID: MRT4577_154173C.1.pep
TSRIPEQGPIQLFPLHYHTILHSPYTGACRAQHQPVPTELLIQRPELQLESSPKRRGCMTKLISLLNK

SEQ ID NO: 244069 - protein, 236 aa, Zea mays
  unsure (1)..(236): unsure at all Xaa locations
  Clone ID: MRT4577_154175C.1.pep
HWVPRGRPEPFLYPSEFPVIPLSSSPRLPLGDRPIGIPKRDDSSELRKTLEHNEGACQAPGGPLLCINNCGXYFGIVETMNMCSKCPPDMITKQDLAKLVVSSIHSILNGSDDAMXRMLLATTRYEMMAKTYMQQRTCMRPLMXAGPNEGVGAISKGGKGWPNTGXPCRKRAGLTEFDXRCGNLYCAVHRYYDNYDCKLYYRTADTDSIAKANPXVNGDQLDNIYVPAPYRWCHED

SEQ ID NO: 244070 - protein, 43 aa, Zea mays
  unsure (1)..(43): unsure at all Xaa locations
  Clone ID: MRT4577_154176C.1.pep
KVSLARREGPEQDLXTRVERQRRRPKRCYEREGRGXGAMEEEL

SEQ ID NO: 244071 - protein, 194 aa, Zea mays
  unsure (1)..(194): unsure at all Xaa locations
  Clone ID: MRT4577_154177C.1.pep
FGTRPEAAETERACGYTHLADPRPPWPISARRSRARTAPAPAXRRAAGRGGRSGRRGRHGRHGRTXPPAPPYSKRRRRXQRPPRGHRRXRPRAATTSRRPRRTRARRAARTRTTSTRTRTAAGGPSRRRSAARGPRGFPPRPLRRXPPRATTTTRSDTTTTRTSPTPRPPPPRGLRVRAAATPAATSRTGWRTG

SEQ ID NO: 244072 - protein, 64 aa, Zea mays
  Clone ID: MRT4577_154178C.1.pep
QNSMKMVIALVVCLALSAASTCAMQMPCPRTLMGRNVLCSPPPNYHYGLPQKLTITPGSGAFRP

SEQ ID NO: 244073 - protein, 138 aa, Zea mays
  Clone ID: MRT4577_154179C.1.pep
RTRGRTRGRTRGRTRGRTRGRTRGGPGLGLGFLAVSGVVASLALLVIWSKVVAAVTVASFSLYLVESVRSSSLPRRRPRAVVTERRLPLDGRGRVSPIREVDAATEPSRPSCCSDSDRGSDGRMLLVEESSGVLDESS

SEQ ID NO: 244074 - protein, 103 aa, Zea mays
  Clone ID: MRT4577_15417C.1.pep
KVAPRSISPSFCMFRRNSYKIALAPFLLAFFSLAWTISKSPFIVIFVSYLGAGLWWQQTQYAPCANSLNIYVKRTYPMDKTPFTAQIQSIGLLFALSCPPSRT

SEQ ID NO: 244075 - protein, 217 aa, Zea mays
  Clone ID: MRT4577_154180C.1.pep
FDSTLPARKPAVQATAYPDTGVPVQPTIIAFPVSSAPAPKGVFVGYSPPAGAEDHVRYQQQPFSYSMQPSLVPVNVPQGIGASAYKDSNHAAVEPLREYARDLPHDYARAIDARMQAVHLGPIAPPESSVQGNPSIPHVVIDHAKVGKPPVNNDVTSFCKSQAGGYHMGITNAFTSPALTQEDNIARHSEQPPCDFDVGAQNVHPDIIQRPPLNLPV

SEQ ID NO: 244076 - protein, 99 aa, Zea mays
  Clone ID: MRT4577_154181C.1.pep
LTPGRARVITRACYEPRVVGHATYSMSPLQYQNRRDERHYSSIAPSVLQGLTKAVAMTVLYDDGDKTFFAVIILAMHHTMILDLARYVTALIVITAVSA

SEQ ID NO: 244077 - protein, 74 aa, Zea mays
  Clone ID: MRT4577_154182C.1.pep
AAGPTDTVRWHALNHTSDLGRSKLACMQCDMLYPLLITIYGASDMPLLCLGTAYRCWLRARRGRRASRVLAGRA

SEQ ID NO: 244078 - protein, 200 aa, Zea mays
  unsure (1)..(200): unsure at all Xaa locations
  Clone ID: MRT4577_154183C.1.pep
VNGKNRKELLAMAKVQGESKKGTLLLPGELTPKXVEDALGEGPAGRSPSHMAVGANKKASNVGHIKDGATVSKVEDVHVDRSVGVKKPRYSADEGPSLTELSGYNAKRHEFDPEYDNDAEQALAEMEFKETDSETDRELKLRVLRIYLSRLDERKRRKEFILERNLLFPNPLEEDLTSEDRELYHRYKVFMRFLSKEEHE

SEQ ID NO: 244079 - protein, 155 aa, Zea mays
  Clone ID: MRT4577_154184C.1.pep
QLIETIIFPHAPGQLLLKGIHLLLFPTLHHLPSNNLGKKPPIHLSSVGPTKSKATLATSESQQAKQLGQLPQSVSLHQKPNLGHHRNVSKPADEEQSLFGYGGNLSPSTYDFDLQKGLKLLQYKNTDGNAIRNHGELEPSLTVLRTNTCMLFKML

SEQ ID NO: 244080 - protein, 592 aa, Zea mays
  unsure (1)..(592): unsure at all Xaa locations
  Clone ID: MRT4577_154185C.1.pep
MGRSRGVLSSGDDDTGHRSKRRRVSSGGDATDSISASIGGAGEGGGKKALYHCNYCNKDISGKIRIKCSKCPDFDLCVECFSVGAEVTPHRSNHPYKVMDNLSFPLICPDWNADEEILLLEGIEMYGLGNWLEVAEHVGTKSKLQCIDHYTSAYMNSPCYPLPDMSHVNGKNRKELLAMAKVQGESKKGTLLLPGELTPKVESQFSPSRVKVEDALGEGPAGRSPSHMAVGANKKASNVGHIKDGATVSKVEEICFLKNVFFCNLSSIKKXMVIVSRYXDVHVDRSVGVKKPRYSADEGPSLTELSGYNAKRHEFDPEYDNDAEQALAEMEFKETDSETDRELKLRVLRIYLSRLDERKRRKEFILERNLLFPNPLEKDLTNEDREVYHRYKVFMRFLSKEEHEALVRSVIEERKIRRRIQELQECRSAGCRTLAEAKIHIEQKRKKEYELNAQKAKDSSQLNANNKSVQKMNRPMKIESDGNLDPKKGGAGLDSPKTTGPTSVKQWDDWDIVGLPGAELLSASEKLLCCQNRLLPSHYLRMQEVLMQEIFKGSVLKKEDAHVLFKVDPTKVDSVYDMVTKKLGNHVELPTV

SEQ ID NO: 244081 - protein, 223 aa, Zea mays
  Clone ID: MRT4577_154186C.1.pep
GYLEVAWGDADDSAAASAAEAATTDVELLKRAWRNEKAAPEILRFDSPLVSRVREQTQLLEDTLDDFADSGVDDLVVSLYQMDLDRTLFLLRSYLRLRLQKIEKYTMHISRSEDLLSRLSQQERRFAKSCAEIMEKHLEQSVLSKLPYGYDSVSRQSLSSTEDDMVPEPQLDTFVFCKTKGDVGAFQLDDIGEEVVDLVADDLYVLRYKSVKGLIEGGRIDLI

SEQ ID NO: 244082 - protein, 113 aa, Zea mays
  unsure (1)..(113): unsure at all Xaa locations
  Clone ID: MRT4577_154187C.1.pep
TNRDHFCHKDRVRLVIGNHLNVEAHACHVDKSVVPVIKEMGMDAYRFSIAXARILAKGTREGGVNPAGILYYXGLINLLLDNGIQPYVTPVHXDVPQALEREYGGFLDNSHKS

SEQ ID NO: 244083 - protein, 119 aa, Zea mays
  Clone ID: MRT4577_154188C.1.pep
HPSLGGPLLPLLGDSYYFFGARFFNNSGVLEPPWPPTLLSLLHLPLFPAGGIPLRPPPPFVLTNCPTCLANSGPLLWGIIRGGCCGFYPLGGFFSRQPITPPFFFFPSFFCRGVPGFFP

SEQ ID NO: 244084 - protein, 34 aa, Zea mays
  Clone ID: MRT4577_154189C.1.pep
ASRKVKEKVGVVKAIIVWCRFEGMKGILVPHGEY

SEQ ID NO: 244085 - protein, 124 aa, Zea mays
  unsure (1)..(124): unsure at all Xaa locations
  Clone ID: MRT4577_15418C.1.pep
KXKSNPXXRKKXHTAXXSXQYXFLWHHLKQFKXFIYRHFXKXSRDXGFLLXSQVLKGQRTKSXXQXHNNKSLPIXFLQLSLXQYQTTILFLXXQKXRLHHTKFXLDSCQIFSSCNSLXXEXLMQ

SEQ ID NO: 244086 - protein, 54 aa, Zea mays
  Clone ID: MRT4577_154190C.1.pep
SKIERWHACLYLIPAPSVSVDVVYYAGINGLIDYSLFGLFSNEQIMEALSMVQV

SEQ ID NO: 244087 - protein, 99 aa, Zea mays
  Clone ID: MRT4577_154191C.1.pep
SRDVVSWSAVISSHAHHGCARDALCVFNEMLDAKVAPPNEITFLSILTACSHGGLVDEGLRYYGIMNDEYGLSPTIKHCTCVVDLLGRAGRLADAEAFI

SEQ ID NO: 244088 - protein, 65 aa, Zea mays
  Clone ID: MRT4577_154192C.1.pep
ATLRSPNTRNYPTMRLHLSPKAFVVIEAGLGLSDLQSYLHTIPSFKYLMNCCYLKKSYFFNNSLI

SEQ ID NO: 244089 - protein, 113 aa, Zea mays
  Clone ID: MRT4577_154193C.1.pep
KGVNAELGADVFVAVNAYRMHMDFISDPAAYGFVTSKVACCGQGPYNGVGLCTAASSVCPDRSVYAFWDNFHPTEKANRIIVSQFMDGPQEYMHPLNLSTILAVDARAAATFN

SEQ ID NO: 244090 - protein, 155 aa, Zea mays
  unsure (1)..(155): unsure at all Xaa locations
  Clone ID: MRT4577_154194C.1.pep
RSEAPGRRKKHSWLAGIMPRRRRSKGQVPASATSPQSAPPXLLPRGQQPGALAGXDGDGDDDESSSDPAWRPSPSPMRRTPCRRRQTSGSMPSGFAVCLSPLVRPIXGAGPCSRRTREPSPASSGRRRRRSTAAXSSASVTRCRSRKLADGGRFR

SEQ ID NO: 244091 - protein, 71 aa, Zea mays
  Clone ID: MRT4577_154195C.1.pep
KKRNPYFGVIKKTQLFGGGKKMLLKQRAPKFYAGPFFTVLGREGENPCFIRTGVVFGENGKGAGGFGTFPI

SEQ ID NO: 244092 - protein, 145 aa, Zea mays
  unsure (1)..(145): unsure at all Xaa locations
  Clone ID: MRT4577_154196C.1.pep
VXRLQRSADRHPARKRLXADGIPRLSREQQXLHWRKGXXGFNVRXRDXGFPEHPAGAGESXXGGWRLAVCPVGPSPXSSLNCKECDGFQDXXLYAPLQRRQFYTRTCIYLRHPVDFXSSGDAXRRCSQNMHPWCLRRAHGQPSRT

SEQ ID NO: 244093 - protein, 77 aa, Zea mays
  unsure (1)..(77): unsure at all Xaa locations
  Clone ID: MRT4577_154197C.1.pep
MRRLALLFLLPLLLATGVTTASAEPATPPASPPPPPPPPPPXPPPPPPXPPQAPXSTERPRKSPPPESPASPSTTNK

SEQ ID NO: 244094 - protein, 93 aa, Zea mays
  Clone ID: MRT4577_154198C.1.pep
CHPSGNYSFLTYICPLIPFRSYHSFQISNTLKWINGAIVRHLDLLKDSTSTIIVITFSVTEVTLGTVVVDSVMVLIALRTLVIIIPLRHTISL

SEQ ID NO: 244095 - protein, 51 aa, Zea mays
  unsure (1)..(51): unsure at all Xaa locations
  Clone ID: MRT4577_154199C.1.pep
MGPLEWAMWANXQTLASDLILIPGGIVATAGRFTQWYFGAYSIVAGVFVCL

SEQ ID NO: 244096 - protein, 84 aa, Zea mays
  Clone ID: MRT4577_15419C.1.pep
IMAAPLGRDLCILVPLTWVNSAQWVMRWLSWLITRTICVYISRSANQIICDEGCVTHDHCPRKLKVSYMNKKANDITELRFYNK

SEQ ID NO: 244097 - protein, 54 aa, Zea mays
  Clone ID: MRT4577_1541C.1.pep
MAANLKWAPVLALLVAWAARGAPTSTTKTKKQLGANKRDPRSEWVRAVLLGPRP

SEQ ID NO: 244098 - protein, 63 aa, Zea mays
  unsure (1)..(63): unsure at all Xaa locations
  Clone ID: MRT4577_154200C.1.pep
DNNIRDTPIVFPQAHIVPRSRPYLSSSRQVISPLLVKAVDQTSRTAEHGATFTDMXMXXSQTC

SEQ ID NO: 244099 - protein, 101 aa, Zea mays
  Clone ID: MRT4577_154201C.1.pep
LMYISTTTYVSSVGVHNHPFYRAQMPESRNRSATARIRASTGTASFILRHPCIHTGGSQRSLPGTRIRAGSRSRPVPRIPALPAPHKPPCHAPCVAPTPPS

SEQ ID NO: 244100 - protein, 135 aa, Zea mays
  Clone ID: MRT4577_154202C.1.pep
AGEAWRAPGRTRAQEVRAELPGGAQAGRARAPAGRCAARRGIRGRAARGGAGRLGRPLRRARLLLALLLALILRVQRAGYQGRVHGRSLLLSFVLCIRLPIPRHRLRGIVVPIDPHGDRGCPLPGRVPGRLVRRY

SEQ ID NO: 244101 - protein, 214 aa, Zea mays
  Clone ID: MRT4577_154203C.1.pep
MPPTPPQGILATGRDRDEDGDVNDTGSSSSHSVELSEEQEPEGWIARPITRDAARSCHFHDALDTLLQAFSKHYSITERDTAEAAMQYGARRALSQYCSLFCKVSDGLDLKYYPHPSTGSAGGVIVSPVGEGNPRLNSMVNLAAMLNTELDHALDELGKVWVEVAELRAECAARRYLDGGSPAPIGIQHPYRSPPHGHFAYGTPNCRTQIDLDP

SEQ ID NO: 244102 - protein, 81 aa, Zea mays
  Clone ID: MRT4577_154204C.1.pep
EGGGGSKKTGRPHPKREKFGHIKGEELPHQAPLRKLLKRVSPWSGLFLGKGPPPKKKIGPRLAPIWRAKKQGPGKTKDGSL

SEQ ID NO: 244103 - protein, 71 aa, Zea mays
  Clone ID: MRT4577_154205C.1.pep
WRRFSLRGKTFFPPNVLGWGVFPFWGIGRYLCIALSVGSFFCRPEKNGPLGGVHKEHVNKTPKSELKLRKI

SEQ ID NO: 244104 - protein, 53 aa, Zea mays
  unsure (1)..(53): unsure at all Xaa locations
  Clone ID: MRT4577_154206C.1.pep
KIKFTXNQFRKLCQKKKKKGCIMALAVVKKKFYNLAKKFQKMFQLEKQIQGQQ

SEQ ID NO: 244105 - protein, 174 aa, Zea mays
  unsure (1)..(174): unsure at all Xaa locations
  Clone ID: MRT4577_154207C.1.pep
MSEEDKAAASAEQPKRXPKLNERILSSLSRRSVAAHPWHDLEIGPDAPAVFNVVVEITKGSKVKYELDKKTGLIKVDRVLYSSVVYPHNYGFVPRTLCEDNDPMDVLVLMQEPVVPGSFLRARAIGLMPMIDQGEKDDKIIAVCADDPEYRHYNDISELSPHRLQEIKRFFERY

SEQ ID NO: 244106 - protein, 79 aa, Zea mays
  unsure (1)..(79): unsure at all Xaa locations
  Clone ID: MRT4577_154208C.1.pep
AKAPAARTAGAVAXGDRGEAGVXARXPAPGCGGAKLDAEVVVELAGEEKAVGKVRLGVMCECRYVCADEGLRYLQHFLV

SEQ ID NO: 244107 - protein, 165 aa, Zea mays
  unsure (1)..(165): unsure at all Xaa locations
  Clone ID: MRT4577_154209C.1.pep
FFIQVVEITKGSKVKYELDKKTGLIKVDRVLYSSVVYPHNYGFIPRTLCEDNDPXDVLVLMQEPVVPGSFLRARAIGLMPMIDQGEKDDKIIAVCADDPEYRHYNDISELSPHRLQEIKRFFEDYKKNENKEVAVDAFLPATTAQEAIQYSMDLYAQYILQSLRQ

SEQ ID NO: 244108 - protein, 58 aa, Zea mays
  Clone ID: MRT4577_15420C.1.pep
HSSACFSFPAAALGHRPRHVSVFDLLMLYRSTSWYLYSTLIYILINKLKHVFILGVCR

SEQ ID NO: 244109 - protein, 62 aa, Zea mays
  unsure (1)..(62): unsure at all Xaa locations
  Clone ID: MRT4577_154210C.1.pep
ICHYPSQSRKYXSYTXPHLFPYPLMHPSPCQLYRTRSIYNTSILAHFVDFLMHYSSLNASPY

SEQ ID NO: 244110 - protein, 134 aa, Zea mays
  Clone ID: MRT4577_154211C.1.pep
MQIFVKTLTGKTITLEVESSDTIDNVKAKIQDKEGIPPDQQRLIFAGKQLEDGRTLSDYNIQKESTLHLVLRLRGGAKKRKKKTYTTPKRVKHKRKKVKMSILKYYKVDSDGMIKRVTRECPNAHCCAGVFMAF

SEQ ID NO: 244111 - protein, 522 aa, Zea mays
  unsure (1)..(522): unsure at all Xaa locations
  Clone ID: MRT4577_154212C.1.pep
GSLYLARICPQQTIDHLVFELSQRMLEDDEEPVRLGKVDVSANVVLEFSQGPTASQVATVVDSQPHMSPLLVRGSLDGAVRNVSGNLSWRTSAVTGRSVSGPLSPLAHEVSIPNPTAGRSGQLLPALITMSGPLSGVRSSAGNLRSRHVSRDSGDYYFDTPNSTDDILHQGGSGIHGINANELQSALQGHQHLLSRADIALILLAEIAYENDEDFRENLPLLFHVTCVSMDSSEDIVLEHCQDLLVNLLYSXGKYXLELYEIESSERENKHHVVSLIKYIQSKRGSLMWENEDPTLFRIELPSASLLSALVQSMVSAIFFQGDLRETWGSEALKWAMECTSRHLACRSHQIYRALRPSVKSDSCVLLLRCIHRCLGNPVPAVLGFAMEILLTLQVMVENMEPEKVILYPQLFWGCVALMHTDFVHIYCQVLELFCRVIDRLTFRDRTTENVLLSSMPRDEFDINGYASDLHRLESRTTSERLLSVTGTGKVPAFEGVQPLVLKGLMSTXSHGSAIEXLSRIT

SEQ ID NO: 244112 - protein, 206 aa, Zea mays
  unsure (1)..(206): unsure at all Xaa locations
  Clone ID: MRT4577_154213C.1.pep
MEVRGLGQLLAALAAAFFVRAIAGPGPALLPPAEDTEADEADAEAGEGGGGGVPPVTIRWARITCALKNKRGEVARFLLSNVSGEAKPGRLLALMGPSGSGKTTLLNVLAGQLAASSSLHLSGFLYINGRPISKGGYKIAFVRQEDLFFSQLTVRETLSLAAELQLPDLWAPERXESYVNDLLLRMGVVNCADSIVGDAKXRGIVG

SEQ ID NO: 244113 - protein, 47 aa, Zea mays
  Clone ID: MRT4577_154214C.1.pep
FALMSPTHPNFYIFLALNWGHVTTKRELSMRPSHRMAKATNRACIAM

SEQ ID NO: 244114 - protein, 221 aa, Zea mays
  unsure (1)..(221): unsure at all Xaa locations
  Clone ID: MRT4577_154215C.1.pep
MPSFPPFLSSPPATAPVAAMASCDLLDVDPLELQFPFVLDKQIPCPLRLANRTDRTVAFKVKTTNPRKYCVRPNNGIVPPRSLCTVVVTMQAQTVVPPDLQCKDKFMVQSVVISDSLSAKDITSQMFAKEGGNVLQEVKLKVAYVMPPEPPSEIAEEHDGLDRVLVPMQRIVDNGKSTSELSSGSVSLRSAEEFGSPVGRIVKSEEFLKAAXTAMETXTYA

SEQ ID NO: 244115 - protein, 32 aa, Zea mays
  Clone ID: MRT4577_154216C.1.pep
NKMSKLQDIEIISLVHSSPKMTVHKVKYNIVI

SEQ ID NO: 244116 - protein, 71 aa, Zea mays
  Clone ID: MRT4577_154217C.1.pep
SKKATFSEGATTYHTSSSHHYVLNLTPHSTISKILNKRSLSSTLSIATNPPSRTSYSILNTTWRSTHFIYM

SEQ ID NO: 244117 - protein, 70 aa, Zea mays
  Clone ID: MRT4577_154218C.1.pep
PKAFFLRAPLVLCSGTFKSSLMCKTLVWWMPVDGKGSAEDLASRRGAAAVELVVEQGRSLNGTTGESNSE

SEQ ID NO: 244118 - protein, 145 aa, Zea mays
  unsure (1)..(145): unsure at all Xaa locations
  Clone ID: MRT4577_154219C.1.pep
WNXQXMWLVRRTTSYLYGAVDTVRDSLGLSKMGFVVSSKVSDEDEAKRYEQEMMEFGTASPEYVIVAAVALLNLVCLALXQAAATGWRRHWXVFFVQVALCGVLVLLNVPVYEAMFVRKDRGRMPFPITLASVGFVTLALIVPFF

SEQ ID NO: 244119 - protein, 135 aa, Zea mays
  Clone ID: MRT4577_15421C.1.pep
MGLLDQLWDDTVAGPRPDSGLGKLRKHASFSPSSAAPSPTAEGAAPPAVTRSITMLRPAALSVATSPRSESSSAPSSPSPASGAPDSPFGAATTPRGEGWKKLRRKGRMADGADAPGTPRSPTVYDWVVISSLDR

SEQ ID NO: 244120 - protein, 761 aa, Zea mays
  unsure (1)..(761): unsure at all Xaa locations
  Clone ID: MRT4577_154220C.1.pep
GTSSRRPAGGLLLLLLFGSCSSAAAVVLRTGEVEMEERLFATEKHGGRALYRLHAVTVFLGICLLLCYRATHVPAAGSGGRAAWLGMLAAELWFGFYWVITQSVRWCPIRRRTFHDRLAARFGERLPCVDIFVCTADPRSEPPSLVVATVLSVMAYNYPPAKLNVYLSDDGGSILTFYALWEASAFAKHWLPFCRRYGVEPRSPAAYFAQSEKPRHDPPHALQEWTFVKNLYDEMTERIDSAARTGNVPEETRAKHKGFSEWDTGITSKDHHPIVQILIDGKDKAVADNEGNVLPTLVYVAREKRPQYHHNFKAGAMNALIRVSSVISNSPIILNVDCDMYSNNSDTIRDALCFFLDEETGHRIAFVQYPQNYNNLTKNNIYGNSLNVINQVELSGLDAWGGPLYIGTGCFHRRETLCGRRFTEDYKEDWDRGTKEQQQHRHRVDGETEAKAKSLATCAYEHDDDTRWGDEVGLKYGCSVEDVITGLAIHCRGWESVYSNPARAAFVGVAPTTLAQTILQHKRWSEGNFGIFVSRYCPFVFGRRGKTRLPHQMGYSIYGLWAPNSLPTLYYAVVPSLCLLKGTPLFPELTSPWIAPFVYVAVAKNVYSAWEALWCGDTLRGWWNGQRMWLVRRTTSYLYGFVDTVRDSLGLSKMGFVVSSKVSDEDEAKRYEQEMMEFGTASPEYVIVAAVALLNLVCLAGXWRRHWXVFFVQVALCGVLVLLNVPVYEAMFVRKDRGRMPFPITLASVGFVTLALIVPFF

SEQ ID NO: 244121 - protein, 50 aa, Zea mays
  Clone ID: MRT4577_154221C.1.pep
SFCVARGQASDVDGGLQQHVVHVLARQRVGLHHRAQKAPGLDLEDVVANV

SEQ ID NO: 244122 - protein, 115 aa, Zea mays
  unsure (1)..(115): unsure at all Xaa locations
  Clone ID: MRT4577_154222C.1.pep
PAGTRIVKRITLGALPLAGFNHWPDRPNTDARSPDTLRHSGCGRPPRPLAPRTXAPPPPRPPXPVAPPXPAPPPXLPPLLPGSPPALPPPPPPPPLAPPPPPPVPPVRPPFPPPP

SEQ ID NO: 244123 - protein, 77 aa, Zea mays
  Clone ID: MRT4577_154223C.1.pep
MKMKAESSNLYLLWGAKLGGNFGPPTKKKRVLQPSACFSAFGVCCRSNTVLLLMSPGELSPNYSDPPPCIVSVLEQA

SEQ ID NO: 244124 - protein, 106 aa, Zea mays
  Clone ID: MRT4577_154224C.1.pep
KVFCMWVPLVRVRLSVPLGRGAAWTWSVLQVSWLVVVGCCLPTALVVGKIVGFYVLVCISYDLRLFCGVGCCLCLGVCRLGWAVRSLFVFLGVVSVLFVTLLMFSW

SEQ ID NO: 244125 - protein, 42 aa, Zea mays
  unsure (1)..(42): unsure at all Xaa locations
  Clone ID: MRT4577_154225C.1.pep
LQDVSSGCRCXIIRSVVRGYDEAMPTIEKGWWPWGREHHAST

SEQ ID NO: 244126 - protein, 76 aa, Zea mays
  Clone ID: MRT4577_154226C.1.pep
SRRAPFFFFFFFYIFFFFFFFFFGWGFLKKKKKAPILYTFIGKWAPNNPNHNARALFFVGVLKNRAGTCTCIYFRF

SEQ ID NO: 244127 - protein, 95 aa, Zea mays
  unsure (1)..(95): unsure at all Xaa locations
  Clone ID: MRT4577_154227C.1.pep
TTGASSSXSPCAKSRSSPSMSSSPWCWWRQSRVTRTTMPPPPPRPWRPCSRTRARTPRRRRSQRRDASWQYRRRXSSLXLSRRRRVDVCARVALA

SEQ ID NO: 244128 - protein, 53 aa, Zea mays
  Clone ID: MRT4577_154228C.1.pep
GVILHQRALFHNYITKHPVLILLSHNIFRSNCSTYLKWINLHNVYHSNILLIV

SEQ ID NO: 244129 - protein, 107 aa, Zea mays
  Clone ID: MRT4577_154229C.1.pep
PIGPLGTGRTTRVSTTLLNSYPPPKTPPVLCRSTPSPFPAPDSCPPALRYPSETACLLKAKQTPAYTQGGDASGHASISSDDGPRVQISLQNRWKALNLLIFFFPPT

SEQ ID NO: 244130 - protein, 97 aa, Zea mays
  unsure (1)..(97): unsure at all Xaa locations
  Clone ID: MRT4577_15422C.1.pep
PVTWKRVVKVFGLWISVREIARVSNPEMGPFFFGPRVXFFKXFPLGEKFQXRFFFXNQGFIRGLEFSLIRAGKRGNNKLLRALRHPWDFFGGNLGKN

SEQ ID NO: 244131 - protein, 164 aa, Zea mays
  Clone ID: MRT4577_154230C.1.pep
MAVSAQGYRTRVPGAVTVRAWDRAPVPPHLAVTAHQGSVVACGGCGRARRSGPRPVPARLRCQGAVPRAAEPGPPSGLPHRARRRGWGPRRLRCRGWVPRTRLAACTAGAARDETVTAPGRADHRRVGARARARLAEAGEGGRARRSWPGHPLASRGWGLRQPQ

SEQ ID NO: 244132 - protein, 53 aa, Zea mays
  Clone ID: MRT4577_154231C.1.pep
DLFRELDPGAADKIHRPCARADCSTSQPVRQEPSLRRIIRPWPQTIRASAEST

SEQ ID NO: 244133 - protein, 38 aa, Zea mays
  Clone ID: MRT4577_154232C.1.pep
SAGSAACRARDRTYRRSNPRHSTSMGPNMKHRVQACVS

SEQ ID NO: 244134 - protein, 147 aa, Zea mays
  Clone ID: MRT4577_154233C.1.pep
LTTNRVRSFDTAFLSRIHVALHYKNLSDEDRERIWTHNFDRLNRDSHGRIRVATVARQFIWSSQEVRALKWNGREIRNAMQTALALAESDSNEEGLPTITIGEKHVRAVVKMSKGFKDYIKSEMPLGSDDADYDGDGDDDAIHGEEF

SEQ ID NO: 244135 - protein, 46 aa, Zea mays
  Clone ID: MRT4577_154235C.1.pep
DPTTILKTSSNIFLSFGSTYVSRSIGDAYFKNREFSDDPCTARLHL

SEQ ID NO: 244136 - protein, 88 aa, Zea mays
  Clone ID: MRT4577_154236C.1.pep
GAFFISGLLARGFKRTPRLAGVVYVHSRFPILCPNYTGLCGVAQELVKFWQLCSIRPINFLQASSVSIPSVSPWCECGLKPQLVLKKP

SEQ ID NO: 244137 - protein, 113 aa, Zea mays
  Clone ID: MRT4577_154237C.1.pep
EAAVPGSIARKRVEKKHGYYYRDHRETSKEVALTKPPAPTRQGRPRERREEIRTQAARLRSADELWLSAAPSPAPSLAPANTRKNQRRGDEEEEGGSREASKLARRKSSRAQG

SEQ ID NO: 244138 - protein, 93 aa, Zea mays
  unsure (1)..(93): unsure at all Xaa locations
  Clone ID: MRT4577_154238C.1.pep
FIWHTVHPMAESHAAAPASGCCSISLTYTPPTHYLTLVKNLVLPNXSIMCTKLSSRPDSNCLTCDPPRDCTRLDTQISTRACMLLSTKTRLLA

SEQ ID NO: 244139 - protein, 216 aa, Zea mays
  Clone ID: MRT4577_154239C.1.pep
MAGVLPRFGPFGPLPPSDEFGIRETRPRLAGRRAGGYDLVERMEYLYVRILKARDLKWTGSFDPLAEVKLGSYSCATRHIEKTTSPEWNDVFAFSRERIQASFLDVVVKGKGFAKDDFVGRLRFDLADAPLRVPPDSALAPQWYHVFDKKAERGGEVMMAVWFGTQADECFPLAVHADASFAVDAKLAAHIRCKQYTVPRLWYVRVNVIEARDIAF

SEQ ID NO: 244140 - protein, 135 aa, Zea mays
  unsure (1)..(135): unsure at all Xaa locations
  Clone ID: MRT4577_15423C.1.pep
MGLLDQLWDDTVAGPRPDSGLGKLRKHASFSPSXGRAVADRGGLRAARRDAEHHHAAARXLSVVTSPRSESSSAPSSPSPASGAPDSPFGAATTPRGEGWKKLRRKGRMADGADAPGTPRSPTVYDWVVISSLDR

SEQ ID NO: 244141 - protein, 58 aa, Zea mays
  Clone ID: MRT4577_154240C.1.pep
NSLDDVNLWLRRQHAVSARYCRALSVRRDMRASAVGSCKRDHLCTCAWVMNKCSGPGR

SEQ ID NO: 244142 - protein, 57 aa, Zea mays
  Clone ID: MRT4577_154242C.1.pep
YVGPAPLQDMPMQIAAPYGPTAYHIHHPFSMDKALTIISHEDYSIIQLANNLRTALN

SEQ ID NO: 244143 - protein, 125 aa, Zea mays
  unsure (1)..(125): unsure at all Xaa locations
  Clone ID: MRT4577_154244C.1.pep
SDAERIEKLDMEWNLXKKIMEEEICKXKQTAREKFINEGDENTKFFHLLAKGRRRRVRIPFLNQDDVPVSDADGINKIATSYYKDLFGHSVISNINMAQRNMEQLSDDDRSFLTAPFSVEEIKKV

SEQ ID NO: 244144 - protein, 59 aa, Zea mays
  Clone ID: MRT4577_154245C.1.pep
SYRDKAEPSLLGRELDCHVVRETSGHTSSPSSSSVAQSKCHQHTQRRCPSVSMRAKIII

SEQ ID NO: 244145 - protein, 100 aa, Zea mays
  unsure (1)..(100): unsure at all Xaa locations
  Clone ID: MRT4577_154246C.1.pep
VVLMVVIVTNTEEGQVVLVEVGLERXDDSTRKNMKAEAGYQGSXVAIKXKNRNGEYETKAVSEIQNLGDFRVPLVDDLHGDDXHAQFHSAVNNTHCPGQE

SEQ ID NO: 244146 - protein, 122 aa, Zea mays
  Clone ID: MRT4577_154247C.1.pep
FSPLFRVVWCASWSRSGFSGSPHASSLASALASGARCGGPGARYVRFVPPAGVECFPFFAPSCHWLSCRWIVSFFVSVPNVFVPVAVGAAFSSSSPPSPSFLLSVRFNLLIPPPVEGGRFSG

SEQ ID NO: 244147 - protein, 49 aa, Zea mays
  unsure (1)..(49): unsure at all Xaa locations
  Clone ID: MRT4577_154248C.1.pep
HIELFLPIHSQNYSIVDRTKKGSCSILHRQEGGGGNLSSXILINIPISX

SEQ ID NO: 244148 - protein, 76 aa, Zea mays
  Clone ID: MRT4577_154249C.1.pep
YTLLCFVLAHRTVARSCVLQAGVRTLELIVGLGGSYCAHSWLDVFVWYKNDFARRKKRYKQKKKYRAAALYFLFFK

SEQ ID NO: 244149 - protein, 258 aa, Zea mays
  Clone ID: MRT4577_15424C.1.pep
MASQEAQAPSATKLVLPITGSSSSKSANKKQKKEAQRRVHHVGVQGPFIKSKWSHIPITFSQEDHQLKDYPHNDAMVISCVIKGFLVHNVLVDTCSATDIIFTKAFRQMQEQDDKIHDATHPLCGFGGRQIVALDKITMPITFGYVHNTRTEQVVFDIVDIVTPLSKIYCSIEGSCYSRIIAGMKGYKFATDVLASCCTKIQNLDIAIRSNRCSESGFNGTVTRSERQLRELTAGDRAPGFAPAMGIRAQRSWITQRE

SEQ ID NO: 244150 - protein, 77 aa, Zea mays
  Clone ID: MRT4577_154250C.1.pep
QNKKGLRAFKITTTIAKNNITIAPLFYTHLHMSIPLHNLYTLFIQNLYHTQTLIFTLATLPYQHPISLDINPFHYDL

SEQ ID NO: 244151 - protein, 42 aa, Zea mays
  Clone ID: MRT4577_154251C.1.pep
WDRTIVWYIMATYNVLVHAFPETFSATFRFVFYVVLILFFGC

SEQ ID NO: 244152 - protein, 62 aa, Zea mays
  Clone ID: MRT4577_154252C.1.pep
QTTLNKLLSTTTAKEAVLDDEVFIHNADHLMFFNSQMRRLRRRKLHHTFRYYSHHWRTWAAC

SEQ ID NO: 244153 - protein, 34 aa, Zea mays
  Clone ID: MRT4577_154253C.1.pep
LPGEGRHPYSAWPCLARYRTSLLSSCASDRYHVR

SEQ ID NO: 244154 - protein, 57 aa, Zea mays
  Clone ID: MRT4577_154254C.1.pep
TGFERSETTIYTRCLWETAMNVESRLPTEHTERLTLVLHYIHIILLVISLRSTSPIP

SEQ ID NO: 244155 - protein, 83 aa, Zea mays
  unsure (1)..(83): unsure at all Xaa locations
  Clone ID: MRT4577_154255C.1.pep
KPTQFPVRAGAPFPFKKRAGFPQKVFFKKKKVPRGVFPPKFSQGEYLKAPGKTFSVTLPGGGTXGFFFDPHQGAGMVGKIPVH

SEQ ID NO: 244156 - protein, 36 aa, Zea mays
  unsure (1)..(36): unsure at all Xaa locations
  Clone ID: MRT4577_154256C.1.pep
LFILFTALXIVSVVIKILLWCHCPLMLLLYDSHLFP

SEQ ID NO: 244157 - protein, 55 aa, Zea mays
  Clone ID: MRT4577_154257C.1.pep
FLNGYCTSQICLNCPCSSMFVKVHSSLGNKRNNLYSLTKVLKKMNFLVSQQIFPN

SEQ ID NO: 244158 - protein, 902 aa, Zea mays
  unsure (1)..(902): unsure at all Xaa locations
  Clone ID: MRT4577_154258C.1.pep
MSVEELKELKKQLTELQEAEYIHSDSSPCGAPVLFVQKKDGSQRMCVDYRSLNDVTVKNKCPLPRIEDLFNRMRDARVFSKVDLRSGYHQMKIRPSDIPKTTFSTRYGLYEFTIMSFGLTNAPAYFMNLMNKVFMEYLDRFVVVFIDDILIYSRNESDHEQHLRLVLQKLRDNQLYAKFSKCEFWIGKVPFLGHIISNGRISMDPAKVKEIMEWRVPTTVTEIRSFLGLAGYYRRFIEGFSKIAKPMTSLLEKGREFKWDEKCQESFDQLKERLMSPPVLVMPDLQKGFDIYCDACCQGLGCVLMQEGHVIAYASRQLRKHELNYPTHDLELTAVVHALKIWRHYIMGTKCQVYTDHKSLKYIFTQKDLNLRQRRWLELIKDYDLEIHYHPGKANLVADALSRKEHVHSAVVAQLPDEIVEDFRRLNLGIVAHTEGVIIDVEPTLEQEFRKGQIGDAKIQEIKDLITEGRGPEFTEDEQGTIWGAHDSVYSIHPGSTKIYQDLKQKYWWYGLKRDVATHVAMCDVCQRVMVEHQRLAGLLHPLKVPEWKWEEIGMDFIVGLPRTSTGYDSIWVIVDRLTKVAHFIPVKTTYSGAKLAELYMAQIVCLHGVPKKIVSDRGSQFTSRYWKKLHESLDTRLNFSSAYHPQTDGQTERTNQVLEDMLRACALKHGGSWDKSLPYAEFSYNNSYQANLKMSPFEALYGRRCRTPLNWSEPGERYFFRPDLVKETEEKVQRIIHNMKKAQARQKSYADKWRMPIYFLVGDYVYLKVSPMKGVSRFRVKGKLXPRYIGRFPILEQCGPVAYRLQLPETLSAVHNVFHVSQLKKCLRVPNRTVEVTDVALEPDLTYLEHPIRVLDQKDRITRRRTLKFYKIQWNQHTGDEATWETQDXFRKEFPRLFSFM

SEQ ID NO: 244159 - protein, 89 aa, Zea mays
  unsure (1)..(89): unsure at all Xaa locations
  Clone ID: MRT4577_154259C.1.pep
MAHLARRTIATQHLHQXYQHVSHLCLVNPADYFPQQLLGXNPLALANVGGNQPQHQLGHFVSPLTXLGMVNTAGYLQQQQLLTSRQLAV

SEQ ID NO: 244160 - protein, 170 aa, Zea mays
  Clone ID: MRT4577_15425C.1.pep
MGLLDQLWDDTVAGPRPDSGLGKLRKHASFSPSSAAPSPTAEGAAPPAVTRSITMLRPAALSVVTSPRSESSSAPSSPSPASGAPDSPFGAGDHQLSPSPSLLFFPPVLVVAGAVFDCFVGARGRDLWVSQRCKKQKEKKKRNIRYLVNNFAAARFVLAEFCSEFEATFV

SEQ ID NO: 244161 - protein, 90 aa, Zea mays
  Clone ID: MRT4577_154260C.1.pep
YTNFHFISHDLNLTTATYQLKLSHTSNFNYYKTITPLISYIPFFLNPILILFILIPFTSHLLLPPILHYSSIYISIHLNLLHCLQIPSPT

SEQ ID NO: 244162 - protein, 140 aa, Zea mays
  Clone ID: MRT4577_154261C.1.pep
RALFSLNLDTDADHVYQRVEDHSKPSDERIKVLETKGPTHGHTDLSFVTKPFEKTVNRAVENVLDGKKVVSKEGEITYSTTSSGTTQSKGRATRNNEEHDLSSDHDEPSNLNIVSKSTATLSKQEIRHFLTSTTHSYPNL

SEQ ID NO: 244163 - protein, 45 aa, Zea mays
  Clone ID: MRT4577_154262C.1.pep
HRISNNSIPAGHPEFDQKSLNLNFKFQFDHQIPSQKHRSSDELPP

SEQ ID NO: 244164 - protein, 44 aa, Zea mays
  Clone ID: MRT4577_154263C.1.pep
DQSVGVKSISHHELVVIVDLDWNKLRELRVDEVVKLERDGRLGR

SEQ ID NO: 244165 - protein, 38 aa, Zea mays
  Clone ID: MRT4577_154264C.1.pep
PPLSQQVKPPRLECPYLRQETDTVGFGQTHKSKAYFKR

SEQ ID NO: 244166 - protein, 198 aa, Zea mays
  Clone ID: MRT4577_154265C.1.pep
MAADEGQVFNYCKLAQAAYAAYDDHNGTCRYSLADMLPAVGLGGSGYVATSFIYATVNILAGDGVNEGNDDDGCQHEQHWIGYVALATDAERDRVGYRDIAVVWRGTSALDELLKDLQAVLVPIHGEQQAGTVRVERGFESLYTSSCEACAMRTSARTQVLAELTRLVTYVRSRHPGEKIRVTATGHSLGGALALLAA

SEQ ID NO: 244167 - protein, 90 aa, Zea mays
  unsure (1)..(90): unsure at all Xaa locations
  Clone ID: MRT4577_154266C.1.pep
AIGYLEAXRGCFKKRRRQSSFPSSSIAPVVSSSTSPVGTPPDLSSARRAGEEEEEGRFHSSDRRACAACCLRYLLYSFFSSFACSIRSGY

SEQ ID NO: 244168 - protein, 46 aa, Zea mays
  Clone ID: MRT4577_154267C.1.pep
TPFNLRHLTTLLTRKTLALPNLITIQHNPLSSTCLITKKPSPNLLS

SEQ ID NO: 244169 - protein, 65 aa, Zea mays
  Clone ID: MRT4577_154268C.1.pep
MEVGQAASGTDGVRERRGSSAARRRSQDEPVQSGMNGIPKHSSWLDLWLFILFDLALFIFVYLLP

SEQ ID NO: 244170 - protein, 120 aa, Zea mays
  Clone ID: MRT4577_154269C.1.pep
MRGTAPELQLHMARSRAGPRSPRPASSLAAGAAMDRKSKYAKGAASSAAAFMDALAAAAADPDSRSGPARGGCRCGRGKLPSEVPLGAVQNQPGDRREFEQPDEPGERRALQGPRRCCTR

SEQ ID NO: 244171 - protein, 125 aa, Zea mays
  Clone ID: MRT4577_15426C.1.pep
DGGQGKTIPMRRGREAAGQRSGVWMEGLRRSCPTQQQKRMHARWKESERFCWRRESLILAESSGNKRRPRTRANLAPAAAGVTPHLSKISFPLGSVGGGNGNWTTPDPGRRNRRTSQGEGEDRAE

SEQ ID NO: 244172 - protein, 61 aa, Zea mays
  Clone ID: MRT4577_154270C.1.pep
GPRAEIAYAKPHPGEGEVCREVGMLDMTANTPHSMSLHYASPSMFRGSLCTYGFLFVRRRS

SEQ ID NO: 244173 - protein, 106 aa, Zea mays
  Clone ID: MRT4577_154271C.1.pep
LFRLYVRPSVTSSSVVVPVVVLVVSVDGDDAAVSIELMPEKEAGKDCGVSAEPHVFRRGYRKKSVFEHERSGVSPKKVKLAPTVKVDRDEYKSPRSKHGALGHLIT

SEQ ID NO: 244174 - protein, 56 aa, Zea mays
  Clone ID: MRT4577_154272C.1.pep
TDLNQTGHLDPARTTTNLVSLALITCHLRIRRKHDCENQAHKSDTPQTDLSLSLYQ

SEQ ID NO: 244175 - protein, 36 aa, Zea mays
  Clone ID: MRT4577_154273C.1.pep
LFFFFFFFFDTSLKPLLLIQVDRRSNYKTTRIQPHR

SEQ ID NO: 244176 - protein, 66 aa, Zea mays
  Clone ID: MRT4577_154274C.1.pep
THYKSGLALEQMLSPEERGKTNQPRNKADEHDDLFYRGSVPKNLVPVEVVTKTGSLSTLSLSQTVT

SEQ ID NO: 244177 - protein, 354 aa, Zea mays
  unsure (1)..(354): unsure at all Xaa locations
  Clone ID: MRT4577_154275C.1.pep
TGTRTSRAYDNGIVEAVYVTLREAEMRSTSXXIPTWEIPIWKDISPRQKKVNEALKLINSTLDELIAICKRLVEQEDLQFHEEYMNEQDPSILHFLLASGDDVSSKQLRDDLMTMLIAGHETSAAVLTWTFYLLSKYPKVMAKLQDEADSVLGDGLPTIEDVKKLKYTTRVINESLRLYPQPPVLIRRSLEDDILGGYPIGRGEDIFISVWNLHHCPKHWDDAEVFNPERWPLDGPNPNEINQNFSYLPFGGGPRKCVGDMFATFETVVATAMLVKRFDFQMAPGAPPVDMTTGATIHSTEGLKMTVTRRTRPPVIPNLEMKIITDSQESTLSAPSMVVSAASVASGEDQGGIS

SEQ ID NO: 244178 - protein, 501 aa, Zea mays
  Clone ID: MRT4577_154276C.1.pep
MYMQFFLSLVFQHSDSFLPLYDLFLTHGGIFRLNGGPKSFLIVSDPAIAKHILRENSKAYSKGILAEILEFVMGTGLIPADGEIWRVRRRAIVPALHQKYVTAMIGLFGEASQRLCEKLDKAAVDGEDMEMESLFSRLTLDVIGKAVFNYDFDSLSYDNGIVEAVYVTLREAEMRSTSPIPTWEIPIWKDISPRQKKVNEALKLINSTLDELIAICKRLVEQEDLQFHEEYMNEQDPSILHFLLASGDDVSSKQLRDDLMTMLIAGHETSAAVLTWTFYLLSKYPKVMAKLQDEADSVLGDGLPTIEDVKKLKYTTRVINESLRLYPQPPVLIRRSLEDDILGGYPIGRGEDIFISVWNLHHCPKHWDDAEVFNPERWPLDGPNPNEINQNFSYLPFGGGPRKCVGDMFATFETVVATAMLVKRFDFQMAPGAPPVDMTTGATIHTTEGLKMTVTRRTRPPVIPNLEMKIITDSQESTLSAPSMVVSAASVASGEDQGGIS

SEQ ID NO: 244179 - protein, 188 aa, Zea mays
  Clone ID: MRT4577_154277C.1.pep
LAILITDRIMHFFTLTNTELAARSDLQQWPDRSSSQQLTAAAVLAAALLLQAAPARTVLPGHSCGHGDVTGCAVPRRHTEECCVTIRIGAAAGAALDCNLACLKARLDLARHLRPVQEHDGPLQHPGHTLDVLRHAMPFNQLPMSFHDIMRELVYILRWTKPNRQEADLTLFDERRVVRTIYELLADT

SEQ ID NO: 244180 - protein, 97 aa, Zea mays
  unsure (1)..(97): unsure at all Xaa locations
  Clone ID: MRT4577_154278C.1.pep
EEKKDKAGAAAASASVAPPPLADAGMYQVPPHYGYAPYHQPAPGGYYGAAPPPNHHAGFYPNGGGVHYPPAPAYXRPHPPPXPQMFSDENPNACSVM

SEQ ID NO: 244181 - protein, 63 aa, Zea mays
  Clone ID: MRT4577_154279C.1.pep
SSASTTFHYCCSSPSRTNRKALTSNPTAHITGLMANYFLRRSPFSSQKNKPRMPSVDIDVHYP

SEQ ID NO: 244182 - protein, 135 aa, Zea mays; identical to SEQ ID NO: 244119
  Clone ID: MRT4577_15427C.1.pep

SEQ ID NO: 244183 - protein, 126 aa, Zea mays
  Clone ID: MRT4577_154280C.1.pep
KTQLCQYLSAIYLQSKTGRRALYISVDHAFNPQRFFEFLGQDNSSNSSQEIGQRLLVHRELEANVLHSFIIERLGEVILTENIGLLVIDSLASAFRLSEGFEESVLLFQIATELRKIVSDRGCIVL

SEQ ID NO: 244184 - protein, 68 aa, Zea mays
  unsure (1)..(68): unsure at all Xaa locations
  Clone ID: MRT4577_154281C.1.pep
PTQSPPTPVXVSSPSTPIGGXPPAPVSSPPSMAQXPPPPAPVSSLSAPETSPPSAPPVSSAPPAVKYS

SEQ ID NO: 244185 - protein, 84 aa, Zea mays
  Clone ID: MRT4577_154282C.1.pep
PYWGALAVCSSSFLSARQKCPSSCCLPRLHMSGFSTPWSIITGFVFFPIFPARLGHTSLPLPRSLSLLQHRASWICSRAEFRAY

SEQ ID NO: 244186 - protein, 53 aa, Zea mays
  Clone ID: MRT4577_154283C.1.pep
QHDALLLDGVGYADSDSVILFSPDKLTLCRVTAFALYTCTPCHTHNRRSPTSG

SEQ ID NO: 244187 - protein, 112 aa, Zea mays
  unsure (1)..(112): unsure at all Xaa locations
  Clone ID: MRT4577_154284C.1.pep
DRSRXELLRIXNPLPTSXGPFLRINGKDVHVSTPRTPRAPKHAARLSRLKLVDVKPITAVLFPESSTPFPSKRLRRWVPPWLPRHACKAASSPRVLRYEEELCEAVAQNKLL

SEQ ID NO: 244188 - protein, 44 aa, Zea mays
  Clone ID: MRT4577_154285C.1.pep
HCTSLACCFLLPVALMTEFSLPDACMLLLRPQPSLKSNTRMPRP

SEQ ID NO: 244189 - protein, 41 aa, Zea mays
  Clone ID: MRT4577_154286C.1.pep
LVEEHQAPVLDDVHLHAVDDQHRVHLRDADPRRSPTTAVSD

SEQ ID NO: 244190 - protein, 288 aa, Zea mays
  Clone ID: MRT4577_154287C.1.pep
MSGAASVERVKDRDIGLDKFVLREARGSSVEVYLYGGQVTFWKNNFGQQLLFVSNKLGNHGVLEQHGFARNRFWSVDESPPPFPVATSNCHVDLILKSSPEDLKIWPHSYEFRLRVALTPRGDLILTSRIKNISSDSKPFQFTFAYHTYFSVSDISEVRVEGLETLDYLDNLQSKKRFTEQGDAVVFESEVDKVYLSAPPKVVIIDHEKKRTFVLRKEGLPDVVVWNPWDKKDEEYKRMLCVGAAAIEKPVTLKPGEEWIGKQEISAVPSSYSSGQLDPELIRRMHTI

SEQ ID NO: 244191 - protein, 349 aa, Zea mays
  unsure (1)..(349): unsure at all Xaa locations
  Clone ID: MRT4577_154288C.1.pep
EANGRAIRRASSPSSIGGRGMSGAASVERVKDRATGLDKFVLREARGSSVEVYLYGGQVTFWKNNFGQQLLFVSNKATFKPRKAVRGGIQICFPQLGNHGVLEQHGFARNRFWSVDESPPPFPVATSNCHIDLILKSSPEDLKIWPHSYEFRLRVALSPRGDLILTSRIKNISSDSKPFQFTFAYHTYFSVSDISEVRVEGLETLDYLDNLQSRKRFTEQGDAVVFESEVDKVYLSAPPKVVVIDHEKKRTFVLRKEGLPDVXATKLGRPFILRLQRLVCEIFAVVWNPWDKKDEEYKRMLCVGAAAIEKPVTLKPGEEWIGKQEISAVPSSYSSGQLDPELIRRMHTI

SEQ ID NO: 244192 - protein, 54 aa, Zea mays
  Clone ID: MRT4577_154289C.1.pep
FFFFFLRKTRSPKIGSGRLDIYNRSDGLHSHQLITLTSQSYHRVQWSMIPTRYY

SEQ ID NO: 244193 - protein, 109 aa, Zea mays
  unsure (1)..(109): unsure at all Xaa locations
  Clone ID: MRT4577_15428C.1.pep
MAEGLAWPPPMCLTNKLLTERILEGTXGSRCHFRTTFPILVVIPESSYTXSKSAAMSGAGDTNSESIRALCKTTTYSNLCFRPLSRRATATAACTWLSPHDSPAVSLNT

SEQ ID NO: 244194 - protein, 84 aa, Zea mays
  unsure (1)..(84): unsure at all Xaa locations
  Clone ID: MRT4577_154290C.1.pep
RTGRSRXQIGRAQEGKTKERTSGEKRREETSAGRRAARRGARRGARGETESAGGPPGRKRQGQTGARARRPTVELAASVAYWSR

SEQ ID NO: 244195 - protein, 154 aa, Zea mays
  unsure (1)..(154): unsure at all Xaa locations
  Clone ID: MRT4577_154291C.1.pep
PVHARLRKKIQHEEMRGGYQLRRLSDAXLTDWLNHAIDNMGSCXMDKNAAKLLRTIIPWIAGKNIPXTGKKAGINELYVGRNAPIYTFMRAVPDTSDDDHLILEQRLNDLYDEDMSAVLAMQLDKMVGPGMTAKMHSTSMHVEGKILSRSEICT

SEQ ID NO: 244196 - protein, 60 aa, Zea mays
  Clone ID: MRT4577_154292C.1.pep
GAPPPFNLNKTPRNNFAPAPNIFWGPLYPGPYPSDFLDCPRGPLARQYLFICKPFARLLG

SEQ ID NO: 244197 - protein, 96 aa, Zea mays
  unsure (1)..(96): unsure at all Xaa locations
  Clone ID: MRT4577_154293C.1.pep
MSDEYVYLPVWDEDEEELQYDIDDGDGDSGGGRSKKKAKQHMEQLKRLQQKDPDFYQYLEXFDKDLLEFDDDDDEIKNYRKTGVEEKEQYVCKEEL

SEQ ID NO: 244198 - protein, 101 aa, Zea mays
  Clone ID: MRT4577_154294C.1.pep
TSTSQSVLTAGTRSPTLSDWTTTRRGLSCSKQDDRAPGRIHALAGHSLRRRRVRRAVRAPAHLDYASKEDRRVELLTVPDLILELERLQLIHDVVPDCGRL

SEQ ID NO: 244199 - protein, 66 aa, Zea mays
  Clone ID: MRT4577_154295C.1.pep
GSEVGVSGDEECWCGARCCELHYTALIGCLCRHGSVDGGMNLVLEMKKGCRADAVTWTDSGSDGPA

SEQ ID NO: 244200 - protein, 85 aa, Zea mays
  unsure (1)..(85): unsure at all Xaa locations
  Clone ID: MRT4577_154296C.1.pep
MAGKGDGPALGIDLGTTYSCVGVRQHHRVEIIGKDQGNRTTPXYVDLTDXERLIVDAXARTRAGMNHLCTGYDAKPLIGRRFSDA

SEQ ID NO: 244201 - protein, 61 aa, Zea mays
  Clone ID: MRT4577_154297C.1.pep
NSPPRNCSLKTVVVCICASATYCPSRLAIVSLTIAMSCTSGGRPIAWHLVCDTMLYMIGLP

SEQ ID NO: 244202 - protein, 733 aa, Zea mays
  unsure (1)..(733): unsure at all Xaa locations
  Clone ID: MRT4577_154298C.1.pep
YSDCGGLTEFSLCKIFSLVPLCSPGSPDVHNLDEENVKLEDLLDEDEIIQECKALNTRLINFLRDKVKVQQLLCYMVEKAPEDAVTNNLFLWQRLVEIITTFYSLVINLLXEXDEDLMNLLFSFLKPDHPHGTLLAGYFAKVVICLAMRKTLQLVHYVQGHPEIVSQLVDLIGITSIMEVLIRLIGADETMYSSHADSMQWLDDIQVLEMIVDKFSTSDSAEVHANAAEILCAVTRYAPPALAAKISSPSFVGRLFQHAFEDSRPKSVLVHSLSVCISLLDPKRLVSASYQAFRGQVSHGTLVTASSEKVNDMLYTQRDLLKLLDVLSAEIVLHTTYGXLTXSLGKYSLKTVEDTSVVLSIGSQAAIQPMIQLGAIKHIKNLFGDCSAENFXANRTSXIIRSCLERKHAPLFGHVHDKCTVSTGVQEAEKNSRLCRXDSNVSIHWSTEGRCRPRIGIVGQMTRIANKLLQLANTNIMVQSYLQQNSDWIEWHTSTLTKRNALENVYQWACGRPTSLQDRGRDSDDEDFRDRDYDVAALASNLSQAFKYGIYSNDDIDEAQASLERDDEDVYFDDESAEVVISSLRLGDDQESGSLFTNSNWFAFDEDKALNDGLVSPEASPSPNSEISALKEDDEVILGEVIDDTEGSEPTLPVSNKDANEESGHTVLANGTIDKQEDDIRPLTPDVKESRPEFVEWKEEEAEPGDVAEMEMIGYGFGDAKLGEEKKSDELGL

SEQ ID NO: 244203 - protein, 73 aa, Zea mays
  Clone ID: MRT4577_154299C.1.pep
APQYHPLGVSDLMAVVGAHADPLGDGAVEAHLVVQVVEDPESSCGTSCHSPGGNSGSGGARRRRRRHSKWERS

SEQ ID NO: 244204 - protein, 185 aa, Zea mays
  unsure (1)..(185): unsure at all Xaa locations
  Clone ID: MRT4577_15429C.1.pep
HVNQYGFIKDRSIQDCLAWSFEYLHLCKSSKKEMVILKMDFEKTFDKIEHDVIYKILQHKXFGPKWLKWMEMIMKSGTSAMLLNGVPGKFFKCKRGVRQGDPLSPLLFVLAADLLXSIINKAKDMGILNLPIQQRCGQNFPIIQYADDTILVLEACQKQLFFLKAILSVSSWDSSFHIFRVAHGT

SEQ ID NO: 244205 - protein, 164 aa, Zea mays
  unsure (1)..(164): unsure at all Xaa locations
  Clone ID: MRT4577_1542C.1.pep
FTRPPTRPPTRPPTRPRTRGFGYDFMVEYKPGKLNGAADALSRRAESGMALNTISTPSFELFDSLRAEAATDLQIQDVRQQLAAGTVSPGWTELDGLLLFKGKVYVPDASTLWPILLSSAHDTGHEGIQKTIHRLRXSFYNPHALQRVKEFIRGVSVYQRNITE

SEQ ID NO: 244206 - protein, 98 aa, Zea mays
  unsure (1)..(98): unsure at all Xaa locations
  Clone ID: MRT4577_154300C.1.pep
FSFWLLYLPQDVYFDDESAEGVISSLRLGDDQERFILFIFDXYCSSFCKHIWCLIQELANEDVICSGSLFTNSNWFAFDEDKALNDGLVSPEASPSPN

SEQ ID NO: 244207 - protein, 92 aa, Zea mays
  Clone ID: MRT4577_154301C.1.pep
MTMTSRFVAAASSSSSSCPLACLISRRGLAGAADGHGPAKVPLWKDPLSPSKWKEEHFVLASLSMWGALFYGGFKFFGGKKEDKIEAASGQT

SEQ ID NO: 244208 - protein, 43 aa, Zea mays
  Clone ID: MRT4577_154302C.1.pep
SYYRWSGAKSHSIKPSVGYYYLSGSASLSYPSLITLINERGCI

SEQ ID NO: 244209 - protein, 102 aa, Zea mays
  Clone ID: MRT4577_154303C.1.pep
RQPLRKRIRRHGVSSRFVAAASSSSSSCPLARLISRRGLAGAADGHGPAKVPLWKDPLSPSKWKEEHFVLASLSMWGALFYGGFKFFGGKKEDKIEVASGQT

SEQ ID NO: 244210 - protein, 124 aa, Zea mays
  unsure (1)..(124): unsure at all Xaa locations
  Clone ID: MRT4577_154304C.1.pep
VTRPPTHPAGGLAIKQGLXQYHPAKLVPFSTDQEDSLVLWTESKDVGKGLRWIRMVNNTRLNLDTLHGDKDHCSVHHGTDVLLWEWCKGXNQSWKILPWGPEANYSGAHPGGPHALRRFCKAGG

SEQ ID NO: 244211 - protein, 93 aa, Zea mays
  Clone ID: MRT4577_154305C.1.pep
MASRLVAAAASSSSLSSASPLARLISRRGLAGAADGHGSAKVPLWKDPLSPSKWKEEHFVLASLSMWGVIFYGGYKLFSGKKEAKTEAASPQA

SEQ ID NO: 244212 - protein, 104 aa, Zea mays
  Clone ID: MRT4577_154306C.1.pep
RNRCVNESIAMASRLVAAAASSSSALSSASPLARLISRRGLAGAADGHGSAKVPLWKDPLSPSKWKEEHFVLASLSMWGVIFYGGYKLFSGKKEAKTEAASPQA

SEQ ID NO: 244213 - protein, 165 aa, Zea mays
  Clone ID: MRT4577_154307C.1.pep
MSGVLGQRPSRPWPPGDPASTPPSEPATAAADAGARGEASALRDLGTSMDAISFGFAATAILISLFLLMAIFEHLIKPRAFPPDSPDDGGSLPHADRLHGRLSPGKLRSPPMVEAVLQAADLSVLMPGQRYPTYLAQPAPLPPPCSREGVHYWPPHDHHNSYMPP

SEQ ID NO: 244214 - protein, 97 aa, Zea mays
  Clone ID: MRT4577_154308C.1.pep
ANSKREPRAKRNTTTKPWGAEPKIRSMGPAKQPEPGNHNSTRKSPHTTPDRGNYRKTRRTERGKTGLKRDPQAGGAGARRRPHYQGTWGKGQRPKPS

SEQ ID NO: 244215 - protein, 53 aa, Zea mays
  Clone ID: MRT4577_154309C.1.pep
QASAHAYEIYSALLLTTSLLIAPFAETVGSMYTKTWLLTCTSYFGDCRCCVNQ

SEQ ID NO: 244216 - protein, 37 aa, Zea mays
  unsure (1)..(37): unsure at all Xaa locations
  Clone ID: MRT4577_15430C.1.pep
MGFRAKKKKKKKKKKKKKKKKKKKKKKKKKKKKXSRG

SEQ ID NO: 244217 - protein, 93 aa, Zea mays
  Clone ID: MRT4577_154310C.1.pep
YARSCTAGSLNSTLVKGTVVLCFQTRAQRSAAVAVETVKKARGVGVIFAQFLTKDIATFIDMPCFQVDYQVGTAILAYTTSTRNPTVQFGSAK

SEQ ID NO: 244218 - protein, 156 aa, Zea mays
  unsure (1)..(156): unsure at all Xaa locations
  Clone ID: MRT4577_154311C.1.pep
GAWCAPSPPVEHSPAXPPSPYXTLPTAPRHPPPAHKVGPTPPSSPGRPTXPSPPPPLPSPSSPLTAIIPXPMVPPSRSPVKHMYSSMHVVFARHFGHLVMFVTSFPCRGLDSPAHINNIMLAHLVAQLLPSAPGPHFCPPPLPQLSPTGASTHLLG

SEQ ID NO: 244219 - protein, 45 aa, Zea mays
  Clone ID: MRT4577_154312C.1.pep
CSSQRPPGLKGGGLEALNGIFGSNMVARFILFVAACCHHFFVPFP

SEQ ID NO: 244220 - protein, 157 aa, Zea mays
  unsure (1)..(157): unsure at all Xaa locations
  Clone ID: MRT4577_154313C.1.pep
KMHHLRPQRLVVSPLTRGKRKRETAARFIPPSLPSLPRVRCKSNSAPLFQPTLITLLIRLQPCSRGGLEVWWWQDSPPAGGSAPSPPRANRLLGFLNRXXXLXRAARGGEERWAEVNQVRAKQAMMERRSLMEALKTPPQGGIHGHVSDLHAQVRRA

SEQ ID NO: 244221 - protein, 56 aa, Zea mays
  Clone ID: MRT4577_154314C.1.pep
AAFLFLLHGPCTYMNTTALACCSTHYVIHLSIIYGHIYDLLSAISLITIWAWSLLQ

SEQ ID NO: 244222 - protein, 83 aa, Zea mays
  Clone ID: MRT4577_154315C.1.pep
KSHNIMGSVPHKVLDYLYIQTSHRLRILKEQMTVIKKLPMMKPRPNLLVVNGPRFQTLTGLRELELLHTMTDIPAQQRHAWSS

SEQ ID NO: 244223 - protein, 66 aa, Zea mays
  unsure (1)..(66): unsure at all Xaa locations
  Clone ID: MRT4577_154316C.1.pep
MRCPAVHALSQKEQDIXMMLAADVHLGTKNYDFQMERYAFKRRTDGICLRSRINAFPPPPPRMPIH

SEQ ID NO: 244224 - protein, 181 aa, Zea mays
  Clone ID: MRT4577_154317C.1.pep
PALSSASDLMKLLPTGTVLAFQALAPSFSNHGVCHAANRYLVLSLIGACAVSCVLLSFTDSLVGRDGKLYHGAATFWGFYPFNYTGTREQREAAFDDEDLSRFRVTALDFVHAFFSALVFLAVALADASIQGCLFPDAGPDVRELLVNLPLGAGVLSSMVFMIFPTTRKSIGYTDMAPHAQ

SEQ ID NO: 244225 - protein, 150 aa, Zea mays
  Clone ID: MRT4577_154318C.1.pep
MDMDLASGAVEVINDLGFDTLTFLGVTVLVVPAFRVVNASPILGFFCAGVVLNQFGLIRNLTDVKLLSEWGILFLLFEMGLELSLSRLKALARYAFGMGLPQVLLSTLAFTAFELPPNDAIGTKILQFLFDSRPDLVNIRSIDEAIVIGA

SEQ ID NO: 244226 - protein, 82 aa, Zea mays
  unsure (1)..(82): unsure at all Xaa locations
  Clone ID: MRT4577_154319C.1.pep
LPXSNYRDLLRGDFFKSRMDLHFLNQPIVTFHFFFCSRSLSFLPHLPSYSILLPMLLFIPFFFLHLPFSLMISLFALFHILY

SEQ ID NO: 244227 - protein, 89 aa, Zea mays
  Clone ID: MRT4577_15431C.1.pep
VSSFWQHFSQHNMITQIMSLLQLELLHEGGELKIQLLLGHLHESPLIVLRREESYTLTSMIKLGFGRGETTHEGQKEGKGTITFNTTAE

SEQ ID NO: 244228 - protein, 121 aa, Zea mays
  unsure (1)..(121): unsure at all Xaa locations
  Clone ID: MRT4577_154320C.1.pep
SIARFQQLPLVHSAAQNIREQQIQQLVLAXLDAYSDHPSMLPLVHVLAQNIRAQQLQQLVLANLVAYSQQQQFLPFNQLGALNSAAYLQQQLQLPFSQLAAAYPRQFLPFNQLAALNSPAY

SEQ ID NO: 244229 - protein, 121 aa, Zea mays
  Clone ID: MRT4577_154321C.1.pep
RTRGVTRKEQQQQQGSPDGDGADPGRFTFDSSPVFVPPAALAMLSVVAVAVGAWRAVTGGGGGGGGGPGVGEFVCCAWLLLCFWPFVRGLVGGRGSYGIPWSVRIKAALLVAAFVHLSTRK

SEQ ID NO: 244230 - protein, 90 aa, Zea mays
  unsure (1)..(90): unsure at all Xaa locations
  Clone ID: MRT4577_154322C.1.pep
GILHPPRPGRHQAPETRAGQLNCLEHGIQADDQMTEDKTIAXGDDALKTFLDETGRXNHEYHAALADLGPTIIDEVIAGTYRQIFYPEQI

SEQ ID NO: 244231 - protein, 79 aa, Zea mays
  unsure (1)..(79): unsure at all Xaa locations
  Clone ID: MRT4577_154323C.1.pep
MAEIPAVAADALXFWPYVVVAXCQGEVDRHRLRDLQRWQEVQESPLDACRQVLDRQLTRRGGGGGVGHFQERTGLPMQG

SEQ ID NO: 244232 - protein, 78 aa, Zea mays
  Clone ID: MRT4577_154324C.1.pep
SSKILSILCIAAFFVFSRIMSITNFPCRASITGALSPLIWATVAIMEFCHVPSFKGHSLKPLKRICTFAFRDLMRVPM

SEQ ID NO: 244233 - protein, 157 aa, Zea mays
  unsure (1)..(157): unsure at all Xaa locations
  Clone ID: MRT4577_154325C.1.pep
MGIGDGSSNGNQQPVHKEIRDETTPLLPVKVEEDEGFHEFNGASFSGAVFNLSTTIVGAGIMALPASIKMLGIIPGILLIILVALLTEASIDMLVRCSHQGKITSYGWLMGEVFGQWGRIALQASVIINNVGVLIVYMIIIGXDVLSGTSSVHVHHP

SEQ ID NO: 244234 - protein, 47 aa, Zea mays
  Clone ID: MRT4577_154326C.1.pep
QKTLYLNCWNRYPPRSLKSPPPSLDFIHNLNTYQSSPHYMKQELLPL

SEQ ID NO: 244235 - protein, 63 aa, Zea mays
  Clone ID: MRT4577_154327C.1.pep
ILVTAAERLPSLLHHDDANHVSSLAPADPTERSQNRGSQAQQLAWPRHARTSRAFAGGLTRRG

SEQ ID NO: 244236 - protein, 86 aa, Zea mays
  Clone ID: MRT4577_154328C.1.pep
MAAAVPRAAFLSPLLPLLLGFLLLSAPHGGSGLHTKGALPLDTVTFYKVIPKSKFVLVKFDTQYPYGEKQDEFKRLAENSASSDDL

SEQ ID NO: 244237 - protein, 80 aa, Zea mays
  Clone ID: MRT4577_154329C.1.pep
RPLLMRARRPQIARVAQSSAASTLICMQCFDSPIPACLAWNPNDWRMSTTRAIRRAWRPPQLGPLLLMYISPDQVHLNEC

SEQ ID NO: 244238 - protein, 61 aa, Zea mays
  unsure (1)..(61): unsure at all Xaa locations
  Clone ID: MRT4577_15432C.1.pep
IRLEGSVSGDVXANVRFMSVGGIVPRMHAVMAMGADEEPSKGTLPKIGEISAIEEIALLKI

SEQ ID NO: 244239 - protein, 282 aa, Zea mays
  Clone ID: MRT4577_154330C.1.pep
VADKEIAPLVSFKRLDSLRYTSALSVALAVVFVVITAGIAIIKLFNGTVAMPKLFPELDGLNSIWNLFTAVPVLVTAYICHYNVHSIDNELEDRTQIKPIVRTSLFLCSSVYIATSFFAYLLFGEGTLDDVLANFDANLGIPFSSVFDDIVRVSYAAHVMLVFPIVFFALRLNLDGLLFPTSRHISRDNKRFAIITVSLLAVIYLAAILIPSIWDAFQFTGATAAVLIGFIFPAMVILRDSYGIASKRDKILAVTMIVLAVVSNSVALYSDAMNIFRKKEVA

SEQ ID NO: 244240 - protein, 221 aa, Zea mays
  Clone ID: MRT4577_154331C.1.pep
EGGLPAPVATPWTPGRPPRRCSTGCGRWTRITRPRSWACCSSRTTATRSSSASPSAPTTSSTPSSPPRAPTSPPSPRPRRRPCWARSTRPGERRRTRALPLAPTTNTRPPSPPTSRSATTSTAPAPALTRSSPTTTTAGHRPAPPTAAASRSATPRPPPPPPEALRGGHACTSRAGSARTAPPAASSTAFRRTMTPPRSARWSSCAAKLVAAAARPQQQQQ

SEQ ID NO: 244241 - protein, 372 aa, Zea mays
  unsure (1)..(372): unsure at all Xaa locations
  Clone ID: MRT4577_154332C.1.pep
PRVRPRVRPRVRPRVRGRVGDTLIGDVLSXGTTSGDVHHRGILEGWFGAHLWNSRAIVLLATALLVFAPLVSFKRLDSLRYTSALSVALAVVFVVITAGIAIIKLFNGTVAMPKLFPELDGLNSIWNLFTAVPVLVTAYICHYNVHSIDNELEDRTQIKPIVRTSLFLCSSVYIATSFFAYLLFGEGTLDDVLANFDANLGIPFSSVFDDIVRVSYAAHVMLVFPIVFFALRLTLXDGLLFPTSRHISRDNKRFAIITVSLLAVIYLAAILIPSIWDAFQFTGATAAVLIGFIFPAMVILRXQCLVLGVCCLLLAKPFCIACNIVAXFCRDSYGIASKRDKILAVTMIVLAVLSNSVALYSDAMNIFRKKEV

SEQ ID NO: 244242 - protein, 459 aa, Zea mays
  Clone ID: MRT4577_154333C.1.pep
MGIGDGSSNGNQQPVHKEIRDETTPLLPVKVEEDEGFHEFNGASFSGAVFNLSTTIVGAGIMALPASIKMLGIIPGILLIILVALLTEASIDMLVRCSHQGKITSYGWLMGEVFGQWGRIALQASVIINNVGVLIVYMIIIGDVLSGTTSGDVHHRGILEGWFGAHLWNSRAIVLLATALLVFAPLVSFKRLDSLRYTSALSVALAVVFVVITAGIAIIKLFNGTVAMPKLFPELDGLNSIWNLFTAVPVLVTAYICHYNVHSIDNELEDRTQIKPIVRTSLFLCSSVYIATSFFAYLLFGEGTLDDVLANFDANLGIPFSSVFDDIVRVSYAAHVMLVFPIVFFALRLNLDGLLFPTSRHISRDNKRFAIITVSLLAVIYLAAILIPSIWDAFQFTGATAAVLIGFIFPAMVILRDSYGIASKRDKILAVTMIVLAVLSNSVALYSDAMNIFRKKEVA

SEQ ID NO: 244243 - protein, 354 aa, Zea mays
  unsure (1)..(354): unsure at all Xaa locations
  Clone ID: MRT4577_154334C.1.pep
GIDKASVTTGRKVRVRVVEGRALTANSKSGKCDPYVKLXYGKALYRTKILTQAVRPVWNHKFEFDEISGGEYLKIKCYNADMFGDESIGSARVNLEGLLEGATRDVWVPLEKVDSGEIRLEIEAIKNDHNNSLQSSSSKAGSGWIELVIIEARDLVAADLRGTSDPYVRVHYGSKKKRTKVIYKTLSPQWNQTFEFLETGEPLILHVKDHNAVLPTASIGHCTVEYSMLSPNQSAEKWIPLQGVKSGEIHVRVALKVSXQVRRRRTXAGAGPFGKGHKMSTQMRDSLKRFTGLIDDGGDPEALALAVAEMEGIQGEQEEYVETLEREKAMLLHKINELGSEIIRTASGPPRTPY

SEQ ID NO: 244244 - protein, 56 aa, Zea mays
  Clone ID: MRT4577_154335C.1.pep
AVEISPYSGLRVLDVGMSGLSRSASLNRGRPKVKEINKHINKHINKHINQTKGSGP

SEQ ID NO: 244245 - protein, 79 aa, Zea mays
  Clone ID: MRT4577_154336C.1.pep
LIVLSIRQYRQRQRRVWCSQAVLIFFLAYIGLPQCLGVYRTSLHRISGFTPCHWPHLLSLHPWVVLFKTPTRRARILVR

SEQ ID NO: 244246 - protein, 40 aa, Zea mays
  Clone ID: MRT4577_154337C.1.pep
FIYYPSFMLVQLSSLKNRCARCTAVFVLYSLLYLENISIY

SEQ ID NO: 244247 - protein, 102 aa, Zea mays
  unsure (1)..(102): unsure at all Xaa locations
  Clone ID: MRT4577_154338C.1.pep
MADQANQPTVLHKLGGQFYFLSIISECVGGGGICPSVSFYERRFGTGNYMTQSLWGPSMCGSGGLNVPVMQTXVCANAPVEKGGVIFMIVXMMGGVLVGVSN

SEQ ID NO: 244248 - protein, 51 aa, Zea mays
  unsure (1)..(51): unsure at all Xaa locations
  Clone ID: MRT4577_154339C.1.pep
IPHHNGGHALXTTPYSSISPFLMGGRKGRTNFLHLIYGSLHETLLGRRSTS

SEQ ID NO: 244249 - protein, 99 aa, Zea mays
  Clone ID: MRT4577_15433C.1.pep
TLTRLWRRGLRRAHGLRRATPELAPLAGDRARLQLPLLHRLGLGSHLLPSSQRAAASGREWARRSLASVSTAHWDRSDSQTLLSRQRNSDLAVLMSASS

SEQ ID NO: 244250 - protein, 141 aa, Zea mays
  unsure (1)..(141): unsure at all Xaa locations
  Clone ID: MRT4577_154340C.1.pep
IKESRAGLLAILPTGIDISTTTTQMDNGFDPTGWKLALVTTRSNAIPLSMESNLAGGFXDKLTWDSLYYDGTYRQMQQQQLYGSLPTNPCMTSDPLAVSNEVDPSPSVKMEAMVTHPQNLRMMIEPIPCQPLQQYYAGVAS

SEQ ID NO: 244251 - protein, 38 aa, Zea mays
  Clone ID: MRT4577_154341C.1.pep
TQILHLEENYVTFKPYICKSFNLKSKTNPITSTQSIKH

SEQ ID NO: 244252 - protein, 108 aa, Zea mays
  Clone ID: MRT4577_154342C.1.pep
MLPAKVSFVFLIVYCAVTFSLGQIAVGEACTVDQRDKITTDCREFIKLKGPVTAPSYTDDCCVAIRAVPNLDMECIIRLLSNKQKKKYDVDKIRRLGSVLCNPHPVMT

SEQ ID NO: 244253 - protein, 74 aa, Zea mays
  unsure (1)..(74): unsure at all Xaa locations
  Clone ID: MRT4577_154343C.1.pep
RGLGGLRGHXVPDEVDERVAHARGRQDGLECVRVCRRRDLAEHDGGAGPRWELAVGHGGDEGLERRRGGNAAAG

SEQ ID NO: 244254 - protein, 76 aa, Zea mays
  Clone ID: MRT4577_154344C.1.pep
HEHGELPTLLQDRRHVQRPTRRRRGPESMRKRDGSHHGQRQERGRHDDAHRQWGFVDDISDGGSSLVGGHGQDPIE

SEQ ID NO: 244255 - protein, 364 aa, Zea mays
  Clone ID: MRT4577_154345C.1.pep
MDTPTAKAAWNANYGVVGSGDRRLAFSRQLSSNATTPRLARSDSSISMPAPLPLPPVYEGPKPSRKLLRLATASRPMRRLALLLALNVAYSATEFAIGLFTGRVGLVSDAFHLTFGCGLLTFSLFAMAASRTKPDNLYTYGYKRLEVLAAFTNALFLLFLSFSLAVEALHAFMQDESEHKHYLIVSAVTNLLVNLLGVWFFRNYARVNIVYRNAEDMNYHSVCLHVLADSIRSAGLILASWFLSLGIENAEVLCLGIVSVAVFMLVLPLFKATGNILLQIAPSNVPPSAFTKCSRQIAACEDVSEVWQGRFWELVPGQAVGSLSIRVKSGADDRAVLEYTHGLYQDLGIQDLTVQTDEFVGPVS

SEQ ID NO: 244256 - protein, 82 aa, Zea mays
  Clone ID: MRT4577_154346C.1.pep
LAQGQLRLGTGPVHGHGGLFHLVTAPARRLDGLQGVTHDPGDASEPLLHEVVRVDGHVVPCRRHPGRVVLLSTSEPPPDLHV

SEQ ID NO: 244257 - protein, 395 aa, Zea mays
  unsure (1)..(395): unsure at all Xaa locations
  Clone ID: MRT4577_154347C.1.pep
MDTPTAKAAWNANYGVVGSGDRRLAFSRQLSSNATTPRLARSDSSISMPAPLPLPPVYEGPKPSRKLLRLATASRPMRRLALLLALNVAYSATEFAIGLFTGRVGLVSDAFHLTFGCGLLTFSLFAMAASRTKPDNLYTYGPVSSFPPAFQALFLFVCALIHTHLLLSAFFXYKRLEVLAAFTNALFLLFLSFSLAVEALHAFMQDESEHKHYLIVSAVTNLLVNLLGVWFFRNYARVNIVYRNAEDMNYHSVCLHVLADSIRSAGLILASWFLSLGIENAEVLCLGIVSVAVFMLVLPLFKATGNILLQIAPSNVPPSAFTKCSRQIAACEDVSEVWQGRFWELVPGQAVGSLSIRVKSGADDRAVLEYTHGLYQDLGIQDLTVQTDEFVGPVS

SEQ ID NO: 244258 - protein, 105 aa, Zea mays
  Clone ID: MRT4577_154348C.1.pep
PQGDKRPAHQQGAGYKAKTRKGTQSTWDDRETQGQPQRKGTEQGEQRWKGQQRTSKPRTLNGRRGETSTPGVRAPKTPASSGTRTTGNSEAAKALGKTDGNAKKG

SEQ ID NO: 244259 - protein, 154 aa, Zea mays
  Clone ID: MRT4577_154349C.1.pep
LEAGRALLLRMEEVKLRSASGMAKLTGVALCLAGVLVIAFYAGELLSAVNHHHAFGAPAPTHAASSTAAAKTMTGAAWIKGTFITVLATLAWSLWLVLQAAVLKEFPNRMLVMATQCLFSVVQSFFAAVVAERDLSMWKLRLDVALLAVLYSGF

SEQ ID NO: 244260 - protein, 96 aa, Zea mays
  Clone ID: MRT4577_15434C.1.pep
GIEFDPQANNKFDVAINLPPDKTLQVGPQYKEYPGKFSFVPGSGPGKTRKIKLSLCIPQMLFDIGADGDKTVDVVFVPRPNVKITLNARPPLKNWK

SEQ ID NO: 244261 - protein, 103 aa, Zea mays
  Clone ID: MRT4577_154350C.1.pep
TGHRAGRKGEKAKNRARADGTSGSDPGTKQEGKKGIAGERVKSLTTHKNTQHTSQKHKARGPKSRTKHPTNRGGPSAHCPMGKRETRRAKRIKETAKGRGEAV

SEQ ID NO: 244262 - protein, 103 aa, Zea mays
  Clone ID: MRT4577_154351C.1.pep
GEVKYTLLALLCRHLSENKLEMTGFVHVMIHLNVKFINRYGLRAGPLNLELSPTSCVGKGTVAETESVACVNMLAGGDDIGSSPPSPGVGARATITTAARTRG

SEQ ID NO: 244263 - protein, 126 aa, Zea mays
  Clone ID: MRT4577_154352C.1.pep
NVSYARNARARHHLLVYTADEGILAAGQATTPPCPSLSSGDLRAQRNDAAKGRGEMGFSWCVGGAFLPRRTAEQRESATVLHCIAAGWLDLDLEYCCLLVVVGWGTNSVRTFLCSTCMHRCSFHLF

SEQ ID NO: 244264 - protein, 103 aa, Zea mays
  Clone ID: MRT4577_154353C.1.pep
IRDLQSNVEHLTEKMKTTIQRGLVLRNESCSENYTTDFIYQLYSEEGKGVFDCRKNVLGHMQQGGAPSPFDRNFGTKISARAMEWITAKLKEARGRGKKFTTD

SEQ ID NO: 244265 - protein, 134 aa, Zea mays
  unsure (1)..(134): unsure at all Xaa locations
  Clone ID: MRT4577_154354C.1.pep
SSISGSGSGRSSGQGAHVAYLSGSASLPWVITTGTRREVKKNTRDLQREGXMHVQADQQKKQGAMMTELKAETAVTFGVSMLLLSGLILAETVIALTVATPVLVILTPRLVSEVAPEAFWRRARLPGRHAKRHS

SEQ ID NO: 244266 - protein, 64 aa, Zea mays
  Clone ID: MRT4577_154355C.1.pep
NVIPQGQHQQLPLRSTPSLLPHQVGHALIPEDNRGNRITKHTLDLTIVDSKITSKSLSYQNPQW

SEQ ID NO: 244267 - protein, 81 aa, Zea mays
  Clone ID: MRT4577_154356C.1.pep
AGSIGVKIGRGTRECAPRQVLTTSRARVACPKRRYVERTQVWRRSPPAASTSPSEPSSPGTGSAIRAAIDISPSVRYDSSP

SEQ ID NO: 244268 - protein, 106 aa, Zea mays
  Clone ID: MRT4577_154357C.1.pep
MASGWGINGNKGRCYDFWLEFSECMSRCRQPSDCGLLREDYLECLHHSKEVTYLPPPVPRLPPLHSIRRLRLRTLASDPHQSSLVLAVRVRPPRSAALLSSLLCHA

SEQ ID NO: 244269 - protein, 86 aa, Zea mays
  Clone ID: MRT4577_154358C.1.pep
MASGWGINGNKGRCYDFWLEFSECMSRCRQPSDCGLLREDYLECLHHSKEFQRRNRIYKEEQRQIRAAARKAKEEAEGAPAVAAHH

SEQ ID NO: 244270 - protein, 57 aa, Zea mays
  Clone ID: MRT4577_154359C.1.pep
DRPRTLYRSQLLIHTYGRNSPPSGESPYYYSELFYIDYPNHQALTYIQLLTLYPSTF

SEQ ID NO: 244271 - protein, 87 aa, Zea mays
  unsure (1)..(87): unsure at all Xaa locations
  Clone ID: MRT4577_15435C.1.pep
LGGEPILDGILYGNRVKGNFFGGMQKDAMDCYAXVLGEGSKVRVGAVSYNMVLDALRRNGMLDDTLNQYDRMCIEHYSPRTITCNLV

SEQ ID NO: 244272 - protein, 86 aa, Zea mays
  Clone ID: MRT4577_154360C.1.pep
KVDTRDDLLVTLPPPSFHRTPHGFGQSRRLYTLHRRARYSTAPSSPSLRSPIQRHRTLIWTTAPFDQVHALSSTRTKNNIELVIDR

SEQ ID NO: 244273 - protein, 86 aa, Zea mays
  Clone ID: MRT4577_154361C.1.pep
MAAAHAEAASPTHRASIQATSTPPYPSAARIADSSCFPQYTASLKCLETNHQDKSKCQQQFDDYKECKKREREARLERNRSRTLFG

SEQ ID NO: 244274 - protein, 88 aa, Zea mays
  Clone ID: MRT4577_154362C.1.pep
YPHIPTLCASFIEFSKCSYMSIHVDQAICKTGFCFSMSGWPADMVNGTCAQCLYPYPNASECRYQKENASNELSMVQGMLIKCLLCRA

SEQ ID NO: 244275 - protein, 124 aa, Zea mays
  Clone ID: MRT4577_154363C.1.pep
FVFFFFFFFFFFFFFFFFFFFFFFRHKKGDNLEGIMGRYIDMRTKQAKEEATQLAKGREEKEVSQVADFSIKKCISIIGTMEVTKEEKAKAYNVFKDLDNRQIFLSACDDDAEPALIWLRNEMA

SEQ ID NO: 244276 - protein, 81 aa, Zea mays
  Clone ID: MRT4577_154364C.1.pep
NRRAADAAAAAEGGLTRLLLLMQSGCSPAARQMALELLKIYRVNAKSCLAGYDSKTTHIMPFRGTEADESGLPRSWVAVLT

SEQ ID NO: 244277 - protein, 60 aa, Zea mays
  Clone ID: MRT4577_154365C.1.pep
CQYSLSKTNNKSHLRKYACYLVTSQQGTGSAIRQKVCNTGWERVTCLPEAFAFGSLHLIG

SEQ ID NO: 244278 - protein, 46 aa, Zea mays
  Clone ID: MRT4577_154366C.1.pep
SSKCNKYSFLDGLSDDAHFFKVEKSFLLLIIWLLFSLSITLCLEDL

SEQ ID NO: 244279 - protein, 303 aa, Zea mays
  Clone ID: MRT4577_154367C.1.pep
MVMAPAAAQQQRRRDAEAELNLPPGFRFHPTDEELVAHYLCARAAGRRPPVSIIAEVDLYRFDPWDLPERALFGRREWYFFTPRDRKYPNGSRPNRAAGSGYWKATGADKPVEHGGRTVGVKKALVFYHGKPPRGVKTEWIMHEYRLADAGARARARKPGTGTLRLDDWVLCRLYNKKNEWEKTQQQQEKKQNQKQMESEASLSHSHSDTRTPESEIDDDPFPELASLPALDDMMGPAAAAPAGAILPKEEVEDLGGLGGDDWLAGINLDDLQIPGEADFYGSMLVSPMAAKMEQDAAGFPFF

SEQ ID NO: 244280 - protein, 139 aa, Zea mays
  unsure (1)..(139): unsure at all Xaa locations
  Clone ID: MRT4577_154368C.1.pep
CCNTQSVHGSAILAGYCGQNTDDLVKNDAYIGPPXRGILAADDSIXTIERAYFPQINGEXAEMQXRALRVLLLCCPVALQHIKGAILLYDTLYHKSKDGWPFADDVKDSRALLGIKGEKDSVEADRIYEENTPPLQDSF

SEQ ID NO: 244281 - protein, 58 aa, Zea mays
  Clone ID: MRT4577_154369C.1.pep
MEMKKVACAVLAAAASATVVLAAEAPAPAPTSASSAAFPAVGAVLGASVLSFFAYYLQ

SEQ ID NO: 244282 - protein, 36 aa, Zea mays
  Clone ID: MRT4577_15436C.1.pep
AVDQEHGSVIRSAYGDHRWDSLEQPVIIGTVSDVGL

SEQ ID NO: 244283 - protein, 42 aa, Zea mays
  Clone ID: MRT4577_154370C.1.pep
AHAPFTHTFTFAKGWSAPSSALFLTPGFGLQGYWDPVPRFDH

SEQ ID NO: 244284 - protein, 96 aa, Zea mays
  unsure (1)..(96): unsure at all Xaa locations
  Clone ID: MRT4577_154371C.1.pep
VPHFLVDTVYGGGRELFVNKKGIELXGRALLGTIARDRRQTYEWVGAPKEIKSALKEIGDIENWMKIMGFDCKRIKAALPKISPSWLWPRLQFSDF

SEQ ID NO: 244285 - protein, 90 aa, Zea mays
  Clone ID: MRT4577_154372C.1.pep
DEATVMSHRSIVLRDCCWVGETLVDGGDDSLAAARVINEHRGGVGGGRGGAGHRGEARSENASSSGREGRVYIRRSREDLEGHEDATALL

SEQ ID NO: 244286 - protein, 45 aa, Zea mays
  Clone ID: MRT4577_154373C.1.pep
YRIATIWSIHRSHCERQRMIRTNTLFLDTQRRDEIPIWLPPATQG

SEQ ID NO: 244287 - protein, 55 aa, Zea mays
  unsure (1)..(55): unsure at all Xaa locations
  Clone ID: MRT4577_154374C.1.pep
EIQQESSIMIPDCQRRLXLANLDFMRILXEMKKVCNDXEEYKQARLVMDSVKLKA

SEQ ID NO: 244288 - protein, 250 aa, Zea mays
  unsure (1)..(250): unsure at all Xaa locations
  Clone ID: MRT4577_154375C.1.pep
MLRSPAAALLRRLAPRLTGCSGGAGSSTRQSLPPYISSSSSFLARFSSTPTSPPPPXPPSVPXDEAEDDKLQGSSSDSGARLSISVDRAGLYSPPEHSHEPSSDSDLVKHLKSIIKFRSGPISIAEYMEEVLTNPQSGYYMNRDVFGESGDFITSPEVSQMFGELIGVWAMCLWEQMGKPEKVNLIELGPGRGTLLADLLRGSAKFVNFTKALNINLVECSPTLQKVQYNTLKCEDESVGDEKRTVSKLS

SEQ ID NO: 244289 - protein, 165 aa, Zea mays
  Clone ID: MRT4577_154377C.1.pep
PRVRNHKILLLHGRLKIWDVKGKLVANVARAANRLYVLELEVARPICLSVRGNSAAWRRHARVGHLNFRGLRRLPEENLVRGLPQIDHIDQVCDSCLAAKQRRRPFPTNAKYRAARKIELVHRDLCGPETPATPNGSRYFFLLVDDLSRFMRETLMSTKDQATRA

SEQ ID NO: 244290 - protein, 327 aa, Zea mays
  Clone ID: MRT4577_154378C.1.pep
EIGIMSQCCLDKNVRSAGPAYFANLAIKINAKFGGRNLEFANPKESLPGVTIEPTIIFGADVTHPAALDDTAPSIASVVASQDWPKVANYNGIVRAQGHRKELINGLEDIVKELLLAFEERSKRRPKQLIFYRDGVSEGQFKQVLEQEIPEIEKAWKALYNEKPKITFLVVQKRHHTRLFPNNPNDRQWADKSGNILPGTVGDKDICHPTEFDFFLRTHAGIKGTSRPAHSHVLRDDNNFTADALQSLTYNLCFLYSSCTRSVSIAPPAYYAHKLAFRARFYVNQDSDAATSVGSYGSSAPSAAAAAAGPKPLPEIKGELRRLMFYC

SEQ ID NO: 244291 - protein, 82 aa, Zea mays
  Clone ID: MRT4577_154379C.1.pep
IPIIARTFPLSPHGQQVTHSSAFTTHARTVSNGIRRQNIEMVSPYIKQGRPFTRLSCMVPTSHTRRSSRCIRIHCDQLPLKG

SEQ ID NO: 244292 - protein, 114 aa, Zea mays
  Clone ID: MRT4577_15437C.1.pep
YTDGSSKPKPSFFSYWASISYKTKEDLVTIGNNLFCIFIHRSFTHIYSIGILIGILNPMQNYASRLRTHNRICILDANSISLWILIGRMYILPQYAIERKRIKSFIRTKVFIGI

SEQ ID NO: 244293 - protein, 69 aa, Zea mays
  Clone ID: MRT4577_154380C.1.pep
QSLRKILSDETTVVYTISMVLLVRDVYVTTDLWIHASLGKSRFCSRYQVALTPQVSFFGRVFHSSSKLP

SEQ ID NO: 244294 - protein, 363 aa, Zea mays
  unsure (1)..(363): unsure at all Xaa locations
  Clone ID: MRT4577_154381C.1.pep
PPRSAPHFPAAAAEAERCASFSPPRAADAESNSASYSPPRTTADTAFSAPPRAPDVESTFASYSPLLATTDTIVSEPKRCIVTLQNTPAYKVSSHKYCNVAIRDLQLNRKFPSLTAIRDKYKQPKFKCVSTLLPPVVVAEEYKLVADTLYLTISYVDRFLSVNALGRDKPQLLGVASMLIGAEVXQIIPPCGSLVISIEYQILSTGILLFFEIDSLYDILVTSRLGLLPSVDSLFIRSAHEDKKGSILLMEFLGSYLAELSLLXDYGCLRFLPSVVAASVMFVARLTIDPNTNPWNTKLQKTTGYKVSELKDCIVAIRDLQLNRKCPSLTAIRDKYKQHKFKCVSLILVPVVIPTSYFEDLAE

SEQ ID NO: 244295 - protein, 43 aa, Zea mays
  Clone ID: MRT4577_154382C.1.pep
LHRRATPQSRTGLPAPARTIASGGGSATTIGVVLPCWLPILLL

SEQ ID NO: 244296 - protein, 40 aa, Zea mays
  unsure (1)..(40): unsure at all Xaa locations
  Clone ID: MRT4577_154383C.1.pep
FPLINGGNLPSGIWIGGTVLXDXXTTXKHTSLSRQCFYPG

SEQ ID NO: 244297 - protein, 82 aa, Zea mays
  Clone ID: MRT4577_154384C.1.pep
VRGSASARTGPALWRSGAAWPLAWTFRLGLGHAAAAHRRHRSGRRCRGAGVRGGTAARSSAARPSRRSKPSCRRLPSMAPMK

SEQ ID NO: 244298 - protein, 80 aa, Zea mays
  unsure (1)..(80): unsure at all Xaa locations
  Clone ID: MRT4577_154385C.1.pep
EYQKAVSCYEKALTXSNKSLSALPGLAYSYHLMDNFKAAINYYHKALWLKPDDQFCTEMLTYALESICQSTXVEGLVEVC

SEQ ID NO: 244299 - protein, 42 aa, Zea mays
  Clone ID: MRT4577_154386C.1.pep
NYRWAGPCVKWFITGNLKMEFLASLNWPTRNRKWGLPLVLTK

SEQ ID NO: 244300 - protein, 108 aa, Zea mays
  Clone ID: MRT4577_154387C.1.pep
VHCQAKGGKVDIKAIYSSFVTKHVMQWHKLAHVCDCDSLGQLVKPTINHCSGRHVLRSFRYDTAGMKAAGHGGMGQQHPPRWPRCRAITLVHKSLLWQFVSGLLPDKS

SEQ ID NO: 244301 - protein, 69 aa, Zea mays
  Clone ID: MRT4577_154388C.1.pep
TAACLLRTVLCARQRQTTHHYTVQPPPNPSPPYPSSIIIIHHHSPPSQPAMVSLAGSQIPSPSRGQSPC

SEQ ID NO: 244302 - protein, 64 aa, Zea mays
  Clone ID: MRT4577_15438C.1.pep
MVDRFSTQNVIKHQATRHLVRLVMLQLMVTTPSVSVIIYIVMYQSCPMYRVRLFQCTFCCLAGT

SEQ ID NO: 244303 - protein, 85 aa, Zea mays
  Clone ID: MRT4577_154390C.1.pep
HASVDACDSETVHHRDDGASQHHDQAASEMDSRAVDAVASRILTDNIDPTPAEIIDPKTAEDNVVMISTNACIRPLTTTSVLTHL

SEQ ID NO: 244304 - protein, 70 aa, Zea mays
  Clone ID: MRT4577_154391C.1.pep
LSIAFDTLQVIKSGLIEMSLILSPFQWPFGLESLFWLILAVCYTCCMDLKYRYILKHYMWTFLSFTINYL

SEQ ID NO: 244305 - protein, 144 aa, Zea mays
  unsure (1)..(144): unsure at all Xaa locations
  Clone ID: MRT4577_154392C.1.pep
AHKTCPVDLHTLCXDSYDDKLQGEPFPADPNNACDGPXYRIPIAYSAHNLDEVILAAKMIDWMHFTDGFCLTFHATAAVAFCVLTQTRDSLDGPHSTRMHTTIWKDLCQIMGKLESDNWCFHQSYMAADGKTLAETKHNSDEID

SEQ ID NO: 244306 - protein, 99 aa, Zea mays
  unsure (1)..(99): unsure at all Xaa locations
  Clone ID: MRT4577_154393C.1.pep
QDXTITQIRLFGSGSMIETGLSQCCPQLSLKIGGTRENARDVVVLAVPQPNTPLVTWNSCYGSRKKENIPFYYCDIHILGSTWAKEPFENYQLTLLIQG

SEQ ID NO: 244307 - protein, 72 aa, Zea mays
  unsure (1)..(72): unsure at all Xaa locations
  Clone ID: MRT4577_154394C.1.pep
YFFFFXXFFFFFFFFFFXTNQTHIFCRALHNPHNRNKKLGALNMQPGRSLSTSSLQKMGSLCAQLKPKNLSS

SEQ ID NO: 244308 - protein, 139 aa, Zea mays
  unsure (1)..(139): unsure at all Xaa locations
  Clone ID: MRT4577_154395C.1.pep
GGGXXKKKKXGRGNRRLKITSTIFRAEIIQRLFSSGARKSFCFYTGXXTGGLQGGFFFXGXXTXNPGGGGGXNXARDGPARQTXTAPRPAKKNXAXXNRPNPPGGARRXGREKXNKHSPALRREPAKRXXHHHGEDHTS

SEQ ID NO: 244309 - protein, 95 aa, Zea mays
  Clone ID: MRT4577_154396C.1.pep
SSGYSRACQRLPERVGVPLHVQRMQFQAPMLPHRLVALVQEVLVDELRNPLLDHTAAITPPASMNYSPSCWCRCTLSKKMTATQKQKRERGGEGG

SEQ ID NO: 244310 - protein, 86 aa, Zea mays
  Clone ID: MRT4577_154397C.1.pep
IQPGTSIDLVLATIILHSNASSLLEPSRRRHTTTRRSEASNGRSRIEGPRRLPLRRRPPLSRWGIVPGYLAVLPPPPRSIYWSAIQ

SEQ ID NO: 244311 - protein, 119 aa, Zea mays
  unsure (1)..(119): unsure at all Xaa locations
  Clone ID: MRT4577_154398C.1.pep
PFHQHRSRSRHYYSAQQRIKPSRTISPPPHHNPSKRSKQWPESDRRPSPLPPFWRPSPSRWPPRPRRRRPAQPPSPPPPPSSSPPSATEPMGPRACRLPSSXPPLLPPPPRSIYWSAIQ

SEQ ID NO: 244312 - protein, 106 aa, Zea mays
  Clone ID: MRT4577_154399C.1.pep
PGTSIDLVLATIILHSNASAFWNHLAAATPQSTTRRSEASNGRSRIEGPRRRGVVALRRGSRRLRRRLPLRRRAPLSRWGLVPAGYLAVLPPPPPPPRSIYWSAIQ

SEQ ID NO: 244313 - protein, 67 aa, Zea mays
  Clone ID: MRT4577_15439C.1.pep
AQASVYKSGSLTVEYSNTTTVAMTAMVFSTIVLVGLAVCVASATIFRQDSVTLITAVLTANLAAVSG

SEQ ID NO: 244314 - protein, 158 aa, Zea mays
  unsure (1)..(158): unsure at all Xaa locations
  Clone ID: MRT4577_1543C.1.pep
FPPLGPPRGDPPFPPPQGHFFKGGQILPVPLVKIKPPPGAKGQNAFPXVGGFIKPPGPPGFPPLYPAVGPIPXCGVGPLFGPPGFPFFPPRLFFFGPXFRGPPFSPVTPPAPVFAPAXFNGPPFAPPPPPPAPVPHXPGAPPPSGNKETHKKPTKITR

SEQ ID NO: 244315 - protein, 47 aa, Zea mays
  Clone ID: MRT4577_154400C.1.pep
SRGRLHGMIHGLSISRVLTQHETRMDTRCHSAVDKIKPSALFLLEPN

SEQ ID NO: 244316 - protein, 161 aa, Zea mays
  Clone ID: MRT4577_154401C.1.pep
MRKLQLKVREKVMTLPRKQTQRDLRRMEKAERAAQLERNIENELKERLNKGVYADIYNVPFKAFDEVLDMERDEVVLEEEEEEEGEVYVEGDDMEEMDDMEDFEGLSDGGTDEDDVLDDPVSKKPKGSSSYSKQNVGKRSRKVMTEVEEDEEINTRQRQRA

SEQ ID NO: 244317 - protein, 110 aa, Zea mays
  Clone ID: MRT4577_154402C.1.pep
FGTRIDLVLATIILHSNASSLLEPSRRRHTTTRRSEASNGRSRIEGPRRCRRSGGRLPLGGRRGRGARAQPRLRRRPPLSRWGLVPAGYLAVLPPPPPPPPRSIYWSAIQ

SEQ ID NO: 244318 - protein, 95 aa, Zea mays
  unsure (1)..(95): unsure at all Xaa locations
  Clone ID: MRT4577_154403C.1.pep
QASARAGTSFFFFFFFFFFMISFIFFFFFFFLYFFFSFNFFFXFNLIATFYHLTMFSQNFQMLYLXLTKFFXLFILVKIFSFFNKTHIFFNPFFF

SEQ ID NO: 244319 - protein, 293 aa, Zea mays
  unsure (1)..(293): unsure at all Xaa locations
  Clone ID: MRT4577_154404C.1.pep
AGEEPAXAAESKMSDDVVWHCIRHNHCSFMSKITTGIFCRNPYNATGICNRSSCPLANSRYATIRDHEGVFYLYMKTAERAHLPNKLWERVKLPKNYEKAMEVINKHLEFWPKLLVHKIKQRLTKMTQYRIRMRKLQLKVREKVMTMPRKQTQRDLRRMEKAERAAQLERNIENELKERLNKGVYADIYNVPFKAFDEVLDMERDEVVLEEEEEEEGEVYVEGDDMEEMDDMEDFEGLSDGGTDDDDVLDDPVSRKSKGSSSYSKQNVGKRSRKVMTEVEEDEEINTRQRQRA

SEQ ID NO: 244320 - protein, 87 aa, Zea mays
  Clone ID: MRT4577_154405C.1.pep
VATHEAPSAQWRTAAKRKAAAEATRAAAKGDDAATAAETGLGAGASAAAATEKETAARTAATARAFDPTPAIACFAWCGGGEMVLEG

SEQ ID NO: 244321 - protein, 57 aa, Zea mays
  Clone ID: MRT4577_154406C.1.pep
AARHLQLLWARVYLSLNPGHRGLSLDNATIATYAYWRGLSSLEETAQFLNGCNIFYK

SEQ ID NO: 244322 - protein, 133 aa, Zea mays
  Clone ID: MRT4577_154407C.1.pep
HWVPRPTPAGTRHQHRSRSRHYYSAQQRIKPSRTISPPPHHNPSKRSKQWPESDRRPSPLPPFWRPSPSRWPPRPRRRRPAPSPPPSRRRRPSPRPSSPPPPPSSSPPSATEPMGPRACRLPSSTSAAAAAAA

SEQ ID NO: 244323 - protein, 200 aa, Zea mays
  unsure (1)..(200): unsure at all Xaa locations
  Clone ID: MRT4577_154408C.1.pep
FYKFFFRRRLNPRPALVDSLTSCDDVYQILPWPPSIKPSKPMRXEMKDPKILFCISVXERXDRLTRAAKALXNLIRRTAEFSQESDAARSIXSERCEKIACSVTSRCRETMQMHVRWLXVPTYXLLKRNFLDTGXFAVEIQQHFALELPNDSSTDIYGXDFYTTLDYAGNRDDRSRKRYASCVRSMHRPPENATWIVLAE

SEQ ID NO: 244324 - protein, 155 aa, Zea mays
  unsure (1)..(155): unsure at all Xaa locations
  Clone ID: MRT4577_154409C.1.pep
LWPGKKKKKKKKKKKKDRPGPGTSIDLVLATIILHSNASSLLEPSRRRHTTTRRSEASKQWPESDRRPSPLPPFWLPSPSRWPPRPRRPRPAPSPPPSPRRRPSPRPSSPPPPPPPSSSPPSATEPMGPRAWLPSSTSPXPPPPPPRSIYWSAIQ

SEQ ID NO: 244325 - protein, 78 aa, Zea mays
  Clone ID: MRT4577_15440C.1.pep
SDACTPLCLLARGFPTGPNKCSSRASWGCVATSPTAVSLLLSVSHHSQSRHCLGLGVPLEVLSALFPVAINRMYVCLW

SEQ ID NO: 244326 - protein, 69 aa, Zea mays
  Clone ID: MRT4577_154410C.1.pep
YDVCQHWDVTDMNYKHDGNFQKASVCDSHSRVNLCNFFFIINYFFFLYLFFFFFLFFFFFFFFSLYIIL

SEQ ID NO: 244327 - protein, 98 aa, Zea mays
  unsure (1)..(98): unsure at all Xaa locations
  Clone ID: MRT4577_154411C.1.pep
VARHDAPSAQWRTAAKRKAAAEATRAAAKGDDAATAAETGLGAGASAAAATERETAARTAATARAFDPTPAIAXSLRRVVVXGGGEMVLEGLMRCCAE

SEQ ID NO: 244328 - protein, 216 aa, Zea mays
  Clone ID: MRT4577_154412C.1.pep
AAAAAAGEVLLGSLQARGPIGSVADGGEEEGGGGGDESRGEGRRRRDGGGDGAGRGRLGRGGHREGDGRQNGGNGEGLRSDSGHCLLRFDGLWIVVWRRSKIHPVVCYNHFISGAGHAKRADMAKAIYDRMEASGIEPSITSNVLLLISYVRSKNLGGALNFFNLVRRKKTPCARLYNVFISGLCEVRKPEQAMMFFREARDNGIIPSMYCEKKKE

SEQ ID NO: 244329 - protein, 197 aa, Zea mays
  unsure (1)..(197): unsure at all Xaa locations
  Clone ID: MRT4577_154413C.1.pep
MDLLKRELEKKQKAATADXGGPSYVRRSEQEQTQLQKRRDEHRKLLAEADASAPYARAAAAATGSDPSSLDCRCQTAEENPNPSAYAVVTALAPYVPPALTPKKTAQEEALLYEERPMDRADHEGYEARRRLRALREPDTLTGEDNDARLARXKLRRKLGVHEKIDHIDTTVGQTNEVLRDMMETRMRHKMRRDTYA

SEQ ID NO: 244330 - protein, 193 aa, Zea mays
  Clone ID: MRT4577_154414C.1.pep
MARIRSTDRLTTGGEIADVADTTPISEVMRESGIVEPNDREGADVVEKSDSEALADNNEYDPSIIHPNKPSQNEFGKSTIKAKDLDVLKRLGYFGQKDDTMIRFAGDEIIPEPKSDVVVVFRSFFRTGLRFSMYEMILGILERKDAKAPLLGYRTKWPTGWTSEWFYMKADIKGKDKFKKIVMSPMSLNFDLT

SEQ ID NO: 244331 - protein, 81 aa, Zea mays
  Clone ID: MRT4577_154415C.1.pep
GRGLEQGDTSRSQLGVSPAYVQEWWVCDTPAGKASLLIVARAPAVGLNVNDALPGGVLLARHYCGCVGFTSRFDRLGFQGW

SEQ ID NO: 244332 - protein, 91 aa, Zea mays
  Clone ID: MRT4577_154416C.1.pep
HLDLRMPGLANPPAFRPSEQGETRGRLRPSHTPSVRSVRSLLPSNSNPISQSLPCSPTPFPYYLDRPGQMLSASTDRHDLRDGGLRPSIRV

SEQ ID NO: 244333 - protein, 113 aa, Zea mays
  Clone ID: MRT4577_154417C.1.pep
KKGRPTRPAGISCGEVASAITPCIFYARGQGSRADGPCYNVDRILNNTRRTTADRRAACNCLKNSVAGVSGLNAGNAGIIYSKCGVSIHYTISIFSDCYTVNLTLNDYYCSRR

SEQ ID NO: 244334 - protein, 38 aa, Zea mays
  Clone ID: MRT4577_154418C.1.pep
DNVADPLRHGHLVWVVQVVAHLHPVSYLGGAQGKRWEA

SEQ ID NO: 244335 - protein, 145 aa, Zea mays
  Clone ID: MRT4577_154419C.1.pep
MGVMMFSFLQLKGELSRTLEEVSGCSLPLCWKGKEPFKSMLDVKKEFKSLVPNFASGKKTLMEIPTENYLIVTHGEETNPQKKKNTHYRMNRLSAYCYCRYNNSSKDEKTNSSGKGRNRTLEANLYTFHLHLLNQLGENTCSSKT

SEQ ID NO: 244336 - protein, 50 aa, Zea mays
  Clone ID: MRT4577_15441C.1.pep
ILINHLKFPVYTTKDHLTKRASWTLYNEGVTIIIEVHLQHINRLIIDTLK

SEQ ID NO: 244337 - protein, 64 aa, Zea mays
  Clone ID: MRT4577_154420C.1.pep
FQFLHFRRGKSTELLHRLLHFHIGAGGCGACVVLVSKSDPATDDVTEFFASSCLALVPRVGRWL

SEQ ID NO: 244338 - protein, 57 aa, Zea mays
  Clone ID: MRT4577_154421C.1.pep
GRVGGHMGQTLPMEAHMALGRQTVLMLLMLHVHLGTTILELRLLSYPTATYCVGILT

SEQ ID NO: 244339 - protein, 73 aa, Zea mays
  Clone ID: MRT4577_154422C.1.pep
MAAEDSKDILKKRLPKKIREVPDCYFLPRRSWPSALAIYGAVCAASFGAGMLLEVWINKKIKEDSGIIWEMDK

SEQ ID NO: 244340 - protein, 69 aa, Zea mays
  Clone ID: MRT4577_154423C.1.pep
KGVSMIQSFQVRCTSQVKHSQFDKLLYAPCKISLRSPISYTISVKRVPHGWPWHLALEINMTNRSTKKK

SEQ ID NO: 244341 - protein, 137 aa, Zea mays
  Clone ID: MRT4577_154424C.1.pep
MEPIVVGAQTDFSVKCKPKQQPPPRIWDVPPLPPPSSLLTCPRDPPSRCRNRSHLTIVRNSRGRCRMHLRETLSRSCPLDPPPGPLPPRRRAHLMGHRRVRALGIRCHNRPHLAVVRASGGHRRALASWIRRRERDP

SEQ ID NO: 244342 - protein, 116 aa, Zea mays
  Clone ID: MRT4577_154425C.1.pep
MPSTVNSASLDQNLELAKQCSREAALAGFKAAAVATVASAVPTLVSVRMLPWAKANINPAGQALIVSTVAGMAYFIAADKKILSLARQHSYENAPEHLKDTSFQGTGRPHPGFFRP

SEQ ID NO: 244343 - protein, 163 aa, Zea mays
  unsure (1)..(163): unsure at all Xaa locations
  Clone ID: MRT4577_154426C.1.pep
MNQNPLSQVKYVAIVLEAEEFCNLISNGSFFDHVQRVCDGYPGFTICYIINKLMNYINKCEQSQYKNPSNTWRRPPVEEETTXWLSVQANGAVIPKGFVHKDLAKKDTWLKALIAIPDIQPRYAFAIWKKYPCMRSLLNEYMDGSKTVAEKELLLSDLKWEDR

SEQ ID NO: 244344 - protein, 56 aa, Zea mays
  Clone ID: MRT4577_154427C.1.pep
KAFSVFEKDVKLEVVNLVNLDLNVQNFVNKRFHKQHVPALRGNDLHQDLLLASHFI

SEQ ID NO: 244345 - protein, 163 aa, Zea mays
  unsure (1)..(163): unsure at all Xaa locations
  Clone ID: MRT4577_154428C.1.pep
MPSTVNSASLDQNLELAKQCSREAALAGFKAAAVATVASAVPTLVSVRMLPWAKANINPAGQALIVSTGRSLNLSLIPLRRPSXITTKMPSHVFLCVTNGGMPALICSTXLGRRAVAGMAYFIAADKKILSLARQHSYENAPEHLKDTSFQGTGRPHPGFFRP

SEQ ID NO: 244346 - protein, 71 aa, Zea mays
  unsure (1)..(71): unsure at all Xaa locations
  Clone ID: MRT4577_154429C.1.pep
RTAQFYRDGAQNTVLIKVVGNISADDYMLLTTISAVSVTVGYLSGIKPWIRGPSMXVTGGLIDVMGGFMYA

SEQ ID NO: 244347 - protein, 76 aa, Zea mays
  Clone ID: MRT4577_15442C.1.pep
KSWALQAKWLWLEKTNPNRHWQGRKLPVHRHVNDLIANSMISIIGNGDNTLFWIDNWSNGNEVRDLTLDVVAKVGK

SEQ ID NO: 244348 - protein, 85 aa, Zea mays
  Clone ID: MRT4577_154430C.1.pep
PVLPRALPPDGPPNRWCNPPGMCYLVWCVRASYTRAVRALCLRLQWRRVGCFLVVTKKKGYGLGWSAGRRTGVLINLPHPDEGEG

SEQ ID NO: 244349 - protein, 112 aa, Zea mays
  Clone ID: MRT4577_154431C.1.pep
KGSPGEYLTPLIQKFSYIKGGGASTKKGGAGQVEHYSGKPLGGVQPQGGPELGHFYKLRGIRGRSISLTLLFLFLFPLRVLFWAPILTTSTRTHTGTTTPSGGLSIFTGFGP

SEQ ID NO: 244350 - protein, 71 aa, Zea mays
  Clone ID: MRT4577_154432C.1.pep
PHESPPSRPPRLPTVSMAVHCPRASTPPRACAAGTADARSGYTRHKSEGSRRQPLAVVAATLAPGGAFLSL

SEQ ID NO: 244351 - protein, 63 aa, Zea mays
  Clone ID: MRT4577_154433C.1.pep
SFDLGNGGSTASSSSSSRSSSPTTLAPNELIAIHQDNMGGGCGSLFIDSPHRVPCMNYSFCLK

SEQ ID NO: 244352 - protein, 105 aa, Zea mays
  Clone ID: MRT4577_154434C.1.pep
APRRARTSWPLPPPSWPRLLLASPSPGAGEEVAAAAGSTPLQQEQARREGGRGYFEVDLSSSKLSCPSLSTPFSLLSLTQHICVSALLLPLALPCHDLLSALSSC

SEQ ID NO: 244353 - protein, 111 aa, Zea mays
  Clone ID: MRT4577_154435C.1.pep
SEPRSHPGHRELRSGSHLSYLSGSAKRKRTMDEDSEKNILALLALLLLVTPARPGSNSTVEYDLLSNNDCETTPSEAVVQSASGDKGDSSIPDKKIHGMVEVIPTVQNQCE

SEQ ID NO: 244354 - protein, 75 aa, Zea mays
  unsure (1)..(75): unsure at all Xaa locations
  Clone ID: MRT4577_154436C.1.pep
LLELSGGWCHFVANSTVCCVLLVAGRLALRLGLGCFRRRRRVVYDSHPWLFLCPWSVVLNLGFSSFGXIELECQE

SEQ ID NO: 244355 - protein, 50 aa, Zea mays
  Clone ID: MRT4577_154437C.1.pep
TTLTWFGTTLGYLIFSISITLYTRHTFMLRTDLPDAMKEAFINPYYTIHT

SEQ ID NO: 244356 - protein, 78 aa, Zea mays
  unsure (1)..(78): unsure at all Xaa locations
  Clone ID: MRT4577_154438C.1.pep
VGXKEQLDNKGWFLDKGLGYILCILLGYFNFTIDTGGIYTLENGFHWRRTRLDTKAGGGWHFFFLLSVGFFGLIGGSL

SEQ ID NO: 244357 - protein, 93 aa, Zea mays
  unsure (1)..(93): unsure at all Xaa locations
  Clone ID: MRT4577_154439C.1.pep
MAAQVPVSGPCVTCIGKCGSGNFVKMLHNXIEYGCMQLIDEAYDLLKSVSKLINSELHQVFSEXNQGELLSILIKITADIVGIXDHKGECYLV

SEQ ID NO: 244358 - protein, 74 aa, Zea mays
  Clone ID: MRT4577_15443C.1.pep
GELRFPTPGGLSSVCTRDNIPMTLACRIAEWHLTIHADGNCPRMMFLTSKSRSTEERGPLEEQTLATANTIKRT

SEQ ID NO: 244359 - protein, 113 aa, Zea mays
  Clone ID: MRT4577_154440C.1.pep
MTSDYTSSVLAPASYSYMQGGAPKRMRRSYGGAPPSLAHDAAMPGFGLDKVSYHYQPLPLPPYYVGSSSGSSDDASVGSLGLLQADGAPQDGASAGDIWSLDELLMLAAAGAY

SEQ ID NO: 244360 - protein, 110 aa, Zea mays
  Clone ID: MRT4577_154441C.1.pep
KQGGPIFTFQGGGGGRFKPAPPFYNPGKGQKRAIPSDSDPFPPRGGGNRHPINGPTLAPPPLGTRVPTPFSSSKFFPPWGGLWDYHKKKLQVVVKKTKGNPPQKQNFSPK

SEQ ID NO: 244361 - protein, 92 aa, Zea mays
  Clone ID: MRT4577_154442C.1.pep
RPLHVWQVKRSPFSYPPLVPNLYVTVQCASHCSFSLPNSYKWAQFRPVGYCNNFINRHMVLANQLESSQVFPVEPLCGIASLRLNLQSHLYI

SEQ ID NO: 244362 - protein, 70 aa, Zea mays
  Clone ID: MRT4577_154443C.1.pep
DKASESSNSLAKTLADAVQVSSAGRATTVQVSAGASTDVAALVPVPDGNEVSIAETITKLVTLMDLPKDG

SEQ ID NO: 244363 - protein, 57 aa, Zea mays
  unsure (1)..(57): unsure at all Xaa locations
  Clone ID: MRT4577_154444C.1.pep
RXRADQGSSXPAPPPLLRKAERGRXXSSPTAPGPGAPPXGXXRGRRXXRTQXRREPR

SEQ ID NO: 244364 - protein, 41 aa, Zea mays
  Clone ID: MRT4577_154445C.1.pep
HASEESQIVSGVDFRFRPSYGVISTLGAIANSQSLDTTRMA

SEQ ID NO: 244365 - protein, 43 aa, Zea mays
  Clone ID: MRT4577_154446C.1.pep
LQQPEYVHDRCVLINQCIWLAAVSGRCKLSAQACIVTSELSNL

SEQ ID NO: 244366 - protein, 192 aa, Zea mays
  unsure (1)..(192): unsure at all Xaa locations
  Clone ID: MRT4577_154447C.1.pep
LRWRPQHVSALALQLLASPAAAAAPDLPVHLAQDLVPHLARGCPRAIAAAARVISASPSAVVPVLFKPLAACLASPDPRASTAAVAAFCDLSAPPADATPFLPLAPDLYNLLTTSRSNWALIKVLKLFARLAPLESRLAARIVDPVCQLLTRSAAMSLTFECIRTGLTALAAHDAALPLAXGKALEFIAAAD

SEQ ID NO: 244367 - protein, 104 aa, Zea mays
  Clone ID: MRT4577_154448C.1.pep
PSPGGIGPQGGGALDPIVGALCVLRRKLNVCASIVWRSGSLPSYHWSLANTLVKPGAVNLATFVVGLDFRGVMVVATVLSLHGPMAHPYGRPCERKKARAATEK

SEQ ID NO: 244368 - protein, 57 aa, Zea mays
  Clone ID: MRT4577_154449C.1.pep
CHGYRRVVCTALQGEINGHHLPCLILEFLLADVTGQIIVTGPPHFTRNNCYKDLELQ

SEQ ID NO: 244369 - protein, 73 aa, Zea mays
  unsure (1)..(73): unsure at all Xaa locations
  Clone ID: MRT4577_154450C.1.pep
SWREVAHHAVQHLEFGSHRHRSLSASWSGSRSLWRDDDRRLSDGLMPXSDLGCSSAPLSNRSERPSYQLGKRK

SEQ ID NO: 244370 - protein, 65 aa, Zea mays
  Clone ID: MRT4577_154451C.1.pep
MATTKWLWPRPRWLWRLWLQPRWIWRIEKEAGTTTGTEAVAAEDEAIGAMVVCSLWLGVSVIFAL

SEQ ID NO: 244371 - protein, 51 aa, Zea mays
  Clone ID: MRT4577_154452C.1.pep
YVRHIFNLILNYFLWRGSTLILNLFGDGLSHWLVTGSSSALPSLYYTIKYN

SEQ ID NO: 244372 - protein, 84 aa, Zea mays
  unsure (1)..(84): unsure at all Xaa locations
  Clone ID: MRT4577_154453C.1.pep
NINCXYALFLYKRNNHQIAFSLKGGEANLSNYAFFPHISFQALFHSIHSLNKVFFSKITLNNHLHNSFNIYLIFNSMSLTLPSP

SEQ ID NO: 244373 - protein, 76 aa, Zea mays
  unsure (1)..(76): unsure at all Xaa locations
  Clone ID: MRT4577_154454C.1.pep
XLENGFXSYGEILDSXXXXDGEMGXSRGFGFXTFSXEXSMVDVIENMNXKEFVXXKFXVNQXQXXGVGGGGGGYGW

SEQ ID NO: 244374 - protein, 60 aa, Zea mays
  unsure (1)..(60): unsure at all Xaa locations
  Clone ID: MRT4577_154455C.1.pep
MEGAWRKVRQALGLRLCVHAPAAGGGNVQPAQSGAGGCRRDAAVAVAXPGESGPNTPAGA

SEQ ID NO: 244375 - protein, 170 aa, Zea mays
  unsure (1)..(170): unsure at all Xaa locations
  Clone ID: MRT4577_154456C.1.pep
QDPKQYSMHLTNHHXEVAAFGGMFLLLVFLNFLFDEEKEHHWLGHFEAKLGSLGKVSSIAVMISIGALMASLSLVPEAQKMVVLISGLWGILIYVGVDVLSNLLEKSEEGGGDVGEMVKRGGIGGFLYLEVLDASFSFDGVIGAFAITNDVVIIMLGLAIGAMFVRSLTV

SEQ ID NO: 244376 - protein, 67 aa, Zea mays
  Clone ID: MRT4577_154457C.1.pep
PAKDLPAFKSDQLGADGCPVFKSCPGEAQEKGVSVSTTLTGIHDSRGGCCRRRRGRGCFLRENGPRV

SEQ ID NO: 244377 - protein, 144 aa, Zea mays
  unsure (1)..(144): unsure at all Xaa locations
  Clone ID: MRT4577_154458C.1.pep
AASTSTTTPPLPLSSSTPGQPPTAGPPARTRPSXPPALAVSPTSPPPAPPXSPRKPAPPPPPAQMPPPPCLPPRSTSRPPRCARCSPPWSRAPPRSRRSPRSSGSGSPAPPTGRESSRWRWTSASGCTRRCRGGTTAAPSTSRA

SEQ ID NO: 244378 - protein, 210 aa, Zea mays
  unsure (1)..(210): unsure at all Xaa locations
  Clone ID: MRT4577_154459C.1.pep
KRKPICPPELRQCGINIVEKXDGLPLALVAIGSILSLRPKNVDEWKLFYDQLIWELHNNENLNRVEKIMNLSYKYLPDYLKNCFLYCAMFPEDYLIHRKRLIRLWIAEGFIEQKGACSLEDTAESYLKELIRRSMLHVAERNCFGRIKCIRMHDLVRELAIFQSKREGFSTTYGGNNEAVLVGSYXXRVXVXXCXKGIXLTIDFRVTLIT

SEQ ID NO: 244379 - protein, 54 aa, Zea mays
  unsure (1)..(54): unsure at all Xaa locations
  Clone ID: MRT4577_15445C.1.pep
TRLPLRTQLYFITPNQXRDGLNVVLLINQPTNHPPEHHAGHHTLNQGRQRGDNH

SEQ ID NO: 244380 - protein, 83 aa, Zea mays
  unsure (1)..(83): unsure at all Xaa locations
  Clone ID: MRT4577_154460C.1.pep
LYQVAAVNPPPFLPQHMLFPFXQLAWASRGFFLSRPPLLPFSPQCAASPAALLQLQQLLPFVQLALANPAASCQQPPIGGALF

SEQ ID NO: 244381 - protein, 39 aa, Zea mays
  Clone ID: MRT4577_154461C.1.pep
HKKGFFFSLALYEGGRLLPTNEPGPLLGKAMIARMLLYQ

SEQ ID NO: 244382 - protein, 78 aa, Zea mays
  Clone ID: MRT4577_154462C.1.pep
VEECFKKQLFGLPAVHYSYVKNVKPGMPLFLFDYIDRRLHGVFEAASLGQVSIDPYAWSNEDLLRTPFPAQVRICMGT

SEQ ID NO: 244383 - protein, 53 aa, Zea mays
  Clone ID: MRT4577_154463C.1.pep
MFALSEESKERIAKLIDVSRVAIHYGYLPLILYLGYTRSEPRPSVIRLLSPLS

SEQ ID NO: 244384 - protein, 86 aa, Zea mays
  Clone ID: MRT4577_154464C.1.pep
LRDSISPYTRLKDKGKAATLSEVGYCSFHSVSLCSGASRCYLQLRFSNLSPCGRETRFRQHLHLAIFTQLNCWALVAFTKSIFKLT

SEQ ID NO: 244385 - protein, 120 aa, Zea mays
  Clone ID: MRT4577_154465C.1.pep
NGRTDALTSKRPSFFFLINHTFAWAKDGTACDTVDRHDEVSSYTRNLRVPSNTAACGGRADKTPDGPLDTPRKYDVAADEDSFMRAEVRDLAAAGGLEADERVTLAEVGSDCTKRWLQDA

SEQ ID NO: 244386 - protein, 54 aa, Zea mays
  Clone ID: MRT4577_154466C.1.pep
THSSLMATSSPAASPYRDRCPEGAAADLFAQPLPVPDSQLHLLLLPYSFFSFSS

SEQ ID NO: 244387 - protein, 92 aa, Zea mays
  Clone ID: MRT4577_154467C.1.pep
MGYNRGKLGRLSFSSYSRRTKQEACCDDGLPTLLPRQDVCTDNELKSSRIQLAMRDYDQCDIKRCTGRKLSRSGLVNESRVTIAFGGVDLSP

SEQ ID NO: 244388 - protein, 95 aa, Zea mays
  Clone ID: MRT4577_154468C.1.pep
DGSVVTYHTPGGNYYGATHYHSTADYSPQVTATAAPPACQYKYDSSYQPEDATIAEGHKTGRFAVGALAFDDVSVAADHLKRALDLMTNHCGEPR

SEQ ID NO: 244389 - protein, 62 aa, Zea mays
  Clone ID: MRT4577_154469C.1.pep
PPSELDPATPPIYSPVHSSSRPQHSQPTASTSMPSPTAHVSIDRGVLACEVRSDYQRRCFAS

SEQ ID NO: 244390 - protein, 36 aa, Zea mays
  Clone ID: MRT4577_15446C.1.pep
STFSLLSHEKGGKGYPLISGGPLLHTKTLFTKLPLI

SEQ ID NO: 244391 - protein, 55 aa, Zea mays
  Clone ID: MRT4577_154470C.1.pep
QPLCNLSTNKSYHEADEMTATEAFIRSIDSQIFNYSQCVSLVLIVDFMISAILGV

SEQ ID NO: 244392 - protein, 47 aa, Zea mays
  Clone ID: MRT4577_154471C.1.pep
ESIIMTSHPGMSPLCLIARSSQLIESFVESREHSLQITWNYCHVFCW

SEQ ID NO: 244393 - protein, 209 aa, Zea mays
  Clone ID: MRT4577_154472C.1.pep
MAQTHDGLERSAEVNELEWSCGRNPDVLIPIANGCEEMEIIILVDILRRAKINVVLASVEKYPAVLGSQRMKIVADKSIMSASDSIYDLIILPGGPAGAERLHRSRILKKLLKQQMQAGRMYGGVCSALKVLQQEGLLEDKTVTAHHAVASELTCQVIDQPNVVIDGNLITGKGLGTVVDFALAIIRKFFGHGRAKAVANGIVFEYPKS

SEQ ID NO: 244394 - protein, 59 aa, Zea mays
  Clone ID: MRT4577_154473C.1.pep
RGLHRQRARLVPSLYGHLDGQFVDPSPQETPSLVGFVRVLFSATPFIKRNQLRQNQIKK

SEQ ID NO: 244395 - protein, 140 aa, Zea mays
  unsure (1)..(140): unsure at all Xaa locations
  Clone ID: MRT4577_154474C.1.pep
TLSKSEASSPFLSSTHIEATIRRTWYCRACTQGYAMGADAIVLRLLTLPDLDSLRRRMISAERIALKPLRPPGALXLFQLMHIYWKDDTRPTCDDEDDCTPSEHLRHHKSIMKSQRNARLIDAGLLLYXIQFSVTHFLDR

SEQ ID NO: 244396 - protein, 43 aa, Zea mays
  Clone ID: MRT4577_154475C.1.pep
VLLFLLTYKVEEVGEALSPASPGKPGSRRTPAKMTVLVPAVIP

SEQ ID NO: 244397 - protein, 54 aa, Zea mays
  Clone ID: MRT4577_154476C.1.pep
TYITISHVGSVQPHVIHAATLLVLTSPCSWLVKCSHQLIHVLVIDLTRDIFRIA

SEQ ID NO: 244398 - protein, 84 aa, Zea mays
  Clone ID: MRT4577_154477C.1.pep
EPRVLNVTDFNFKCPKTNTQYVVKEGSTQTKAKTPGHKQRYRNTTTWLDWRTYRSGRLGYLGFTNARTDDLCGELLEVKERGGQ

SEQ ID NO: 244399 - protein, 110 aa, Zea mays
  unsure (1)..(110): unsure at all Xaa locations
  Clone ID: MRT4577_154478C.1.pep
CLYSTSTXXATFQIKLFCGRPXPXKDQAPTSSAYNNSGGGVKFFFFFEQKQKKHPNIQFIISNLKNLYFPHLTTLPTSYILLFCSPNNTTFPPTSLHQLTKLVKFAYDKF

SEQ ID NO: 244400 - protein, 126 aa, Zea mays
  Clone ID: MRT4577_154479C.1.pep
LDNDISGGILEQTFSTEDERFGVMTTEDLIPDGRNIDVTNENKKEYVDLMVKWRIEKRIAEQFQAFKEGFQELIPQDLINVFDERELELLIGGIAEIDVDDWKKHTDYRGYTESDEVVQNFWATVR

SEQ ID NO: 244401 - protein, 57 aa, Zea mays
  Clone ID: MRT4577_15447C.1.pep
TLHSQSFITTVPCLFLEQSTMWFPAESTHVWLMLRKSMHSWTSDILYSLFASPKPKK

SEQ ID NO: 244402 - protein, 153 aa, Zea mays
  unsure (1)..(153): unsure at all Xaa locations
  Clone ID: MRT4577_154480C.1.pep
IFEKTMTGKIITIDEMTSDTVGDEEGHVHLIEDIPADQDRLVDAVKLLEERGCLVHYDIPNDCTLHLGLPLRVGTYKRMMTITPNPRCLVLXHNNVNVSWMIVYKMDDPTGKVTRLRKECPNTECGAGVFMANHFDRHYCGKCGLTYVYNQKA

SEQ ID NO: 244403 - protein, 163 aa, Zea mays
  unsure (1)..(163): unsure at all Xaa locations
  Clone ID: MRT4577_154481C.1.pep
MGQAWGNLQDRLQGRRWKEHQVRKITDKVFDRLTEDAQKRDKEALRFEXSDINKYLPGPHHDPPSKEKLRAMMEEYDVNLDGLLDREEFAEFIRKLTADSLCSISVKLLITLVAAPALAMATKRATEGVPGVGKVVRKVPNALYASAITLGVVLLQRSTEGVE

SEQ ID NO: 244404 - protein, 110 aa, Zea mays
  unsure (1)..(110): unsure at all Xaa locations
  Clone ID: MRT4577_154482C.1.pep
LRSKAKQSVCSGIRLLPYRAIIYTLVLCWLLADLWRTVRFSSLNTYTRWTYATSPGGGGIHPSRVTNXWCQIIPYVNPERPPPRNRNHRTGGGLAGQVYPSFISKRSLCN

SEQ ID NO: 244405 - protein, 42 aa, Zea mays
  Clone ID: MRT4577_154483C.1.pep
LIVAVLVGGSDINKYLPGPHHDPPSKEKLRAMMEVTTSFPFV

SEQ ID NO: 244406 - protein, 172 aa, Zea mays
  unsure (1)..(172): unsure at all Xaa locations
  Clone ID: MRT4577_154484C.1.pep
MGQAWGNLQDKLQGRRWKEHQVRKITDKVFDRLTEDAQKREKEALRFEEVYIAVLCVYNDINKYLPGPHHDPPSKEKLKAMMDEYDVNLDGLLDREEFAEFIRKLTADSLXTISVKLLITLVAAPALAMATKRATEGVPGVGKVVRKMPNALYASAITLGVLLAQKSAEGVE

SEQ ID NO: 244407 - protein, 155 aa, Zea mays
  Clone ID: MRT4577_154485C.1.pep
TGSKVFLIYVFNYGHKVSDLLWRSRSNYYFFPLSRSQLLQLVQPTGSSWVESLSVVYHLLGFCNAQEYDVNLDGLLDREEFAEFIRKLTADSLCSISVKLLITLVAAPALAMATKRATEGVPGVGKVVRKVPNALYASAITLGVVLLQRSTEGVE

SEQ ID NO: 244408 - protein, 82 aa, Zea mays
  Clone ID: MRT4577_154486C.1.pep
APQARFVALRHTTRVEQRTPLASPSRPPFCGLWGALPRPPGTTALPGAHRPRTLEAGFSPRSHLPPPPGRDWPRWRAARPAT

SEQ ID NO: 244409 - protein, 127 aa, Zea mays
  unsure (1)..(127): unsure at all Xaa locations
  Clone ID: MRT4577_154487C.1.pep
VVDSRMYDACQTTSLRRFKRVICLDYITCMYKPASTSIGLLSVVRIIRCTAPFNHCSXPVRHVVAVIRCGXSSLQRPSCSLEHVLIPHWRNSLFAGRQACSHHGTRLRCEGSQSTETSSLSCSGPGP

SEQ ID NO: 244410 - protein, 79 aa, Zea mays
  Clone ID: MRT4577_154489C.1.pep
IRHEARSTSAPLGTLNKHKHYLTQSVRLGRGVTAGCNTTLTPEPKDSPRGSRRQAARKPYGPPRGTPRPPEDGLPMSKT

SEQ ID NO: 244411 - protein, 75 aa, Zea mays
  unsure (1)..(75): unsure at all Xaa locations
  Clone ID: MRT4577_15448C.1.pep
AASRPARFTSLGAHRSEEMAASLLTXNITKKRVQXQVKRPHLDRYKCLKPSWRRPKGIDSRVTRNYKGCNLAAHH

SEQ ID NO: 244412 - protein, 49 aa, Zea mays
  Clone ID: MRT4577_154490C.1.pep
ACTIRAGQGTKYSRSKSLTYESYHVSAGEKPRCPWSSNIIIAEYVDRFC

SEQ ID NO: 244413 - protein, 41 aa, Zea mays
  Clone ID: MRT4577_154491C.1.pep
ECFMYKRTGALLLYRRLILGSCADHKLIMEHGLALNTCFAY

SEQ ID NO: 244414 - protein, 109 aa, Zea mays
  Clone ID: MRT4577_154492C.1.pep
MAPAHGDKAGPCRDRGSTRDPFLGGRFCPANFRWGPPGGRFCWAPHPEYRGYRESSLGPGVLEVRNDTPAFWGWPRNQALHAAKVPPDEVYLVREPAKCLPKTARLLAY

SEQ ID NO: 244415 - protein, 58 aa, Zea mays
  Clone ID: MRT4577_154493C.1.pep
LAGGQTYAFLKKIFNFFIFYFFFIILKINILKIKKTGGQSIISKINIECIQGFSFFIG

SEQ ID NO: 244416 - protein, 29 aa, Zea mays
  Clone ID: MRT4577_154494C.1.pep
TWSKEPSKLGLVLNSTINHGATYPYKSFP

SEQ ID NO: 244417 - protein, 292 aa, Zea mays
  unsure (1)..(292): unsure at all Xaa locations
  Clone ID: MRT4577_154495C.1.pep
MAALLRLAAARSALPRRALAPHRRLAAAVAMEEWWSDWEQDGEEEARASAPAAGLDPAGGGPGGVQWVVMGRPGPQKHAHAARLAEVLAVPYISMGALLRQELNPSSQLYRKIANSVNEGRLVPEDIIFGLLTKRLEDGYNKGENGFILDGIPRTRMQAEILDEIVDVDLVLNFKCADGCFMXSNRGATSAPTXQLFDVSNSASTNCSPSLGSYTWHSQVEPAGVLGLEASKMERMRTYAEQTKQLEDYYKKQKKIVELKTSARPVETWQGLVAALHLQHLDSPPTPHKLTA

SEQ ID NO: 244418 - protein, 75 aa, Zea mays
  Clone ID: MRT4577_154496C.1.pep
RNKKRIFFSIPIPYLPPPSTPNFSPAAALLILISARSVSAPAGRRIPPASIMLWVRNIRRFENTGAGLGSEAIMG

SEQ ID NO: 244419 - protein, 66 aa, Zea mays
  unsure (1)..(66): unsure at all Xaa locations
  Clone ID: MRT4577_154497C.1.pep
SLYQCVLFXKMFGRPPCYRFEFELCGXCSVNYHVHXLGFRTTQXKQQKIRVRSPCIELRRVRVQAS

SEQ ID NO: 244420 - protein, 85 aa, Zea mays
  Clone ID: MRT4577_154498C.1.pep
NPRVSSKANPTLNGLMANYSAKFLGPYSFGESQFGQFSPSLSPFLSLVLFKQFGLPKVCIPGYGPNCKTRARVYVSCPWGRSCFL

SEQ ID NO: 244421 - protein, 120 aa, Zea mays
  unsure (1)..(120): unsure at all Xaa locations
  Clone ID: MRT4577_154499C.1.pep
MASGDAGRWPLGXKRTLITGDTXQLGRAVVDELAALGAAVHTCSRNEAELGERLREWEGRGFRVTGSVRDVSVRDQPERMLREVASLYGGKLDILVKHFTASLPPSSIQLLASPPRCGHD

SEQ ID NO: 244422 - protein, 63 aa, Zea mays
  Clone ID: MRT4577_15449C.1.pep
YFELKYFGPFNLLYVCGSKLTRKGGTVQAQQGQIRVLLLSVDSSLADWAPQQMSVSATDPHHF

SEQ ID NO: 244423 - protein, 140 aa, Zea mays
  Clone ID: MRT4577_1544C.1.pep
PILLTQSPGCGREYPNLFEDWQIALNVEAAVAPKRVIYPPAEEYMIHAERSNENLVEAFKNMHVQEEMVPDDNEEYVHEVIEDGGVEESQEDAVEVDAEDDGVEESQDEAVEVEAEDSTDGAVLVNGNNSEEQWVLTPEQ

SEQ ID NO: 244424 - protein, 82 aa, Zea mays
  Clone ID: MRT4577_154500C.1.pep
LPPFMPRPRPPLPRPPRPPLGVVPPLPPMSPLPRLPPPNPRPPPPPPRPPPWNLPPLPPRPPTGFNEAASLHQTAEMDGKQG

SEQ ID NO: 244425 - protein, 76 aa, Zea mays
  Clone ID: MRT4577_154501C.1.pep
LYIQSSLVIGPDIQTCLLLYSFQFTSVDNQHIFSLFREYASCTHPSMVCCHHMRYPQDGCSFNSSHVMYRGGRAFR

SEQ ID NO: 244426 - protein, 63 aa, Zea mays
  unsure (1)..(63): unsure at all Xaa locations
  Clone ID: MRT4577_154502C.1.pep
PPPPXXGEQXRERRGPPEHRTPSDRLGPRAVRAARQRAPGHRSWPTASGWPRLGSEAAIVVRG

SEQ ID NO: 244427 - protein, 160 aa, Zea mays
  unsure (1)..(160): unsure at all Xaa locations
  Clone ID: MRT4577_154503C.1.pep
MGRAPDQPARYGQFDHLYLRTIMMVLASVVATLFIILLLFSFPSCLRLHATHSQRGHGSRCLLPYSSDTSPDIDPCSGYYTSTRVFHSMHAPTHHRFCTRWTSRSSSRPSPCFSSPTCCTCPRSQPRADRRSFMRIRXESVLLLAFLRSCRRGHDDACHA

SEQ ID NO: 244428 - protein, 215 aa, Zea mays
  Clone ID: MRT4577_154504C.1.pep
EGGSSLPPSLPRAAPTTGSSLPRTSLHGYLPIGATDLGKRSSSEHADENRSGAAIGEELSQGERESLVEQNGQGGDVNSSQTSAASGKMDDNEPDPASSSDTTTIPDEDTSNESQKAEQDNCDLYRGEWVTDSSGPLYTNNSCPIITQMQNCQGNGRPDKDYENWRWKPEQCNLPRFDARKFLELMRGKTLAFVGDSVARNQMESLLCILWQVDV

SEQ ID NO: 244429 - protein, 81 aa, Zea mays
  unsure (1)..(81): unsure at all Xaa locations
  Clone ID: MRT4577_154505C.1.pep
NCPSFTPLGSISCGLFWTNSARFDRRFPNLKICAPNGIRIVIFFPIFYVQTSCCLGWVVKQEIFFLFMHCRHKNVKTMRXX

SEQ ID NO: 244430 - protein, 192 aa, Zea mays
  unsure (1)..(192): unsure at all Xaa locations
  Clone ID: MRT4577_154506C.1.pep
MSLPGRKAPAGASGARRWLVTVVVSVLALVLTLVVISLSQGSSLPRTSLHGYLPIGATDLGKRSSSEHADENRSGAAIGEELSQGERESLVEQNGQGGDVNSSQTSAASGKMDDNEPDPASSSDTTTIPDEDTSNESQKAEQDNCDLYRGEWVTDSSGPLYTNNSCPIITQMQNCXQGNGRPDQDYENWRWK

SEQ ID NO: 244431 - protein, 500 aa, Zea mays
  Clone ID: MRT4577_154507C.1.pep
MSLPGRKAPAGASGVRRWLVTVVVSVLALVLTLVVISLSQGSSLPRTSLHGYLPIGATDLGKRSSSEHADENRSGAAIGEELSQGERESLVEQNGQGGDVNSSQTSAASGKMDDNEPDPASSSDTTTIPDEDTSNESQKAEQDNCDLYRGEWVTDSSGPLYTNNSCPIITQMQNCQGNGRPDKDYENWRWKPEQCNLPRFDARKFLELMRGKTLAFVGDSVARNQMESLLCILWQVDVPQNRGNKRMHKWLFKSTKTTIARVWSSWLVHRSTEAVGIAPKGIDKVFLDIPDETFMEFLPRFDVLVLSSGHWFAKRSAYILNENVVGGQLWWPRKAGKMQVNNVDAFGISVETCLTAVVNNPNFTGLAIVRTWSPDHYEGGAWNTGGSCTGKVKPLNEVVRNGFTDAMHEKQVAGFRKAVKNAGEHGSRLKLMDITEPFAFRADGHPGPYRSPDPNKKTQRGPDGKPPPQDCLHWCMPGPVDTWNEMLLETIRREFETDRT

SEQ ID NO: 244432 - protein, 161 aa, Zea mays
  Clone ID: MRT4577_154508C.1.pep
ALAAAAEFAHKDLFYDFNAVGARDVVVVHVPEGVTRGDDPIHIMFAYTNSFAESMLMSNPRVLVVAEKSAEVAIVEEHFGAGEEGGCYWANPVAEIIIDEGARVVHSYVQHQSFAAAHTKWTVVQQDTTSKYEFVEVSTGAKLNRHNLHIEQLGPETATAT

SEQ ID NO: 244433 - protein, 214 aa, Zea mays
  unsure (1)..(214): unsure at all Xaa locations
  Clone ID: MRT4577_154509C.1.pep
MRVLLCDLALLALAARGTSXHTSGGCGCHPPPPVHLPXRVHLPPPVHLPXPMNLXPPGHLLPPAHLTPTWHVAPTAHLPPPPWHYPTLPPRPQTHXPRPHQCPGRQPNXNPAXLQGTCGVGGSPIMGQCVENLRHHRSPTATTYCSSHSWSLRQQCCHHLTXEEPQHRYQESILLVLLSILQQQPQSGQFAQLLTAQIEQQLIAXMCGLLQPTT

SEQ ID NO: 244434 - protein, 135 aa, Zea mays
  unsure (1)..(135): unsure at all Xaa locations
  Clone ID: MRT4577_15450C.1.pep
XXVAARGYLYFFLFFFFFFLFFFFFFFFVLFLCILCIVEFSKMIVLKDFMGSRPQKPWGGGKNSFFLKKGPPQRGQGGKNPGAPPKKGGGKAQKGPLQKGGQKKEQRPRKKDPHGGGEKRGKAPQKRAGERAPHP

SEQ ID NO: 244435 - protein, 144 aa, Zea mays
  unsure (1)..(144): unsure at all Xaa locations
  Clone ID: MRT4577_154510C.1.pep
MSRLSDLQTINSLCSLNAHLTSTTYASSDCITIDDIRVSAATPXRLAHQLTNASRWYETVYEGRAHRFPAQAAARNPPAESGPAASXLRDDAEDDEYLDLYGDQTVEDFKAPDEHERPXTPLXQKECEASSALMDGRPWDDETD

SEQ ID NO: 244436 - protein, 142 aa, Zea mays
  unsure (1)..(142): unsure at all Xaa locations
  Clone ID: MRT4577_154511C.1.pep
MDVDKGTMTVVGRLDAKKLRDRVADKTKKKVDLVLGGGGGNSSNNKGGGGNNNKQGGGNQHKGGHEEDGKQSDKEHGGGXGGQGEGQGRSPGGGGGDEGEGXNNKGGSGGGGKGKGGGGGGGGGGGGKDNKKPGRCVLHSLS

SEQ ID NO: 244437 - protein, 45 aa, Zea mays
  unsure (1)..(45): unsure at all Xaa locations
  Clone ID: MRT4577_154512C.1.pep
GEAVKYKSXLHAFQEIFKKEGTKSMFKGVGGKILRASTGAGVLCD

SEQ ID NO: 244438 - protein, 101 aa, Zea mays
  unsure (1)..(101): unsure at all Xaa locations
  Clone ID: MRT4577_154513C.1.pep
KWAAEIRDPVKGVRVWLGTFPSAEAAALAYDEAARAIRGPRAKLNFSSSSAVAAAAPGARKRXRAAPPAAKPAPVITLVDDEEEHATXAFVKHEDEASEGS

SEQ ID NO: 244439 - protein, 61 aa, Zea mays
  unsure (1)..(61): unsure at all Xaa locations
  Clone ID: MRT4577_154514C.1.pep
LGFPSGDLPKFPTSDGTVKIPKEGXVPLKIFGTRFDAPEIFFIGPIKGDFPGVFSNPGAAI

SEQ ID NO: 244440 - protein, 75 aa, Zea mays
  Clone ID: MRT4577_154515C.1.pep
TVYYGGICEYHDDPEKVCTIHADCCVGLDTKVHDLKAFAADWKNYTSQAPEERQKAAFKWTYPTRCRDSISWRKP

SEQ ID NO: 244441 - protein, 187 aa, Zea mays
  Clone ID: MRT4577_154516C.1.pep
MTEGGVPAEHADEEEKEVYLQNTATADEEEDCRARRGRSPSAARPPRCPTVVQKPLAPCTDARPATCVKCPEWCAFCLETDGCGLFSLVLVTLFDVIVGRWARRRKLDLTSRRELTACARGCSRAPAVIDCMRSANTESAGNGDGYGEERETVGRAKYGYREGVCWSWSKRGAEQRATTYSRLQKPS

SEQ ID NO: 244442 - protein, 448 aa, Zea mays
  Clone ID: MRT4577_154517C.1.pep
HHVYIENLSLSELLDGTYKYSSLGRDKGKKVLRTKEELLVSVRKAFSMLSDMDYCHGKVQFIILGPKPPPACTSSCDIKEQCCDKPSPLVKDSSQINVCDTALCHPKDILSRLTLPHQQDLDSLLTPGSESTAAVKPVRGASLPPFPWSHSQAGGCRQSVDCGKHGSSRSYSQWQWVRVGSNLTSLDYEDTSVHRIDHLLQEMDAAKLCRMDSCDGQYNLCGTESTSGSLAQNIQSRKNGGEHGSQQLQTLDRVDSLDGFQKHDSEHSLLKTSQVSPKIQHAAEILCDMRRSTESLSGQGYSNGIIKWPKSPPEKVMKARKPSSQFGITESSSGSRNNDATWNGSSHSTKKICDRKNDSACLNNPGKETIRWPVPVEGGASPVRSSERGPMLDMRQPHGNGGRHPVQVPSQVARLEKEYENQQKLRKATLTSSLGSPGDWSRERNRRV

SEQ ID NO: 244443 - protein, 83 aa, Zea mays
  Clone ID: MRT4577_154518C.1.pep
VFIFAHQGPWLSRELDEFISIVCESFGWARLSYSASCLGLRPKCTESQLLPASTRPHFQLAPPEPVHEQLHLILSRCFLSLLS

SEQ ID NO: 244444 - protein, 100 aa, Zea mays
  unsure (1)..(100): unsure at all Xaa locations
  Clone ID: MRT4577_154519C.1.pep
TGGXSQSHGGKRRPGTGKRHTRAERGPRHAGRSGPHCEGKRQKAPXGRSRPTLYVFFLFXIXVFXXDIKRPVDSLKPKLYYDHAYIIGHTTHDNVCRLTK

SEQ ID NO: 244445 - protein, 81 aa, Zea mays
  Clone ID: MRT4577_15451C.1.pep
ASLELLRPYNYTDVATNLCPFLGRKYSADFSVIVLLFKFNSEDLNVGHQDSKRGRYKCLASTLLVLQAHKQAHKSAQRFQA

SEQ ID NO: 244446 - protein, 69 aa, Zea mays
  unsure (1)..(69): unsure at all Xaa locations
  Clone ID: MRT4577_154520C.1.pep
NLXVEHMCVHNAWPVPGCSLLRCXLMRVFYLATCSCCFSSRTWCLVTSSCGTLCACLGLLVRCPRPLGG

SEQ ID NO: 244447 - protein, 91 aa, Zea mays
  unsure (1)..(91): unsure at all Xaa locations
  Clone ID: MRT4577_154521C.1.pep
GFGFFCERIEMAAPDVEYRCIVGGLAWATDEHSSYNAFCSYSVELAIKSILDRWTQWDRXMQLIXLVTEEATGLIMEVMNGQGLVCRNISA

SEQ ID NO: 244448 - protein, 116 aa, Zea mays
  Clone ID: MRT4577_154522C.1.pep
MAAGALEQGIGIVHRFATVNKKGQGKMRALQDLLFSPYMSLASDKDGMIWFRSPGQKQHIWCCKMDNLGNQYNTDGGLCQGDPLSLMHAIHIGNGNGNGSPTADSVQGNREKREDC

SEQ ID NO: 244449 - protein, 115 aa, Zea mays
  unsure (1)..(115): unsure at all Xaa locations
  Clone ID: MRT4577_154523C.1.pep
MAAGCNCKAAIGCVDARAPVRASYVSLYKWPESDAEFVRSVAMARRQGGGGGGQESPGGGASAPSYSYHHYYYNGSGSMRSNNSGEXGWXISLSREGDSYSCRQAYLRSYTFSRR

SEQ ID NO: 244450 - protein, 92 aa, Zea mays
  Clone ID: MRT4577_154524C.1.pep
APKFFGFKMAGCPRAQNNVIINFDPNFLTLIPWGGPKKFISGTGWNKFDPRGKQCGAQKTFLCLHLTIFCTNPALGPPFFNHGLTLCAVFLQ

SEQ ID NO: 244451 - protein, 91 aa, Zea mays
  Clone ID: MRT4577_154525C.1.pep
HICQPVLTTDGAPSQFQLSTFPPLTAFSLLSLNPSRRRRRLNPRCADCSSPRLRWGRGRRGSSIPPTRRRPRATRARGGAGGRAGRRRRRR

SEQ ID NO: 244452 - protein, 307 aa, Zea mays
  unsure (1)..(307): unsure at all Xaa locations
  Clone ID: MRT4577_154526C.1.pep
MAGQTAKAKEAEKDDRQEPGAEGAKDKLLPSHQQQESPASVADNDSSGVSSVPGDESPVLDGDSGELKVEENLDGNGSKEKKTSQKSSTSDGFASAKVSDGTSSLRKTSGSATMSTRADFTESGKSSMCRVSTASDISDESSCSSMSSATTKPHKGNDSRWEAIHVVKSRDNVLGLNHXRLLKKLGSGDIGSVYLSELSGTRSYFAMKVMDKTSLASRKKLLRAQTEREILQSLDHPFLPTLYTHFETDKFSCLVMEFCPGGDLHTLRQRQPGKYFSEQAAKFYVAEVLLALEYLHMLGIIYRDLKP

SEQ ID NO: 244453 - protein, 127 aa, Zea mays
  Clone ID: MRT4577_154527C.1.pep
YAVSGRALKGNCKGHPGRYSQHCSSVVRWDHRNKVILPKEGTKAFVACQGISLTMRLKAGGYLFASIAFVEIDPPKPRGGLDLSPLRRRRHREGRQGLTLTPRRPWHTRTDTTPSVPRLIAVAGLQA

SEQ ID NO: 244454 - protein, 62 aa, Zea mays
  unsure (1)..(62): unsure at all Xaa locations
  Clone ID: MRT4577_154528C.1.pep
QGQGVRPPLLQGCRGFPFCQPXGXPPPPWIGMSFISLPSCLDIKGYCVRRLGFLSPFFCFHP

SEQ ID NO: 244455 - protein, 112 aa, Zea mays
  Clone ID: MRT4577_154529C.1.pep
KTKPYFEAYNHGTTKQKNVGGGCGGKGTRGRGQAKGGARRRGGRRWAAGRAGRAGRGPDIEGSAEKLQSALIGGMTSWSVGMVLRMRRLPWQRSRRLPEGLRHSRRHRTPMN

SEQ ID NO: 244456 - protein, 238 aa, Zea mays
  unsure (1)..(238): unsure at all Xaa locations
  Clone ID: MRT4577_15452C.1.pep
MEKVMKGFGARDASGASNAPNVQVGDLPLKSSEVCPSKIKIPGKRAPLDLTLKTALQFVSSSSVKWCHNLSIAGPITQSYRGGSQNSRCARPGKEFLFSRALQSWVYPQSLLPASIISAMLSSTARGENEFLLKRYQDWEDSFQNLYYMLRKNQLNIFYVYTAQFVALFIRGNCLEKQPCNAYLSQSTRGIRSLLRKHGVRFSMPLCNAEVERVTDDDLMEFXKIKHXNLGQTLHIDA

SEQ ID NO: 244457 - protein, 62 aa, Zea mays
  unsure (1)..(62): unsure at all Xaa locations
  Clone ID: MRT4577_154530C.1.pep
FLXADSFNLPCFCLGLIVFIFPRLLIDVLSVEPGSFYATGLLFGGGAAVSVAVSXAGGETIA

SEQ ID NO: 244458 - protein, 198 aa, Zea mays
  unsure (1)..(198): unsure at all Xaa locations
  Clone ID: MRT4577_154531C.1.pep
MTPSYNSGPAGPAGGRRAATFAGACVFLSRNLVAPEVFDAVHDALRLNGAEVLLCADPSRTGPLDFHVISSSSHERFADMRSKGLNLLGPQCILSCAKERRFLPKQSYTCCLAMDGVKTLCSGFEKSEKVRIEELVTAMGGHLLTKHSMDVNFVIVKDVLAAKYKWALNTLKKPIVTMKWLEQCXIEHRVVPHEPYRI

SEQ ID NO: 244459 - protein, 72 aa, Zea mays
  Clone ID: MRT4577_154532C.1.pep
ALDEEKSHSCLVTRKFLRFSMQVKFFVLSGIGIMHMVGCRSSASRAQAPSWSSGTIRKGKSADCDAVLRMES

SEQ ID NO: 244460 - protein, 67 aa, Zea mays
  Clone ID: MRT4577_154533C.1.pep
IGFNPYRLLVLVDRMSTLRPAKDTFYTLDASHGHQCTGVNYASGSCSRALIKVFSRPKQIRSFPVDK

SEQ ID NO: 244461 - protein, 99 aa, Zea mays
  Clone ID: MRT4577_154534C.1.pep
NLFTGTKYTCAEHYKELRHHKSFGITQEERNKLRPTDFVMVKWVDNVASAQRKRSTTKHALSSRLRHDETMRQCKEKVLLKLLNTNDDVALVTSCKLCM

SEQ ID NO: 244462 - protein, 346 aa, Zea mays
  unsure (1)..(346): unsure at all Xaa locations
  Clone ID: MRT4577_154535C.1.pep
MPTAEATTPVPPELSSGQGRTVCVTGAGGFIASWLVKRLLEKGYTVRGTVRNPVDPKNDHLRALDGAVDRLVLLRADLLDPQSLAEAFSGCDGVFHAASPVTDDPEMMIEPAIRGTRYVMAAAADAGVKRVVFTSSIGTVYMNPYRDPSKPVDDTCWSDLEYXRVRQNWYCYAKTVAEQGAWEVARKRGLDLVVVNPVLVLGPLLQPTVNASTDHVMKYLTGSATTYVNAAQAYVHVRDVAEAHVRVYEAPHAHGRYICAESTLHRGDLCRVLAKLFPEYPVPTKCKDQVNPPVVGYKFTNQRLKDLGMDFVPVLQCLYETVTSLQEKGMLPVLPTKQDHDQLGKS

SEQ ID NO: 244463 - protein, 88 aa, Zea mays
  Clone ID: MRT4577_154536C.1.pep
RPGWDPGEVPLPVSPCARCAAARRRVHSPVALSLLRLSGIGLYIYVVRGDLQKHTGKDGERTQRQHPCSHVLTAIAGDSGVPQLQEPK

SEQ ID NO: 244464 - protein, 48 aa, Zea mays
  Clone ID: MRT4577_154537C.1.pep
ARLALGVISYRRVVFMCNRVQNRRDVHGISMRFSRVRDRACSLGCTRL

SEQ ID NO: 244465 - protein, 172 aa, Zea mays
  unsure (1)..(172): unsure at all Xaa locations
  Clone ID: MRT4577_154538C.1.pep
HESEASTHHRTAIHARVGASSILFHSPLPSLLRAQAAAQHAGRPLVVPSDYXGSRSFSYHRLKKLPVAAPSPPPATTAPASRGLEHEGDPRRAAAAIEDSYRSYYRALVARGRXGSGGGXGGRQRPRPRPRRRLRAWGALARALRRRAAAAGALVRASVARVARRLREGRPY

SEQ ID NO: 244466 - protein, 72 aa, Zea mays
  Clone ID: MRT4577_154539C.1.pep
RKFDEMDQQTTKEEQSEFYKIFYSVFDDQYAAMDALLNGKELFSFQIFQNVLDKYLGVHVDRPSRFVTRTNQ

SEQ ID NO: 244467 - protein, 41 aa, Zea mays
  Clone ID: MRT4577_15453C.1.pep
EKRLEYHEGFVTACQTGCPKFEGHNGVAGIFPKGIGVCFGP

SEQ ID NO: 244468 - protein, 95 aa, Zea mays
  Clone ID: MRT4577_154540C.1.pep
GQPRKSQTQYQILRCRVTFCCRARYNRDPAGVGSHALVPVSMDAAAREAQQSSGLEWRVTVPEGASVTVEHEAGPAARALAWLLACFAKAWSRVA

SEQ ID NO: 244469 - protein, 96 aa, Zea mays
  Clone ID: MRT4577_154541C.1.pep
CLILPATPWLHHSQLMVFSTSKSCNSLQHFLPTLSLPAGAYAQLWAVLITTLLWGKSELEHLAPVLEGPYLTHNSEGSCRSRTLQYHHLSGCKGHN

SEQ ID NO: 244470 - protein, 41 aa, Zea mays
  Clone ID: MRT4577_154542C.1.pep
STYSIKSYLFWIKKKKKKKKKKKKKKKKKKKKKKKKKKKKI

SEQ ID NO: 244471 - protein, 55 aa, Zea mays
  Clone ID: MRT4577_154543C.1.pep
GRLAAHIRCARLRLGSVHLSTRARLSLLSTYTHQSRHYASHYRSSDASVSALVPV

SEQ ID NO: 244472 - protein, 47 aa, Zea mays
  Clone ID: MRT4577_154544C.1.pep
RPTSNIERRIQDQQSRHHDDRDSSRPDAACCSCTAPLARQCSVNAHK

SEQ ID NO: 244473 - protein, 71 aa, Zea mays
  Clone ID: MRT4577_154545C.1.pep
MANSNLPRRIIKETQRLLSEPGGGISASPSEENMRYFNVMILGPAQAPYEGGVFKLELCIPEACPLPSPTG

SEQ ID NO: 244474 - protein, 113 aa, Zea mays
  Clone ID: MRT4577_154546C.1.pep
MDHLQVLKLPSMAKFNAGFTHCNQSFVKDCVGPAKESYERRMSKVCLLILNIVFMLVIKECKGEIMIFECSICMFGCYAYFLQPSSPRQTSLILYLLLVAVILHFISCVYNSA

SEQ ID NO: 244475 - protein, 35 aa, Zea mays
  unsure (1)..(35): unsure at all Xaa locations
  Clone ID: MRT4577_154547C.1.pep
FQLLLKCSSTQEPCRISSCIPGAPFCDMAPEXNCG

SEQ ID NO: 244476 - protein, 100 aa, Zea mays
  unsure (1)..(100): unsure at all Xaa locations
  Clone ID: MRT4577_154548C.1.pep
SKRLVGREVLRRNNTVLACLNDPLITTVNMTYMLKADTVHGXQGKHHEAKVKDFETLLYSENEVAXVIGCAEPLSRYIWGPGWPXYIVETTGVFTDHKMA

SEQ ID NO: 244477 - protein, 37 aa, Zea mays
  unsure (1)..(37): unsure at all Xaa locations
  Clone ID: MRT4577_154549C.1.pep
TSXXLQIVSLATGYIPSXRPVPHHQVTAXNTXXSLHP

SEQ ID NO: 244478 - protein, 80 aa, Zea mays
  unsure (1)..(80): unsure at all Xaa locations
  Clone ID: MRT4577_15454C.1.pep
GKKARQTAWAHDQRTLHGLESAGTXEKTASVEMGQMAEDARRRAEIARLRELHTLKGKVESVVKLKGLDLEDINNQHYTV

SEQ ID NO: 244479 - protein, 278 aa, Zea mays
  Clone ID: MRT4577_154550C.1.pep
MMDMLSASFANRRNEHNWSGERKFERFEECSGYRGTWSAKMGKRPILMEDSRRSTYCETQPSNSIYELPVSSSYNGTKKLLVPVGVQLQQSYSRSLARFAAQLGPVCWEIASRRIERSLAPGTKFGRGWVGDGETPNSFQPPVLAAFSETTTPQDRTAASGEQPCPSMSSPPATEACAGNDRSHLAGSQPDATPYASTSTTQRMSSEALASQQCGSLPQISINRAERTLEMMKGSPNNLHGHPGMQQTANGFNAVPGPMMFPHVAQLVVNQMQTHTAD

SEQ ID NO: 244480 - protein, 523 aa, Zea mays
  Clone ID: MRT4577_154551C.1.pep
DERFPAWYPVTLFNELYYLNAGGTIWTDGLPPIQSLTAVGWKKFSLDMLNGESDDFNEMVRQNNTASDILHRMASVFERMHASIASNSAIGTTLLQGEENIGQFLYLEGIEYYMWNTYDVHFYASFSLIMLFPKLQLSVQRDFAAAVMMHDPEKLRILHDGKWAARKVLGAVPHDLGLYDPWFKVNAYTLYNTDRWKDLNPTFVLQVYRDVVATGDKSFARAVWPSVYIAMAYMEQFDKDKDGMIENEDFPDQTYDVWSMAGISAYCGGLWVAALQAASALAREVGDKASEKLFWDKYEKAKFVYSKLWNGSYFSYDDGDNKMSTSIQADQLAGQWYAKACGLFPIVDKDKAQSALEKVYSFNVMKFKGGTRGAMNGMWPDGTVDMSAMQSREIWPGVTYALAASMIQEGMVEQGFKTAEGVYHAAWSPGGLGYSFQTPEAWNNDDEYRSLCYMRPLAIWAMQWALSKPKLHNTPQADIPQDSFPKNQFAYARITKLLQLPEDESSKSFVRVVYEIIRNRFRS

SEQ ID NO: 244481 - protein, 71 aa, Zea mays
  Clone ID: MRT4577_154552C.1.pep
GAALFFFFLNKNSMLNGHLEGLIYIKRATLLRCMGSPSSIKVSEPYCSMHACICRFWKKVFPLFSPLLQAS

SEQ ID NO: 244482 - protein, 43 aa, Zea mays
  Clone ID: MRT4577_154553C.1.pep
QSNQISIHEYRSMLVSSKTILSFACPTPMTASYHPIACNSFVL

SEQ ID NO: 244483 - protein, 113 aa, Zea mays
  Clone ID: MRT4577_154554C.1.pep
MTDTTTGVVSNLFQAWMRPSPAAATANCKIAMQEFQEEQGAAAAASIVCKEQMVTCGDVNRPPALEMVVAPVMGASTATFSLLEDWLLDDMPGQAMDGFMGISAGCCADPIMF

SEQ ID NO: 244484 - protein, 44 aa, Zea mays
  Clone ID: MRT4577_154555C.1.pep
SPTPIDLNAILQHTCLCSIQLCPSDLILLSVVSLFGYSLQHVIK

SEQ ID NO: 244485 - protein, 80 aa, Zea mays
  Clone ID: MRT4577_154556C.1.pep
CSFPPRSMGARRGAVFFHPKSYQINLFNRVTDQIATLDPQVSWLLACCRQCSGACRCHPCLGSQQDRCHINHGEAEEHTR

SEQ ID NO: 244486 - protein, 110 aa, Zea mays
  Clone ID: MRT4577_154557C.1.pep
SDEQVSSMNEAFSLFDTYCDCRIAPSELGILMRSLGGNPTHAHLKAIVAEENLTAPFDFHRFLDLMAKHMKPYPFDRQLRDAFKVLDKDSTVFVAVSELRHILTNIGEKL

SEQ ID NO: 244487 - protein, 93 aa, Zea mays
  Clone ID: MRT4577_154558C.1.pep
LASERPGLGREPPRFFTNFFKEKRKKSLWPLLSPQIFYLAKRGALYLGFETFYPPGKIRGGLFQEATEVGILGERVPGPQSKIFLAGSLLSPG

SEQ ID NO: 244488 - protein, 109 aa, Zea mays
  Clone ID: MRT4577_154559C.1.pep
MRASSSMRPVKELPRDSPLKPSYIEIGRSILKGKDLQTMKKLGYFNSKLNVRLPGDGTVAAMLAGSLRLFWFPQELRSFGFHKSCECETTGYDAMEDGAASPYRKLFFL

SEQ ID NO: 244489 - protein, 72 aa, Zea mays
  Clone ID: MRT4577_15455C.1.pep
SKGGRGRVPSTKTWDAAWTPWGPGYEIYLPRICICVNLPLYAGQLVLILGKIVAVGLFLVAPSQKKKIYVCP

SEQ ID NO: 244490 - protein, 107 aa, Zea mays
  Clone ID: MRT4577_154560C.1.pep
PLEFFFFFFFFFFFFFFFFFFFFFFFFHSQRPFPLVTSLVKKKRVVCKENLSFLNVQVQHQQFVHLYGLLPAGSKCNEQLLQACKLLAATEGGTLPSNHCTVYPGVL

SEQ ID NO: 244491 - protein, 37 aa, Zea mays
  Clone ID: MRT4577_154561C.1.pep
GMYITQVPTLESAVQSMFAQCALSDPAPNASFYIQRS

SEQ ID NO: 244492 - protein, 220 aa, Zea mays
  unsure (1)..(220): unsure at all Xaa locations
  Clone ID: MRT4577_154562C.1.pep
MAIGGDAGLLVGDGAGAGDDNIILNPEFDDGLDSWAGSGCKIELHDSLDDGKVLPANGKYFVAATGRTDTWNGVQQDVTARMQRKLLYEATATVRLHSAAGGGGGAVAPCEVRATLGVQTADGRQQYLSVGKSQVSDKEWVQLQGKILLNSTVAKASIYIEGPPXPGVDVLLDSLVVKHAQKAPPAPAPDFENLEYGANIMQNSKLDDGLNGWVPLGPCT

SEQ ID NO: 244493 - protein, 123 aa, Zea mays
  Clone ID: MRT4577_154563C.1.pep
CLLFVSSFTRLHAAGYDDLPRMMLARSSWSLATRRTRRLHGAKMSVIGMSQIPNASINIAVFYVSRALNICGFGFLHRTAIWIVFSPWLLAYISFIGRPSHALRAIGYLVISTLVQCLTFGIS

SEQ ID NO: 244494 - protein, 151 aa, Zea mays
  Clone ID: MRT4577_154564C.1.pep
MRLRQTLILLPALQVLARSTIAEIDDKKVARAAAPAYTSAFPDPSPAAVTPGSLKGTKDAPVDGFDGKPHAGPYIDDTPTSHDKQPAVVEDLGTGKKTVPGRKDSTLVGAEKEVLDGDKSVMQDPDRKLATGKTGVEGGVSAKDKERLAHE

SEQ ID NO: 244495 - protein, 135 aa, Zea mays
  unsure (1)..(135): unsure at all Xaa locations
  Clone ID: MRT4577_154565C.1.pep
RKPNPQIFRALTHIQYVDTCIRDLAHSNDAHLRAMQAPGSPCCQAPGTTSQHHAREVIVSSSMESRSEDTNNKHHAVSLGPKIGSNSRSRCAIELPSVGQPSLEXXXXXXXXXNCSFXXXXXXXXXXXGWRXXGY

SEQ ID NO: 244496 - protein, 104 aa, Zea mays
  unsure (1)..(104): unsure at all Xaa locations
  Clone ID: MRT4577_154567C.1.pep
EDLVAPDEGDGPLYPLHVSPSVVKLCHPPLCLVPSQIHHACNRLSVQSVFLLRACLLSFWSRCTHLYFLCFLMSNPCVGNAPVGPFKMPPLFFWPVVGINXGFL

SEQ ID NO: 244497 - protein, 55 aa, Zea mays
  Clone ID: MRT4577_154568C.1.pep
LLHVVGEDEVIDEAALAADFQDLRNLLDLDHVLQNLHLKKTNLLQVVQQLAPGTI

SEQ ID NO: 244498 - protein, 139 aa, Zea mays
  unsure (1)..(139): unsure at all Xaa locations
  Clone ID: MRT4577_154569C.1.pep
MIPELNVLDTQSSLDVAGDGFLSQEQPLLTVNSTTPIEYPATASSSSSTPHPPPTIRTKSPTSTSAIPGTSTFSLHPSPSSSSSSSSSRKRKSSPEEEDSAVTLKRQRNTLAARKYXQKRIDRITELEEALAAKAKECD

SEQ ID NO: 244499 - protein, 69 aa, Zea mays
  Clone ID: MRT4577_15456C.1.pep
AAADADALAHVFVGPFPAFVASFAVDENKRGMGTFSLAFLWGTEHPNPNLSSLAICNRIWCHFKCMHTY

SEQ ID NO: 244500 - protein, 44 aa, Zea mays
  Clone ID: MRT4577_154570C.1.pep
LMSNNHSLRLDGIDLFLNSILSSLMTLLKVLFFSHDHHVVLDCL

SEQ ID NO: 244501 - protein, 157 aa, Zea mays
  unsure (1)..(157): unsure at all Xaa locations
  Clone ID: MRT4577_154571C.1.pep
GVALFVPHFPWSPIAGFCLSWGVWRPVLHPPGLSPVVASLAGVLPVPGVVPGAPICAPNAVPSLVPGAXPPSLLRARSWNRVGCPPGALCXGLLPLPSLVPGPVPPLXAPGAFLLPLCFGPFCLSPGAPPPXPLPPGVCXPWGLFPPPPPLSGAVSC

SEQ ID NO: 244502 - protein, 114 aa, Zea mays
  Clone ID: MRT4577_154572C.1.pep
GSSSDIVIRTDADGRQVRVGDVARVELGAQDYGVNTYLSNKPTVVIATMQRPGSNALDAAEKVKAEMEQLSKRFPKGLEYSVIYNPTEFISQSIDAVYHTLFEAVILVVLVILV

SEQ ID NO: 244503 - protein, 54 aa, Zea mays
  unsure (1)..(54): unsure at all Xaa locations
  Clone ID: MRT4577_154573C.1.pep
MADHANQPTVLYKLGGQLHLXSSSSEGVRXRNICPSFSPDERRFATRNCMTQSL

SEQ ID NO: 244504 - protein, 89 aa, Zea mays
  unsure (1)..(89): unsure at all Xaa locations
  Clone ID: MRT4577_154574C.1.pep
HSAKAKKFYLCLXXGPSTSLXKGLTESQDADQASESMFTSERAPHKKARRDLVKKSREWVLEKKERRRRQGKEVRPDTQYTGRKRKPRF

SEQ ID NO: 244505 - protein, 122 aa, Zea mays
  Clone ID: MRT4577_154575C.1.pep
PRQLPRAETTNFVVEVRRPWARTPLTGNSLEEDEGVALGQGDHELAVPVYDMSSQYHLLPCHPGEHIQVQVLQVGMLQPRLLVVPLPRHQAHWQWLHNVQINHVQYRCKNPHSTHPYPLKPD

SEQ ID NO: 244506 - protein, 61 aa, Zea mays
  Clone ID: MRT4577_154576C.1.pep
RTSVNLAHPGAARHVGECRSVYCVSKARLVRSGHLACSSPQLKPFRPPPPASAARLPVRPP

SEQ ID NO: 244507 - protein, 34 aa, Zea mays
  Clone ID: MRT4577_154577C.1.pep
YEHHPKWIHMAANAKGWLTLEPLWQLLLGGIILR

SEQ ID NO: 244508 - protein, 90 aa, Zea mays
  unsure (1)..(90): unsure at all Xaa locations
  Clone ID: MRT4577_154578C.1.pep
MPNVKSAGGAGASAIPAGGDGEVEAGFAKLQGEDFEYYMQTYSIMLGRNSKKSTVDVDLSSLGXGGMNISRHHARIFYDFQRRRFRARRH

SEQ ID NO: 244509 - protein, 34 aa, Zea mays
  Clone ID: MRT4577_154579C.1.pep
KTKKIKKKKKKKKKKKKSNKKKKKKKKKKKKKLV

SEQ ID NO: 244510 - protein, 436 aa, Zea mays
  unsure (1)..(436): unsure at all Xaa locations
  Clone ID: MRT4577_15457C.1.pep
SGRAPRPQAPSGAEQRSARXEVRSAYGDIGLRYREDETVAYSRHHATMGRXHRVLREVRRRPPRPAPAKVLDFGAGPSSALWAMRAVWPKSIERVNLVEPSKEMQRAGQSLLDNLKGLPLIHSYDSIQELNRKIEKHERGHDLVVSSYALGEIPSLSDRITIVRQLWDLTSDVLVLLEPGTPQGAKIISQMRSYILWMEKRKCRKIEKSSSRPPSSMKSIVAQKVSLKNGSFVVAPCPHDGRCPLENSDKYCHFVQRLERTSSQRAFKRSKGVPLRGFEDEKFCYVALRRGKRPEEAWPLDDLNFETLKERNAKRKPEDLVIDYDDQFPSEEDEEVHVDGGDSLVPYASDEHELSLFHDSEEAEAEQTVRADLGGGWGRIIYSPMRRGRQVQMDVCRSTKRDASEGTFERVVVTRSKNPTLHFQARKSLWGDLWPF

SEQ ID NO: 244511 - protein, 124 aa, Zea mays
  Clone ID: MRT4577_154580C.1.pep
RGLICDYGLSLGDLIGVLEDFFSSLGMSKLRFKPAYNPYTEPSMEIFSYHDGLKKWVEVGNSGMFRPEMLLPMGLPEGVNVIAWGLSLERPTMILYGIDNIRDLFGPKVDFNLIKSNPLCRLGL

SEQ ID NO: 244512 - protein, 33 aa, Zea mays
  Clone ID: MRT4577_154581C.1.pep
KIYSSGLFIYLSPVSSKMTGLATKIFGNGGGAF

SEQ ID NO: 244513 - protein, 498 aa, Zea mays
  Clone ID: MRT4577_154582C.1.pep
MAEKSPAADVEAGLLAHLNSAGEVPDSRSFASSLGVSHLELEGVIKSLSAFRIVDSTDIIKETWVLTEEAKGYAAKGSPEAQLVAAISPEGASKDALKAILGDAFDVGMKAAARNKWIGFEKGNKDLVLRKVESVKDELQEQLRRLENGEVVSDKVIDDLKRRKLITKEKSIWYSLKKGSEFVVKRKTLATDVTTEHLRSGDWKDLEFKDYNYGAQGQPIAKGYVQPLMEVREAIENIFIMMGFTEMPTNNFVESSFWNFDALFQPQQHPARDSHDTFFLKAPATTKQLPDDYLEKVKQVHQSGGYGSKGYGYDWKRDEAEKNLLRTHTTAVSTRMLYKLAQEKPFTPKRYYSIDRVFRNEAVDRTHLAEFHQIEGLICDYGLTLGDLIGVLEDFFSSLGMSKLRFKPAYNPYTEPSMEIFSYHDGLKKWVEVGNSGMFRPEMLLPMGLPEGVNVIAWGLSLERPTMILYGIDNIRDLFGPKVDFNLIKSNPLCRLGL

SEQ ID NO: 244514 - protein, 96 aa, Zea mays
  Clone ID: MRT4577_154583C.1.pep
RHAYQSKLPRQHVGCNHVVMALGALSHSAFTKQSATWQQSIIKEEQQQGHVRHQDLHKLLKVRRHTSPRSNTYHKCAVRCHSKLPKNNHMTKSHCT

SEQ ID NO: 244515 - protein, 92 aa, Zea mays
  Clone ID: MRT4577_154584C.1.pep
TTDRDREPNPITHKHINIYTIPRPFIHPSHRTPISLSMTTTANLAHHNSISSISVAVPTTTTTMIFPPAFLHDSSNWNDNHQHQHHQHHQSH

SEQ ID NO: 244516 - protein, 53 aa, Zea mays
  Clone ID: MRT4577_154585C.1.pep
APILASYDTAIPQVFFTCLGVTAARHRWPQPPCSSPPSVPTSPNGDATRHAAA

SEQ ID NO: 244517 - protein, 72 aa, Zea mays
  Clone ID: MRT4577_154586C.1.pep
LSDIDLFSKNRTGGGGVRETSVLRFKEKRGPRLFSKKIRFPVRKVNPDFRPRIKGRFVWSPFFFWQALEEKA

SEQ ID NO: 244518 - protein, 470 aa, Zea mays
  Clone ID: MRT4577_154587C.1.pep
MASDPAPDDAAAAVNGHGNDNGHGNGPSPSKRPRAVISEAEIRVEFAHHDAAVARVNNGSFGCCPASVLAAQAHWQRLFLAQPDAFYFHVLQQGLLRSRAAVAEVVGAGDVSEVSLVDNATTAAAIVLQHAAWSFAEGHFARGDAVLMLHYAYGAVKKSIHAYVARAGATVVEVPLPFPVASADAIIAEFRAALAVAKEGGRRVRLAVIDHITSMPSVVIPVKELVAICREEGVDKVFVDAAHSIGQVPVDVRDIGADFYTSNLHKWFFCPPAVAFLHTRKDDPIASQLHHPVVSHEYGNGLPMESGWIGTRDYSAQLVVSEAIDFVNRFEGGIEAIRNRNHEKVIEMGRMLAEAWGTFLGSPPELCGSMVMVGMPGCLGVESDDDAMRVRTMLRKDFQVEVPVYYNSRRVEGQEMTKDKNGDPVTGYVRISHQVYNVTEDYERLRDVVNKLVSEGFTSSKLRPSEKQEA

SEQ ID NO: 244519 - protein, 144 aa, Zea mays
  unsure (1)..(144): unsure at all Xaa locations
  Clone ID: MRT4577_154588C.1.pep
MGLTMGYTAGEVDEEADKDAIMFAMQFMLPIMLXYTIKXALLLVLLEEVHREDAGLKAELVPEEXPARITDPPSDPAIVDRMVDLMLCYHVFYYQMQDQNEDHERRYXSAGXFCKWVSNNVNRNYNGVLMLMIQHMNQIQELDL

SEQ ID NO: 244520 - protein, 93 aa, Zea mays
  Clone ID: MRT4577_154589C.1.pep
IQMKEAFTLSKSSRSVGFKVILFSIIVVFSQPAFCREAASNLGPLLSGKASRHFAAWGRRRERRRSDRIPEANCVSEERRRRRWWAGDRGRRG

SEQ ID NO: 244521 - protein, 703 aa, Zea mays
  Clone ID: MRT4577_15458C.1.pep
MPSYAPSSGCLPLVLSLHAHALRSGLATDRSVASNLLTAYAAFARAGDRDQAFRDCVAADAASSFTYDFMVSEHVKAGDIASARRLFYGMPEKSVVSYTTMVDALMKRGSVRDAVELYERCPLHSVAFFTAMISGFVRNELHKDAFTVFRKMLTCSVRPNVVTLICVIKACVGAGEFDLAMGVVGLAVKCNLFEKSIEVHNSLITLYLRMGDAAAARRVFDDMEVRDVVSWTALLDVYADLGDLDGARRVLDAMPARNEVSWGTLIARHEQKGDTAEALKLYSQMLADGCRPNISCFSSVLSACATLQDLRGGTRIHANALKMGSSTNLFVSSSLIDMYCKCKQCTYAQRVFNSLPEKNTVCWNSLISGYSWNGKMVEAEGLFNKMPARNSVSWNTMISGYAENRRFGDALNYFYAMLASGHIPGEITLSSVLLACANLCSLEMGRMVHAEIVKLGIEDNIFMGTALCDMYAKSGDLDSSRRVFYQMPEKNNITWTAMVQGLAENGFAEESISLFEDMIENGIAPNEHTFLAILFACSHCGLVEQAIHYFETMQAHGIPPKSKHYTCMVDVLARAGCLPEAEELLMKVSSELDTSSWSSLLSACSTYRNKEIGERAAKKLHELEKDNTAGYVLLSNMYASCGKWKDAAETRILMQGASLKKDAGCSWLQLRGQYHAFFSWKEKHPLSLEIYEILDLLMLELTT

SEQ ID NO: 244522 - protein, 72 aa, Zea mays
  Clone ID: MRT4577_154590C.1.pep
PAAVPGSALNRFLTTPKVIFSALGHEVLLKFSENFAEARRAKAAAQGKGKKPRPRRASITRAKVFRTLGWPR

SEQ ID NO: 244523 - protein, 63 aa, Zea mays
  unsure (1)..(63): unsure at all Xaa locations
  Clone ID: MRT4577_154591C.1.pep
ALSILFGVPVKVVIGWEFRVCKVGFFKTGAXRNLDLPSRLSLSLGRVYLFFLVWFFFICFFFF

SEQ ID NO: 244524 - protein, 55 aa, Zea mays
  Clone ID: MRT4577_154592C.1.pep
LPLKSNVLRQWRLTSIFSSFYMRIRPHVSNLFHPTLQVSLAADNISGVAFHPARR

SEQ ID NO: 244525 - protein, 69 aa, Zea mays
  unsure (1)..(69): unsure at all Xaa locations
  Clone ID: MRT4577_154593C.1.pep
CTMPVTSSVINPRXNLGDAGSYNKDKPWEDPWIVCEGPLLYDAIAPFYHHNILRVGVMKDLSSLRSDWR

SEQ ID NO: 244526 - protein, 50 aa, Zea mays
  unsure (1)..(50): unsure at all Xaa locations
  Clone ID: MRT4577_154594C.1.pep
CIIYMAFIIRYGVQELLSLNKDRXCREGXXXFLLGRTEIINIPDKVGACV

SEQ ID NO: 244527 - protein, 45 aa, Zea mays
  Clone ID: MRT4577_154595C.1.pep
RGRTASVTGPGKHALYKGSVPSRSRRSQSAQPAGLWSNQPRFLLR

SEQ ID NO: 244528 - protein, 66 aa, Zea mays
  Clone ID: MRT4577_154596C.1.pep
SQKFVGDSRASLFYSQAGIGLSPSFLKPVSWYYHQWGSPPPVLDFIAPLALVSAPPQLLCPDPFFP

SEQ ID NO: 244529 - protein, 60 aa, Zea mays
  Clone ID: MRT4577_154597C.1.pep
DNDDPRDGPAPSPPKPEPKPQPPKPGPTPKPPMPSPTPEPPPPYNRSQVHAETAAKAVFV

SEQ ID NO: 244530 - protein, 342 aa, Zea mays
  Clone ID: MRT4577_154598C.1.pep
MASDAAAEPSSGVTHPPRYVIGYALAPKKQQSFIQPSLVAQAASRGMDLVPVDASQPLAEQGPFHLLIHKLYGDDWRAQLVAFAARHPAVPIVDPPHAIDRLHNRISMLQVVSELDHAADQDSTFGIPSQVVVYDAAALADFGLLAALRFPLIAKPLVADGTAKSHKMSLVYHREGLGKLRPPLVLQEFVNHGGVIFKVYVVGGHVTCVKRRSLPDVSPEDDASAQGSVSFSQVSNLPTERTAEEYYGEKSLEDAVVPPAAFINQIAGGLRRALGLQLFNFDMIRDVRAGDRYLVIDINYFPGYAKMPGYETVLTDFFWEMVHKDGVGNQQEEKGANHVVVK

SEQ ID NO: 244531 - protein, 98 aa, Zea mays
  Clone ID: MRT4577_154599C.1.pep
GCVHFFFFFFFFFFFFFFLEPRRALGPKPQRHFFNLVKFGTFSKKGPKSPPFWNLMGVSLHSGFCQIGDPYPGVYTRGWAFLQNKQALFGVIPPFFSN

SEQ ID NO: 244532 - protein, 95 aa, Zea mays
  unsure (1)..(95): unsure at all Xaa locations
  Clone ID: MRT4577_15459C.1.pep
TKGHHRKRGKTPRNKPAGAGETTXNWASMGHLRPQNNGLNXLYLHDASPHAGETREDDQDIGRIICDCINGDFTNYNRAIAQTGQTGYGPAEENY

SEQ ID NO: 244533 - protein, 74 aa, Zea mays
  Clone ID: MRT4577_1545C.1.pep
STKSIFSSSIKHETCSRIGLSTYEVGPQLIKTSSLCSIGNFVLPFLHIDQVFRSQKTSSKVLLFHRDGNMGCDW

SEQ ID NO: 244534 - protein, 61 aa, Zea mays
  Clone ID: MRT4577_154600C.1.pep
MKLLATLRSKYLPYGPVEQIIPYLIRRAEENRGLLSASSFDRQLLRKELVRRVKATVAGRE

SEQ ID NO: 244535 - protein, 149 aa, Zea mays
  unsure (1)..(149): unsure at all Xaa locations
  Clone ID: MRT4577_154601C.1.pep
KKPSPPGGGGKKKRKKKGGGGGGHRKNKRGKRGRIIQGGQNXGGKGGGGRALCRGKKRGRLAGXPQDGEKAPHGEDDRGGHPGRGKKRRPQPDQSGGGGLPPKGGGQGASPAPPGTRGPGNRLHAPGGXRSGGKXGTGGGGAPLRGGAP

SEQ ID NO: 244536 - protein, 369 aa, Zea mays
  Clone ID: MRT4577_154602C.1.pep
FNSVAAVQCVNRYPRTKVGITVDRVGAEDGHACDRNAAGFVSAVDVAASLPPGSASVCIKITALCPIALLEKASDLLRWQKKHPSFSLPWKTHSFPVLSDSSPLHLTASEPAALTAEEERELQLAHSRLLAVCARCAEHGIPLLVDAEYATVQPAIDYFTLVGALAFNDAGAADGGRPIVHGTIQAYLRDARDRLEAMVRGAERERVRLGLKVVRGAYLTREARLATALGVPSPVHGSIQETHDCYNGCAAFLLDRVRRGSASVMLATHNVESGQLAAARAQELGIPKGDRNLQFAQLMGMADGLSLSLRNAGFQVSKYLPYGPVEQIIPYLIRRAEENRGLLSASSFDRQLLRKELVRRVKAMVAGRE

SEQ ID NO: 244537 - protein, 46 aa, Zea mays
  unsure (1)..(46): unsure at all Xaa locations
  Clone ID: MRT4577_154603C.1.pep
KRLHVSERIYKRPICYSHSQFNTILGLNNPSSFWGAVSHXXHXCFP

SEQ ID NO: 244538 - protein, 404 aa, Zea mays
  Clone ID: MRT4577_154604C.1.pep
GRFLKADGAYKGSRSLRYDNLFDSYPSNLVSIARFHSKRVLKLKEAVLTSYRRNEIKFTELTLDTFRMLQCLEWEPTGSYQIAAKGVRENGTVSDQSGPSGLIDIQLSTEISDGSLPSNPQKAIIYHPTAAHLLAVLATICEELSQDSILLIYISASGSAEQSFASQKFGSSSSRARAASAFPTDKPNSHNSSDNHLWLGPRGSGGPNNLYPDDLIPFTRYPLFLVIDSENSHAFKVIHNSEKGEPAALLLSPRTSSAMPGVESTAHGSQFTYFLTAPMQAFCQLAGITSDIDTDTYANAENILFSALEEYEGILCTSVGLNNVWGQILPDPFLRRLILRFIFCRAVLFYFHSDEHEYLPTCLPSLPESVSPHAEAIRTPILSLAENLVVSDRFDFRDSTRNKK

SEQ ID NO: 244539 - protein, 155 aa, Zea mays
  Clone ID: MRT4577_154605C.1.pep
GREHHSPPAQSVCAVAMDPMVLVLLHATVARPPVLTAVQFDTGAVCHGCLSAGSLVCSIDSHPVSGREAEAGSPAQWRRSHSQRWRRPQARRAQAAAVPYGKGEGEHVLHFPLLFTLLSSSPATPRSNSQRQSAMAMSQQENRICMLSYLLTTVS

SEQ ID NO: 244540 - protein, 65 aa, Zea mays
  Clone ID: MRT4577_154606C.1.pep
GDPGALVELKVKELKNGPLSMFSRSGFFVRPIFPGRGRLEPLVDHIVAPVSTNAGASATKLVPAN

SEQ ID NO: 244541 - protein, 44 aa, Zea mays
  Clone ID: MRT4577_154607C.1.pep
PVLTQAPISETLYRIASVHDFSTRVPELVLINPATLRAIYTRTN

SEQ ID NO: 244542 - protein, 119 aa, Zea mays
  Clone ID: MRT4577_154608C.1.pep
TSRRIRNIAEHRNSSINTQRNTLTNYFSLHLSNISRLMPTSKINIHSNILLTNRHQDIVRRSKHIAAVSRAIIRRRTSSKNTRPKLLNSHLLRRQPRSNNRIETQLNMRLNKHINQPKG

SEQ ID NO: 244543 - protein, 138 aa, Zea mays
  unsure (1)..(138): unsure at all Xaa locations
  Clone ID: MRT4577_154609C.1.pep
GRHKPAAARVPPGVREGGPPXGPGPPTFGPESKGPPAGKRGXKGGAPPPPPGDPGPXKRGGXPQGPPPQPGGGAPRPPAFKGNRPGKPGQVVRGPGVKRAPKGKPRGAVSSWGTLWLIKKKNPAPGPPRAGNVWEGFF

SEQ ID NO: 244544 - protein, 112 aa, Zea mays
  unsure (1)..(112): unsure at all Xaa locations
  Clone ID: MRT4577_15460C.1.pep
LAALDYSAHPPPLYPFGRPVPAYLQPFVPFTPLAALSFAAYXHHQPLPPFGQLTHVTLGALLPLYPLFLFPMPALPTPGPLFQLHPFLPFTLPALTNPTVSPQQPPPPPPII

SEQ ID NO: 244545 - protein, 113 aa, Zea mays
  Clone ID: MRT4577_154610C.1.pep
AARSPPAGGHGRSKPYRLRPLPTLHSTSPSPEGAAACARGPKEGGGGAIILCFGRVCPDLVWFQEVGATCVGRRPLACADRPWRHPGCSELGARMSLSGVEEPGCVVRASRGL

SEQ ID NO: 244546 - protein, 579 aa, Zea mays
  unsure (1)..(579): unsure at all Xaa locations
  Clone ID: MRT4577_154611C.1.pep
TKPPHITTTDGGASPSPPPPXAHRRLLSTTATTPAASSSNPPTPEAVLYAIHSLSKDPSQALAVFRRSAAAGKPVGSAAYNLMLRTLASHPSSAQRHFWPFLREMQEAGHSVDQGTYLAALASFKKASLTADYASLTAHYDKFRKGDKSAAAAAAEAVRDHDAAGLDSRLADIGLLPLTETAVITVLRELREHPIKALAFFRWAGRQQGYTHSSVSYNAMARVLGREESVPEFWELIREMKGAGMYVDIDTYLKLSRNFQKRHMVREAVELYELMMDGPFKPGQQDGPIIIRRISLGPSPDLELVNRVVNKFEAVWGVKTKELLDGVHRALTSNGLFDKAAEIVQTMRDQGHQPDNVTYSQLVYGLCKADRLEDARKVLDEMEAEGCAPDLKTWTLLIQGHCVAGDVDKAVQYFTEMIEKGLDADGDLLDVILKGLCSHEKVEEAYSLFVEMVDKAELRPWQGTCQHLIGDLLRVNKLEEALALLKTMKTCKFPPFADPFPPYIAKYGTVEDARNFFKALTVKTSPAPAAYLHVLKLFFAEGRYSEAQDLLYKCPIYIRKHPHVAKLFESIKIESASAS

SEQ ID NO: 244547 - protein, 689 aa, Zea mays
  Clone ID: MRT4577_154612C.1.pep
ESLDDELSTEIIDKCDGIPLAIIAIASLLVERPCEEWSKVYDSISLGNGDNTTKILSYSYYDLPSYLKPCLLQLSIFPEDYQFDTNAAIWMWIGEGLVHLEKEEGSLFVVGERYFKELVNRSMIQPIEDKYDRLVEVFSIHDIVFDLIRKLLKDEDFITLLDSSGQHASQDSLREKKICVPRSDCKLRRLAVRNHHVQRFPEDTMDMPEALRSLNIIYCNIAIMTPLHSFRLCRVLCIEYSYVPISLKHLGKLLHLKYLELYGTPVDELPKEIGHLRSLQTLLLVNTGLDELPPAVCSLTRLMCLIAEGFKRLPADKMGNLTSLEELRLESVVGQSATQALVAELGKLTRLRVVNITFSEELEESLQEALVQSLFNLWGLQELALSSKWWQQGSAMWGDLEPPRQLRRLIIKGIVFSRQPRWINRSCMAHLCFLSLTVLAVEAQDLDNLARLPELRYLKLDGVSWPPRYDAGPGDFRNLRFCDVGTMLVFHMGAMPRLEELVFGVCAGYWSWEQNGVLLEQFPTMDVIEDLDLGLDNLLSLEQVTVIVNCSGTTAAKVQEVEAVVMRAMENHANRPTIKMERVGEKFILSDEEREDLLQRRIEKEGRFLEFKDKSDAFFIRHLRLIRHLRKSVISHNCAGASMCEVRKVEAARRHAAEVHPNHPSIELIRKNNDEMASSSDHPNTELRN

SEQ ID NO: 244548 - protein, 49 aa, Zea mays
  Clone ID: MRT4577_154613C.1.pep
INRRDLLSNHMEPQKISYSMAHLNSTVYQDIIWLKHMLARGENKTVTLA

SEQ ID NO: 244549 - protein, 231 aa, Zea mays
  unsure (1)..(231): unsure at all Xaa locations
  Clone ID: MRT4577_154614C.1.pep
MDSNKRLGLGVQHGHHSHNGTIAKPPPAHHHHHARRKQGRPNGGGGKGIKVVYISSPMKLTASAEEFRAVVQELTGRDSNVADHDLDLDXPPATATPPSNASSXTATPTETAAAAAAAAAGPRALSPTTKDAGPVRRRTPEYDGAAMAEPPPPPRSRACSSTTTTTRLQRACFTARTTGSRRNLSYAELNLTYGGNFLLRYGFRFHDGNTAGRARVRTPCRFVRSVHYLFT

SEQ ID NO: 244550 - protein, 142 aa, Zea mays
  Clone ID: MRT4577_154615C.1.pep
NQGPFFLRGLENKTLQGILLNPGTFTRLFLKTKTPPQKQCTGRVLVPQLENPQICLTERRRVPPNPPSKAGGNTPPPPPVRARGPKKTPEAPRGPKKPGGEKGINRRPAGPKTRGGRPGAFFPPQPRRGWKTASTPYPSRGG

SEQ ID NO: 244551 - protein, 60 aa, Zea mays
  unsure (1)..(60): unsure at all Xaa locations
  Clone ID: MRT4577_154616C.1.pep
PPPLEXXRXKKKDHAVEYLPSRPREPDGYRRVDQRVRTRVRPRVCFTPXPXAPPDVVGGR

SEQ ID NO: 244552 - protein, 229 aa, Zea mays
  unsure (1)..(229): unsure at all Xaa locations
  Clone ID: MRT4577_154617C.1.pep
GRKSGRLPPWDPHRIIMAIWKLRSSGLEQKGEVIDKEPELKENPYEEGSLLANEDVKMSEVYSAVLSVDVSALMEMFSGGPLEHKVMERAGCVDYLATEWELLNRNVYQRHINFRFDKSLSRYGGEATTTQQKYNLPNQNDWIVEEVMTLQGVQHEDYSSIQLKYHMTSTPLRPNSCRIKVLLGIAWVKGTKHQKKAAKNVMMNSANRLXEIFSEVEKEVTSRKSSASG

SEQ ID NO: 244553 - protein, 241 aa, Zea mays
  Clone ID: MRT4577_154618C.1.pep
MDLATLSPFAGAAPAPSHPRSPVSTDRSKLPSSGAMFPCRPLAPPHLPRAPSLARLPLSSLRPPSSSLRVVRCMAKERRVRMVAKQIQRELADMLTRDPVLQRAVLPEAALGADRYLSSLTTIADVELSNDLQVCKVYVSVFGDERGKKVAIEGLKAKTKYVRSQIGRRMKLRLTPEIRFIEDESMERGSRILAILDKLKEEREQQEGKDGEEDDDSYISEEDDGDWDADEPDEEDIIYVK

SEQ ID NO: 244554 - protein, 48 aa, Zea mays
  Clone ID: MRT4577_154619C.1.pep
FRKNLLMLSPLIMKTVSILFSKGLNTYEFLCIWCLKAWIKKVCLIIFT

SEQ ID NO: 244555 - protein, 65 aa, Zea mays
  Clone ID: MRT4577_15461C.1.pep
SITKLPHCRVCSAERTCALIHMVHPKLVFVKRQKWWTVRASAIRLTRTIILILCGYLSNYVRLSY

SEQ ID NO: 244556 - protein, 97 aa, Zea mays
  Clone ID: MRT4577_154620C.1.pep
KVFLMHKPENTREDSRVGDARFSAQLGAPLGRTARCSLLSVSALGMAVGARWVLVVWWLDRSACWVLAARRLSALCPCRPGGWRKPDGLQPCAAGVL

SEQ ID NO: 244557 - protein, 80 aa, Zea mays
  unsure (1)..(80): unsure at all Xaa locations
  Clone ID: MRT4577_154621C.1.pep
KENVLSPMELVLPLKKLVNXKLPTLLGVATRCNFPQLPDFIKSGFLKERVEPINKFSKFFPHLKKVAKGPGVWPFDQILF

SEQ ID NO: 244558 - protein, 122 aa, Zea mays
  Clone ID: MRT4577_154622C.1.pep
RCARGGHYPRLRGGKWGGRLAGPASLLFQKAKRGGCAGRTKRGETGMFSKSRRWRTARGFVRKLLIKGRPPPRKRIQERPRMGEENRKRPPRGVVDGDRKNFFFCFFFFVMFYFFFFFFFFF

SEQ ID NO: 244559 - protein, 90 aa, Zea mays
  unsure (1)..(90): unsure at all Xaa locations
  Clone ID: MRT4577_154623C.1.pep
KTLLKRSPKRSQAPSSGVLKKGVXVIXKKTLFKKGHVANRADPSLVXSTQPPPKEHKRVHPQKVSYXQGRPPPFXRVNPLNSSGGAYYPH

SEQ ID NO: 244560 - protein, 113 aa, Zea mays
  unsure (1)..(113): unsure at all Xaa locations
  Clone ID: MRT4577_154624C.1.pep
TGASVYLERLCQGSLDLNGHQGILXNTVHPGVGFRRDWGATIRWRKPSPVWSSRVPRNSPLLVEDLSNDVPDHALSDNVARVTGFFLGPVCVSILFNGPLGIWVLKSMHELQS

SEQ ID NO: 244561 - protein, 48 aa, Zea mays
  Clone ID: MRT4577_154625C.1.pep
HQVPYPSVSCNQVLFKHFEHPLIYPDEHFIFPNLVCLHQKVVHLVPLP

SEQ ID NO: 244562 - protein, 157 aa, Zea mays
  Clone ID: MRT4577_154626C.1.pep
QENKLAGWGYSAGGLLVASAINCRPDLFRAAVLKVPFLDVCNTLLHPIVPLTAIDYEEFGYPVDYEEFLAIRKYSPYDNIQKDVPYPALFVTSSFNTRFGVWEAAKWVAKVREFTQYDPERPVFLNLTTDVVEESKYLQTRELSLETAFLIKMVCSV

SEQ ID NO: 244563 - protein, 77 aa, Zea mays
  Clone ID: MRT4577_154627C.1.pep
RFELLAYYLNANPVPIFGTSAESEKRWPSRQMGRQSASISARPTLAHFYKGYNRSRSFIRGFLSLKASCIENYHITN

SEQ ID NO: 244564 - protein, 47 aa, Zea mays
  Clone ID: MRT4577_154628C.1.pep
SGMPKPSGLEREPAVLKVPAYLPLPSKVLLFFWGNLNQINWRRFTTS

SEQ ID NO: 244565 - protein, 116 aa, Zea mays
  Clone ID: MRT4577_154629C.1.pep
NPKKGDGVFKKQKTLKRGHIFIKKPQGPSKKTLLKKQKLPDLKSKNFYFKQKDFLKKKDFLLRKENQNRQKNKSPYKIKKNPPRIKNPPSKKRTCVKKPRPQFNKKKKNTKNPTKI

SEQ ID NO: 244566 - protein, 191 aa, Zea mays
  unsure (1)..(191): unsure at all Xaa locations
  Clone ID: MRT4577_15462C.1.pep
VTDTFCIGSTPTDSRLLTHGDLPRLLSTAXNPTQLCLSRASLTQPRIGLALSMVRQRAQRSIVCQAASNISDYRVSDMQKRILMNLLPLCDISLTNGSMIAPXSXFFCPADCGXNADXLPTHKDXVPYYITWEAWLXLTVPTXRKFWEALKGDPTYLXVLXDDRLASYGINAERTHLGCVAPXNSFDNKII

SEQ ID NO: 244567 - protein, 68 aa, Zea mays
  Clone ID: MRT4577_154630C.1.pep
KKKKNKKLKKKKKDIKKKKKKKKKKKKKKKKKKKKKKKKKKKGGGLLKGPNLTTRAWQRKSFLLGAPK

SEQ ID NO: 244568 - protein, 50 aa, Zea mays
  Clone ID: MRT4577_154631C.1.pep
VKPRGPVPLYVSCGIKQVWFTPCSRAILGKPLNFFKGDPRLGPLIMTKVF

SEQ ID NO: 244569 - protein, 142 aa, Zea mays
  Clone ID: MRT4577_154632C.1.pep
AHCNTSCFPSFHSFLGLVIVMNGKNFRFSGMGTSVIFGLVMVLTGGACLCECLEFRLWPDHIYDPALKTLFLYRRLLFYSMLLSITGASLLEKLRHRSMKARRSKLCYVVTVSRCRENVLFKLLSANDNIVPVTFVNLVCNL

SEQ ID NO: 244570 - protein, 439 aa, Zea mays
  unsure (1)..(439): unsure at all Xaa locations
  Clone ID: MRT4577_154633C.1.pep
AYRGRQDKEGCTPLHWAAIRGNLEACTVLVQVGKKDDLMVKDKTGLTPAQLAADKNHRQIAFFLDNARRVHDRGCGANTRXEIVKIRPCTFSLVHHXGMLITYVHSVILGQYVMTMTAPFGMFAWSGVFLATAGLVMFYKCSRKDPGYISINTRGSQNQRDDEPLLKMELENPALLFGNWSQLCITCKIVRPVRSKHCSTCDRCVEQFDHHCPWVSNCIGKKNKWEFFMFLTLEVFAMIITGSAAIIRLVRDPDSPSSFGAWIHYSAFQHPGVVSFLALDCFLFFGVAVLTVSQASQIARNITTNEMANSMRYAYLRGPGGRFRNPYDHGIRKNCSDFLLNGYNEDTERLDQTLHTDEEMGMIQMTRAVSQNGDNHLHHGNGTEHSCADSQASPKPHSQVGSPQCCDHSKRTDRTLLGLGLGLGRNSASRQYVRSLIPL

SEQ ID NO: 244571 - protein, 35 aa, Zea mays
  Clone ID: MRT4577_154634C.1.pep
IKYSACADEIRNTDVQNRESSTGHGTYVTSHPRPL

SEQ ID NO: 244572 - protein, 545 aa, Zea mays
  unsure (1)..(545): unsure at all Xaa locations
  Clone ID: MRT4577_154635C.1.pep
ILEHGADINAVDHTGQTALHWSAVRGHIQVAELLLKEGAKVDATDLYGYQATHVAAQYGQTAFIYHIVAKWNADPDIPDNDGRSPLHWAAYKGFADSIRLLLFLDAYRGRQDKEGCTPLHWAAIRGNLEACTVLVQVGKKDDLMVKDKTGLTPAQLAADKNHRQVAFFLDNARRXRQRMWCEHQIWEIVKIRARSSSLVHHYXMVITYTHSVISGQYAMTTKAPFGKFAWSGVFLATAGLVMFYKCSRKDPGYININARGSQNQRDDEPLLKMELENPALLSGNWSQLCITCKIVRPVRSKHCSTCDRCVEQFDHHCPWVSNCIGKKNKWEFFMFLTLEVFAMIITGSAAIIRIVRDPNSPSSFGAWIHYSAFQHPGVVSFLALDCFLFFGVAVLTVVQASQIARNITTNEMANSMRYAYLRGPGGRFRNPYDHGIRKNCSDFLLNGYNEDTERLEQTLPTDEEMGMIQMTSAVSQQNGDNHLHHGNGTDHSCAVSQANSKPHSQVGSSQCCDHSKRTDRTPLGLGLGLGRNSASRQYVRSLIPL

SEQ ID NO: 244573 - protein, 78 aa, Zea mays
  unsure (1)..(78): unsure at all Xaa locations
  Clone ID: MRT4577_154636C.1.pep
MDATGTGAGGKAKKGAAGRKAVGPRKKSVTRSVKAGLQFPVGRIGRYLKKGRYAQPIGSGAPVYLAVXLEYXAAEVWS

SEQ ID NO: 244574 - protein, 82 aa, Zea mays
  unsure (1)..(82): unsure at all Xaa locations
  Clone ID: MRT4577_154637C.1.pep
SVNLVACEGFERLERDEVLGKWXALLRMPVFXPFLLSILVNFTINTLLQSYSVYYKLDXRECVLYLHWKNMPRIVLSVCALC

SEQ ID NO: 244575 - protein, 42 aa, Zea mays
  Clone ID: MRT4577_154638C.1.pep
MDKSMLGDLDGLPEEDKMRMAAMIDQLQIRDRFVPYQRIRLV

SEQ ID NO: 244576 - protein, 62 aa, Zea mays
  Clone ID: MRT4577_154639C.1.pep
IGLGYLQQVSYLTFNFKLYPVNSVVYSTNNVLHNHIQCETMFCTALPLNDKCLLWKIKSNSV

SEQ ID NO: 244577 - protein, 147 aa, Zea mays
  unsure (1)..(147): unsure at all Xaa locations
  Clone ID: MRT4577_15463C.1.pep
MHSIGAEDDNKNNTPYMNHIPIEEVXEQMKCTRXGLSSREGQQIIEILDPNRLDEKKDSXSLSELGXMWNTLAXGLEMAAIXMDFALDNGGXRNPDWRELFGIYRALXVINCTICFIVEINDGXNADVVLMANLATKTKVLSRRTKV

SEQ ID NO: 244578 - protein, 115 aa, Zea mays
  unsure (1)..(115): unsure at all Xaa locations
  Clone ID: MRT4577_154640C.1.pep
MLSVRRRQEDAGGRVAAAQTQQLRGGLGMDDDAELEEGEACGDDTAFVDPDVALSYIDEKLQDVLGHFQKDFEGGVSAENLXSKFGGYGSLVPTYQRSPLPKLEVHLRQMLPQNL

SEQ ID NO: 244579 - protein, 229 aa, Zea mays
  Clone ID: MRT4577_154641C.1.pep
MEGEGDASGSDEVVQLEDAVELLVEHLVVPVLPRGQVDREEALSPEAQEAVARQVHATVLLYNYYHRKQFPQLEFANPERFSMSASLSVTNKNLLMYLNQAQNRLGNGVGTGLSVTDKVIVDACDIAEALDPTKDSPEMTTWPISKVAVLLLNRTKKECVLEHGSETKGVWSMFEKEITTALGGSLSSDMSVQGSSNNPWDFLRNRTCFSRLHIQRWNSNRYEAYKFAL

SEQ ID NO: 244580 - protein, 95 aa, Zea mays
  Clone ID: MRT4577_154642C.1.pep
EYYNFCCYFLLRKMPPHHQPPLRCGSSWREKCLPISCGFLSLLTHVLLMCFIVLVMSNSQGNFEWTLAWAGAEGDGQTDKKSVPGWFFLYACGDI

SEQ ID NO: 244581 - protein, 75 aa, Zea mays
  Clone ID: MRT4577_154643C.1.pep
NLWRSRGVSRLSGYIGAEEEGLKEYRGGRCQGENERGAGESGGEENRGFCPGLQVMMIGSEEVQPWVMAQRHARG

SEQ ID NO: 244582 - protein, 667 aa, Zea mays
  unsure (1)..(667): unsure at all Xaa locations
  Clone ID: MRT4577_154644C.1.pep
VVLLQIAVPTRTDVPEYQKLTSQVHEIVGRINGRFGTLTAVPIHHLDRSLDFHALCALYAVTDVALVTSLRDGMNLVSYEYVACQGSKKGVLILSEFAGAAQSLGAGAILVNPWNITEVADSIRHALTMPSDEREKRHRHNYAHVTTHTAQDWAETFVFELNDTVAEALLRTRQVPPGLPSQMAIQQYLRSKNRLLILXYYIYYCILDSHGHFFSVIITGCSSQKMAHLYPVVNLCYVEALRSVVSFALLLLPSPVRLSAYIFXDLILMIHLWHIKSPVKLSLSNFHKKAFWTHELSTTLXSHSLLFDSNNFNNSCYLYMTGXGFNSTLTEPVESSGRRGGDQIKEMELKLHPDLKGPLRALCEDERTTVIVLSGSDRSVLDENFGEFKMWLAAEHGMFLRPTYGEWMTTMPEHLNMDWVDSVKHASEYFTERTPRSHFEHRETSFVWNYKYADVEFGRLQARDMLQHLWTGPISNAAVDVVQGSRSVEVRSVGVTKGAAIDRILGEIVHSENMITPIDYVLCIGHFLGKDEDIYVFFDPEYPSESKVKPEGGSASLDRRPNGRPASNGRSNSRNPQSRTQKAQQAASERSSSSSHSSTSSNHDWREGSSVLDLKGENYFSCAVGRKRSNARYLLSSSEEVVSFLKELATATAGFQATCADYMHVLG

SEQ ID NO: 244583 - protein, 158 aa, Zea mays
  Clone ID: MRT4577_154645C.1.pep
QGSKKGVLILSEFAGAAQSLGAGAILVNPWNITEGADSIRHALTMPSDEREKRHRHNYAHVTTHTAQDWAETFVFELNDTVAEALLRTRQVPPGLPSQMAIQQYLRSKNRLLILGFNSTLTEPVESSGRRGGDQIKEMELKLHTDLKGPLRALCEDER

SEQ ID NO: 244584 - protein, 346 aa, Zea mays
  unsure (1)..(346): unsure at all Xaa locations
  Clone ID: MRT4577_154646C.1.pep
LYFPLEPTISSCAQNFGEFKMWLAAEHGMFLRPTYGEWMTTMPEHLNMDWVDSVKXVFFVNNVLLRQLISSFXFFFLQHVFEYFTERTPRSHFEHRETSFVWNYKYAXSVDLPSILFKEGPCSNILFPPIXDVEFGRLQARDMLQHLWTGPISNAAVDVVQGSRSVEVRSVGVTKGAAIDRILGEIVHSENMITPIDYVLCIGHFLGKDEDIYVFFDPEYPSESKVKPEGGSASLDRRPNGRPASNGRSNSRNPQSRPQKAQQAASERSSSSSHSSTSSNHDWREGSSVLDLKAENYFSCAVGRKRSNARYLLSSSEEVVSFLKELATETAGFQSSCADYMFLDRQ

SEQ ID NO: 244585 - protein, 79 aa, Zea mays
  Clone ID: MRT4577_154647C.1.pep
LATGVALSRIRGMNILLLSGKARRLQLQSIYCLSKNMHVVSTGGLEASCRCRQLFEEGDNLLRRAQQVAGVRPLPPDGG

SEQ ID NO: 244586 - protein, 49 aa, Zea mays
  Clone ID: MRT4577_154648C.1.pep
DGGHLSGGLSLSRIARSLIYRFRCGSVNPMAPLLDSCFTCYVLTSPPTL

SEQ ID NO: 244587 - protein, 76 aa, Zea mays
  Clone ID: MRT4577_154649C.1.pep
GGGPKGFCTAPGKHQYYPLSSPWPTTKQPRKKSCHSPSATHNKKLRFTLRTHPCRHTAQPTDFLHSTIRTDLYITH

SEQ ID NO: 244588 - protein, 68 aa, Zea mays
  Clone ID: MRT4577_15464C.1.pep
SHASGNSNHVEALRVYLLSKSLSRLKNQFQSGNGVITVDCIEGYPLIRLQLGKHVFLSAGDFYLASRS

SEQ ID NO: 244589 - protein, 151 aa, Zea mays
  unsure (1)..(151): unsure at all Xaa locations
  Clone ID: MRT4577_154650C.1.pep
PALEFAGAAQSLGAGAILXNPWXITEVADSIRHALTMPSDEREKRHRHNYAHVTTHTAQDWAETFVXEFLISMAQYHSVDQAPSLIIXFATQVFWXYPFLFXSELNDTVAEALLRTRQVPPGLPSQMAIQQYLRSKNRLLILGLLYFLLHT

SEQ ID NO: 244590 - protein, 66 aa, Zea mays
  Clone ID: MRT4577_154651C.1.pep
LLQSSTVTHKPSKWCEPSIIVCWYTVVAFVKASWFNGWNCFSCKTVAAFPPACFYNANNFSCATHH

SEQ ID NO: 244591 - protein, 236 aa, Zea mays
  unsure (1)..(236): unsure at all Xaa locations
  Clone ID: MRT4577_154652C.1.pep
STKQEKHIXHLQETFANFRNAGLKLNPEKCIFGVKKGKFLSCHVSTKGIEANPSKIEAILRMEPLRSRKGAQRLTGRLASLNRFNSSATLVQERQEGQTKKQTSVYFVSEFLSPSQKNYIELEKVLYAVLMASKKLRHYFESHHIVVPSSEPLKDIIRNKEATGRVRKWVAELNEFSIDFIHRSSIQSQTSADFIDDWMPEAEDEQRVLNEEVWTILFDGSWGTFGVGAATLSFLP

SEQ ID NO: 244592 - protein, 67 aa, Zea mays
  unsure (1)..(67): unsure at all Xaa locations
  Clone ID: MRT4577_154653C.1.pep
RAKFKFPAGQKIFDSRKWGFTKFSRTDYMKYKTEDTIVPDGVNADLLGNHDTLXKRAPGTASLNAVA

SEQ ID NO: 244593 - protein, 70 aa, Zea mays
  Clone ID: MRT4577_154654C.1.pep
QLMPMELGTYTSHDPGPVHDGHLLTAELLDANKEDRDPLNPQGASAADTGEAKTRQPFRLRQRNLWWMLS

SEQ ID NO: 244594 - protein, 167 aa, Zea mays
  unsure (1)..(167): unsure at all Xaa locations
  Clone ID: MRT4577_154655C.1.pep
MILLSSSDDEFYEEEEAAMMXSXTILHLMIDDCCDDDILLLTNDSSIILYEVIYCCNNVHDAAAAAAAXGXSYDEVAASSNNTTASSDDLLNCCDDFFNDDHHTIFFLLLFADYYIIIDVLLLICCTAADVIIDDTTPEILQTFFIINDFFPPEEEEILRKNHRCFF

SEQ ID NO: 244595 - protein, 102 aa, Zea mays
  unsure (1)..(102): unsure at all Xaa locations
  Clone ID: MRT4577_154656C.1.pep
SDPKNTVFVVSGRXKDELARWLEPCERLGISAEHGYFTRWSRYSPWESPDLKVDYGWKKMVEPVMDLYVAVTDGSSVETXETALVWHYEGTDPVFGPSQAKE

SEQ ID NO: 244596 - protein, 105 aa, Zea mays
  Clone ID: MRT4577_154657C.1.pep
KAKSGIDPSKCVDLAKHVKLACPHLIFSGLMTIGMKDYSSTPENFKALVNCKLEVCKALDIPTEQFELSMGMSGDFEQAIEMGSTNVRIGSTIFGPREYPNKRQN

SEQ ID NO: 244597 - protein, 68 aa, Zea mays
  Clone ID: MRT4577_154658C.1.pep
RKNFFFMKFLFKTMSQNFYSVVLLYGGLPLPLQTVLYGVVHVTYSHVHLYIASCLHRQKVNQEDRVLR

SEQ ID NO: 244598 - protein, 83 aa, Zea mays
  Clone ID: MRT4577_154659C.1.pep
PAARSTVPGGPSVACSTAKAVEWDASWSKNLDPSGRAALGVHDAAYEDTPGEAPASADPVSDKGLRPAIGESLVTPVASATAV

SEQ ID NO: 244599 - protein, 109 aa, Zea mays
  Clone ID: MRT4577_15465C.1.pep
PTRPPTYQRAVTRHDHDTPAGARDPDRTRPPSAAAKDNQITHDNKQQRASTARADHGEESALPTHRDTQPANADEGRQSTGKTTEKESEAGKDTRPRGPGKKTTTHARA

SEQ ID NO: 244600 - protein, 69 aa, Zea mays
  Clone ID: MRT4577_154660C.1.pep
ASKGTPGPEGNGKKLVGAAALKLRLGPRVKNKAPEKNQSRRAAGDQVEGIFFPFLFLLFFFNKESHIFW

SEQ ID NO: 244601 - protein, 146 aa, Zea mays
  Clone ID: MRT4577_154661C.1.pep
KVPTQKRAFRVFRGQFPFFWVHWGGALPGGPAQKGHPLQARGPQKFGAPGLGLGRDFLAKKPPSSFWADLGFPPPKGFRGAPGPILEGVPPVGFYPVGKPQNPPPGFFVPPFFFFTSPPLFWGFPPPALPCFACEIFPGGFDLFLP

SEQ ID NO: 244602 - protein, 356 aa, Zea mays
  Clone ID: MRT4577_154662C.1.pep
MVMAKQQHDKGLPKQARNEPAPFRLEQCCRCDDAHRQADDESMDAAGSAGPLHLTLGPLGSAAGPRCSCGVAPAPAPALAAPATVAVLRGSRYMRPAQELLGEVVRVADLAAADDEDEDQATERLEGGGHRAARRAAGNDGDGVQAKLLYLLSELESRRERYFGELERVVSSFEPALGGGAAAAYTTLMARAMGRHFGNLRRAILRRLRLQAAAAARRSLRRGGEDQDDDDDDDGDSDGEVTEELVDRLARRTKLAAAARAEQAWRPLRGLPDGSVAVLRAWLFDHFLHPYPNDGEKLRLAVTTGLSRRQISNWFINARVRLWKPMIEEMYKDEFSDGSAVSSYDDASASGASSSS

SEQ ID NO: 244603 - protein, 36 aa, Zea mays
  Clone ID: MRT4577_154663C.1.pep
PLATLFSSRRMFGSFTSRVDEGVLCSSVKGVSPTRS

SEQ ID NO: 244604 - protein, 103 aa, Zea mays
  Clone ID: MRT4577_154664C.1.pep
NKQKSNRTSKSKTIDYKPNGCLHTCRIDFPLNDAICAYALFCCTKLTRACGLKTSNLTTRHRELITFDSDHPKLNPVGSFLTAGAWNTHAVPKINPLKKHPPL

SEQ ID NO: 244605 - protein, 77 aa, Zea mays
  Clone ID: MRT4577_154665C.1.pep
GGHPKGPPLVPPQSLATSEHLPLLQVLIYIYIYIYIYIYIYISLVIVVVVENVSLLQLLVHLLSVQKNSISLLVLVT

SEQ ID NO: 244606 - protein, 70 aa, Zea mays
  Clone ID: MRT4577_154666C.1.pep
IKAVKYVLVCVTSARPYQQHYGVDHGLMVENVVQIVKKKEKMDGGQVRFNSHTIAPDRISDRVKKAPVKA

SEQ ID NO: 244607 - protein, 104 aa, Zea mays
  Clone ID: MRT4577_154667C.1.pep
PALFSFSDAGKGFLTRLEGVVIVFKANQPGGLVLLGKALADFLALRIFGDGGQGWLASFKGVDFVAPFLPLVGTFVAPIEAQLFGIFGTWLPGAALGGHGSPID

SEQ ID NO: 244608 - protein, 89 aa, Zea mays
  Clone ID: MRT4577_154668C.1.pep
ERKNTHKRKFLKTETRTYKAGGIEEILPTVYFLLTTISRLNTGTRRLAGDHNLQRSGSKKAFTFDDFGTDGYRGFGEGRQASKLGQALH

SEQ ID NO: 244609 - protein, 179 aa, Zea mays
  unsure (1)..(179): unsure at all Xaa locations
  Clone ID: MRT4577_154669C.1.pep
AYQLAACSPLIPSPSHPPTCEADDCYEHGPAWTRLFQCPLHASHLAPRPVRARRASGWTSLACTEKCTTEGNVRAHYNAQRQQVTSLILTQQSAGALRSREKNLHGKFRMQMRLMPISCAGTATCLYLSQLEGPVPDKIDMEXMLNDRVQTAKLNTIVRCNSNGRTEHQTYLRSDPSAD

SEQ ID NO: 244610 - protein, 1145 aa, Zea mays
  unsure (1)..(1145): unsure at all Xaa locations
  Clone ID: MRT4577_15466C.1.pep
MDDVCEGKDFSFPEQEEGVIELWAKLDAFHEQLRRTEGGEEFVFYDGPPFATGLPHYGHILAGTIKDVVTRHQSMRGRHVSRRFGWDCHGLPVEFEIDKALGITNRQQVFDLGIGKYNETCRSIVTKYVSEWEAMVTRTGRWIDFKNDYKTMDLNFMESVWWVFAQLWEKDLVYRGFKVMPYSTGCKTALSNFEAALDYRTVPDPAVMVSFPIVGDADNAALVAWTTTPWTLPSNLALCVNANLTYAKVKDKSNGAVYVIAESRLGQLPVKAKASGKKQAPSKGSNIEAVQDGLDKESYELLSKIPGVSLVGLKYTPLFDFFIELQGTAFRVIADNYVTDDSGTGVVHCAPAFGEDDHRVCLAAGIFETAGLVVAVDDDGCFIEKISDFKGRYVKEADKDIINAVKDKGRLISKGSIEHSYPFCWRSGTPLIYRAVPSWFVKVEKIKDQLLECNKETYWVPDYVKEKRFHNWLEGARDWAVSRSRFWGTPLPLWISQDGEEIVVMDSIEKLEKLSGVKVTDLHRHYVDDITIPSKRGPEFGVLKRVDDVFDCWFESGSMPYAYIHYPFENRELFEKNFPGNFVAEGLDQTRGWFYTLMVLSTALFGKPAFKNLICNGLVLAEDGKKMSKSKKNYPPPKDLIDEFGADALRLYLVNSPVVRAESLRFKRTGVFAVVKDVFLPWYNAYRFFVQNAKRLEVEGLASFSPMEQVVLLKSSNVLDHWINSATESLVSFVHQEMDAYRLYTVVPYLVKYIDYLTNIYVRLNRKRFKGRTGXEEDCRISLSTLYHVLVTTCVVMAPFTPFFTEVLYQNLRKVSSNSEESIHFCKFPSTTXAREMVVVHPDNDFLEDITGKLKEYVMEEINVKNVTPCNDPLMYASLRAEPNFSVLGKRLGKDMGKVSNVVKKMTQEQILAFEKSGEVSFFGHCLKLDDIKVVRQFKRPENVSEKEIDAAGDGDVLVILDLRTDQSLFEAGVARXAGVAGEVVNRIQELRKTAQLEPADPVDVYYESVGSDKNTLEEILKSQDQYIRDALGSPIVPKEMAPTDVVVLGEESHNVHDMSFVICIARSTPIISPDLLSHASGNSNHVEALRVYLLSKSLSRLKNQFQSGNGVITVDCIEGYPLIRLQLGKHVFLSAGDFYLASRS

SEQ ID NO: 244611 - protein, 90 aa, Zea mays
  unsure (1)..(90): unsure at all Xaa locations
  Clone ID: MRT4577_154670C.1.pep
RKKGAIEIEWGGAPTWKRKGFSSQNXYKVLNGLTCAKKGEVFCFCLFINFFHSFSCVEGHIFFLPVSIFYYFGMGPHKTFCLLGGGAALN

SEQ ID NO: 244612 - protein, 72 aa, Zea mays
  Clone ID: MRT4577_154671C.1.pep
LFPLPSWWFVCLLKSLYRWASLACPFRRCWGHLTRLRGPSLFSSAQDFARSSQPGVCRRAPTMRAPPLGCGW

SEQ ID NO: 244613 - protein, 78 aa, Zea mays
  Clone ID: MRT4577_154672C.1.pep
RAPKLTRARRRRRRTSNVAPNNKPKAAPIQRSRRTSPTATQVNRLAAQTPTARWTREKEGPTERPSTQEPTPHADGDT

SEQ ID NO: 244614 - protein, 148 aa, Zea mays
  Clone ID: MRT4577_154673C.1.pep
KRDQGRAKRAFPPPLKDQQRGPSFANSPTKNSPGPKQQQGPQTPRGGPFQATPKKPRDTHGGKKTKRVGQETTTSDLWRPTQVMGPHGPKTPGFEGGGEKGGLKSGARLGEPKNPRFPPGERRAQQCWQRGEPISPPFFFLGKHGPRG

SEQ ID NO: 244615 - protein, 64 aa, Zea mays
  unsure (1)..(64): unsure at all Xaa locations
  Clone ID: MRT4577_154674C.1.pep
LVARAMDVRCLXXLXSXXTTSSSLSFLXRSFCCWPSSSXVASFCALLACPLRCSAAPLSPPCLS

SEQ ID NO: 244616 - protein, 252 aa, Zea mays
  unsure (1)..(252): unsure at all Xaa locations
  Clone ID: MRT4577_154675C.1.pep
CRYAEGPAGRKIVFSPSCWCCLLVAECFGAAVEVAPRRRHWRWWQSWIDYLIQDLTGATSNGSHHHEFGSKTPRRPGAIDNTDLIDDVPLEVSNMEIXDDYILLPQQVWEKLHGWYGGGPTLPRKAINTGFSQTDLAIEVYPLRLQLILMSRGERTFIRISKKGTVGQLHKMACKVFDLAPDEVCIWDYYGRTKHSLMDSLDKTLDDANIQMDQNILVEVTTDASGSLDGLVKRNNFFESDAPKSGLPDENF

SEQ ID NO: 244617 - protein, 85 aa, Zea mays
  Clone ID: MRT4577_154676C.1.pep
MRPLPAAAMATATLPLRLLPSKTLTLSTLPSLRRSLSVAVLEPRRWRLRAAAEEAPEAVEVEFVEPETEAEEKPAVPEPIEAQLA

SEQ ID NO: 244618 - protein, 78 aa, Zea mays
  Clone ID: MRT4577_154677C.1.pep
SALWFSTWCSQLPRPRRNRSPPTKSHTVLRTDTDPRPPRDRAPQPLTREGAGTETLTPRALQPEVCRPHVILRIYDSL

SEQ ID NO: 244619 - protein, 67 aa, Zea mays
  Clone ID: MRT4577_154678C.1.pep
FSEQGITPNETALFTLDTPYDKYSMHETCTTNIPLLTAYSPKLTQQKKCEGQYISDINLTMLVGQPS

SEQ ID NO: 244620 - protein, 142 aa, Zea mays
  Clone ID: MRT4577_154679C.1.pep
MKIPSRLPDHEEEEEYDDALFYEDIQAPKFVDLTAPDAGSSDDDPAWFCLRVGCDQSHEQVDPEALDRSFFMRVMAARSPNVRLHKAISRKNLSSMLKCPHSAPPKRPRARFARLSAETEAAGKATGGDQTKGRADLRHASV

SEQ ID NO: 244621 - protein, 60 aa, Zea mays
  Clone ID: MRT4577_15467C.1.pep
QTPRSKRDGAKKHRVLDHRVVRDMVGQAVGSPTCLRSGVLASFELKCGVLGFSKFSKRIK

SEQ ID NO: 244622 - protein, 210 aa, Zea mays
  Clone ID: MRT4577_154680C.1.pep
MSLIYAPVFGLLVFEMLLFVALIVPMPFKVKRGLFEFISSNPLVAKLQYGMKITFIFILILFVDSVNRVYRVQVELAAAKQQGGAAGAVAGSERMEVQARKFYSQRNMYLCGFTLFLSLILNRTYTMILDVLRPEEENKRLTVGDSKSEKGKSGLGDAGQLGEVSQLKEALRKKDRELEAMKKQSQGLSDEYNRLGDQVSPNDSVPKKDR

SEQ ID NO: 244623 - protein, 90 aa, Zea mays
  unsure (1)..(90): unsure at all Xaa locations
  Clone ID: MRT4577_154681C.1.pep
KSYLPTNLYLLNIITVFPVKKAIMLNSLFVTNPTFSLWEVXNIIFLXTXFYPNTYLXXLLHIXLHLFYLNQXXXISQKTKKKKKITSSST

SEQ ID NO: 244624 - protein, 98 aa, Zea mays
  Clone ID: MRT4577_154682C.1.pep
LDLTHPRPAASSVGAAANRDVHTARAPETGELGVEFLTAFCLAHGVLACRVLLVAILCCPGGCRHEGARHDHEKKDANASSCGVHRPHLVQCRLFLLL

SEQ ID NO: 244625 - protein, 179 aa, Zea mays
  unsure (1)..(179): unsure at all Xaa locations
  Clone ID: MRT4577_154683C.1.pep
MEASSWDALRKQARRLEAQLDDQMIAYRKLVSMKSDGSENDIESDIERSLKQLQQVNSQMQTWVSSGGSEVLSHTLTRHMEILQDLTQEFYRLRSSLRVKQQHASLLDLRDFDRAKFDVEEPSDSADQALLREQAAIGRSTGQMDNVISQAQATLGSLMTQRXTFGGITXKIKHVSSRL

SEQ ID NO: 244626 - protein, 246 aa, Zea mays
  unsure (1)..(246): unsure at all Xaa locations
  Clone ID: MRT4577_154684C.1.pep
GRKQARRLEAQLDVQMIAYRKLVSMKSDGSEDNIESDIERSLKQLQQVNSQMQTWVSSGGSEVLSHTLTRHMEMXQDLTQELYRLRSSLRAKQQHTSLLDLRDFDRAKFDVEEPSDSADQVLLREQAAIGRSTGQGEPSVELLLLSGILHVSLQNDECCQLYAXSYCMFNXQMDNVISQAQATLGSLMTQRSTFGGITTKISNVSSQLPTINHVLSSIRRKKSMDTIILSLVASVCTFLIFIYWLS

SEQ ID NO: 244627 - protein, 72 aa, Zea mays
  Clone ID: MRT4577_154685C.1.pep
GFCSGRTIGLLCGSPGFTAKDYCRAAAFVSSVVAEHNHRAVRRHGWMPGDQGAGREGRGRRVLKGKSSPARG

SEQ ID NO: 244628 - protein, 65 aa, Zea mays
  Clone ID: MRT4577_154686C.1.pep
LSLVSCSDVRLRSYMELCILVPGISSQHHGSGSPEQGQFGLASWKCSEESFAHQVKIRDPLKIGF

SEQ ID NO: 244629 - protein, 218 aa, Zea mays
  Clone ID: MRT4577_154687C.1.pep
MEASSWDAVRKQARRLEAQLDDQMIAYRKLVSMKSDGSEDNIESDIERSLKQLQQVNSQMQTWVSSGGSEVLSHTLTRHMEILQDLTQEFYRLRSSLRAKQQHTSLLDLRDFDRAKFDVEEPSDSADQVLLREQAAIGRSTGQMDNVISQAQATLGSLMTQRSTFGGITTKISNVSSQLPTINHVLSSIRRKKSMDTIILSLVASVCTFLIFIYWLSK

SEQ ID NO: 244630 - protein, 145 aa, Zea mays
  Clone ID: MRT4577_154688C.1.pep
MGKSNKRKREPTPPLEDFGDSEYSEEEFSSESEGSPAPVSPPASSDDSDDSQGIAAEVWTYIQAVERSGLKGSDESEYSSDEEDSSDSSEEGGGGDGGDEDDDGGDSDDGDDGGDDGSRGSKGGDGGSSRGSNGGGSKGSNKASG

SEQ ID NO: 244631 - protein, 145 aa, Zea mays
  Clone ID: MRT4577_154689C.1.pep
MGKSNKCKREPTPPSEDFGDSEYSEEEFSSESEGSPAPVSPSASSNDSNDSQGIAAKVWTYIRAVERSGLEGSDESEYSSDEEDSSDSSEEGGGGDGGDDDDDGGDGDDGDSSRGGDGGSKGSNGGGSRGGNSGGSSKGSNKASG

SEQ ID NO: 244632 - protein, 120 aa, Zea mays
  Clone ID: MRT4577_15468C.1.pep
GVLIQKWGRSSAASTAVSVVDAIRSLVTPTPEGDWFSTGVYTTGNPYGIAEDIVFSMPCRSKGDGDYELASDVLMDDFLWERIKKSEAELLAEKKCVAHLTGEGNAFCDLPEDTMLPGEV

SEQ ID NO: 244633 - protein, 68 aa, Zea mays
  unsure (1)..(68): unsure at all Xaa locations
  Clone ID: MRT4577_154690C.1.pep
GCNIHESPLVVHHSLNLSLVHCLKQTMRAQQLXQLMLPVINQVTLANLSAYFEKQQFVTFNQLSTLNP

SEQ ID NO: 244634 - protein, 183 aa, Zea mays
  Clone ID: MRT4577_154691C.1.pep
GRDRIRPLARGARVQRAWRQRPSLCRAWRWRPLPLDHVSGCEARDRRWLTASSIEERGIQGRDDDPVCVVHQQTGLDTARAVLRAPPSTSDEPSRVRSSTSASPAPTGRFVIRRSVRIAASSPLIILLPQVPSVASFPLIRPYHCPPFRIHEPTGFVLIVLDLDRDKEFSCPSDFLRLPLILC

SEQ ID NO: 244635 - protein, 143 aa, Zea mays
  unsure (1)..(143): unsure at all Xaa locations
  Clone ID: MRT4577_154692C.1.pep
SSGRPGRDKLFFFFFFFFFFFFFFFFFFGGKKTPPGGPEXKPRGGKQARXPQQGERGGPPPXGGPPPPQGGXPKNNPRGETTPGGPPPGXGNPTPRGGATRGPQLATKRGXSGKKMPPGKNCPPPTTPHKKPAGRKKEKGGGA

SEQ ID NO: 244636 - protein, 227 aa, Zea mays
  unsure (1)..(227): unsure at all Xaa locations
  Clone ID: MRT4577_154693C.1.pep
QLLSSRSMHIGLSLYADDAVXFLKPVASDINLALDILTLFGVASGLKTNVQKXSNVLPIRCNDDNLXLACVQELLPCSVLSFPCKYLGLPLXIKKLPRDQVQAIVDRVASLLPGWKAELMSRVGRSIHVQFVITSKLIYAATALDLPTWAIKAIDKLRRGFLWKGRKXARGGHCLLAXPKVTRPKNLCSLGLIDLRXMAXALRVCWLWLXKSDLSKPWTDYPIRLGK

SEQ ID NO: 244637 - protein, 36 aa, Zea mays
  Clone ID: MRT4577_154694C.1.pep
VDNTVQRHVGRPNQGITANVQTLCKNQKHRNTMINP

SEQ ID NO: 244638 - protein, 62 aa, Zea mays
  unsure (1)..(62): unsure at all Xaa locations
  Clone ID: MRT4577_154695C.1.pep
RRTAAWELVKWAARGKHQWAEQAEFCASADFLFLFLFIFFYSLFLFXNPHLNFKFVVNFHSD

SEQ ID NO: 244639 - protein, 77 aa, Zea mays
  Clone ID: MRT4577_154696C.1.pep
FRKHWFYLHKESPNHFSGSKSGRSSFFNRGAPKMLVCCSPPHIQVARRIWYSTYSVKSLFGKTTRLGRTPARPVFGR

SEQ ID NO: 244640 - protein, 56 aa, Zea mays
  Clone ID: MRT4577_154697C.1.pep
MLNRGGPTAYHLAFMTLIFTTERIQQEVTLGDQLFYYSIETLYLEFLAYQATAKCF

SEQ ID NO: 244641 - protein, 77 aa, Zea mays
  unsure (1)..(77): unsure at all Xaa locations
  Clone ID: MRT4577_154698C.1.pep
KNYLETNLTWANFILSSIXLLKLSPHKILSKQYTHQLTLSTANIFLLFPYKEIISLHFIEFLLTIFLKXFPNILTTT

SEQ ID NO: 244642 - protein, 50 aa, Zea mays
  Clone ID: MRT4577_154699C.1.pep
VLKKKKKKKKKKKKKKKKKKKKKKKKKKNKKKKEKKKKKLKKKINLNSIK

SEQ ID NO: 244643 - protein, 89 aa, Zea mays
  Clone ID: MRT4577_15469C.1.pep
DPENHPQLSSIAMELAMNVNGLLLVANTLADLLRKNQTVRFWFHMLKRFRQSVERNFSRFGEHPKQLVERDHPTDITMLVQPSSAVLRL

SEQ ID NO: 244644 - protein, 112 aa, Zea mays
  unsure (1)..(112): unsure at all Xaa locations
  Clone ID: MRT4577_1546C.1.pep
SSVRVIYPPGEGYMIHAXRSNENLVEAFKNMHVQEEMVPDDNEEYVHEVIEDGGVEESQEDAVEVDAEDDGVEESQDEAVEVEAEDSTDGAVLVNGTNSEEQWGMKNEEPSA

SEQ ID NO: 244645 - protein, 218 aa, Zea mays
  unsure (1)..(218): unsure at all Xaa locations
  Clone ID: MRT4577_154700C.1.pep
GATGWXFFGNLMDAGMCSICGEESFGTGSDHIREKDGIWAVLAWLSIIAFKNKDNLGGDKLVTVEDIVRQHWATYGRHYYTRYDYENVDAGAAKELMANLVSMQSSLSDVNKLIKEIRSDVSEVVAADEFEYKDPVDGSVSKHQGIRYLFGDGSRLVFRLSGTGSVGATIRVYIEQYEKDSSKTGRDSQEALAPLVDVALKLSKMQEYTGRSAPTVIT

SEQ ID NO: 244646 - protein, 53 aa, Zea mays
  Clone ID: MRT4577_154701C.1.pep
GLTSLGCVTKPYKDKQEWERPLTKCVSLTLTLDAYGNVIMAIPSFLMKDNPPS

SEQ ID NO: 244647 - protein, 224 aa, Zea mays
  Clone ID: MRT4577_154702C.1.pep
SYLRSEASFIRTSPGRICHRLASLPSSRESFGTGSDHIREKDGIWAVLAWLSIIAFKNKDNLGGDKLVTVEDIVRQHWATYGRHYYTRYDYENVDAGAAKELMANLVSMQSSLSDVNKLIKEIRSDVSEVVAADEFEYKDPVDGSVSKHQGIRYLFGDGSRLVFRLSGTGSVGATIRVYIEQYEKDSSKTGRDSQEALAPLVDVALKLSKMQEYTGRSAPTVIT

SEQ ID NO: 244648 - protein, 91 aa, Zea mays
  Clone ID: MRT4577_154703C.1.pep
MEHGLLSESDEDSDGELHPLIVRDQNCGLQAKTNDNLEAFPEDNLACDAIIDNRTIMKRPEFVRIISKLMVGIFLSIWVRRSLRIHIKNLR

SEQ ID NO: 244649 - protein, 184 aa, Zea mays
  unsure (1)..(184): unsure at all Xaa locations
  Clone ID: MRT4577_154704C.1.pep
WVERPLSNPGPGFHHGPNPPASTMNLQIPMPPGPYSNSMPHGPFSPQSQQVPYSPHRMYISNPAFPNPGLPPHLQPHNFGTPQSPLRQTYRNPEARPKKYDDEFGAPASDKEWKRRRSKSRGRYAADAKRKSSNKSKAAGVLMGVWXGWTALLDGFEWXCRTCWRMIYDIIRVMIYELIPMRHD

SEQ ID NO: 244650 - protein, 68 aa, Zea mays
  Clone ID: MRT4577_154705C.1.pep
GHNMRDSGDEAKHNEHLHYLNNRYPLTLALRVDMLTTFTNSCSFSRGQNIDETHFGSAAFFESWGQGF

SEQ ID NO: 244651 - protein, 168 aa, Zea mays
  Clone ID: MRT4577_154706C.1.pep
MSGKPAFKVADISLADWGRKEIMLAENEMPGLMSLRRKYKESLPLKGARIAGCLHMTVQTAVLIETLVALGAEVQWSSCNIFSTQDHAAAAIAKTGVPVYAWKGETDDEYIWCIEQTLVFKDGQPLNMILDDGGDLTNLVHEKYPQYLANIKGISEETTTGVHNLYKM

SEQ ID NO: 244652 - protein, 297 aa, Zea mays
  unsure (1)..(297): unsure at all Xaa locations
  Clone ID: MRT4577_154707C.1.pep
MGAGASGLAGAEPGGKVARGAGLGDLPELCTAEVLLRLGAPDICRLARLNLAFRGAAGADFVWEAKLPGNYARLLRFVXGRGGGXSGRDWSAVGRKDVFARLARPVPFDGGKREFWLEKNEGGICMALSSKALVITGIDDRRYWINMPTSESRFHSTAYLQQIWWFEVVGEVDFCFPAGTAYSLYFRLHLGKSSTRFGRRVCSSEQVHGWDKKPVRFQLSTSDGQHAVSQCYLDEPGRWILYHVGDFDAPPSSGQPTRLKFSLAQIDCTHTKGGLCVDSVLVYPKGFQPERVVRARK

SEQ ID NO: 244653 - protein, 90 aa, Zea mays
  Clone ID: MRT4577_154708C.1.pep
LPPSDRCDREANHLERDEGDGERRQGTHATGEFFRRRDERRRHPMTGNQLCHDTTGLGISIAACAIYLAGEAAYNTPLPPLRRLPRVYRR

SEQ ID NO: 244654 - protein, 202 aa, Zea mays
  unsure (1)..(202): unsure at all Xaa locations
  Clone ID: MRT4577_154709C.1.pep
KILQCEDIYREGQHIGCSFALTNLKDSSFEQHSVQIVVKDNAXXKIRPSFNIVPLTSHVKPDPPHIKRLFFQNGNLYVQWKNPQNFYSRCLSYQVEVNNSQTETNDIFYVEEAKCQNSEFEGNLEGTICFMVPGVLPDTLNTVRIRVRTNKLCYEDDKLWSNWSQAMSIGENTDPTFYITMLLATPVIVAGAIIVLLLYLKS

SEQ ID NO: 244655 - protein, 72 aa, Zea mays
  Clone ID: MRT4577_15470C.1.pep
KEMRDYMSIPVAKQQLSNSRKSQLHILLSRKNSNFPTTHNNQIRIGHCDAALEPVCSSKRKPTIQLPNNELP

SEQ ID NO: 244656 - protein, 112 aa, Zea mays
  Clone ID: MRT4577_154710C.1.pep
PTPNQRYGSARPFVWHDKRPHKPQLLINHDENTTILELHSHHEFYFSFFLSFCLGCWGVTSIATSMVAKQPQPLLSQASSHYHTSLMEHIIYGVLVPKKVHFYMTTWPIFKV

SEQ ID NO: 244657 - protein, 61 aa, Zea mays
  Clone ID: MRT4577_154711C.1.pep
TRAGPLWILLFLLNIMMRNSRARSRKKVTVFHDHEFDILLLCHDHKVCLSISLHDLLLMNL

SEQ ID NO: 244658 - protein, 78 aa, Zea mays
  unsure (1)..(78): unsure at all Xaa locations
  Clone ID: MRT4577_154712C.1.pep
MPKLDQSLVLCLKADSAAASVARTFFDCEQLLLHNGDNHYLLTTEHADTLPYSINLSTHXVTGRFFNGLNMHDIVSEH

SEQ ID NO: 244659 - protein, 123 aa, Zea mays
  Clone ID: MRT4577_154713C.1.pep
PPLPPLRFPTGRRWPTTSWSSDTGRTRSWRWGRTTTTSATATTSTWAATRTTTSSSWASRTSTTTSSFWANHMSVTTSSCWASRTSTTTSSSSATTTMMTTSSSSGTTITTTMTSSTCRRATS

SEQ ID NO: 244660 - protein, 57 aa, Zea mays
  Clone ID: MRT4577_154714C.1.pep
AAGNTDDKDKLSAGYLSGTDNNQSILVSSQAPAFPKALHASVLISFGSSLMVVLISH

SEQ ID NO: 244661 - protein, 72 aa, Zea mays
  Clone ID: MRT4577_154715C.1.pep
KIQIRNNKITPNVKGLSSRGLVLGQVNPVFEPPSCCSSRTNCLSRRGVVSGPKEAPGGASVTTTMGPLRRIR

SEQ ID NO: 244662 - protein, 79 aa, Zea mays
  Clone ID: MRT4577_154716C.1.pep
WKWIMLLVGFKSFEQRKSFLKFGKRRPRRFSAGTGLGGQEKKGGFIGQGGFKVIWFGWFFFGNLFWQGFFIWVLEVAID

SEQ ID NO: 244663 - protein, 164 aa, Zea mays
  Clone ID: MRT4577_154717C.1.pep
MVGAEGWRRLRRCSSYRGCSSSTNGGGGRGVGGCVVLAQKATAYARVTRVGDDGMDETLLSNLPYNSDYGYSSGGNSCSTSERLARPAVQVSRAGQAPAKACGPNLAARNWLGFTGAIPSFLTVYVCKINSKYLSGLSSNKKMVGKETTGQIALDDITPMDMAL

SEQ ID NO: 244664 - protein, 181 aa, Zea mays
  unsure (1)..(181): unsure at all Xaa locations
  Clone ID: MRT4577_154718C.1.pep
PAGLVAIATAHALXALFVGVSVAAXLSGGNLXPAVTFGPAVGGNLTLLTGXLFYWVAQLXLGAPVACLLLGFVTHGKPIPTQXVAAGISELEGVVFEVVITFAPIAIGFIVGANISPAGPFSGGSMNPARSFGPRXVPAGNFAGNWVYWVGPLVGGGLAGLVYGDVFIGGSYQQVADQDYA

SEQ ID NO: 244665 - protein, 78 aa, Zea mays
  Clone ID: MRT4577_154719C.1.pep
GRKTGFMSQKKENSVLRRSKTNNQFVLGPGFLGPPLVKPVAKKNWGPPKKNKSGKGLGVTPIFGRGAMEPGFFRFENP

SEQ ID NO: 244666 - protein, 65 aa, Zea mays
  Clone ID: MRT4577_15471C.1.pep
SQVITCFVAVLKRSGKPGRVWPPPTNTRCSYCNGQANWHLVVPDHFYDKGRLVRLTAQKVDDESS

SEQ ID NO: 244667 - protein, 66 aa, Zea mays
  unsure (1)..(66): unsure at all Xaa locations
  Clone ID: MRT4577_154724C.1.pep
KFAFLYYTSPTLKRPISMGEGPTFLQYNPQHFSHSIXTLSPFSIHIPIPLLKTYFKNKPNFINSTY

SEQ ID NO: 244668 - protein, 155 aa, Zea mays
  unsure (1)..(155): unsure at all Xaa locations
  Clone ID: MRT4577_154725C.1.pep
CWGSGTAIPNAPCWDEGVPTKCSTTXIKDIFFGXKKEDIFGLLKTYTGALPLAHLNSYNMNIDKLKANGIISVICVYLNDPYVLDXWAKKLDAYDTXTIYGDFVGSFHISLDXEIDLSAALHFRRXSHRLSIFAGPGQIKSLNVPEAPDDFKASG

SEQ ID NO: 244669 - protein, 322 aa, Zea mays
  Clone ID: MRT4577_154727C.1.pep
SFNDTPSAIFWTDYVATRWYRAPELCGSFFSKYTPAIDIWSVGCIFAELLTGKPLFPGKNVVHQLDLMTDLLGTPSAESISKIRNEKARRYMNNMRKKPRVPFTKKFPGIDPMALHLLERLLAFDPKERPSAAEALADPYFNGLANNEREPIAQPISKLEFEFEKRKLAKDDVRELIYREILEYHPQMLQEYLQGADHNQMTFMYPSGVDRFRRQFAHLEEGTAKGEKHSPQLRQNVSLPRERVIGNKHGDGNTGDKLAHASVTDGISQPSLSERSFLKSESISASKCIGEKPKHVKDGESVLESVDETVDDLSKKIPQLKT

SEQ ID NO: 244670 - protein, 163 aa, Zea mays
  unsure (1)..(163): unsure at all Xaa locations
  Clone ID: MRT4577_154728C.1.pep
PRPSRPRRAPHATEPHKRRRPTQKANQPPGPPPAPARATAKAPGPTRKTAPTTXKGGGNAXKKXEGRPRAGGGGAGKRKKAAASGKPKRXPXAPXXXRXEXRXEXQAQHPSNKSXAAXSKAXGEKXRXXXEQEKQPXXDQXXAEKQGXEKTKAPXAKESPRPK

SEQ ID NO: 244671 - protein, 81 aa, Zea mays
  unsure (1)..(81): unsure at all Xaa locations
  Clone ID: MRT4577_15472C.1.pep
DSHTQHXPNNSSRRQDMLXADSGEGQPRPGCGLCIPHLLTTTGRSLSTATYNTRAEASNRHGVASLTSSVCHLCEESSGST

SEQ ID NO: 244672 - protein, 70 aa, Zea mays
  Clone ID: MRT4577_154730C.1.pep
MEGKKNRLACCRMLMFLLLPAQHQQVAGLSKVCLCYRNCYTDCMKLTARYPCNANCFKDCINGMLPPTPA

SEQ ID NO: 244673 - protein, 64 aa, Zea mays
  unsure (1)..(64): unsure at all Xaa locations
  Clone ID: MRT4577_154731C.1.pep
TXSLPDVTELRQGLQLPCNTEQVKNKMRECHSYLTNDESCGVRPANHQSNHSNASTSEVLSTGI

SEQ ID NO: 244674 - protein, 152 aa, Zea mays
  unsure (1)..(152): unsure at all Xaa locations
  Clone ID: MRT4577_154732C.1.pep
PFDNECPHSCPTMNYPTSSLDSHLIESTSGFCEPXMITHLSDNAPDDKGRKNFMIYFMMADVSAAVSKTAAAPIERANMLIQNQDDMINPGXLSYTYKDIVDCFRRTIKDEALSSLWRRNTANAIRYFPTHALNFAFKDYFKRLFNFKKDRD

SEQ ID NO: 244675 - protein, 82 aa, Zea mays
  Clone ID: MRT4577_154733C.1.pep
LKNLVELIIEDRIAAYVVEYPYASIEWIVTHVIYRRDLLRTLLDRRISSWGDFDDGVPTFRRMYAGPVVRYLQMGQAHKAAQ

SEQ ID NO: 244676 - protein, 149 aa, Zea mays
  unsure (1)..(149): unsure at all Xaa locations
  Clone ID: MRT4577_154734C.1.pep
ENEFGPEPPSQGFSPIPPGPXGPPGRKKTHGGGPRGRNXTGQGGSLKTKGADPPPPHFKTKQPGKLGVCPQLNPPRRGPPGPPPMGGGERXPPPGRPPRPRGEAPGGGDPNSGETPPAPPQPFWVPPRAFWDPPPGPPRPPRPLGKPFL

SEQ ID NO: 244677 - protein, 37 aa, Zea mays
  Clone ID: MRT4577_154735C.1.pep
LEDLNYLVSRTYDETRALVEANKWDVSVHKDYLAMER

SEQ ID NO: 244678 - protein, 95 aa, Zea mays
  unsure (1)..(95): unsure at all Xaa locations
  Clone ID: MRT4577_154736C.1.pep
SLLWPCLXGLGIGGLFPMSLILSLDHLDNPRRAGGLTAFVQGIGYLIXGLSPLIAGMIRDQLGSFEWAWWSLMAXSRLMLLIVMRFNPTHYARHR

SEQ ID NO: 244679 - protein, 111 aa, Zea mays
  unsure (1)..(111): unsure at all Xaa locations
  Clone ID: MRT4577_154737C.1.pep
SVQKWRKQSPPGGFXREIIMCPPFIFKEKKGFSHXKKRAGVFPGDRFGGLSKPGKGGKNGRARDSQFGHGGRKRLKKQNPSXAPKDFKGFYPGGGPPTKKKKRFLTLLWIL

SEQ ID NO: 244680 - protein, 104 aa, Zea mays
  unsure (1)..(104): unsure at all Xaa locations
  Clone ID: MRT4577_154738C.1.pep
MSDKLPYKVADIGLAAWGRKALDIAENEMPGLMRMREMYSASKPLKGARIAGCLHMTVETAVLIETLVALGAEVRWSSCXXFSTQDRXAAGXAXAGLALFAWAG

SEQ ID NO: 244681 - protein, 65 aa, Zea mays
  Clone ID: MRT4577_154739C.1.pep
AHGMFSFWYKLSAAKEQDTSTPRLSNSKGSRRDDFTMIFAIILQDRQFSLHHSTRMIDQVATRCS

SEQ ID NO: 244682 - protein, 117 aa, Zea mays
  Clone ID: MRT4577_15473C.1.pep
YTTPGETATGPRHGGNGAVAAGAWRTPAGRRQQCDVLTCERTRHARQVVATPAYIRMARDSARHLHVGAASCHTSDGRWQRLASRHHGEEPHLLWLQQHPQRASGQRLLLRFRPLAD

SEQ ID NO: 244683 - protein, 66 aa, Zea mays
  Clone ID: MRT4577_154740C.1.pep
PNLQPNNLLRFYNVLNSKTLILTNLICFDYNPLNKSNIIKNNSISITPLQHTLILHILIHFTLYHY

SEQ ID NO: 244684 - protein, 52 aa, Zea mays
  Clone ID: MRT4577_154741C.1.pep
ASASQTSMRKCLAPSSRLSTTSVSVLGHRPCHGSRSRAVRRKSLSCNAYAYA

SEQ ID NO: 244685 - protein, 199 aa, Zea mays
  Clone ID: MRT4577_154742C.1.pep
MSYDYHHSWGRDGGPRSSGGGYGGGHGGSRGPGGGGGGGGGGRGGRGRHPGHLKGREIGLWYAKKQGQKNKEAERQERAVVHMDERREEQIVQLLHSVQAKNDKDSEAQISWFAPEDHGYGTEIPAENKPNSEKKLENQEKKLISQEKRTFRIRDKYIDRDSEYLLQENEPDVALDQQLLEDLRKKKSDLRYIEMQHFR

SEQ ID NO: 244686 - protein, 147 aa, Zea mays
  unsure (1)..(147): unsure at all Xaa locations
  Clone ID: MRT4577_154743C.1.pep
TSSVARRRIALTRAVRPRVLSIQSHIVSGYCGNKAATFPLQLLGFDVDVMNTVSFSNHTGYPSWTGEKATGEQLTKLFEGLEANGLVEYTHILTGYIGSAQNLTAVTEIISQLKAQSNPFFVLDPVMGDNGQLYVQPDVIPIYXELM

SEQ ID NO: 244687 - protein, 132 aa, Zea mays
  Clone ID: MRT4577_154744C.1.pep
MAKSAAAAILLAAALLGCLVSASLADQGTATYYTVYTPSACYGNQDEGTLIAAASDALWNGGAACGTMYTVTCVGGTNETPNPCNPGASVTVKIVDRCPSPGCQATLDLSQQAFAIIGNLGAGKIVIDYSQA

SEQ ID NO: 244688 - protein, 81 aa, Zea mays
  unsure (1)..(81): unsure at all Xaa locations
  Clone ID: MRT4577_154745C.1.pep
XCIFVXKYFVXXXYYXXXXXMXXXGPPFXPRXNIFARSXHXAAYXLNGLCLLCPKVELVEEEHILQVLXPMQNLVMGVAPX

SEQ ID NO: 244689 - protein, 95 aa, Zea mays
  Clone ID: MRT4577_154746C.1.pep
PTRPASLLATHLSSPPVRRDTTQRGAAAPQQPLEPAAMDRISTRFSAVDDLYFPSSFLGPSTAGTGAAPVPIAAAAHGGAPLSHLSRHAALHGTV

SEQ ID NO: 244690 - protein, 67 aa, Zea mays
  Clone ID: MRT4577_154747C.1.pep
ARNSAREEFWLASIFPTAPTASARILKNNGVYTTVLVSRTSGWLLRYTITVLTLRPRFTQANNRALH

SEQ ID NO: 244691 - protein, 63 aa, Zea mays
  Clone ID: MRT4577_154748C.1.pep
SVGICASFNRNCKLSFLVQPFQNTPARPGICELSLCGLLLEVWSLSIVKCAQYCCYVVTMHGL

SEQ ID NO: 244692 - protein, 257 aa, Zea mays
  unsure (1)..(257): unsure at all Xaa locations
  Clone ID: MRT4577_154749C.1.pep
MNPGHCSQHLHRRTFPRKSRCSREKGRHPPLLALQFAPWRQVQVQGRSSPAGSQPPASAMAEAGRRTLALVNLAAIMERADEALLPAVYREVGAALGATPVALGALTLYRSAVQAACYPLAAYAAVRYNRAHVVAVGAVLWAAATFLVAVSDTFAQVAIARCLNGIGLALVTPAIQSLVADCSDDNTRGAAFGWLQLTGNIGSIXLGGLFSLMLAPTTVMGIXPGWRVAFHIVAVISVVVXXVLVXLFAVDPHFLQG

SEQ ID NO: 244693 - protein, 79 aa, Zea mays
  unsure (1)..(79): unsure at all Xaa locations
  Clone ID: MRT4577_15474C.1.pep
GRRKSLAGXTMTASAHLSLGSPKPNDRVGIFYKRLDVFVTYRDEAVTVPVSLAPQLQSHRDFPVXPPVLSDETASVATY

SEQ ID NO: 244694 - protein, 48 aa, Zea mays
  unsure (1)..(48): unsure at all Xaa locations
  Clone ID: MRT4577_154750C.1.pep
FKVKMKELKSFSTPFIAKMYQGGGEDMGGAGGMXDXVPAGKGGPGPKV

SEQ ID NO: 244695 - protein, 157 aa, Zea mays
  unsure (1)..(157): unsure at all Xaa locations
  Clone ID: MRT4577_154751C.1.pep
MRALTGSLAALALLLGTAAFAPMAHAAGEAIHIERQTWSFGGFTGQYDPGQLQRGFQIYKDVCAGCHGLRRVRFRNLFEPGGPEFPEEAVKALANDWPNKITDGPDDQGKMFEREPKPFDPILGPFKNDNKARAAQNXALPPDLSLIAKARNVEYHG

SEQ ID NO: 244696 - protein, 113 aa, Zea mays
  Clone ID: MRT4577_154752C.1.pep
MDEARNQGAMGLCTSCCKGAGVLPRSSARAARRPWRSLLAAMEQRAGKVAAKGEQGRRYGEELLRLLFWGGVPSTGAGGRSGAGRRGRLHARHGRKWALALVLPARRGTAGEK

SEQ ID NO: 244697 - protein, 420 aa, Zea mays
  Clone ID: MRT4577_154753C.1.pep
MGDWIIGALINIVGSVAINFGTNLLKLGHDQREKLSSINNSEGNEKFVPKSVMHFQTWRIGILFFAAGNCLNFMSFAYAAQSLLAALGSIQFVSNIAFAYFVLNKTISVKVMVATTFIVFGNIFLVSFGNHQSPVYTPEQLIAKYSNLVFVLYCMSLVFVVAFNHYLYRSGETIISNSSKDAGTYWRTMLPFSYAIVSGAVGSCSVLFAKSLSNMLRLTMSSRYEFHSWFTYSIVLLFLCTAGFWMARLNEGLSLFDAILIVPMFQIAWTFFSICTGFVYFQEYQVFDTLRIIMFVLGMTFVFVGISLLAPDDSKADTKDGSSTADDSIIDIDRNGKMPMEETDTDDSISFVTSVKVNAKRVLSKAKSACSMSLGLGESTISASSVLAMPMVSSRTTGFRGIGNDRPKYVPLRTTDWSNL

SEQ ID NO: 244698 - protein, 64 aa, Zea mays
  Clone ID: MRT4577_154754C.1.pep
LRVRMDISWATDSLAEAINTIENSYGSRPACEDLMLKAILPKCSQDTIASLLPPYTVTSGVVGM

SEQ ID NO: 244699 - protein, 113 aa, Zea mays
  Clone ID: MRT4577_154755C.1.pep
VWTVFEGYNGELYTRVIASYDHNKQLRLWKQQKTSLPSARQHKKTKTFPVYLYITISYRLLQSVVLKGTYFGRSFSIPLKPVVLDETIGMASTDEALMVLSPRPRDMEHADYK

SEQ ID NO: 244700 - protein, 83 aa, Zea mays
  Clone ID: MRT4577_154756C.1.pep
MPMEETDTDDSISFVTSVKVNAKRVLSKAKSACSMSLGLGESTISASSVLAMPMVSSRTTGFRGIGNDRPKYVPLRTTDWSNL

SEQ ID NO: 244701 - protein, 65 aa, Zea mays
  unsure (1)..(65): unsure at all Xaa locations
  Clone ID: MRT4577_154757C.1.pep
PPVRWRGKASDEDIHTTDASIPIQVPISGPITRARARQLNHQVITLLSSCPSYLXPWRPVHSCFA

SEQ ID NO: 244702 - protein, 458 aa, Zea mays
  unsure (1)..(458): unsure at all Xaa locations
  Clone ID: MRT4577_154758C.1.pep
CHPIIFSFLFLAQCFGLNIDYLLAILQSLLAALGSIQFVSNIAFAYFVLNKTISVKXYDSHFLVAGMKITITTWNHVTMKLLLFFXVMVATTFIVFGNIFLVSFGNHQSPVYTPEQLIAKYSNLVFVLYCMSLVFVVAFNHYLYRSGETIISNSSKNAGTYWRTMLPFSYAVVSGAIGSCSVLFAKSLXYILFCKHPCIXMLILSDLFGADCHVLSPLLPVPCXSNMMRLTMNSRYEFHSWFTYSIVLLFLCTAGFWMGRLNEGLSLFDAILIVPMFQIAWTFFCFCTGFVYFQEYQVFDTLRIIMVVLGMTFVFVGISLLAPDDTKADTKDGSSTAEESIIDMDRNGKMQMEDTDTDDSNSFVTSVKAKAKRVLLKAKVIGFLSGSDSTIDLSQICLSLILXLQSACSMSLGLGEDTISASSVLAMPMVSSRTTGFRGIEDDRSKYVPLRTTDWSNL

SEQ ID NO: 244703 - protein, 138 aa, Zea mays
  Clone ID: MRT4577_154759C.1.pep
LLDEAMAILSILSSHPEGKAAIGAAEPVPVLVEMIGSGSPRNRENAAAVMLHLSVQSVHLARAQECGIMVPLRDLALNGTERGRRKAVQLLERMSRFLVRQQEGISSHEQMLDELERQLDAFGPGVTEADILEQSGLL

SEQ ID NO: 244704 - protein, 42 aa, Zea mays
  Clone ID: MRT4577_15475C.1.pep
ACLSADRSTAELCGTMTPAAPIVLYGGHDGVKKMRRCDMFPA

SEQ ID NO: 244705 - protein, 65 aa, Zea mays
  unsure (1)..(65): unsure at all Xaa locations
  Clone ID: MRT4577_154760C.1.pep
VWHIREASSPSNPAMVRRTEAXRKKCEGIKTLQLLGCSYCKALTLNLPHKLFQFLTLHNRWVSNQ

SEQ ID NO: 244706 - protein, 137 aa, Zea mays
  Clone ID: MRT4577_154761C.1.pep
LFFFFFFFFFWGFFFFLFGGFSGENKNPLGNPPLPKKTKQGQSEYKPTPTIEGGKLFYRFFQKKKNHQGPKKETNGKGPKPRATKNTGRPPPLFIYDKITPRHARDPPTNKYGWKNKWIAPGQTHGKTSKGTRSPKS

SEQ ID NO: 244707 - protein, 77 aa, Zea mays
  Clone ID: MRT4577_154762C.1.pep
YQECLSISTELSISTHITNTRNAKAFALLSYEGIAKRIKRITALTAGCATQAMELASSIDSHINKTSQLEGTLIEKK

SEQ ID NO: 244708 - protein, 124 aa, Zea mays
  Clone ID: MRT4577_154763C.1.pep
LPFTMLRLSGLEFCISNETLIILHTTNISVCNFILQLARLTCTCLKKGLVESRIQFVIVVGCHYSKTQIHWGYLAALLDHISFSFTVCAWFGPTPTVIYRAEKLAMITEQLCVLPTLFSAYNMH

SEQ ID NO: 244709 - protein, 414 aa, Zea mays
  Clone ID: MRT4577_154764C.1.pep
RVRCPISLELMKDPVIVATGQTYERAFIEKWLASGHQTCPNTQQRMPNTTLTPNYVLRSLIAQWCEANGIDPPKRSTQPDKPTSSCSSSERANIDALLSKLCSADPEEQRSAAAELRLLAKRNANNRICIAEAGAIPLLLSLLSSSDLQTQEHAVTALLNLSIHEDNKASIILSGAVPGIVHVLKNGSMEARENAAATLFSLSVVDEYKVTIGGTGAIPALVVLLSEGRQRGKKDAAAALFNLCIYQGNKGRAIRAGLVPLVMGLVTNPTGALLDEAMAILSILSSHPEGKAAIGAAEPVPVLVEMIAGGSPRNRENAAAVMLHLSASVRQSAHLARAQECGIMAPLRELALNGTGRGKRKAVQLLERMSRFLVQQQEDAVDPRVQELEEIERQLAAFGPGVTEADVLQQLGAL

SEQ ID NO: 244710 - protein, 83 aa, Zea mays
  Clone ID: MRT4577_154765C.1.pep
CVLISLATCCSSHPHPCLQRSVSLSLSLPLFFNGGGLLPCCPRILLLLLYAPPPSNNLLFMSICGAIIRLDTGLGTGTVHLSG

SEQ ID NO: 244711 - protein, 97 aa, Zea mays
  unsure (1)..(97): unsure at all Xaa locations
  Clone ID: MRT4577_154766C.1.pep
NLAQGRPPFSNRKGNNFGTPFRSGVFFXFNPNQEKAAKKSLEKHQKFFNRKIVPQIVPTKRFFKTKKAPPPSLEKGGPFGFGQFSTKGCKNPPPCFG

SEQ ID NO: 244712 - protein, 108 aa, Zea mays
  Clone ID: MRT4577_154767C.1.pep
RVASPRSHPVSPSDPPVSISPSFQIWKFPLRIRSTRPVPLSSSRCHDTSRFRKGLFMMASPVSCMLFSCLDDAEGRVGVRVRSVCVDRSCLCCCLGVVCGSDIHSWKC

SEQ ID NO: 244713 - protein, 93 aa, Zea mays
  Clone ID: MRT4577_154768C.1.pep
RPGRDHESSSTLGLRSIYSTLYTITVREQCDYRQSCVLLDSAVPPAATPQLLRRAWHGINDYDIIDDDLVDINGDSVAAPEGSAALDTAVMTA

SEQ ID NO: 244714 - protein, 536 aa, Zea mays
  unsure (1)..(536): unsure at all Xaa locations
  Clone ID: MRT4577_154769C.1.pep
QAPPTVDRAHPLDYTAAASNGVRLCYSRSTSSPPPAAGGGGGGVXFLAVAAPPGALLTSVPGFGNKQQLPSKHYAGYVTVDERHGRRLFYYLVESERDPARDPVVLWLNGGPGCSSFDGFVYEHGPFSFESSGGTAGSLPKLHLNPYSWSKVSSVIYLDSPAGVGLSYSNNVSDYETGDFKTAADSHTFLLKWFQLYPEFLANPFYIAGESYAGVYVPTLSSEVVKGIHKGVKPVINFKGYMVGNGVCDTVFDGNALVPFAHGMALISESIYKEASTACQGNYWNSSSAKCDEALSKVETEIDGLNIYDILEPCYHAPADTKQAAVTPQAQSTSELPQSFKDLGVTSNKPLPVRTRMHGRAWPLRAPVRDGRVPSWQELAADVASTSSGVPCMSDEVATAWLNNNSVRSAIHAEPVSSIGPWELCTDKLDFDHDAGSMIIYHKNLTSQGYRAFIYSGDHDMCVPYTGTEAWTASLGYAVVDPWRQWIVDEQVAGYTQGYEKGLTFATIKGAGHTVPEYKPQEALAFYSRWLAGAKL

SEQ ID NO: 244715 - protein, 59 aa, Zea mays
  Clone ID: MRT4577_15476C.1.pep
ARLGINRSRLLERKEISRPLRVNTSGKSDGPCQMLCPGGLLPFMSSLLALASCVGVEEG

SEQ ID NO: 244716 - protein, 74 aa, Zea mays
  unsure (1)..(74): unsure at all Xaa locations
  Clone ID: MRT4577_154770C.1.pep
YFGQKKKKKKKKKKKKRRREKKKKKKKHKKKKKNXKRKPKKKKKATKNIQLTKLGKRAGVFKKLKCFAPGWQGS

SEQ ID NO: 244717 - protein, 542 aa, Zea mays
  unsure (1)..(542): unsure at all Xaa locations
  Clone ID: MRT4577_154771C.1.pep
LASSADDGTSIELALPIHYTTAAASNGVRLCYRRSTSSPPLAAGGGGGGXSFLAVAAPPGALVTSVPGFGNKQQLPSKHYAGYVTVDERHGRRLFYYLVESERDPARDPVVLWLNGGPGCSSFDGFVYEHGPFSFEPSGGSAGSLPKLHLNPYSWSKVSSVIYLDSPAGVGLSYSNNVSDYETGDFKTAADSHTFLLKWFQLYPEFLANPFYIAGESYAGVYVPTLSSEVVKGIHKGVKPVINFKGYMVGNGVCDTVFDGNALVPFAHGMALISESIYKEASTACQGNYWNSSSAKCDEALSKVETEIDGLNIYDILEPCYHAPADTKQAAVTPQAQSTSELPQSFKDLGVTSNKPLPVRTRMHGRAWPLRAPVRDGRVPSWQELAADVASTSSGVPCMSDEVATAWLNNNSVRSAIHAEPVSSIGPWELCTDKLDFDHDAGSMIIYHKNLTSQGYRAFIYSGDHDMCVPYTGTEAWTASLGYAVVDPWRQWIVDEQVAGYTQGYEKGLTFATIKGAGHTVPEYKPQEALAFYSRWLAGAKL

SEQ ID NO: 244718 - protein, 63 aa, Zea mays
  Clone ID: MRT4577_154772C.1.pep
PEYWGRPPFFFFFLTNMICLYQGGKCPPFSFTTGFNSNMIPPFSQNVSKERSPLDTSPIDCLP

SEQ ID NO: 244719 - protein, 87 aa, Zea mays
  unsure (1)..(87): unsure at all Xaa locations
  Clone ID: MRT4577_154773C.1.pep
FREIQCFPNVTNQKEEPPFXEKSKMIRVRHTNVGPAIALXVRXLNKDLGRPKALPPGIHQIHQFLERFYMSRIGIRMLIWHNVGLHD

SEQ ID NO: 244720 - protein, 106 aa, Zea mays
  Clone ID: MRT4577_154774C.1.pep
MDTSSPAALVNAQMLNMFVGRRVRTVVQVQHNEGGVLVGQSTDGHQLCVKSAMDVPVSHFMEVYGIAENSQTIRAEVCTDFGPNFDPKVFDELCKLASGRFKHLFL

SEQ ID NO: 244721 - protein, 160 aa, Zea mays
  Clone ID: MRT4577_154775C.1.pep
MPLHWYLELEGGRGDDMFKKKQICRLQNPSHSRRRPPARQREKSASSVRRLKDEMDTSSPAALVNAQMLNMFVGRRVRTVVQVQHNEGGVLVGQSTDGHQLCVKSAMDVPVSHFMEVYGIAENSQTIRAEVCTDFGPNFDPKVFDELCKLASGRFKHLFL

SEQ ID NO: 244722 - protein, 155 aa, Zea mays
  unsure (1)..(155): unsure at all Xaa locations
  Clone ID: MRT4577_154776C.1.pep
GPLAPGVLLVGXGASGFPPLRLRAHPFWFFKTSWGETWGGTGSSQICGGSPVPPKWGVVSMVFPGSPVPPSKGLPLVPGDNRVSLFCGPLIPAGNPFVLFLYRGPPSCVNRPWGPCCRVICLACWACSPLFGCGPVFPPCFRFFFAPLFFFWPPL

SEQ ID NO: 244723 - protein, 146 aa, Zea mays
  unsure (1)..(146): unsure at all Xaa locations
  Clone ID: MRT4577_154777C.1.pep
GTSRPAGPVFPSVCCPSPLSPSSRACSFPATSSPSXGARPPLSXSPAPSARAWLAPARTEPFPPVHVPPCSRPXPXPCARAPYPASAPPLPXWPSRPSSLPLPCCPCFPKPRAPSXAASMAPSRAPLPWSLSSAFLSQPPPRQVAR

SEQ ID NO: 244724 - protein, 82 aa, Zea mays
  Clone ID: MRT4577_154778C.1.pep
TEYSRYYNQLSRRALTGKTTCIFVPDRAGDSHPSREGAENPLPILTGHSVLSSHDITQCRAATKALGDEGAGDAHSVSRDVF

SEQ ID NO: 244725 - protein, 73 aa, Zea mays
  Clone ID: MRT4577_154779C.1.pep
MSIGKLLDCISYWRHLKHSYTLGKPFTMICTVKKTTFFELHGKWCLQRGGGEVSHCIQSHRKTETACTGLRVL

SEQ ID NO: 244726 - protein, 50 aa, Zea mays
  Clone ID: MRT4577_15477C.1.pep
YIGMLEPRINTSLTTDKKRPCNQKHKKATTIDTNEYKPFGLGLTSLKLTE

SEQ ID NO: 244727 - protein, 160 aa, Zea mays
  unsure (1)..(160): unsure at all Xaa locations
  Clone ID: MRT4577_154780C.1.pep
PPHPLPGGAPDPRPNPFLSVLALQSKLPSSKLRGLASTLDHFTLARREGVSATSRDLDDKGSAGGGCPTGTETPLLCSKLTYNTPTPWSLQLPQDYNRAFLPMPLAYNPASHILLFLAQQYTTAXLTTDSPSAENTHIQQDIGGGTTPTQRLDYMKATIK

SEQ ID NO: 244728 - protein, 198 aa, Zea mays
  unsure (1)..(198): unsure at all Xaa locations
  Clone ID: MRT4577_154781C.1.pep
CGSLXSARXLFNKLSSRDLVLWNAIIACCGTHGCGHDALALFQELNETGIKPDHATFASLLSALSHSGLVEEGKFWFDRMIKEFGIEPAEKHYVCIVDLLARSGLVEEANDMLASMQTEPTIAIWVTLLSGCLNNKKLELGETIAKKILELRPEDIGVLALVSNLYAAAKKWDKVREIRKLMKDSGSKKVPGYSLIEV

SEQ ID NO: 244729 - protein, 104 aa, Zea mays
  Clone ID: MRT4577_154782C.1.pep
HHVRTCMDLSPLRQPPFFFFFFFFGPRVSSDCRGCVRATLWRVAESTVTVSDGRLLMKQKYTVAYRYGVELLATARITLTCIMRMNGLTAPMLPGSRQAHKSAQ

SEQ ID NO: 244730 - protein, 104 aa, Zea mays
  Clone ID: MRT4577_154783C.1.pep
FILQERRQFLGLPFRRTPGGRHIGLCFFSTKSDDYELHKSTTRHPWREVLLFLAERGWASSCRGEYAEQEEPPWAISPWEEVRAQLAAINGELETSCAAHIRKG

SEQ ID NO: 244731 - protein, 129 aa, Zea mays
  unsure (1)..(129): unsure at all Xaa locations
  Clone ID: MRT4577_154784C.1.pep
DLPVLKSFRFLPQTIFPNMGVDIYKXVLNLNGANDSVVADFHRASKDGALADENMRGIRFEVXDVDLHADAIHRGGGQVIPTAKTVIYAFHLTVNPMLLYPVYLVXIHAPENALGGIYCVLNHKKGHVF

SEQ ID NO: 244732 - protein, 110 aa, Zea mays
  Clone ID: MRT4577_154785C.1.pep
ILGFPPHISHISTHILTINHKPHISIKEISSIRQRDLTDDYELHKSTTRHPWREVLLFLAERGWASSCRGEYAEQEEPPWAISPWEEVRAQLAAINGELETSCAAHIRKG

SEQ ID NO: 244733 - protein, 53 aa, Zea mays
  unsure (1)..(53): unsure at all Xaa locations
  Clone ID: MRT4577_154786C.1.pep
SGRRQCCTCLAAPCRGRASALHRRWQLSEPVTSXXRCPSSCCSDXRSSIRTAA

SEQ ID NO: 244734 - protein, 92 aa, Zea mays
  Clone ID: MRT4577_154787C.1.pep
IPGRFAIAIASPRRRADHTKHHQPSRSFLCCRAIDNAPELGADSRARSGRIRTYFSCLCAQVSMDYLHLDVMLLIGVLTRTRIEFIAMDLVS

SEQ ID NO: 244735 - protein, 37 aa, Zea mays
  Clone ID: MRT4577_154788C.1.pep
RAQKMIFVGYERGTKAFRAYDPITKCVTITQDVVFDE

SEQ ID NO: 244736 - protein, 46 aa, Zea mays
  Clone ID: MRT4577_154789C.1.pep
SHTLTQTIPFESLVCVLATSLVALQQALIMSHEKHLLFFNHHKLRL

SEQ ID NO: 244737 - protein, 129 aa, Zea mays
  Clone ID: MRT4577_15478C.1.pep
IVFSLYMCYRKVVDNMIILLVLKFDNHKPDRLGVVLFTSPAPEFVKFLNRFQKLQWLLKLMLKLVIGGHKKVVDNFIILLVLKIDRHRSDGLGVRIFTNSVTESVQILYRFQKLHCLPNLMLQSVHGSL

SEQ ID NO: 244738 - protein, 78 aa, Zea mays
  Clone ID: MRT4577_154790C.1.pep
MEEEPLDMDQSSDTIDNGKAKIQHREGIPPDQQRLILAGKQLEDGRTLPDYNIQKESTLHLVLRPPWWSVSHGSFKLL

SEQ ID NO: 244739 - protein, 238 aa, Zea mays
  unsure (1)..(238): unsure at all Xaa locations
  Clone ID: MRT4577_154791C.1.pep
MASSPPSSASLRQRPAAAAAAAATPDQQHEPPRLEDGLLPNQGGSPATSALSQALSSTANLANLLPTGTLLAFNLLAPTFTNHGACDATTSLLTRGLLALLALASALACFTDSLRSPHDGRVYYGVATRTGLWLIDYPPGAPPLPQGATGRYRLAFIDFVHAALSAAVFGVVAARDRDVVACLYGPTPDRATQXLLDVLPLGVGVLCSLLFVAFPTTRHGIGYPVVANAVAAATATSS

SEQ ID NO: 244740 - protein, 129 aa, Zea mays
  unsure (1)..(129): unsure at all Xaa locations
  Clone ID: MRT4577_154792C.1.pep
VKRISDLQASKESPARAVASDKGTPVPSSSSQEKDPVAKTILNKVKEKSDDEXRERERSRGRERDARGRDSDRDSRGRESDRERDRRRCSRERSSGHSDKEKSRRHSSRDRADYYNSHSSREKDRHRHH

SEQ ID NO: 244741 - protein, 100 aa, Zea mays
  unsure (1)..(100): unsure at all Xaa locations
  Clone ID: MRT4577_154793C.1.pep
RALTRALXRSYALRVGTTYSRTSHITPPDGVPFLPRLGNQTIQTTSIPNFNCAWTPIPNPSHQTGRYRPAIAPYLALMLLLILGLYNVHYHYDTLFIHKH

SEQ ID NO: 244742 - protein, 43 aa, Zea mays
  unsure (1)..(43): unsure at all Xaa locations
  Clone ID: MRT4577_154794C.1.pep
HSLYPPPPNGTFLADFFQEENMLLKNVYYFXIKDAGFFHADWD

SEQ ID NO: 244743 - protein, 416 aa, Zea mays
  Clone ID: MRT4577_154795C.1.pep
MIYTAIDTFYLTDEQLRDSPSRKDGIDEATETALRVYGCDLIQESGILLRLPQAVMATAQVLFHRFYCKKSFVRFSAKRVAASCVWLAGKLEESPRKSRHIIFVFHRMECRRENLPIEFLDVFSKKYSELRHDLIRTERHLLKEMGFICHVEHPHKFISNYLATLEAPPELTQEAWNLANDSLRTTLCVRFKSEVVACGVVYAAARRHRVPLPEDPPWWTVFDADEAGIQEVCRVLAHLYSLPKAQYIPVYKDNDSFTVKRISDLQASKESPARAVASDKGTPVPSSSSQEKDPVAKTILNKVKEKSDDEGKPLPAEFDGKENPVANSKNDKSDSGVDRSRERERSRGRERDARGRDSDRDSRGRESDRERDRRRCSRERSSGHSDKEKSRRHSSRDRADYYNSHSSREKDRHRHH

SEQ ID NO: 244744 - protein, 426 aa, Zea mays
  unsure (1)..(426): unsure at all Xaa locations
  Clone ID: MRT4577_154796C.1.pep
MIYTAIDTFYLTEEQLRNSPSRKDGIDEATETVLRVYGCDLIQESGILLRLPQAVMATAQVLFHRFYCKKSFVRFSAKRVAASCVWLAGKLEESPRKSKHIIFVFHRMECRRENLPIEFLDVFSKKYSELRHDLIRTERHLLKEMGFICHVEHPHKFISNYLATLEAPPELTQEAWNLANDSLRTTLCVRFKSEVVACGVVYAAARRHRVPLPEDPPWWTVFDADEAGIQEVCRVLAHLYSLPKAQYIPVYKDNDSFTVKRISDLQASKESPARAVASDKGTPVPSSSSQEKDPVAKTILNKVKEKSDDEGKPLPAEFDGKENPVANSKNDKSDSGVDRSRERERSRGRERDARGRDSDRDSRGRESDRERDRRRCSRERXQMTHWSXNLNAGHSDKEKSRRHSSRDRADYYNSHSSREKDRHRHH

SEQ ID NO: 244745 - protein, 225 aa, Zea mays
  unsure (1)..(225): unsure at all Xaa locations
  Clone ID: MRT4577_154797C.1.pep
MRCVTARAPVAALRPSASLKYXTPTWSLLGHSSRLARTATGSPTRSTLKAEAKAEWIPGLPSPAYLDGSLXSDNAFNAVRLEQDPXNXRMIHXVELVNERXKMLRVCVMMIPXGVSKGEMISAPQXHDASQSEXFASASTLMEIELFCVXYVQIGCGEDIYEPXGSDDQDRIYNRYXLPPLXCGTPGRVFHPLNFLSTLETKDSELXNDRLIMLSCLNFLIHHNV

SEQ ID NO: 244746 - protein, 193 aa, Zea mays
  unsure (1)..(193): unsure at all Xaa locations
  Clone ID: MRT4577_154798C.1.pep
GIQEACSVLAHXYSXXKAQYIXVYKEYDSFTVKRISDPQALKESPARAVASDKGTPIPSSSNQEKDSVAKTIPNRVKEKSDDEGRHLPAEFDGKENLVVNSKIEKSDSGVDWSRERERERERSRGRERDARGRDSDHDSRGRDSDRERDRRRRSRDRSSGHSDKEKSRRHPSHDRVDYYSSHSSREKDRHRHH

SEQ ID NO: 244747 - protein, 43 aa, Zea mays
  Clone ID: MRT4577_154799C.1.pep
FGSSSSAVLFRFQCVAVSRGQDKAIRPLTSNGPMIQPLLRLVL

SEQ ID NO: 244748 - protein, 86 aa, Zea mays
  Clone ID: MRT4577_15479C.1.pep
PGASKGAVRAPSSRYASTSCVCVRSTSARVEASILSRRSRRPPSLVSISSARWRARLASARASLASACAACASAQALFASLLSSAN

SEQ ID NO: 244749 - protein, 354 aa, Zea mays
  Clone ID: MRT4577_1547C.1.pep
MAGRKAAMVVEKNKKVVLRRHVTGFPTEEDMEITVDTIELGVPAGLTAVLIKNLYLSCDPWMRGRMSKHEDGATVPASDFVIGEAMVNFGVGKVVGSTHPEFTAGDLVWGLSGWEEYTLVTQPESLHKIKHTELPLSYYTGVLGMPGLTAYGGFTHVARPKKGDFVYVSAASGAVGQIVGQLAKIAGCYVVGSAGSDEKVSLLKTKFGFDDAFNYKSESDLGAALKRCLPDGIDIYFDNVGGATLDAALLHMRHGGRVAACGMISQYNLEERDGHGLRNLFYIISNAIRVEGFTALDWFHLYARFEEEMARYIKEGKVVVVEDVAEGIESAPAALIGLFSGKNVGKQLVAIARA

SEQ ID NO: 244750 - protein, 146 aa, Zea mays
  unsure (1)..(146): unsure at all Xaa locations
  Clone ID: MRT4577_154800C.1.pep
GRFQPLQQQNQRHEVVPLSPLCXQQTRGLLRQLPVVHYIDAKQEVQQLQQLVLANLINYSQQQELLAFNQRGSLDSASYLQQQQLPFRQLPADYPQKLVXFNQLALLNSPTYLQNQQLLPXGQLAGVSPATFLAQPQIKPLYQKER

SEQ ID NO: 244751 - protein, 71 aa, Zea mays
  Clone ID: MRT4577_154801C.1.pep
LDWKKKSPVISEVSELRHQTITLRFLPICVENSGSIRVSRMFGSLQCSCILYYCFHRHDDLLKVHNHTGSL

SEQ ID NO: 244752 - protein, 136 aa, Zea mays
  Clone ID: MRT4577_154802C.1.pep
RASVGQLPQLSPEQRTHGPLPHPTPLFSPATGGCGGSLGGVVELPTEEGGLDQKGEGCAVCRSIGPNPNTRNAIRDMVVRGAPAIAIAAALALAVEVSDLDFIGTPEEAASFVSKKLEYLVSSRPTAVNLSDAATK

SEQ ID NO: 244753 - protein, 52 aa, Zea mays
  Clone ID: MRT4577_154803C.1.pep
ILTSSYLAHLTLGQRTRGNHTGKGYQDRVHVVLLIPQKELRQFNSRMRKLRL

SEQ ID NO: 244754 - protein, 179 aa, Zea mays
  Clone ID: MRT4577_154804C.1.pep
MAAAAAQKAETKKSAVAPAGKAAQPAATTEVPTKPAPPSQTVRDARGGGSSARGGFGRGERGRGRGGRGYGQNRGFSGDNGNDFQGGYGGGGYGDGAVTGGSEGERERDTRPPYRGGGRRGGYRNVEFADDSERPPRRNYERHSGTGHGYEMKRDGAGRGNWGTATDELIAQDAEDSPK

SEQ ID NO: 244755 - protein, 81 aa, Zea mays
  Clone ID: MRT4577_154805C.1.pep
QFGFSETMPEYVPNLSKTRKFGYPKNSGSGSGSPFYSISLQINVTSNICTCIFKIIPGIKQHYSVLATAVRHHSVLAHWII

SEQ ID NO: 244756 - protein, 154 aa, Zea mays
  unsure (1)..(154): unsure at all Xaa locations
  Clone ID: MRT4577_154806C.1.pep
WRPNPSGEAASACIYYLHQLIAAAAAAAHKAEAKKSAVAPAGKAAQPAATTKFPTKPAPPSQTVRDARGGGSSARGGFGRGERGRGRGGRXYGQNRGFSGDNGSDFQGGYGGGGYXDGAVTGGSEGERERDTRXPYRGGXRRGGYRKCEFADDS

SEQ ID NO: 244757 - protein, 100 aa, Zea mays
  Clone ID: MRT4577_154807C.1.pep
PPAAPSPPLPGTLPTLFSPSLSFHLHSNGGPTRPAKLLVLVSTIFIRYFAILLKYSPPPLPWPPSTLSNSSAAAAAQKAEANKSAVAPAGKAAQPAATTK

SEQ ID NO: 244758 - protein, 202 aa, Zea mays
  unsure (1)..(202): unsure at all Xaa locations
  Clone ID: MRT4577_154808C.1.pep
MSDSHETDKNIEMWKIKKLIKGLESARGNGTSMISLIMPPRDQVSRVTKMLGDEYGTASNIKSRVNRQSVLGAITSAQQRLKLYNRVPPNGLVLYTGTIVTDDGKEKKVTIDFEPFKPINASLYLCDNKFHTEALSELLESDDKFGFIIMDGNGTLFGTLSGNTREVLHQFSVNLPXKHGREGXSALRFARLRMEKRHNYVP

SEQ ID NO: 244759 - protein, 54 aa, Zea mays
  Clone ID: MRT4577_154809C.1.pep
KKVGYNKLTQMAKKAKRRPKIERLRNLHPLKGHVDFFVNFKGLDMKPIHQSNTV

SEQ ID NO: 244760 - protein, 122 aa, Zea mays
  Clone ID: MRT4577_15480C.1.pep
KLGQKYRVPLRIARAPGFPSLACPPKGPYAYACLVERVPPPQSPIVAPCDSDLKRRISRVPGVPTMSIPSHGFSIDRPPEAPIGGAPRICSVQPRDVLGCNTRAGLVHPTKSLFHVWVPAKA

SEQ ID NO: 244761 - protein, 73 aa, Zea mays
  Clone ID: MRT4577_154810C.1.pep
GGFGQTVNWHKRGGVEHIGNRKFYWGVLGVGEGKKKEVETGGGHFEGTPLTGLEGLVSTWGEDFFDVFFFSRE

SEQ ID NO: 244762 - protein, 122 aa, Zea mays
  Clone ID: MRT4577_154811C.1.pep
MDSSSLKSAQLLELMRQHLATDAGKEVTKKVGLVYQLNIAPKKIGVDEEIFVVDLKKGEVTKGPYQGKPDATFSFTDNDFLGIATGKTNPQIAFIRGAIKIKGSISAAQKFTPDIFPKPAKL

SEQ ID NO: 244763 - protein, 87 aa, Zea mays
  Clone ID: MRT4577_154812C.1.pep
TSLFLSPPFQHDLLLAPVRTPPRSQTHLSTPLERKPALDMGGCHAKPLTQDADCSPSHAAPSTPPPGNATPGPGKNHFSVSPFFAFS

SEQ ID NO: 244764 - protein, 77 aa, Zea mays
  Clone ID: MRT4577_154813C.1.pep
SPDVLTCSWTLRRDRRTMYDASEVNLYLGSSPRRDDRSSTIRVVLITCIYLRGLAAHGASPPQGSNNSRATRPLLCY

SEQ ID NO: 244765 - protein, 125 aa, Zea mays
  Clone ID: MRT4577_154814C.1.pep
REEKLSHGLLLWTSRRAAARSRTSPATTGEAFYNLVCAGYANPEHFDFRHLDTLDYARRRPRRDPRSCRHRSLGLRSEIRVRHEEHPRVHKTPRAPGLDGTHSGALQGRVQPQLLSRVREDGDPT

SEQ ID NO: 244766 - protein, 61 aa, Zea mays
  Clone ID: MRT4577_154815C.1.pep
FNYMSDLALTYLFLKHRFLPIYIYIYIFPPNRILRKERKGKIWWEPIISRTRTNLPGGEEF

SEQ ID NO: 244767 - protein, 202 aa, Zea mays
  Clone ID: MRT4577_154816C.1.pep
MREIVHIQTGQCGNQIGAKFWEVISDEHGIDPTGTYHGDSPLQLERINVYFNEATGGKYVPRAVLVDLEPGTMDSVRAGPFGQLFRPDNFVFGQTGAGNNWAKGHYTEGAELIDSVLDVVRKEAESSDCLQGFQITHSLGGGTGSGMGTLLISKIREEYPDRMMCTFSVVPSPKVSDTVVEPYNATLSVHQLVENADEVFCI

SEQ ID NO: 244768 - protein, 214 aa, Zea mays
  Clone ID: MRT4577_154817C.1.pep
SKFQRWDDNASGSSSGGTVHSYKEALLSSSSATSLELEVRTSTIARPKLCDKERRLCRREDLVPVDKEDGWQVVKSRKQSRCASARRGTSVNLRGRCFNCLSPNHLVASCRCPPRCFRCFKLGHQASRCPAIQAGPLQLKTPGRLRDRLEFDRSYPVGKRSVWHRLEEPGKRLSVFKRLSSHKVPPPAVQSWECCSSKEEEVSLGAYLSRTPNI

SEQ ID NO: 244769 - protein, 125 aa, Zea mays
  unsure (1)..(125): unsure at all Xaa locations
  Clone ID: MRT4577_154818C.1.pep
WYFSIRAAGPSFGIGLQTCRGVGNREFSLEISWTIRWNRKLLVLGWVKPLKREDFIFLPWSQGGFXWFGPYSAPGKKKGLLPAFYQGSPFFGAGVPLFWVMGEGLVGKNGTLGGTLRFVFHAPDP

SEQ ID NO: 244770 - protein, 172 aa, Zea mays
  unsure (1)..(172): unsure at all Xaa locations
  Clone ID: MRT4577_154819C.1.pep
ALAVPARXQPELKQASEFRYIGKEAFRAIDGADIVNGRALYGADVHFEGTVYATVARPRVYGGKVKSFDASAALKVPGVLKVVEIESRPLPSEFQPLGGVAVIASNTWAAIKGRDALTIVWDDGVNAGYDSIAYRQELEASARQPGKVVRDTGNVEEALKRADSQFEAGYYL

SEQ ID NO: 244771 - protein, 78 aa, Zea mays
  Clone ID: MRT4577_15481C.1.pep
INSQFRHSSPTPEHFLLVPDILSKTRYFHGLHRYRSRGYSAYIRDADGQQGQRDQGRSRSPSTLTWSSRCSSGTSAAT

SEQ ID NO: 244772 - protein, 258 aa, Zea mays
  unsure (1)..(258): unsure at all Xaa locations
  Clone ID: MRT4577_154820C.1.pep
DEVXYLALLSACSHAGLVDECRRYFSCIRRDRTVRPKAEHYACMVDLLGRAGELREARDLIRTMPMEPTVGVWQTLLSACRVHKDVAVGREAXDVLLWGHAXNPVNYVTLSNVLAEAGEWRECHKVRDAMRRRGLKKQGGCSWVEVGKEVHFFYGGGGEEETHPQAGDIRRVLRDMETRMREQLGYNADDARFALHDVDEESRAESLRAHSERLAVGLWLLRNGVDGGGHGEPVRVYKNLRVCGDCHEIFPGRPRGTQ

SEQ ID NO: 244773 - protein, 93 aa, Zea mays
  Clone ID: MRT4577_154821C.1.pep
VRLLDLCRQLWRPRAAPTRAPVQRNRELPGHACCSLQEPDPAGRVTPNACSEFATADARAKGAAPICRCIRVPGLSSCHVSRGMPFGLPFSLV

SEQ ID NO: 244774 - protein, 78 aa, Zea mays
  Clone ID: MRT4577_154822C.1.pep
PRLTRNSIITNLNYKSNEEQLASTTDQADDGSCTGSTPTEGAALGISHEKTRGSSRWTGRAPQIFGTPSPLLGAGLAT

SEQ ID NO: 244775 - protein, 112 aa, Zea mays
  unsure (1)..(112): unsure at all Xaa locations
  Clone ID: MRT4577_154823C.1.pep
LTHPLTHPGYTVQLLYQADGYIPRAGSITRLTSHNFSILNLVQISSAPVYLYQDAIMFPLWNFNAYISIYHIKGCTRVQLVSYNATTSLDDLLXPALLLIAPYCYLQATYAH

SEQ ID NO: 244776 - protein, 102 aa, Zea mays
  Clone ID: MRT4577_154824C.1.pep
NPREGPPSGQFLAGLFFQQGLLNHGTHVRGFIPSFATLACIRRGIRPNPRSSHVCKTPRFYKHPSPLGVFFMEVPRPLQARDPHKVETSGAILEPAINLPYK

SEQ ID NO: 244777 - protein, 821 aa, Zea mays
  unsure (1)..(821): unsure at all Xaa locations
  Clone ID: MRT4577_154825C.1.pep
YSARGAPEEDEVVIFRSFFKAGLRFPLSRFVVEVLSTYQIYLHQITPEAIIRMGIFVWAVRSQGLEPSARCFCSMHELSYETKAWGKEQYHNNFGCYSFVARSGVSYPVPTFRKRWPGDWMKEWFYVKNDLKAREDIKEIIMRPIWSHFGLRKPKVEIDEAVEACRRAFSTICSFVGTRDLLQEHIAYRIWPLVDSWEMPEETITNPSEGGLVRLKYTFRFGDQFIEPDDDWLKYVENTSDELLGAYSKSEDNALSAAFGSRKKKRLNRVFDAIGFMYPDYRYSSRGQKRKNTTSGNVAASTAPSKPAPKRKKLKVLTHRPRYIEPAIVPEFGGETSSAIEAKGPALMQRIEEPATMPKTDKIEEPRTEVTKALEVLSPSAGVEVPKTQKGLAATPKRKRMASVLDVLETIKASSSTPGKIAKASKAQIEIETKLTEAEATMSQVYAEAGPSEPAKEKSLETGEKAAEEEAIEQIMPKKDATPTPEAPSEVLDYIIRHASGKRLSEEEIFEAKHYAREMKYPKGALVFNGTDEDDFLYCLPDNKELSVCREMARSMGFPKLEVVLCAMTKDDLADSLAYNSLKVIKLRNEALEKDKILLTLVDKVKRDEANFKTQSEAQKIEIEDLRKQLAKAKEKCVVAEAKRGISEQWTNHLEKNVEELRISKERCFEKSMDCVKKIKTSFANVGTYSSEDNFIRGDPEGPIEWISSEAEAFEEILSDRGDVCAFSGARGVAAILEKAGCEHVKTLAQAEAAFSIDDTKDXLGRSKLNRRKKFXDIWENGGRGMAHEIIKKSEKDTHDTREATKAAEKVVELERRIGIT

SEQ ID NO: 244778 - protein, 60 aa, Zea mays
  unsure (1)..(60): unsure at all Xaa locations
  Clone ID: MRT4577_154826C.1.pep
DSRNADXMTHVGIATRQDQRGGFIRHTGYDPRHLDHKGLEGRPLRPEGDGQLSKLSKARC

SEQ ID NO: 244779 - protein, 88 aa, Zea mays
  unsure (1)..(88): unsure at all Xaa locations
  Clone ID: MRT4577_154827C.1.pep
KKIGFKFPANSKKKIGGAFDGAISWLGANQLPKGGGFWAKIKELESFFNPFFAKLFQGGGXKMGGPGGMEKEAPSGKGGPGPKIKGVG

SEQ ID NO: 244780 - protein, 86 aa, Zea mays
  Clone ID: MRT4577_154828C.1.pep
YIYGCPFSYLSKAIRTVQEEIATFGSLEGSKSPIANPNPTCIFLAFEFCVWSMTRPGIPTDGHKSATSAHPRQFTIFRTACIILRR

SEQ ID NO: 244781 - protein, 117 aa, Zea mays
  unsure (1)..(117): unsure at all Xaa locations
  Clone ID: MRT4577_154829C.1.pep
CVTLLYWLKVXPDXTXIGDLDLFHHRPYECLLLGYINVNANAKKGSNFKLLERSQVIMSVPGAHSRKPPLEKLLSEYIPGPKPSRCIELFARELFPRWTSWGNEPLHFQDTMYFSEK

SEQ ID NO: 244782 - protein, 173 aa, Zea mays
  Clone ID: MRT4577_15482C.1.pep
MKEHSSKHMAAPAARPLVTVQTLDGDMATDSAVTVALPDVMKSSIRPDIVNFVHTNISKNKRQPYAVSKKAGHQTSAESWGTGRAVSRIPRVPGGGTHRAGQGAFGNMCRGGRMFAPTKIWRRWHRRVNVNQKRYAGVSAIAATAIPSLVMARGHKIETEPELTLGIGDCVGS

SEQ ID NO: 244783 - protein, 418 aa, Zea mays
  Clone ID: MRT4577_154830C.1.pep
MEVCDELRSFEATGVYRLDGTCSGAGATYLDPVRLLNASYQRFRIVPSAYYSRSFGPQHQEGEPEIERPEKRRKRKRNQKPKPRELNPMERIAEARHQEAKPLLLNAHESLVKAKHLLEYISKTIKGNEHTLDAGSGSENNFVELGTSWRAPFYEITLCFQKPHVLGNEEGFFHAQKTSFPLFNSIISVEGTDEAEGEFRNRRYILPRGSCFLMADFKRVRDLIPCSPNQGYNLIVVDPPWENGCVRQKEVYPTLPNKKFLYLPVQQLAHPTGALLVLWITNREKLRAFVEKKLLPSWGVEDSTVFYWLKVKPDGSLIGDLDLFHHRPYECLLLGYINVNANAKKGSNFKLLERSQVIMSVPGAHSRKPPLEKLLSEYIPGPKPSRCIELFARELFPRWTSWGNEPLHFQDTMYFSEK

SEQ ID NO: 244784 - protein, 69 aa, Zea mays
  Clone ID: MRT4577_154831C.1.pep
LAANSARDTKKTPFVPGHIQFPVRNDKKLSPFLGPVPLPTGGVMPPTHTLFLPKKAGGGSPKVSAGSQD

SEQ ID NO: 244785 - protein, 79 aa, Zea mays
  Clone ID: MRT4577_154832C.1.pep
KSLEPGSIHGPSLCATACSISPRWQRNSRPHESRHPPPPRACPIPLSVVPRRRVAPLPLPALGYGHEDPLDGSGDLRGL

SEQ ID NO: 244786 - protein, 109 aa, Zea mays
  Clone ID: MRT4577_154833C.1.pep
PFSQKQPRCGPPPRSGKSRSICATIDHYIVSSGPPPLRYRRGGLPLYLCSIPNLKKLSPCVFLVPEIPVAVCTITKVLYTTPLILIRWFFFKQQKKPPPKNKKKIKKLF

SEQ ID NO: 244787 - protein, 38 aa, Zea mays
  Clone ID: MRT4577_154834C.1.pep
SPYKLCRLVTSMYETADWLKSNWEDNYILRLSYCLKHK

SEQ ID NO: 244788 - protein, 75 aa, Zea mays
  Clone ID: MRT4577_154835C.1.pep
MGAFTFEDEIYSPVAPATLYMALVSDADNVIPKALESFKSVENVEGNGGPGTIKTITFVEDGETKVVLHKIESID

SEQ ID NO: 244789 - protein, 116 aa, Zea mays
  unsure (1)..(116): unsure at all Xaa locations
  Clone ID: MRT4577_154836C.1.pep
FFSFPPXKKKKKKKKKGGPRWALWPCLLRHGRAREGVALARPPRTRGGTTTGFGYGDSAGGGPRLVFLAGVFLVQSPSLLVGGGTCGAEVPPSPRIFFFFFFFFFFCFGGLYCPPP

SEQ ID NO: 244790 - protein, 125 aa, Zea mays
  Clone ID: MRT4577_154837C.1.pep
GRGSTAKGYLKKIKGGAQHPGKAGTGKENGARSPHGPRKKGEEGPTQATGGQKNQGDINYRKRGLYFHGHPQLKMGKKLGGEKKPPPLVTKKTPLEVCPPTGQKKNGAPPGEGRQENPPGLFKIS

SEQ ID NO: 244791 - protein, 270 aa, Zea mays
  unsure (1)..(270): unsure at all Xaa locations
  Clone ID: MRT4577_154838C.1.pep
MCNGKGIQXCLQCSGECVIWQESVDXQPWEKVRSSSPLKVKEDDEVDXKLEININNPKRSKRTYASTSPEVAKKISRSLRSLNAQTGLFTXHMKIIHQDPELRAQRVAAIKRTKGSDVARKRAFQIQKAFFSDPENRLKRSIAMRGVKFYCSKCGQGGKRRFYSPTVRVGSIRVRCRWRLCYRKGQLSFTCVSLXSEKEHKQRPHHCSRCGEKGHNRRNCPTCTDLGSDASGYVVNKVNGSNSAVYQCSICLEKGHNRRTCPKRKATLLK

SEQ ID NO: 244792 - protein, 174 aa, Zea mays
  unsure (1)..(174): unsure at all Xaa locations
  Clone ID: MRT4577_154839C.1.pep
PRSRPERDSKNFDFRAQKREGRSRRSPGDPAAGRPHTSASLASVLFPTIKMSRGGSAGVGXSSLDYLFGSAEPPKTSLTPAASAPPAGVGAPPDDKXTCCHKADGSRHIAVGDTSQTNNYHRLDGQKTVNFLTDRASTKVHAAPGGGSSLGYLFGVNCMPITKLSPPTVAECFF

SEQ ID NO: 244793 - protein, 147 aa, Zea mays
  unsure (1)..(147): unsure at all Xaa locations
  Clone ID: MRT4577_15483C.1.pep
MAFSGRIQELVRKYGKVAICVHLSVSCASIAGLYVAINNNVDVEAVFRRFGISPGVTVGGEASPAPVSRDEHLRDXPAAHGQRGTARRDXRERQPRNRTMELVASXGGAFALAVVCNKALFPVRVPITIALTPPVARALSRWRLVKS

SEQ ID NO: 244794 - protein, 149 aa, Zea mays
  unsure (1)..(149): unsure at all Xaa locations
  Clone ID: MRT4577_154840C.1.pep
PRPGKKKLVTYQPLXFWGQIKTPGMSFKCXGIYLFRFPRTPPHFLAPGDGKKTPPFVGDGVIPPSAKGPPTSKIGPHVFLSPNARVGTGARLINCIILKGVGNMEKPVVLPSIVGWESSLGKWSRGQGEGDQNAQLGLSFFGETRFFLK

SEQ ID NO: 244795 - protein, 262 aa, Zea mays
  unsure (1)..(262): unsure at all Xaa locations
  Clone ID: MRT4577_154841C.1.pep
MAATSLARLSRRTTISATAAAPSLRRLLSVTSTASVAATAPPPPPXARPAPRPXADRVRWDYRGQRKLVPLGQWMPKVAVDAYVAPEAVLAGQVTVHDGASVWSGAVLRGDLNKITLGFCANVQERCVLHAAWTAPTGLPAETLVDRYVTVGAYCLLRSCTIEPECIIGQHSVLMEGSLVETNSILEAGSVLPPGRRIPTGELWAGSPARFVRKLTNEEIMEIPKLATAINDLMQSHFSEFLPYSNAYLEVEKLKKSFSIPL

SEQ ID NO: 244796 - protein, 55 aa, Zea mays
  Clone ID: MRT4577_154842C.1.pep
RHDIQSLACHYGTAMLKAPFADHHAPMAAFPNIGGRPRHTAVTVWTGPQDAFAGH

SEQ ID NO: 244797 - protein, 185 aa, Zea mays
  Clone ID: MRT4577_154843C.1.pep
VNGSGQFCGVAEMIGPVDFDRSVDYWQQDKWSGQFPVKWHIIKDVPNNLLRHIILENNDSKPVTNSRDTQEVKLEQGLQMLTIFKNHEAETTIVEDFDFYEQREKALQENRRQQQPPTTYPQKLVDTNAQGPVADISDAFAKAVQLKDTANSGTTPKAEGASAENGSAATAKVEGSANLNTGPVE

SEQ ID NO: 244798 - protein, 188 aa, Zea mays
  Clone ID: MRT4577_154844C.1.pep
MPKEGVAGDGSKTAEHSSAEDTRAADALALRGRPGGELGAPRSVRDVSMSSTSFPLLTRTNYPSWSVMMKVIMEARPMWKAVETGDVEYEEDRLAMEAILRSVSEEMVLTLGAKETAKEAWDTIKTLRISVERVRESKAQTLRLQYEEIRFKAGEQVDDFALRLQGLVNELATLGCQDPDSMPHRSSM

SEQ ID NO: 244799 - protein, 44 aa, Zea mays
  Clone ID: MRT4577_154845C.1.pep
MEMKTESLSQLANWTECQFHMVAHRHRVEVWTLLVTFGLEPYYV

SEQ ID NO: 244800 - protein, 257 aa, Zea mays
  unsure (1)..(257): unsure at all Xaa locations
  Clone ID: MRT4577_154846C.1.pep
MELYSGYLDDHFNPHKLSIAGSAVSPPEYMASASPAQFAAAPLRMGYGRPAPAPPPPVMGMWSSEPFRVDSGSAHATSASTVNTKLEETRLEDDVVALEPARSTEQETSRPPERAQRRLAQNREAARKSRLRKKAYIQQLETSRMKLSQLELELQRARQQQGAYAXGSMGDSALGYTCPIDPGVAXFEIDYWHWVDEQKRHTTELMSALQGQQTSSTSELELRLLVETGLSNYEHLFRIKAVASNADVFHVMSGVWK

SEQ ID NO: 244801 - protein, 59 aa, Zea mays
  Clone ID: MRT4577_154847C.1.pep
HGPSLLFGVQRFHWDTCPWQHDIAHVVRSGPGWRLWFWAAVTSTLLTREIFRYGACRRA

SEQ ID NO: 244802 - protein, 68 aa, Zea mays
  Clone ID: MRT4577_154848C.1.pep
NTISVLKLIGLYYSGSKKKKKKKKKNLCVSVCGIAVGSDVGTGQGRGAPMLFSDIPNPRQGVKYNFSP

SEQ ID NO: 244803 - protein, 99 aa, Zea mays
  unsure (1)..(99): unsure at all Xaa locations
  Clone ID: MRT4577_154849C.1.pep
PTRSSTRPSTCALGIFFSTLLVTIEHKVTAHAGRDGWLVDNLDDGRXLGYFYWXLLAVVSAINLVXLFTFDVRGYVYKEKRLADAGIELADEESIAVGH

SEQ ID NO: 244804 - protein, 123 aa, Zea mays
  unsure (1)..(123): unsure at all Xaa locations
  Clone ID: MRT4577_15484C.1.pep
MLHELLVTLSGYPGDIFRXSHRSQRLQXFAVTDFPMLHPAEKEGLDRLAQLGFYFKEFNAFIASCRSCSYRSSPTHGTPAHSPPGLYLTALAHSLEKKLQTYRRVIVDTESAILSGEDNLGRI

SEQ ID NO: 244805 - protein, 84 aa, Zea mays
  unsure (1)..(84): unsure at all Xaa locations
  Clone ID: MRT4577_154850C.1.pep
MGKIQSDCPYPWGFFGGRNEGDRIKPIARVGNYFRELPCQHDGGQGLPIIGLWNGGMGHPNDPGVVNWGIXECVASFIWEGGIN

SEQ ID NO: 244806 - protein, 79 aa, Zea mays
  Clone ID: MRT4577_154851C.1.pep
QKSRNVCFFKTQGPKKRFPFFFFGGSFPGIKGLWGSHQIVFVKLVVPKGLNPTPPIHKKTCDWVIAQATLFCSQEIFGA

SEQ ID NO: 244807 - protein, 102 aa, Zea mays
  unsure (1)..(102): unsure at all Xaa locations
  Clone ID: MRT4577_154852C.1.pep
QEEKQHRIRQXPVGKKEVEHYRKRWREINARPIKKVAEAKARKKRRMLKRLEQTRKKAEAVVNTVDISEREKVAQLRSLYKKAGLGKEKRHVTYVVAQKGVG

SEQ ID NO: 244808 - protein, 54 aa, Zea mays
  unsure (1)..(54): unsure at all Xaa locations
  Clone ID: MRT4577_154854C.1.pep
AVGCGRLFGRVLRRLLSGRRPGGGCAFSLAXVAPSRXALCSRSRSRXLLVGVGG

SEQ ID NO: 244809 - protein, 47 aa, Zea mays
  Clone ID: MRT4577_154855C.1.pep
EQQPASNQKFILRGCCWNGRVDLPVLQCIVGLRVSPCYITGFSSNDQ

SEQ ID NO: 244810 - protein, 91 aa, Zea mays
  unsure (1)..(91): unsure at all Xaa locations
  Clone ID: MRT4577_154856C.1.pep
VSHLLLLFVLPVLSLVALAHLSPFSRPXLFLPFSSLWGGGAAAFLXPLXLLPFGRLASAFSLPRRFLAFRRLAWLVPCVVFRGXVVLPFGR

SEQ ID NO: 244811 - protein, 60 aa, Zea mays
  Clone ID: MRT4577_154857C.1.pep
IQVFQLSVPCRYICLCQECNSKVSFCPLCQSSYIFGMQIYYVLHSICVSPMSCTTVCYVH

SEQ ID NO: 244812 - protein, 120 aa, Zea mays
  Clone ID: MRT4577_154858C.1.pep
GSPAFSFCIFYSVQNLPITDSLYENVGPAKPRPIFFFFFFEVQLPFLSVFPILFKSSLLQTLYTKTLGRLNLGPFFFFFFFEVQLPFLSVFSILFKSSLLQTLYTKTLGRLNLGPFFFFF

SEQ ID NO: 244813 - protein, 66 aa, Zea mays
  Clone ID: MRT4577_154859C.1.pep
SGEIHESGPTLGGGGEIQNIGVWQCWEGFELAAFGGELNLPAFNFPCWGGQPVVVVLTSNPVLGGL

SEQ ID NO: 244814 - protein, 147 aa, Zea mays
  unsure (1)..(147): unsure at all Xaa locations
  Clone ID: MRT4577_15485C.1.pep
MAFSGRIQELVRKYGKVAICVHLSVSCASIAGLYVAINNNVDVEAVFRRFGISPGVTVGGEASPAPVSRDEHLRDXPAAHGQRGTARRDXRERQPRNRTMELVASSGGAFALAVVCNKALFPVRVPITIALTPPVARALSRWRLVKS

SEQ ID NO: 244815 - protein, 121 aa, Zea mays
  unsure (1)..(121): unsure at all Xaa locations
  Clone ID: MRT4577_154860C.1.pep
MVKDTRYYNMVGVDPSATESEIKKAYYVKARLVYPDMNTNDPXVAEKFQEIGEAYQILIEPTQGXAYDWHVKDCILMEGMIDIAATFAILLVNELFEEYIGQLEMALMALLDNYVENEQID

SEQ ID NO: 244816 - protein, 86 aa, Zea mays
  Clone ID: MRT4577_154861C.1.pep
LISIWQSISVYRRSENHKGWISVVPLGHEVHNNQAACIYLLGFLQELSGAPDKNQCVVALLKPLPRVRLILINPPVCPIRRILFSC

SEQ ID NO: 244817 - protein, 94 aa, Zea mays
  Clone ID: MRT4577_154862C.1.pep
STSQETSPSESNPPRTGIRGVKSMKVVKLNVFPPAPARASSSSSRYSSSSSSLVIFDVWRPLSYKLTVCDNPRCRHSSSTSSTSMPPWGASPPT

SEQ ID NO: 244818 - protein, 69 aa, Zea mays
  Clone ID: MRT4577_154863C.1.pep
YCVITCHGSQHALLKQPLTDTNHEGGHYNWQGALSSIEWGGVENLQASLFNGKPGAWHIPVGNSDALRF

SEQ ID NO: 244819 - protein, 75 aa, Zea mays
  Clone ID: MRT4577_154864C.1.pep
SKEITYIKVVTNSQQRAHMKVVKLNVFPPAPARAYSSSSRYSSSSSSLVIFDVWGPLSYKLTCLCGVQVHQLDPL

SEQ ID NO: 244820 - protein, 69 aa, Zea mays
  Clone ID: MRT4577_154865C.1.pep
GQRHMHLVAQSKRGAVNLLYETQTSSFPMLPSLEKSYDHLGRALKSLRHVLKEGERAIPDVRQDQCLFM

SEQ ID NO: 244821 - protein, 49 aa, Zea mays
  Clone ID: MRT4577_154866C.1.pep
AGKQEPFILHGLTGFILNYIRDCLEYLKMSATTDQIYYAIQPPDNYMGI

SEQ ID NO: 244822 - protein, 321 aa, Zea mays
  Clone ID: MRT4577_154867C.1.pep
PKRSPSPPLPEIPQIRSQCRRPLPPRRHPKLSPTSSRAPPSACALAPAASLSSNSSPSSLSPEQRRRADTNLALARARRNLRLAESKAQASGGAPKLEELLVEDTWAEALRGELRKSYALELCRFVAHERLHGPLPVYPPPHLVFHALNATPFDRVKAVIIGQDPYHGPGQAMGLSFSVPEGIKIPSSLGNIFKELKKDLGCTVPSHGNLERWAVQGVLMLNTVLTVREHQANSHAKKGWEQFTDEVIKTVSQKKSGLVFLLWGNSAQSKTRLIDETKHHILKSAHPSGLSANRGFFGCRHFSKTNQILEKLGLSAIDWQL

SEQ ID NO: 244823 - protein, 94 aa, Zea mays
  unsure (1)..(94): unsure at all Xaa locations
  Clone ID: MRT4577_154869C.1.pep
LGLSSPNSNIMFLMWNRLNMIPGRGRFYFNLWNXXXLTQGGGFQAPPPAPDWPARGGRMFPPMRPSRTRAFAXFXVRILPPNNFGCWAFPPGPP

SEQ ID NO: 244824 - protein, 69 aa, Zea mays
  Clone ID: MRT4577_15486C.1.pep
EQRGSQPTRPQCVSVEDRGSEAAPVAVLIHEQGVVGLEESLYVVPELEQVVRAVGHINVVGGVPLPPGY

SEQ ID NO: 244825 - protein, 34 aa, Zea mays
  Clone ID: MRT4577_154870C.1.pep
RTEGRQPVVRSRRAYGGSGRDVGVAGDVPGRPRG

SEQ ID NO: 244826 - protein, 55 aa, Zea mays
  Clone ID: MRT4577_154871C.1.pep
LGQFVLCPQELIERCPGHALYFWRPLAATERESEYSLPTASPFLPGLGEHDHTFK

SEQ ID NO: 244827 - protein, 103 aa, Zea mays
  Clone ID: MRT4577_154872C.1.pep
SHRLVGQLGTAGGRSACGFLSQGRMARSNAACKLNKVVWSLAIDDNHAPQGEGVNHAGKKERSLAIDDDLAPEGVSVNWEGGQGQRRLKTRRTMRRQSCPSGE

SEQ ID NO: 244828 - protein, 66 aa, Zea mays
  Clone ID: MRT4577_154873C.1.pep
LIALITQKPASRHMIAGSYNANVHSQYHHAHTLLLLHPLHTYRTRDPTNHLTHTHAQHKTALHDHD

SEQ ID NO: 244829 - protein, 50 aa, Zea mays
  Clone ID: MRT4577_154874C.1.pep
TKPNPCFINNNYNNVVKPAYTGLVRNSCSCLTSLYCTRVTYLDYILKDFY

SEQ ID NO: 244830 - protein, 50 aa, Zea mays
  Clone ID: MRT4577_154875C.1.pep
KNGLIRGAPPKKSKPIRGVQFPPEGIFPPEGKKIILTFVKFIEELENQRF

SEQ ID NO: 244831 - protein, 45 aa, Zea mays
  Clone ID: MRT4577_154876C.1.pep
TVHKLANLLHAKELSRRLKEEGANITVNSVHPGLIMTNLMRHSFV

SEQ ID NO: 244832 - protein, 269 aa, Zea mays
  Clone ID: MRT4577_154877C.1.pep
MDAPFFHELRRQASSYLTGKIRSARLALTDVTPTQLMTEEATNGDASPPNVKTMGLIARQAFEVDEYVRITDILHRRFASFDPRQGQGQGQWREAYKALLLLDHLLTHGPRSVAVEFQKDREAIERMATFQHIDERGFNWGRTVTSKSERVLKLLERGPFLEEERERARKIAREIKGFGSFNLSSASHAAPQPPPGDEGSRGYGRSNSQFEQRWRHKDGDDSDKENLIQSPEPARVAREVEAEPEEPHHHPFHGLGQKQRPEAMLLLSQ

SEQ ID NO: 244833 - protein, 63 aa, Zea mays
  Clone ID: MRT4577_154878C.1.pep
PSQLHCWSLHYCTPSSYLPSLPSCAPHVPSSYTISCQHKCAKRSNPISPELSCLLPSQIRYWS

SEQ ID NO: 244834 - protein, 295 aa, Zea mays
  unsure (1)..(295): unsure at all Xaa locations
  Clone ID: MRT4577_154879C.1.pep
MDAPFFHELRRQASSYLTGKIRSARLALTDVTPTQLXYSVSLITCGAPRPGVLSDYLWRACSMTEEATNGDASPPNVKTMGLIARQAFEVDEYVRITDILHRRFASFDPRQGQGQWQWREAYKALLLLDHLLTHGPRSVAVEFQKDREAIERMATFQHIDERGFPCSLSLTHTRXRLLRLLERPPFLXEERERARKIARVIKGFGSFNLSSASHAAPQPPPGDEGSRGYGRSNSQFEQRWRHKDGDDSDKENLIQSPEPARVAREVEAEPEEPHHHPFHGLGQKQRPEAMLLLSQ

SEQ ID NO: 244835 - protein, 41 aa, Zea mays
  Clone ID: MRT4577_15487C.1.pep
RLWPLTTNYYYCENFFSSSRNIRCLQGHRKLLPFVKPIDKY

SEQ ID NO: 244836 - protein, 161 aa, Zea mays
  unsure (1)..(161): unsure at all Xaa locations
  Clone ID: MRT4577_154880C.1.pep
NSLQCFFDTPGLMLXAHGFPYRDVTVRVESAWSSINLYDLLIVMFDVNRHLNLPDSRVIKLIKRFGTEVNPNQRRILCMNKVDLVEDKKDLLKVAKEFEDLPGYERYFMVSGLKGKGVKDLIQYLMDQAVRRPWDEEPTVMTEEVMKTISLXVVRXKMLHH

SEQ ID NO: 244837 - protein, 171 aa, Zea mays
  unsure (1)..(171): unsure at all Xaa locations
  Clone ID: MRT4577_154881C.1.pep
ARVVCQLKDLKKKSAETTQPPXATIPGETNEIAVVCCTGTASTAYERAAATYIRASVSCDDRPGLHADLAGALRAMRLRPLRADMAALGGRAQCDFVLCREDGAGCRTLKALEEGVRQALAKAAFPETPPYGCNAARSRRQRLAGSHCVLHGHGHGHGHGHGLHVIGEHGW

SEQ ID NO: 244838 - protein, 128 aa, Zea mays
  Clone ID: MRT4577_154882C.1.pep
SVGGRDGGDPPTGGGAAAEQVPPAGAAVQGGSPHPGAVSSRPALVTTKGGLMTIIAACGKKLFSHNNTQHPTSRHQKKSRRRLLRSQPPHISGAPPTRCLAGKKPVPPAKINNPPPREKRPASWGTLL

SEQ ID NO: 244839 - protein, 72 aa, Zea mays
  Clone ID: MRT4577_154883C.1.pep
YLVNPQHVPRVLKFVGTIHLVLLSSLGPSGLVPFSPWRHMQRCCWTRKGIKSASKEMVSSLTYTLSLSLIPT

SEQ ID NO: 244840 - protein, 554 aa, Zea mays
  Clone ID: MRT4577_154884C.1.pep
WDLEPAKKKKKKKKKTTRWKNKLQSKEYEISKSIFRLSTGLASPAWPEPDVVRKSIFGETGSDFETFVLAYWEKLPNLYRRKQATKMDSLVFVTLHNDFNLGTTPDSIIESLLQGLVSCPAIASDELDIDSFLHEVHDSLGDSVKYRQDIRVMRTRDPDDQTSRGCVTEEHFFDDGTIFTDEDAFIEKCKHAFKNGNSIALRGMEFRSEKVAAIASALAGLFGQPSVGANIYFSPARSQGLARHYDDHCVLVWQLLGSKKWTVWPNPKPLLPRLYEPFDPLDGTLDESSGRVEVLHEGDMMYVPRGYVHEARTDVSGSEVNDCSLHLTLAIEVEPPFEWEGFAHIALHCWAEKQQLRGSQSVEFEGKAGASLSAIVLHVAIRLLSDSEPVFRKACMVAAKASTSSSSCTSTTTHLEALRSSQRSTFDEILRKIDQSCSIKEALERIVSAVRERDDGAFQWMSWLRHLPQQGTAAGYSIDFCNVLGALEALVEAFDSDPGQALDGLTAFKSGFCRRVAYEDACEAFGTLLEMYRVARTQYMRGMLALHGAGAHVS

SEQ ID NO: 244841 - protein, 81 aa, Zea mays
  unsure (1)..(81): unsure at all Xaa locations
  Clone ID: MRT4577_154885C.1.pep
CETPIVXPYRXIHQAAGTTITTIITLXLQQPQIILQDEPLDHLVVQIIRAQQLQQLVLSNHGAYSQQHXLAALNQLAAIKL

SEQ ID NO: 244842 - protein, 52 aa, Zea mays
  Clone ID: MRT4577_154886C.1.pep
SFTRPFDWLTRSEVMRMSPIPHVVTHVCAHISSNLRLKDRPRSLESTKILVA

SEQ ID NO: 244843 - protein, 80 aa, Zea mays
  Clone ID: MRT4577_154887C.1.pep
SSRDHSLGTLSCTTQPPRHLRQKRSGQWLRRWPPRGAHSWAPAWRTRCLTTGASRAGSGSRAARSRMAFYNKVATTTYIF

SEQ ID NO: 244844 - protein, 34 aa, Zea mays
  Clone ID: MRT4577_154888C.1.pep
LCQIFTLCLKKINTLLYVYPFPNNNEGAYAHAPK

SEQ ID NO: 244845 - protein, 71 aa, Zea mays
  Clone ID: MRT4577_154889C.1.pep
SVETLASDCMMAVTASAGVTSASTAVSTPAVTASSVSVSSAFTSRSVSAMLASSPAEGLAHVCADVSAVER

SEQ ID NO: 244846 - protein, 204 aa, Zea mays
  Clone ID: MRT4577_15488C.1.pep
MANAATSPPAPAPSRPTLLGGVRGFDAAVSLRLHALFLPVPRLLLKALEVAGDGRIWLPVPISLLLLSASPANASGAASPLLAGLVAGLVLDLILVGLVKVFVRRPRPAYNAKDMYVAVSADHWSFPSGHSSRAFLVASFLAAGGFRPREALFLWAAATSASRVLLGRHYVLDVVAGACLGVFEAWLSILLLGFMCAQSTFLVC

SEQ ID NO: 244847 - protein, 73 aa, Zea mays
  Clone ID: MRT4577_154890C.1.pep
YSFCYIENSLPPFSAVTYAQIRVPLVLLLVGSSKNFFIFALLSIILNIYLEIPNFAQNGTGTRICMCMYQCIV

SEQ ID NO: 244848 - protein, 555 aa, Zea mays
  unsure (1)..(555): unsure at all Xaa locations
  Clone ID: MRT4577_154891C.1.pep
MAEVAARRAVGVPAGGGGDQANLAAVAAAMRGRGEVDTSSPFQSVRQAVDLFGGGAAAVSQWRHPQAPPRVHLRPEEEELMKVEEQTVKLEMELFVKEKETFKVLKELQETKQVIDGLKIQIEKVTWEDTNAAKGHADTXWYIHFLLSNKIPSHQSRAXGTQSPLTTLIKLNQAKAFLNTDTVNMLKSQIQKEKGSLEKTRERLQFNLGKASSLEADLTKTVARLQAAKAPQPVLEPSEIWLQMKHLNADKARHKKASEDLRNEICELTAAIEHTRSKTKTLQFRILMAEKLKEASQRGESVALAEMEKLSNGRDPNGSTSDAVTLSVEEHSTLVLKAQEADGAARKKVDAAMQGLDQANRCKLELLERVEEAMAAVETSRKALEEAQRREESETKAKLVAEETLRKLRSDQIIQNWRPTNSSSVKFKNTALLAPRRAAAGAGIYDVNGLSLVAAGPNSVKTVSIGQILSMKLXRARDDEDXTTSARKKKVSLGQILSQKYEMFSPLRIDHDCASHRQFQQPRRKRMGFVVYALLLARQRHRRRKAASCTRGGLS

SEQ ID NO: 244849 - protein, 79 aa, Zea mays
  unsure (1)..(79): unsure at all Xaa locations
  Clone ID: MRT4577_154892C.1.pep
SACASANPASRRHYGISNALALRYDDMPDVXDDTLSDKQSLAKRVVSNAIDEFDTSSYGDNYAQKEADAAIKKAFPASA

SEQ ID NO: 244850 - protein, 67 aa, Zea mays
  Clone ID: MRT4577_154893C.1.pep
PPKLKDPINVATDQATSGMLSPRGRGRPPKKAKVAVEDPRGEPAAARDVVVDASAVHVKRGRGRPPR

SEQ ID NO: 244851 - protein, 127 aa, Zea mays
  unsure (1)..(127): unsure at all Xaa locations
  Clone ID: MRT4577_154894C.1.pep
MKEAGEERCLDPQLWHACAGGMVQMPPVRSRVYYFPQGHAEHAHGGGGATDLAGARARPLPPLVLCTVAEVRFLADPETDEVFAKIRLVPAAPGEVEFGEPREFGIDPEDAREKLSSFXXTLTQSDA

SEQ ID NO: 244852 - protein, 113 aa, Zea mays
  unsure (1)..(113): unsure at all Xaa locations
  Clone ID: MRT4577_154895C.1.pep
KKNSKKIEKRREIKVGKVKEDNINHAYGMHGKVQQQQKQGAMMTALKAATAETFGGSMMVLSGMIMAGTVIALTVATPVMVIFRPVMVKEAIAXXLMQQRFVTSGXXGVAALN

SEQ ID NO: 244853 - protein, 224 aa, Zea mays
  unsure (1)..(224): unsure at all Xaa locations
  Clone ID: MRT4577_154896C.1.pep
PGGSLEELIYSRQIYKQQLSNIAVSGKIERRYFEGXKKFQGELFGICNLFRDLSDKLFTSEIIEMHGEHGKSSATEATGIREIVDTDLFGSQENRKSSTATTHTDDQKLVDFGIVYAHRNEDVVNMRTDGREKGGADETVQSSLEELLSKNETKHTAMEKSYSSEEKREVARSYSLEQKKKEFSCIASFMGMDDLEFSKWLLSASPHQRSEVLQDYRRKKKNQK

SEQ ID NO: 244854 - protein, 89 aa, Zea mays
  unsure (1)..(89): unsure at all Xaa locations
  Clone ID: MRT4577_154897C.1.pep
LQFLYLVNEHVSVVDYTCFGRVTXQFAGSLHRKGEKXEEIILRLQLHGGRPSLVLYMHVDTRETTMLPIIVSGRHPLPFQSPSVRSMPR

SEQ ID NO: 244855 - protein, 344 aa, Zea mays
  unsure (1)..(344): unsure at all Xaa locations
  Clone ID: MRT4577_154898C.1.pep
QSSACFLQASARQIISVWTETACYSISPTRSKDVRCSCGSPLPMVECCKRTDSLGVIWSYLHXENPEGCSICPFCLVLPFLVKLQQLSNHLELIKPNPKDELEKQKKDAELAAAVFGADIDLVGGTAESXNFMGLSDAEKCGRMXARLCLPSLWTRQHENRXLFEXCIRMLDILXKVVIRKXITFXRIDGANALTSRQSSGVXQPRSPSKQVFLISTRAGNLGVNLVSANRVVIFDPSWNPAQDLQAQDRSFRYGQRRHVTVFRLLGAGSLEELIYSRQIYKQQLSNIAVSGKIERRYFEGVQELDPKCYFFISASNSALMAFFQSSNCRHLELQTCLEVHRWW

SEQ ID NO: 244856 - protein, 28 aa, Zea mays
  unsure (1)..(28): unsure at all Xaa locations
  Clone ID: MRT4577_154899C.1.pep
SIVKSQYINHAXHCNLSKSGSMIRPPSP

SEQ ID NO: 244857 - protein, 234 aa, Zea mays
  unsure (1)..(234): unsure at all Xaa locations
  Clone ID: MRT4577_15489C.1.pep
MSSGGGDHHGVYHQQHGHGHGHLARADGAEYAFHGNDDMESFFFNHPASAGLDGGGSRTTGADELLAPYSSITDYLQGLLDPSGLARHLDAPLKHELSVDASHDSQGTSGAPGGEAAAMHTPXXSSVSLSSSDRDGEGQQPRRCKKGRTNKAEDAEGDEKDQQDGXENSTKANKSKKKAEKRQRQPRVAFLTKSEXVDHLEDGYRWRXYGQKXAVKNSPYPRSYYRCTTPKCGV

SEQ ID NO: 244858 - protein, 250 aa, Zea mays
  unsure (1)..(250): unsure at all Xaa locations
  Clone ID: MRT4577_1548C.1.pep
MDLALLEKALLGLFAAAVVAIAVAKLTGKRYRLPPGPPGAPVVGNWLQVGDDLNHRNLMAMAKRFGDIFLLRMGVRNLVVVSTPELAKEVLHTQGVEFGSRTRNVVFDIFTGKGQDMVFTVYGDHWRKMRRIMTVPFFTNKVVAQNRAGWEEEARLVVEDVRKDPEAAXXGVVLRRRLQLMMYNDMFRIMFDRRFDSEHDPLFXKLKALNAERSRLSQSFEYNYGDFIPVLRPFLRXYLNRCHDLKTRRM

SEQ ID NO: 244859 - protein, 153 aa, Zea mays
  unsure (1)..(153): unsure at all Xaa locations
  Clone ID: MRT4577_154900C.1.pep
MTVVRMRGSKELVRVLHGTRTRMNWYARAWLWTLQKVPPGXNITAKYGSDWLDAKATCFGKPTGAGPDDNGGGCEYKDVNKAPFNSMGAXGNGPIFKDGLCXGSXLEINCDKPEECFGQTIVVYITDMNYEPIAAYHFELSDTEFGAMDKNVE

SEQ ID NO: 244860 - protein, 79 aa, Zea mays
  Clone ID: MRT4577_154901C.1.pep
YRIIPNIQVPLYIETFTLANPTNRILKGPHLCLGSIFYCCSKKDPFPLCEVLSASLFPSWRQHNQRFLPCFKGPPPPNC

SEQ ID NO: 244861 - protein, 38 aa, Zea mays
  Clone ID: MRT4577_154902C.1.pep
PLGRRSPAARPRVGKIPLSRFRGSGFQTRGPVLGLEPN

SEQ ID NO: 244862 - protein, 208 aa, Zea mays
  Clone ID: MRT4577_154903C.1.pep
MLAYRKFGERPPPKRLTREAMRNYLKERGDQTVLILHAKVAQKSYGNEKRFFCPPPCVYLMGSGWKKKKEQMERDGCSEQESQPCAFIGIGNSDQEMQQLNLEGKNYCTAKTLYISDSDKRKHFMLSVKMFYGNSDDIGVFLSKRIKVISKPSKKKQSLKNADLCIASGTKVALFNRRSSQTVSTRYLHVEGGNFHASSQQWGALYIH

SEQ ID NO: 244863 - protein, 250 aa, Zea mays
  Clone ID: MRT4577_154904C.1.pep
FPNSGILADQGVAGKGVPIGGIDGLSSEAAMFDVEYGRWQEEHYRLMYELRAALQQHLPEGELQMYVESCLAHHDEMVGIKEGAIKGDVFHLISGVWRSPAERCFLWLGGFRPSEVIKMLLSHVEPLTEQQIVGVYGLQQSALETEEALSQGLEALYQSLSDTVVSDALSCPSNVSNYMGQMAVAMNKLSTLEGFVRQAENLRQQTLHRLHQVLTTRQMARSLLAVSDYFHRLRTLSSLWVTRPRAPQEQ

SEQ ID NO: 244864 - protein, 86 aa, Zea mays
  Clone ID: MRT4577_154905C.1.pep
RRGPCSRWKIGGRPCPRPIRQERPRPRPRSPKSPSPEVETDILYLAGRPSIDQALQLVGNPVIRDPCTPPRFSPKVDQYESPAVHH

SEQ ID NO: 244865 - protein, 58 aa, Zea mays
  Clone ID: MRT4577_154906C.1.pep
MSRNRGPRLKKKPRLGALPGLTKKTPKSGSNQKKKFPFGKKKKKTKKKKIKPRVNERM

SEQ ID NO: 244866 - protein, 80 aa, Zea mays
  Clone ID: MRT4577_154907C.1.pep
MGAGYMFMAGLGLLVVVGLHQLLESRKRKRPIQKVEMGTSSQNDVDMSWIPQETLNQINKASPRRLPRKRAQKRSVGSDE

SEQ ID NO: 244867 - protein, 64 aa, Zea mays
  Clone ID: MRT4577_154908C.1.pep
MDSTGTASRGKVKKGSAGRKVSRSMNKSISWFAKASLQFRISRIRRYLKKGSYTQRIRTDARVY

SEQ ID NO: 244868 - protein, 73 aa, Zea mays
  Clone ID: MRT4577_154909C.1.pep
YHSGPFLLGYVIYDCTHYYLHHGQPSSDPAKYLKKYHLNHHFRIQTKGFGITSTLWDHVFGTLPSTKTVDKSI

SEQ ID NO: 244869 - protein, 150 aa, Zea mays
  Clone ID: MRT4577_15490C.1.pep
PPPPFGEANAPPQKGGPDENGKKTYPGSLARGGKPSKSGGPPGLCFGFPVKSAAPAQNVFFFWFFEKQVPPHGGPLGLLFSPPPDTGRRGATEGGFFSVPPTKGGPHHGSLALFENDFVPNLCGGGTKPPLRYPLWLKKRKKMGGRKGGK

SEQ ID NO: 244870 - protein, 56 aa, Zea mays
  Clone ID: MRT4577_154910C.1.pep
GHPKFVVQGMHNRGPFPPRVNERSISLHSGPSPLSCGALKYWNLLVHGQRRITLAP

SEQ ID NO: 244871 - protein, 237 aa, Zea mays
  Clone ID: MRT4577_154911C.1.pep
MVASAFTVDLDKPLVFQVGHLEEQYQEWVHQPIVCKEGPRFFENDILEFLTRTKWWAVPLIWLPIVCWCLSTSIKMGNTITDVAMMIGFGIFLWTLIEYVLHRFLFHIKTKSYWGNTAHYLLHGCHHKHPMDGLRLVFPPAAAAILCFPFWNMIKLFSTPSTTPGLFGGGLLGYVIYDCTHYYLHHGQPSSDPAKYLKKYHLNHHFRIQTKGFGITSTLWDHVFGTLPSTKTVDKSI

SEQ ID NO: 244872 - protein, 134 aa, Zea mays
  unsure (1)..(134): unsure at all Xaa locations
  Clone ID: MRT4577_154912C.1.pep
RLVRHATKPFNDGKYLPVQVGPINWLFFRDXQEGVEVLHEVDCLAXLEDMLSLMHXRWNVGIIDATYSTRIPKNMLMKMAEGKCQIIFLXTLCNDQHVLERTIQSKVQQRPDYAXHTEYEAGVQDFKYRLAYYE

SEQ ID NO: 244873 - protein, 122 aa, Zea mays
  Clone ID: MRT4577_154913C.1.pep
PTNRCPNPNRNWPSPPPHNHQHSTKTTLPHNHQHRRARGVAAAYPIVRSGRRQPRTSRHQASKAATKVGGTRINVGVLCNKRRPTEGGTTVRIQSCAPVRKAARRRRKPGSGVRTARGGGGG

SEQ ID NO: 244874 - protein, 104 aa, Zea mays
  Clone ID: MRT4577_154914C.1.pep
KEKGTPPTTRRQGLGVGGGTPYGFAAGNSERGNVLKELDLGAEGIKAGGQRLIIVPPELAYGKKGVQEIPPNATIEREAELQPTKQSPFGTPVKIVEGKLCKEF

SEQ ID NO: 244875 - protein, 58 aa, Zea mays
  unsure (1)..(58): unsure at all Xaa locations
  Clone ID: MRT4577_154915C.1.pep
RLCFLCAAHCTAAAVLALLEICCLWGCDQPWPYRVVDASLIKSGXWSSIFCSILLLAV

SEQ ID NO: 244876 - protein, 80 aa, Zea mays
  Clone ID: MRT4577_154916C.1.pep
MGQCPCFGSAKAAEQERRAEADRRESQDARAKAAEAAQRRQQEYEKSAAGRAAKAQMKAMKESKTSNQGGEPVLKWQMGS

SEQ ID NO: 244877 - protein, 105 aa, Zea mays
  Clone ID: MRT4577_154917C.1.pep
NFPGGRPKGPIPKHRPTTLGDPTWGPNLGTKRGKIMPVGNCCAKTIPRTHTHPKHKPETPGGQTGGPNESNYVELTGRFPCRKPNRPTCLTKWPNHRDKPLGDWA

SEQ ID NO: 244878 - protein, 39 aa, Zea mays
  Clone ID: MRT4577_154918C.1.pep
TVSVSVFSLISLVLHVSNGRSSSLAGLAPQTQVARAAAE

SEQ ID NO: 244879 - protein, 55 aa, Zea mays
  unsure (1)..(55): unsure at all Xaa locations
  Clone ID: MRT4577_154919C.1.pep
ATFAPRDAPPGFFLRRLLYFHLHGCDVAASVXVRNFYRMCHLSRVIVLKIQSIMP

SEQ ID NO: 244880 - protein, 70 aa, Zea mays
  Clone ID: MRT4577_15491C.1.pep
DVSFTSVYCSRPWLLNTGTLRLLPGGSVRSIRHFEGACRYYCRLRLNTPGCNKNYTAASIKCAGRYGSSR

SEQ ID NO: 244881 - protein, 62 aa, Zea mays
  unsure (1)..(62): unsure at all Xaa locations
  Clone ID: MRT4577_154920C.1.pep
GWHGGDAESVSWGRWRADSAGHGPLHGHLLFSLERLRSTGRDWRRLRIEQGTRVSRFGNXPT

SEQ ID NO: 244882 - protein, 94 aa, Zea mays
  Clone ID: MRT4577_154921C.1.pep
WLHKSFTGSTVLTYGLLHGPKTRHQLNNSFKVRTCTICFLHLQRTNRIRPPPLYTLLFGTSSPHRGLIKPEFGAEVLLKGMAAPGYTIYSRPTD

SEQ ID NO: 244883 - protein, 54 aa, Zea mays
  unsure (1)..(54): unsure at all Xaa locations
  Clone ID: MRT4577_154922C.1.pep
PNGFKIKVVAPPXRKSRVWIGGSILAPLSPFPQMWVSKAEFSKSGPGIVPRKGF

SEQ ID NO: 244884 - protein, 77 aa, Zea mays
  Clone ID: MRT4577_154923C.1.pep
PRVRHAFAIVRSSCVVNSLSKREYDLINLLLPLVACVTSVMNLGLYYLANRGAINDRSWTEWGAHPDTSLQLLFILL

SEQ ID NO: 244885 - protein, 117 aa, Zea mays
  Clone ID: MRT4577_154924C.1.pep
HRAELRAEEHNAHSLLSIFFFFFFFFDKLHSFTVEQAPRAARNSIEQNSGQKNTMLSLFCQFFFFFFFFFDKLHSFTVEQAPRAARDSIEQNSGQKNTNLLNSYDTSHSHDGHRLVF

SEQ ID NO: 244886 - protein, 105 aa, Zea mays
  unsure (1)..(105): unsure at all Xaa locations
  Clone ID: MRT4577_154925C.1.pep
IKKKKNKVYKLFFFINNFFFFFFLFFFFLFFVFFSTCVPFHHFINWWGGGATXPFSQHSFRGFCPFYHLDYPYIPRHASLGRRKCFLHSDSLGTHHMFLHFLAFA

SEQ ID NO: 244887 - protein, 50 aa, Zea mays
  Clone ID: MRT4577_154926C.1.pep
LHRVSELKLLCITAELLPGLVLLHRCIEWKTKVKQGLRTRPNKLPTSGSR

SEQ ID NO: 244888 - protein, 95 aa, Zea mays
  unsure (1)..(95): unsure at all Xaa locations
  Clone ID: MRT4577_154927C.1.pep
RXXXNLDLDLAVAMAXXQTRRLLTXLAAVRRXAYLPTYLPTQPTYCRHRTSIXDSXXXXPGXGEXXGKSCPIPVEPGKPAXXKIXASXXXXXRKG

SEQ ID NO: 244889 - protein, 67 aa, Zea mays
  Clone ID: MRT4577_154928C.1.pep
VRSLIRDPGVYNLWFRVVFFLEFLREKNFLQGKVITIIKPRFKKTPFKEKLYAFRDRFGISGWNQGC

SEQ ID NO: 244890 - protein, 102 aa, Zea mays
  Clone ID: MRT4577_154929C.1.pep
LGIRLEDTAMFYGLKGFNDHLMQGGPYGNVQSEVLMRKDASTFTFRQGWAFPRKVYFNGDECQMPPPDAYPYLPNSAPPTAAASLGGAAAAAVVVLLGMIVA

SEQ ID NO: 244891 - protein, 89 aa, Zea mays
  Clone ID: MRT4577_15492C.1.pep
LFGCWLANAFRNHLFCLAIVGSKSSSALYYVNRHFKCINCCHCIIVFVLGEKFSLIFVSRFQVLFVFPMLYSIVKPDGGIVEVFGKSCY

SEQ ID NO: 244892 - protein, 125 aa, Zea mays
  Clone ID: MRT4577_154930C.1.pep
SLPRKHTREPTLLPKISGLLMRLGMPASAATGTITPNSSQARIDALIAPYLSPDVSPVWENPSVKPYMKQHAIEHGILPGLPPLLQQSLELLQQLPQQHPLAQNMRAQQLQQLVLAHLAAYSEEQ

SEQ ID NO: 244893 - protein, 626 aa, Zea mays
  Clone ID: MRT4577_154931C.1.pep
MAASASAGRWWAVVLAVAVLLGPGRVVANTEGDALYSLRQSLKDANNVLQSWDPTLVNPCTWFHVTCNNDNSVIRVDLGNAQLSGVLVPQLGQLKNLQYLELYSNNISGTIPPELGNLTNLVSLDLYMNNFSGNIPDSLGNLVKLRFLRLNNNSLVGPIPVSLTNISTLQVLDLSNNNLSGQVPSTGSFSLFTPISFANNPNLCGPGTTKPCPGDPPFSPPPPFNPPSPPTQSTGASGPGAIAGGVAAGAALVFAVPAIAFAMWRRRKPEEHFFDVPAEEDPEVHLGQLKKFSLRELQVATDTFSNKHILGRGGFGKVYKGRLADGSLVAVKRLKEERTPGGELQFQTEVEMISMAVHKNLLRLRGFCMTPTERLLVYPYMANGSVASRLRERQPSEPPLSWEPRRRIALGSARGLSYLHDHCDPKIIHRDVKAANILLDEDFEAVVGDFGLAKLMDYKDTHVTTAVRGTIGHIAPEYLSTGKSSEKTDVFGYGIMLLELITGQRAFDLARLANDDDVMLLDWVKGLLKEKKVEMLVDPDLQKAYEEVEVESLIQVALLCTQGSPLDRPKMSEVVRMLEGDGLAERWDEWQKVEVVRQEAESAPLRNDWIVDSTYNLRAVELSGPR

SEQ ID NO: 244894 - protein, 495 aa, Zea mays
  unsure (1)..(495): unsure at all Xaa locations
  Clone ID: MRT4577_154933C.1.pep
MAAAGRWWAVVLAVAVLLGPGRVVANTEGDALYSLRQSLIDTNNVLQSWDSTLVNPCTWFHVTCNSDNSVIRVDLGNAQLSGVLVPQLGQLKNLQYLELYSNKISGAIPPELGNLTNLVSLDLYMNNFSGNIPDSLGNLLKLRFLRLNNNSLVGPIPVALTNISTLQVLXSMCTTTLLLMFVVCXEYIIYQLPXKCRDLSSNNLSGPVSSNGSFSLFTPISFNNNPNLCGPVTTKPCPGDPPFSPPPPFNPPSPPTQSTGASGPGAIAGGVAAGAALVFAVPAIAFAMWRRRKPEEHFFDVPAEEDPEVHLGQLKKFSLRELQVATDTFSNKHILGRGGFGKVYKGRLADGSLVAVKRLKEERTPGGELQFQTEVEMISMAVHRNLLRLRGFCMTPTERLLVYPYMANGSVASRLRXFILYIIYKKPDSIVPTKQAERXFLFSLNFLIXERQASEPPLKWETRXRRIALXLARGLSYLXDHXXDPKIIPIGDVKA

SEQ ID NO: 244895 - protein, 345 aa, Zea mays
  unsure (1)..(345): unsure at all Xaa locations
  Clone ID: MRT4577_154934C.1.pep
MAGQEVANKRVVLKRYVTGFPGADDMEVVTGTARVAVPPGSTAMVLKNLYVSCDPYMRGRMTKHERPSYVPDFVVGEVLENFGVCKVIASGHQDFKVGDLVWGMTGWEEYTLIHNPESFFKINHPELPLSYYTGVLGMPGLTAWAGFFDVGKPKKGDCVFVSAASGAVGQLVGQFAKLTGCYVVGSAGSDEKVNLLKTKFGFDEAFNYKKEQDLDAALRRYFPEGIDIYFENVGGSTLEAVLPNMRIHGRIPTCGMISXYNLEEPEGVHNLFEIIAKRLRMEGFMVFDYYSQYHKFEQEMVGYLKAGKIAYVEDIAEGLEKAPEALIGLFTGRNVGKQLVAIARE

SEQ ID NO: 244896 - protein, 105 aa, Zea mays
  Clone ID: MRT4577_154935C.1.pep
WLLWDSSSCAMEGASLQEERRAPAHSVSYRLTGALIISELQRIFSSTPVLSYARRGVISFKSFSPLGHVIVVMPSHSLEYQSSSWSEADDQLGEPGSRGKQMGGV

SEQ ID NO: 244897 - protein, 74 aa, Zea mays
  Clone ID: MRT4577_154936C.1.pep
YATVSAFYRPMRAIDQHVVTEGVNQSLLHEWSSSVWLLSPDVLSACPWISYISGMISSNVGRSFGVASRHLCIN

SEQ ID NO: 244898 - protein, 146 aa, Zea mays
  unsure (1)..(146): unsure at all Xaa locations
  Clone ID: MRT4577_154937C.1.pep
MAVALFSTSLSPXFLALSSPKPVAPADSXFLPFTXXLRSVSAPKTARRXFESVXVAVAREHGTEGVEXXDGXVSEELKVLXGKLPLXVDSAQLXGIFXKASSVQMPKVVYNRMSXRSRGFGLVEMSSVEEDGAAGEDFXXYYFQGR

SEQ ID NO: 244899 - protein, 65 aa, Zea mays
  Clone ID: MRT4577_154938C.1.pep
CTPRPRPFTGSCVSHSGPVLSRRCCSEIERGKLTSELLLSRVAGKADSTLTLSCFPVVPGSVFLL

SEQ ID NO: 244900 - protein, 93 aa, Zea mays
  Clone ID: MRT4577_154939C.1.pep
MSDSCLTMFYVLFDRIFYSASRLTIFYVLLDHILHNCCYLLLTDFFSNMQVEMLEKQKNEVIASHFEEDTFALVTSYRLDSFNLVLAANFVDV

SEQ ID NO: 244901 - protein, 58 aa, Zea mays
  Clone ID: MRT4577_15493C.1.pep
YNPAHVEQTSLWSTANIELMMCFLASSSFCSICCSHSFIFSGKCLNQGDICAAIWCDT

SEQ ID NO: 244902 - protein, 40 aa, Zea mays
  Clone ID: MRT4577_154940C.1.pep
FLLVRFKMVGSTQAWMTGAASRWGITRGMPHHRTSLTLFR

SEQ ID NO: 244903 - protein, 120 aa, Zea mays
  Clone ID: MRT4577_154941C.1.pep
HPGLVLQALCIYVMIHVDIYQWGGDQDRNQPTTPPLHAHRRRPHARAAAPLLLPPQHRAAEGTLTSPRDNVNCMQVTSSVAPPRAKASTTCRSPSYSRRHAPQRVHPGSGAFVILTRPLS

SEQ ID NO: 244904 - protein, 122 aa, Zea mays
  unsure (1)..(122): unsure at all Xaa locations
  Clone ID: MRT4577_154942C.1.pep
PPTRPFYCVDDDPSCVFITVNETCELANINSCERSDGKHTNNSKVATDPACLEIPHHTFALYQDPVHESQGHDHAILDISWSKKXELLSGSKDKTVRLWKDRCDSCHKVSLDNNYVTCVRAK

SEQ ID NO: 244905 - protein, 51 aa, Zea mays
  Clone ID: MRT4577_154943C.1.pep
IHYYHFYTILFLLLSLLVASLSGVGDHSSTNLIEGGGLNKSSSPPKASPAI

SEQ ID NO: 244906 - protein, 109 aa, Zea mays
  unsure (1)..(109): unsure at all Xaa locations
  Clone ID: MRT4577_154944C.1.pep
EPVFNLPMSYVVCAPPSIAYSICLALALISYQKAKRCRPPVALSTLFGVCPETGQDQAPVCPVKTPETLLSLTFKIVPKKKKKKKXKKKGRARSEDSSCGAASDINALE

SEQ ID NO: 244907 - protein, 99 aa, Zea mays
  Clone ID: MRT4577_154945C.1.pep
LLPPGINEKRKFILHLRARTLSLSLSVCLSKTCQSSLILGSRKTNRSDVFLFFSSFSLLTETVPSLRFQPCDRVAGQPRRGLGQSAKRHRSCLPRAGQR

SEQ ID NO: 244908 - protein, 399 aa, Zea mays
  Clone ID: MRT4577_154946C.1.pep
MGGSADANGAGSVRVPVPPARPFLDTFRGNLKETFFPDDPFRGVVRERGAGRRTVAALRYFFPFLEWAPAYALSTFKSDLIAGITIASLAIPQGISYAKLANLPPVLGLYSSFVPPLVYALMGSSKDLAVGTGSLFTGPAGPGKSFRFPARAAPPSSSFLSSSLGWSLSYFNFESPLPLSLSHARSSPTQQNPNPSCGRRRRLRAQPMSDSEASPPPTPAAATPAAPVETSPSSARKEELLPVEEKISELSESQSELLGRLRGLKEDLLSWRSNLDSQVTKYKVELSDIKSALNNEIEQLRSDFQELRTTLKKQQEDVSLSLKNLGLQDATENDGNKGNGDGTNEVLSANLGNLKLDGSSENYDESRESKEDKLENTDTAGDGIVDKATKETSSTDEQF

SEQ ID NO: 244909 - protein, 80 aa, Zea mays
  Clone ID: MRT4577_154947C.1.pep
MSDSEASPPPTPAAATPAAPVETSPSSARKEELLPVEEKISELSESQSELLGRLRGLKEDLLSWRSNLDSQVTKYKSGTL

SEQ ID NO: 244910 - protein, 85 aa, Zea mays
  Clone ID: MRT4577_154948C.1.pep
KIKKTRQPYKESANLQTHTCNPVALLYPHSKTHSFDVLTQLWYCQNPVDSPLIYTAANAKTFSLPNLKHSLPNPLSQHLLILNSP

SEQ ID NO: 244911 - protein, 248 aa, Zea mays
  Clone ID: MRT4577_154949C.1.pep
MGGSADANGAGSVRVPVPPARPFLDTFRGNLKETFFPDDPFRGVVRERGAGRRTVAALRYFFPFLEWAPAYALSTFKSDLIAGITIASLAIPGTMVYRRMDQYAAAQTVPGVLVLRVDAPVYFANASYLRERISRWIDDEEERTKSQGEMGVRYVVLDMGAIGSIDTSGTSMLDELNKSLDRRGMQIVLANPGSEIMKKLDSSKVLEQIGHEWVFPTVGEAVASCDYVLHSHKPGMAKDSAAAHESMV

SEQ ID NO: 244912 - protein, 50 aa, Zea mays
  Clone ID: MRT4577_15494C.1.pep
NWSTSQPLKKIQAVLDMVVIPATPLARPNLLNMCYNRRMEKNTMLVVSLF

SEQ ID NO: 244913 - protein, 313 aa, Zea mays
  unsure (1)..(313): unsure at all Xaa locations
  Clone ID: MRT4577_154950C.1.pep
QNIDCLCPVCNLCQCEDNSLKIVSVNSGYASLVTNLMPYGTVSCILIFEPNYIVAIEDSRNLHIWEMVDGWSEISEQYMIPSLGNMGPILELTRMPKNTSLIIGHDGEGGFCLWDISKRTLLATFAAPGNTVFQILPVGLCSLQEDIIDAPVDDIDKNLQVITVXLVQKKVRVNFVTPPRQDIAVWVLISCASVAEYQHDLQAKENSARWSFALLAKKRVFIGNVLDTRITALDACGNYGYAGTHGGLLYLWELSSGRKVTGTQCFNSGRVSCVSVDSKSGAVAVTDGGCHVLLYTQDKVQAADDGADGRIPV

SEQ ID NO: 244914 - protein, 145 aa, Zea mays
  Clone ID: MRT4577_154951C.1.pep
ISRVIKLFPCSVSFEQELSESQSELLGRLRGLKEDLLSWRSNLDSQVTKYKVELSDIKSALNNEIEQLRSDFQELRTTLKKQQEDVSLSLKNLGLQDATENDGNKGNGDGTNEVLSANLGNLKVSSSSIVEYFNYLLAECLACVV

SEQ ID NO: 244915 - protein, 61 aa, Zea mays
  Clone ID: MRT4577_154952C.1.pep
CSPVSACCGPLTLEHLGMFGVDRADAILPHGCGTIMAVCALDPPVGWYKTWYVLYQCPKFR

SEQ ID NO: 244916 - protein, 79 aa, Zea mays
  unsure (1)..(79): unsure at all Xaa locations
  Clone ID: MRT4577_154953C.1.pep
SDIPVDPASVGSDQTKGGGGGGGGAXVDSGNKVYVGNXLAWGVDNSTMXNLLSEQGQVLDVKVIYDRGSXRFGGFVSVS

SEQ ID NO: 244917 - protein, 48 aa, Zea mays
  Clone ID: MRT4577_154954C.1.pep
APSPQSGGISDPAGRVYNYFKSILLTFRVQSSKITSQRGVLFQLPLLK

SEQ ID NO: 244918 - protein, 124 aa, Zea mays
  Clone ID: MRT4577_154955C.1.pep
TLASLATHSPCVLPTSLHPRFAYSEYQRKTRNHARLSLLLHRLHRRLHRQTPGRQVQLYQHRRLQLLLHSLHRYVENFSLVERKRRVGSLVREGSIERGVWNLKARIYTYHGLPFLEFGKIGGV

SEQ ID NO: 244919 - protein, 61 aa, Zea mays
  Clone ID: MRT4577_154956C.1.pep
INFIKSNSFRPNIQQNHPPPFRYKQIILPFYKVQISLYPFYFSNCSPRSEANLSLHFFPLQ

SEQ ID NO: 244920 - protein, 100 aa, Zea mays
  unsure (1)..(100): unsure at all Xaa locations
  Clone ID: MRT4577_154957C.1.pep
MSENNPSQLLPXELLDRSIRPTIWVVMKGDMELVVTLCSFDVYVNMVLGDVTDYEFTVAGRRITILDQILLNGNSIGILVPWGSTTRRGMNFCFPEPHWW

SEQ ID NO: 244921 - protein, 155 aa, Zea mays
  unsure (1)..(155): unsure at all Xaa locations
  Clone ID: MRT4577_154958C.1.pep
AGRAAIAEKLEGRSGXQIGKSCRLRWFNQLDPRINKRPFTEVEEERLLNAHRAHGNKWALIARHLPGRTDNAVKNHWHVVMARRCRDRSRHHARAASSSSPLSMNLSPRETLHVDIGDRVRHKHRRKDYHAGDSADEPLKKDVPFIDFLGVGMSS

SEQ ID NO: 244922 - protein, 87 aa, Zea mays
  Clone ID: MRT4577_154959C.1.pep
HILFFATKTQTGVLKNPQHHGPMQGKKGVKKGPRAPKKPLKLPNWRVFQGKTIWGPPPTPVGPKFLPCLHPPANFWSQEPGGEKNLA

SEQ ID NO: 244923 - protein, 99 aa, Zea mays
  unsure (1)..(99): unsure at all Xaa locations
  Clone ID: MRT4577_15495C.1.pep
REWKHWGTDKLEFAIYGVTDTTGAXAIXLKDSHXEDICQVVLVARPRKVXNQVQVLRDLAGVLITRNVGISHSLRLANPLGFLKDVPLPVCAPLLKQLD

SEQ ID NO: 244924 - protein, 50 aa, Zea mays
  Clone ID: MRT4577_154960C.1.pep
VEVQHGLLSATRTSFILDIDGQLRIKDILQECKQFHQVQQASIWESCRPF

SEQ ID NO: 244925 - protein, 293 aa, Zea mays
  unsure (1)..(293): unsure at all Xaa locations
  Clone ID: MRT4577_154961C.1.pep
MYYPQPTVSLAAAVALLRPSLRRHSQRASSLLRSSTPPPWVSARRRTAVSDDFFTXSSWTLLEWXEPDSIDDGLPSPWEGAVVYRRDAAVQHLEYASTLERLGLGDLSSPDSRARAADLGLAGGTLDSTGAQPRTPVLVSVDVTRRRGRLRLDGIVRTVITLGCFRCAEPAPQGIFANFSLLLTEDPVEEEPDLGTIFQEDDDKGGASLACAMDGDQDIDWDDRLHFPAADKEIDISKHIRDMIHLEITLDAVCNPNCKGLCLTCGANLNTTSSCTCKPRNVQGLSPLKGVFK

SEQ ID NO: 244926 - protein, 83 aa, Zea mays
  unsure (1)..(83): unsure at all Xaa locations
  Clone ID: MRT4577_154962C.1.pep
MAHRVLVVLYIELPTLADTLADAEDPVTRQEHAVGNDIEMXLDAELHFLSYNQRLLKCYMDTDQHHCWCVVFKDNVHQARRYQ

SEQ ID NO: 244927 - protein, 75 aa, Zea mays
  unsure (1)..(75): unsure at all Xaa locations
  Clone ID: MRT4577_154963C.1.pep
LXTHTGVQNLGGIYRALVGHPPITNKTRGGAQTTGGQPALTLVTRHSKHETDHERHHISLLGPTKVHEKRACDNL

SEQ ID NO: 244928 - protein, 113 aa, Zea mays
  unsure (1)..(113): unsure at all Xaa locations
  Clone ID: MRT4577_154964C.1.pep
FPTXFQLHEXATDSAXCXWXXYVRXLPLAXXXRSXPNQEAXSXXFRGLQCDXAQLRVRREXXXRQLXSXEVAHEXSKLVXCYQXACPLVXYXXEHVXSAXHXRLWIQXWWGGX

SEQ ID NO: 244929 - protein, 127 aa, Zea mays
  Clone ID: MRT4577_154965C.1.pep
AAASDNLAPWRPTTSTSSTSSPENRHSLPLLPPRATLGTRPTGTTLRPRWHQNPRQRPGIGEMAATRLGGAVVDGAEGAQISYEGVSASRAGAASAVVDGSEGGGTPGVAAARARKGRAGGGRRARS

SEQ ID NO: 244930 - protein, 136 aa, Zea mays
  Clone ID: MRT4577_154966C.1.pep
PRFRNSRFGSGVSAVRGGGRARQNACGQGQGRGAFQGPGGVCRHLGPPAADAPGRGPRLLFRHAGYLIQYSAQPPAPLFATGPFFPQRSVCSRAWPSFAMDACSVLFFERLLRHGPEPPLWSCVPLGFPCTAPEPL

SEQ ID NO: 244931 - protein, 68 aa, Zea mays
  Clone ID: MRT4577_154967C.1.pep
PSLAAPRWHAPCQGQQLGWVVGPSCSASRSSSPTSPRPCSPSQRLPARKPQEGQRTRDLIQGSGYPSY

SEQ ID NO: 244932 - protein, 94 aa, Zea mays
  Clone ID: MRT4577_154968C.1.pep
FLGLQKPLQVLFFRGPFLWTLFKVCFPPPDSFLWCRSRPPWGLTPRPLFFFPPPPGGVYFSNNKGVWGFLRPQIPPGRPSPFGPPLAGCPKCVG

SEQ ID NO: 244933 - protein, 172 aa, Zea mays
  Clone ID: MRT4577_154969C.1.pep
MILIFSRITARSIHKAIHISHSYSSSFRNKEFSSYKPTFQHLSTNNPMRPNDSLEAQDMVPAEGNHSCFSSVQSTPEIEKKYVHRVYDAIAPHFSATRFAKWPKVAGFLNSLRPGSVVLDAGCGNGKYLRFNPDCLFIGCDISPPLIEICAGRGHEVLVADAVTLPYRNDLA

SEQ ID NO: 244934 - protein, 42 aa, Zea mays
  unsure (1)..(42): unsure at all Xaa locations
  Clone ID: MRT4577_15496C.1.pep
LLIQGIFRSGPFXFRGGGTLSLGVYQDFSNCLLKEWGLTDFT

SEQ ID NO: 244935 - protein, 131 aa, Zea mays
  Clone ID: MRT4577_154970C.1.pep
KRGISQSSNVDVSYAMHGQELLTESNKPHKIQLTRNEREKKYVWLKIGTAPGTEMRAEQNKCECKCGISSGCTCEHGGSQRSATCARCSHHRAQATVNKRHQAPVEEAPMHHHPPCHVSQCWPWTCNTTVA

SEQ ID NO: 244936 - protein, 146 aa, Zea mays
  unsure (1)..(146): unsure at all Xaa locations
  Clone ID: MRT4577_154971C.1.pep
MAATVMTTTTSKAGRKSLISRTLQRCKSGLSAGGGGSCGRSSTSSPPGCFSVYVGAERERFVVRAECANHPLFRRLLDDTEREYGYAAQGPLALPGCDVDSFLDVLWQMERADGAFFHEEVAAASSPMCXLHSGSKGRAAGYGMLS

SEQ ID NO: 244937 - protein, 145 aa, Zea mays
  Clone ID: MRT4577_154972C.1.pep
MPSSPWPPAAGAPPPQQRAAQGTVSTVAPERLPVEGSRSGPAKEEDTARLPSVDYYSELKTLEHAEKTKKYQGKLAARLKAKYFSNKTFEEGYVFEEIVIESKTVRLSRWPFTRLFADPARFCREKSSTEKGISPPLAGVAMSDD

SEQ ID NO: 244938 - protein, 62 aa, Zea mays
  Clone ID: MRT4577_154973C.1.pep
FLTLIFSIQKKKQIFFLLSIKPPHFKKLLYIHKTHKIKNPTPPLLLIKPFYKFLYPHPPIHP

SEQ ID NO: 244939 - protein, 354 aa, Zea mays
  Clone ID: MRT4577_154974C.1.pep
MVKTEEHYSLPSARKIYGYQSNYLWKIFHHVSKVSFPHNLHLHNQVLQNNEQPTHLPGQQHRWTPNTNNIDGHLTVFDNVSVQNNKARATDLDARSSGRQGGEGDAGCGDSFIEQRPREDRREKAAVVGEGEGDAGCGDNFIEQRPREDKREKAAVVGDSLARMGERSSGRRGGRGRDDVGRSGSVGGRWPHEDGREKTLVVRAPVLLTPASQWFMDLTASSIPHGASPHAVAAFHNMLIRADANAKAACRASEALDAIVSCLVDLDLCSLTSSLRHIERLVDVVGLLTRALGSCLDSVLPLVVSVVVNGLCKSGLVDDACRLLNDMPRNGVKLNVLWYNLMLDCYDIVALATS

SEQ ID NO: 244940 - protein, 80 aa, Zea mays
  Clone ID: MRT4577_154975C.1.pep
CSQPACVSPQAACQAKMSRCWSGGMPSLSWHETITMSMASTNSPQMTTRRGGAADMGGGGARVRLRDAGTARHGWGSSVS

SEQ ID NO: 244941 - protein, 78 aa, Zea mays
  Clone ID: MRT4577_154976C.1.pep
YVSTKARRSIRNAESAAPCNDKQVPPPVKLMQQNTRQAKTKYNILHRGCISVVQYIKSTRFHFPFHLRASLGTLFSQR

SEQ ID NO: 244942 - protein, 60 aa, Zea mays
  Clone ID: MRT4577_154977C.1.pep
QMLNLRIPKETKGVASGLIHPTRVSRTELDDDLAHTPGCASLTQPFTLHTCVAKLLYAPR

SEQ ID NO: 244943 - protein, 237 aa, Zea mays
  unsure (1)..(237): unsure at all Xaa locations
  Clone ID: MRT4577_154978C.1.pep
MASTSSSRYAKHRRIGEDDELEEVEEEAEEELERFDDFTIASSWEKFISEIEAICRQWLADGAKILMQKGAEGVPPFENLYMIKRELKHGKRVYSMEYHFMKSVKGQNSYWDDDTHSMQLSFGVDEFLIIAPLSASGVILDDPESTKLLSSVAIALSNCGSNWPAFVPVHDPSRKAYIGIQNLGTVFTRRFEADRIXSQVPIRLMHLEGLHELFLSQFCLSSSDSPARVKVHFSMKL

SEQ ID NO: 244944 - protein, 44 aa, Zea mays
  Clone ID: MRT4577_154979C.1.pep
YLAEERMVWLWLRLGLSVAMCWNGQGHAGLRHARYGLVCCPVCL

SEQ ID NO: 244945 - protein, 373 aa, Zea mays
  Clone ID: MRT4577_15497C.1.pep
MSSQSSAGGPAIHHPHSNYHPYIFQHDPPLHSNSRRRRRNHDDPYQPYLPLPHAHSHGATAVVTGTVRCHVPRDPLVLSHLQERLFPTLPQHHPIAGPPPTKRARRAPDTPWDPPPPTLQPALVPVALERPPDVGHSAGALLSRDEIERRSPSRRDGIDSALEARLRASYCAYLHCLGNRLGLPQTTIATAVVFCHRFFFHRSHACHDRFLVATAALFLAAKAEETACLLNTVLRASCEVSQNQEFNLLPYMLCGQDWFEQYRESVIQAEQMILTTLDFELEVAHPYASLSSALGKLGLTHTVLFNVAWNLINEGLRSSLWLQFKPHHIAAGAAFLAAKFLHYDITFHPNFWHEFKTSPYIVQDVVQQLKELL

SEQ ID NO: 244946 - protein, 69 aa, Zea mays
  Clone ID: MRT4577_154980C.1.pep
HACVATTYIIKFWPSSHQTYELQSSNFNKPHTTQQLNFINNLPPNPRPQDLQTIFLQLLTHQATHHLTQ

SEQ ID NO: 244947 - protein, 84 aa, Zea mays
  Clone ID: MRT4577_154981C.1.pep
KTMGETFLFGVGLYKTPEELNTICAGEALISGFQQKLSDSPAIKKCTWRIKICGRKLVFLVLTLGGGLRFKFLGRLRAFFFFFF

SEQ ID NO: 244948 - protein, 112 aa, Zea mays
  unsure (1)..(112): unsure at all Xaa locations
  Clone ID: MRT4577_154982C.1.pep
SPRRXXSPPPVIKGPERAVCRHTAHGSARYRASLKPIITSTNARQGRNTPPRTLPAMWVFLTPPPIGRIGPSKSRHQHPPEKKKKKKKKKRKIKKKKKKKKKKLVQAFFFFF

SEQ ID NO: 244949 - protein, 169 aa, Zea mays
  Clone ID: MRT4577_154983C.1.pep
TSVFEDWGDVKNQKIVEEGGVASAGIEQTVVSNDSESRKGTVLEAELQVDDNLVQEDEFVVAKEDKKPAVATDAVQVDWVKTDEANPQKSKLHEEMEVLDELLGKENMENSGISSTDENYAEKTGDDILFEDGVLIENGLATAYEHDLLWGWKALQQLLMSLGFKMDTT

SEQ ID NO: 244950 - protein, 121 aa, Zea mays
  Clone ID: MRT4577_154984C.1.pep
ARDQLVLNVHSTPYHPRDRTMWRVKMLPKHPHLNRNKRKFSRLSSRKFLVMGSFMLDCGCDGRVILRDDALQIGSKKSICSFRFFSPVWMTAGVVLFRFGLFKRVFPMAGFSLWYRRLAGG

SEQ ID NO: 244951 - protein, 53 aa, Zea mays
  Clone ID: MRT4577_154985C.1.pep
SSGNNAEYFFFFFFFFFFLIELTFFKSFLQFWTHSSQAGHTCTAHWPLSRANG

SEQ ID NO: 244952 - protein, 101 aa, Zea mays
  unsure (1)..(101): unsure at all Xaa locations
  Clone ID: MRT4577_154986C.1.pep
CPIEMEPCXPEEKNXSRLXPEKIKAPAPEASNKNADYIICHASGKELTQEEVLEARHYAQRLKYPKGALVFNGSNEERFLYCLPDNKEISVCWEIGKSIGF

SEQ ID NO: 244953 - protein, 85 aa, Zea mays
  unsure (1)..(85): unsure at all Xaa locations
  Clone ID: MRT4577_154987C.1.pep
MRPTRRQTTAAPSADSPSGAISSAPSAYAAFTALGPGPAPELAGTVATSSLAGRXRRRRTGSSLSPPLITILAATGAALLVELYT

SEQ ID NO: 244954 - protein, 48 aa, Zea mays
  Clone ID: MRT4577_154988C.1.pep
DAKNNLYIPSVHIHGGHNKVAPLHHMFRFLRNIFLCFLLRCGRRFPTL

SEQ ID NO: 244955 - protein, 45 aa, Zea mays
  Clone ID: MRT4577_154989C.1.pep
RCHNYSRPWSGALGSVRCTLNLIYSADSSIVFLKDTTPKTKIKKL

SEQ ID NO: 244956 - protein, 90 aa, Zea mays
  Clone ID: MRT4577_15498C.1.pep
DDPATAAPGDPHTIRRGGLNNSDSSPWRHYRQPAEGRDDWLERAAYLRATAAPRCGRVRQSAPCPGVKLCPLRIPLCTDSSAVLTDCPRL

SEQ ID NO: 244957 - protein, 95 aa, Zea mays
  unsure (1)..(95): unsure at all Xaa locations
  Clone ID: MRT4577_154990C.1.pep
RWLGSGVSGSRRSTGVCEYRCSVGLTVWPSDDRYIRSHLSNXGEELXSRIIHNRETRRPCGXXFMSFSTEEAMRNGIEGMNGKELDGRNITVNEA

SEQ ID NO: 244958 - protein, 48 aa, Zea mays
  Clone ID: MRT4577_154991C.1.pep
NKGHSTEGPSTAREGSVGEESHADQSKAHQFKGIQQLRWQDLGGSVGK

SEQ ID NO: 244959 - protein, 936 aa, Zea mays
  Clone ID: MRT4577_154992C.1.pep
MDRRSWLWKRKSLDKSPGESDSSGSASSHSEPSFDDQEPKPVSSNSSPNHSHSPDVSSRIIYNENQEAERAESLNEKLVLATSSNDSSPQHDQSMKPDIYQSPLLFPNIRNDDVPDSVKNLNEKVSPKFKVDDVQDSVKSLNEKLSAALLTINDKDDLVKQHTRVAEEAVAGWEQAEAEVASLKQLLETASKKNTSLEDQVSHLDDALKECVRQLRQAREEQENKIHETVAKKSKELESEKFELQHHIAELSKQLQATKLEATTVRVQRDLQEKLQIVEKENKDLKVELLALSKDLKILARERDLSNQAAETASKLHLESVKKITRVEAECLKLRHLTRRTSLTNDSRLITNSACMESQTDSQSDSGEHMLVDEMKNSDSWATALIAELDQFKNANNDTRNLVNNSVEIDLMDDFLEMEKLAALPEVDCVSSSFGAETDSDQGVSRDKSSKVKTEPLQCQVTDLHAKIEKIEGEKRELEMALADARVQLGTSCDALMVANNRLIDLQMQLDLANESKHAAFGEAERLNGERKDLALQLESRSSQVDELQLMVASLEKNVDRKVLELQLELVSVEAADLRKTVASLEEKIDAEITLSMQHKTNADLAEASKESLEAQLQSANTEIGKLNGIVQTLENEVRKETDSREELLKQIEAMKIESERSLSVVSTKESLEVQLQVANSEVAKLRGMVNALECDAANEKAYSSDLQMQLEAVEGIRKVLESELESSHQEVMRLKEKVSSLEARIKDQTSLLVEYTAKSEDAVSRKKAMEGQLEAANLEVTKLRNKVSLIQGKVEQEKLLSEEYEAKCRKLEAQVLRDSREAKLWRLTNSNGDLKVKQEKELVSAAGKLAECQKTIANLGRQLKSLTDLDGVVADPEKLESRDTHLDFRDGGDVADGLYELGLPKRNGSCLSPLRSDPSPRGLPSLSSYLSKTKR

SEQ ID NO: 244960 - protein, 76 aa, Zea mays
  Clone ID: MRT4577_154993C.1.pep
PSPQLSSYLKPTKYRYKPKRFCILYCRSPHSNLPPLFSLFHSFSLSNKQLTPKPTATSTTPCLLDITLSLSASSNA

SEQ ID NO: 244961 - protein, 88 aa, Zea mays
  Clone ID: MRT4577_154994C.1.pep
FEITAGKNKSAPLGNGAVGARACFRGTNSYVTAPRADAQPGQRIGATPGCARAQVKKRASRGSPAAQGPGPSGHGVTGRDEAESTGEQ

SEQ ID NO: 244962 - protein, 78 aa, Zea mays
  Clone ID: MRT4577_154995C.1.pep
HAASATVGQLCPSAERSNSIIIFGFPKYNNLVTFSRYSACIRLGHAEELCHFIDGSCPEILRKFIPSFHKFSQLQDFK

SEQ ID NO: 244963 - protein, 78 aa, Zea mays
  Clone ID: MRT4577_154996C.1.pep
MGVQSYYRLFCCGCGANAAAGDREGDEDGGFEAFDDKGAAEAGPRGLSWAQVEAMTGRFTSAVVGEGGFSTVYLARLS

SEQ ID NO: 244964 - protein, 69 aa, Zea mays
  Clone ID: MRT4577_154997C.1.pep
LATLCVLIYTYYATLSIHAVLVISATITLTCCCDPIDSVSCRVSGKVLPSQHAPQIPPADPWLGFRIVS

SEQ ID NO: 244965 - protein, 44 aa, Zea mays
  Clone ID: MRT4577_154998C.1.pep
FSFQNCSRFFARNRLSCCPDYKFGLFVMLTLFNILSFLLVMVIM

SEQ ID NO: 244966 - protein, 58 aa, Zea mays
  Clone ID: MRT4577_154999C.1.pep
RAPSPFFFFFRLNALRQHAYTEIIHIIDYTHVRTQYPFRTVHIITNLNFVLHSSKPNT

SEQ ID NO: 244967 - protein, 184 aa, Zea mays
  unsure (1)..(184): unsure at all Xaa locations
  Clone ID: MRT4577_15499C.1.pep
MSSPPFPTPIESMAAEGDNNMIHPLRSDGEDLPVAXLPIMQPQNIRHMVDDDCAYCVIPLPEEPSKILSKELEKCSLNLYVYIADAAVSEGVSDLVNAASINEIAACDEDVTNCHADLRWDYQMTYFNLILGVKYLNVMXLFHLTCDNDADMFKGNTPXEIRQTYNSMNDFTPEAVIPDPQGRT

SEQ ID NO: 244968 - protein, 47 aa, Zea mays
  Clone ID: MRT4577_1549C.1.pep
RLSVCVRTSGVLMTYGDDCLYVHMSITVYVCITRPRCIGEQKNSDDG

SEQ ID NO: 244969 - protein, 122 aa, Zea mays
  Clone ID: MRT4577_154C.1.pep
QVVVAVPHCRSPCRSRTSGGATSSSSCSPCCPCTARSARAPGTVAIGARMLVLGYNHLYSSIYPSLVRLMRISLARAAVSIASVRPWSVPRRVHPAAMVFDVDRPVQLRAWRRQNPCASTAR

SEQ ID NO: 244970 - protein, 64 aa, Zea mays
  Clone ID: MRT4577_155000C.1.pep
SFIHSFLWFLGGYVSRSKGRQGFFLSLLGNTIPASPFLIRAFLACFLDHSFGKESQSKSRESKV

SEQ ID NO: 244971 - protein, 93 aa, Zea mays
  Clone ID: MRT4577_155001C.1.pep
FFMWLVAHKKVWTADRLQRRGMDHPERCPLCDQDQETLNDMLLGCVFAREFWFKLLLLVNLQHLAHQSYKRVFMDWWQDLSTKIPGIARNGLN

SEQ ID NO: 244972 - protein, 100 aa, Zea mays
  unsure (1)..(100): unsure at all Xaa locations
  Clone ID: MRT4577_155002C.1.pep
WAELFTLSTIFSGGREADQFYNTCTELGTPDGSIWAEGMHLARSCRFKFFQNPTRNLPPPAEGSAIXPLSPFRQLCYWDPXRRPTAEQALQHALFNVCHW

SEQ ID NO: 244973 - protein, 57 aa, Zea mays
  Clone ID: MRT4577_155003C.1.pep
CLEFNHLDFFFLQAIPGMLLALVLFFDNRKFKDVNFAPDVFSPKRRNYVWHAVTGYG

SEQ ID NO: 244974 - protein, 109 aa, Zea mays
  Clone ID: MRT4577_155004C.1.pep
QEGADVTNASCSVADLRHRGGRHKRTSALRNRSPYNMAAGSGPNGCARCCWRSTTHLLRRTAPPKRTRTAAAVAADTTAPCRKPTEYTMPATEVAVEAPPAMNTTTWTW

SEQ ID NO: 244975 - protein, 195 aa, Zea mays
  Clone ID: MRT4577_155005C.1.pep
MVHPSIIHRARAMAYRALEVTLLSAKDLKRVNLISRMEVYAVVSISGDPLTRQCTQPDPYGGRHPSWNTSFRFNVPPTAATATGCLHVLLRTERALGDRDVGEVIVPLADILATAGGASDPGPRPPQLASYQVRKVHRCEPRGVLNVSYRLGPIVGQQAAPLARADEAAAAFVGYPVVPRGWSAARSAGCWSPAT

SEQ ID NO: 244976 - protein, 87 aa, Zea mays
  Clone ID: MRT4577_155006C.1.pep
TNKACGLQVPAPASTARARRQEQDSNNALARLARASLSCPKAPHAFTTHRRVDWPDRLAPTQQQCLCLPFDICAGSDRNKNKLTPAY

SEQ ID NO: 244977 - protein, 32 aa, Zea mays
  unsure (1)..(32): unsure at all Xaa locations
  Clone ID: MRT4577_155007C.1.pep
PNHFNXXPETMLTXPPMVMGDTPLLIAAKRVN

SEQ ID NO: 244978 - protein, 62 aa, Zea mays
  unsure (1)..(62): unsure at all Xaa locations
  Clone ID: MRT4577_155008C.1.pep
LPPGAPVPTLNSRLFDTGLQWTVDERSLTDALSCFGTVXEVXLMYDINSHRSKGFGSVRFLK

SEQ ID NO: 244979 - protein, 83 aa, Zea mays
  Clone ID: MRT4577_155009C.1.pep
VEAASIKKVCLSSSAVGADGAGPLVTVGVRVGVGVGLTSADVEHDGELLHQGLVLGASTTLPLWMSVLRKTGTRGAREMLGRV

SEQ ID NO: 244980 - protein, 45 aa, Zea mays
  Clone ID: MRT4577_15500C.1.pep
HIFHPIQTTQLTISSSLICPSKPNLQSKIKILSPISTHKNNQPSL

SEQ ID NO: 244981 - protein, 81 aa, Zea mays
  unsure (1)..(81): unsure at all Xaa locations
  Clone ID: MRT4577_155010C.1.pep
NYYYLNIILFFILGSRQKHPIYIFVLGVPTHACIFCKPAKPDTSAAYQLTFATLTKIHKHHASCSPTRPPTRPPTRXXTRG

SEQ ID NO: 244982 - protein, 65 aa, Zea mays
  Clone ID: MRT4577_155011C.1.pep
LGNSRALTGFAKVWTGCNYLVIMYKNCLLVKLSVKTFNIPGPFDMKLREAKCSGPLLQHNRFTRF

SEQ ID NO: 244983 - protein, 72 aa, Zea mays
  Clone ID: MRT4577_155012C.1.pep
SVWQTEARPCSAACPPPCQRRIGTEVVPRRNMVSSQYECLDAVTASPSSCQSRSPTLSGPPMDSSVCHLEPN

SEQ ID NO: 244984 - protein, 61 aa, Zea mays
  Clone ID: MRT4577_155013C.1.pep
VGPHVLCCRARGSYCEEIAHWAVTVINVLPAQPLTHCLRSKGYGWPSRVITLVTGEKPYPL

SEQ ID NO: 244985 - protein, 198 aa, Zea mays
  unsure (1)..(198): unsure at all Xaa locations
  Clone ID: MRT4577_155014C.1.pep
SIATSLCLLPTLINNSVILSIPQTQPTFKIKYTIATIAAFATMALAKPAFLNTDFALTEGKPYTIRYSGCDSGCTIILQNGESTDLKDYKTLTSGAKGDSFTFTPSQLPSDTYNFKITDSAGDINYSAQFTYEGSYDAPSVTSATKSAVETTAAQTTEQATTLASVTKXVEEATTAKPIIPTHVPVPPKNXTTPIATP

SEQ ID NO: 244986 - protein, 127 aa, Zea mays
  unsure (1)..(127): unsure at all Xaa locations
  Clone ID: MRT4577_155015C.1.pep
YCELPVVSSLCAARHVLYSRRCAGRQKHVRGHVKHILCSQCAKRCPKDQAIKRVQVRNIVKQVPIRNFHELCVYDAYVLPNLYAKVHXCVSCEIHAHIDRVRSRENRTHRKPPECLTCTYDRPAVAE

SEQ ID NO: 244987 - protein, 88 aa, Zea mays
  unsure (1)..(88): unsure at all Xaa locations
  Clone ID: MRT4577_155016C.1.pep
KKFFSFKKWAAITPVVFCTSKIFLPFXQVSGRNRXSFFTNKRLCLFSQRFGVTPXTLFKIKKIXPFAQLVLKNQGASFKKKIMGGENF

SEQ ID NO: 244988 - protein, 338 aa, Zea mays
  Clone ID: MRT4577_155017C.1.pep
MDPRFPPPAPSSCFGGGGELPARGHHRRAHSETFIRLPDADLLLDPDADFGFSDIDFPSLSDDSPAASDPTPQPQAPPLQPPLQQAASPASAAPPRPPSGAHMRSLSLDAAFFDGLSLQGGGGGGGVRGGVAGHKRSGSMDGDTSPFEGESAPPSVLPDYAKKAVPDDKLAELALLDPKRAKRILANRQSAARSKERKIKYTSELERKVQTLQTEATTLSAQLTLLQRDTSGLTTENRELKLRLQAMEEQAKLRDALNDALREEVQRLKIAAGQVPNMNGNPFNGGLSQQQQMPSYFSQPQQMQYFSGHQGQHHHPKHDPQNSSNGGGQPLSDSMDFM

SEQ ID NO: 244989 - protein, 72 aa, Zea mays
  unsure (1)..(72): unsure at all Xaa locations
  Clone ID: MRT4577_155018C.1.pep
GRTRALSTFCNLKSSCDXLEIVFNVXTITGGLVLITMLIVNIKVFLNATTFKKHAMHTLLHGLXCWKKRMKL

SEQ ID NO: 244990 - protein, 75 aa, Zea mays
  Clone ID: MRT4577_155019C.1.pep
DDVGYVGVVNMRVKVDEPAHAINKPLSANATISGSADTINVAIAAIVLVDVLALFPHNVPFVETVAVHGEVSCLL

SEQ ID NO: 244991 - protein, 67 aa, Zea mays
  Clone ID: MRT4577_15501C.1.pep
QSYDFWPRWWTLGGVGARPAHMYCVHAMNINSYLGACGTCMGHCLSYLTSLLLFIMFTLIRKPNGRE

SEQ ID NO: 244992 - protein, 199 aa, Zea mays
  unsure (1)..(199): unsure at all Xaa locations
  Clone ID: MRT4577_155020C.1.pep
MDGATSPFEGESALSSGLPDYAKKAMPAERIAELALIDPKRAKRILANRQSAARSKERKIKYTSELERKVQTLQTEATTLSAQLTLLQRDTSGLTTENRELKLRLQAMEEQAKLXWYVLVFLWXLKPLSYKAQKETPLFLFQEHYEANALNDALREEVQRLKIAAGQVPNMNGNPFNGGLSQQQQVPSYFLHTQQMQYF

SEQ ID NO: 244993 - protein, 163 aa, Zea mays
  Clone ID: MRT4577_155021C.1.pep
ALFIENKQRKDGSWYGTWGICFICGTFFAIKGLIAAGRTYDTSSSIRQACNFLLSKQQATGGWGESYLSSEIGNYINGNTHVVNTAWAMLSLIYAGQVERDPIPLYQAARELINMQLDTGDFPQQEHVGCFNSNFYLNYPNYRNLYPIWALGEFRQRLGANKK

SEQ ID NO: 244994 - protein, 333 aa, Zea mays
  Clone ID: MRT4577_155022C.1.pep
MDLRFPPPAPSSCFGGGGVLPARGHHRRAQSETFIRLPDADLLLDPDADFGFSDIDFPSLSDDSPAASDPTPQPQAPPPQQPLPQAASPASAAPPRPPSGAHMRSLSLDAAFFDGLSLQGGGGVAGHKRSGSMDGATSPFEGESAPTSVLPDYAKKAVPDDRLAELALLDPKRAKRILANRQSAARSKERKIKYTSELERKVQTLQTEATTLSAQLTLLQRDTSGLTTENRELKLRLQAMEEQAKLRDALNDALREEVQRLKIATGQVPNINGNPFNGGLPQQQQQQVPSYFSQPQGMQYFSSHQGQHQHPNHHPQSSSNGGGQSLSDSMDFM

SEQ ID NO: 244995 - protein, 81 aa, Zea mays
  Clone ID: MRT4577_155023C.1.pep
VFASVGVLSDFFQILVVALGVNRGALSLGVRHDTKTLTLKRIVLSFFPKMEGFFPVPFKKKIICLMFCLKESKDNYESVKK

SEQ ID NO: 244996 - protein, 57 aa, Zea mays
  Clone ID: MRT4577_155024C.1.pep
IGNDDKVQQHSKPTILLRNGGSHSATVTSSNSFKDRLLPPLTDPLIELFNSFHKSPT

SEQ ID NO: 244997 - protein, 61 aa, Zea mays
  Clone ID: MRT4577_155025C.1.pep
FRRSKVPPENLHFLTSTQVMLVFPSVDNIWKTSALSPAIVERHYSDFTLKGIQLALIHTAH

SEQ ID NO: 244998 - protein, 100 aa, Zea mays
  Clone ID: MRT4577_155026C.1.pep
MGDAAAATATASTSAPATPTSILICLEDGSDLLSDAYDGAGAADFEVARDKHLLEEDQGEEYVALLLSKGSALVCSPGQEETEKWVKEARCVSRPMKHCP

SEQ ID NO: 244999 - protein, 145 aa, Zea mays
  Clone ID: MRT4577_155027C.1.pep
AFLDARSPRWGGLGKFLRAKYLSLVHARMETAFFGRLEQRGIVSAGPGFPESSWFADFAEMARRVWLLHCLFFAFDGGAEEDGASIFQVRTGARFSEVYMESASDGRAGDDAEDRVVGFTVLPGFRVGRTLIQCRVYLSKPGRRP

SEQ ID NO: 245000 - protein, 58 aa, Zea mays
  Clone ID: MRT4577_155028C.1.pep
IRALRKTLVCLPEWGGQIPLAPQVPEILPGRGFYRLEQGPGRNWVQKKKKKAAALKEP

SEQ ID NO: 245001 - protein, 39 aa, Zea mays
  Clone ID: MRT4577_155029C.1.pep
KGSSKLAELFFAPNMFPRQMLVLLDRFLKVLDLIKSSPF

SEQ ID NO: 245002 - protein, 92 aa, Zea mays
  Clone ID: MRT4577_15502C.1.pep
MSGHTQPEGPHQLDSKHAANSCRKNVPGTSFVSDLRDHIHEFINASADEHRTCFTKTLKRMFDMSKTVTDRSSEAEEAGPESVLPLQTTVSR

SEQ ID NO: 245003 - protein, 89 aa, Zea mays
  unsure (1)..(89): unsure at all Xaa locations
  Clone ID: MRT4577_155030C.1.pep
GRRTSASSRCCPASSASTSPCRRTSSTSSRCASCQWRKYGQKISKGNPCPRAYYRCTVAPHCPVRKQVQRCAEDTSVLIPXYDCAHNHP

SEQ ID NO: 245004 - protein, 120 aa, Zea mays
  unsure (1)..(120): unsure at all Xaa locations
  Clone ID: MRT4577_155031C.1.pep
AKKKWERQSRAFYNLVRQPDKVEKVAQIFXRLEKGELKVWVKTLELKKAFXKVAAVKKKIGXGVFSGSFINLATKLVFNLIRGAATIGKSLWGFFGGQIFIGVVKVKKLGWQEKIKTGVG

SEQ ID NO: 245005 - protein, 42 aa, Zea mays
  Clone ID: MRT4577_155032C.1.pep
VKGSIWRNPSKNYLVREEPPPPCPIEGPPLRWFYWFLTKERF

SEQ ID NO: 245006 - protein, 69 aa, Zea mays
  Clone ID: MRT4577_155033C.1.pep
PGRFSQGLIIGIASQLKKCPPVSKGGTRRKGVNEGKVIYWRVAIWGGKKTWKNWQPPKKKKKKKKKKKI

SEQ ID NO: 245007 - protein, 82 aa, Zea mays
  Clone ID: MRT4577_155034C.1.pep
CSPRLVSSRFVSVSSAHHHSRVKPSTNQTLERLSAPVLNPLSFPDPCRPQAKTPRLSLDVGYIQSIHSVRNVFCIHVQVTLI

SEQ ID NO: 245008 - protein, 34 aa, Zea mays
  Clone ID: MRT4577_155035C.1.pep
AILSLFFYSRHYSAGVELTGAHGLFYVPIEPHMS

SEQ ID NO: 245009 - protein, 104 aa, Zea mays
  Clone ID: MRT4577_155036C.1.pep
ACTLTHPGAASMVTCHREVQQMTERDRRGALWQAKPLKSAHTTEADAGCTSRAGGRSRIWEHGDCAWKAPGTSPRGCLGVLESWWPRPGVCHDYCPSTPVGPRA

SEQ ID NO: 245010 - protein, 192 aa, Zea mays
  unsure (1)..(192): unsure at all Xaa locations
  Clone ID: MRT4577_155038C.1.pep
QPTPQPTCQPTCQPTPQPTHQPAPQLTPQTTLQPTPQPTPQATWQPTPQSTCQPTSQPTXQPTCQPTPQPTHQPTPQPTPQPTPQPTCQPAPQPTXNMSANISTNTPANTPVNTPANIPANTPTNTPTNTPTNTPNNIPANTPXTPTCQPTPQPTCQPAPQPTPQLTLWATPQPICQPTPQPTHQPTPQATL

SEQ ID NO: 245011 - protein, 43 aa, Zea mays
  Clone ID: MRT4577_155039C.1.pep
IKLIISIHMYHKFDSYRDHWICFIIYPKVGKVLVKGIGADCSP

SEQ ID NO: 245012 - protein, 51 aa, Zea mays
  Clone ID: MRT4577_15503C.1.pep
AGGYSTPESGLDYSTITRSNSAYGRRLMTHNHHTASIRTNHPVNLIPALPR

SEQ ID NO: 245013 - protein, 61 aa, Zea mays
  unsure (1)..(61): unsure at all Xaa locations
  Clone ID: MRT4577_155040C.1.pep
NTKGSQFFFCPVGTPWFXGKHFFFGQVFKGMDVFKALKKGGPPKGSPSXKVVKVPYLGHLP

SEQ ID NO: 245014 - protein, 70 aa, Zea mays
  Clone ID: MRT4577_155041C.1.pep
RRHDAEGLPPLSENNNVWNAPEYITRTKPSNYLQVSPPISRRAMDPKRCLRTSARKKGGTQPRHLLPHKG

SEQ ID NO: 245015 - protein, 46 aa, Zea mays
  Clone ID: MRT4577_155042C.1.pep
FLFFLFFFYLFFCFFFNIIFFFLFFHSFFFFRTKTEMALIKQQGNC

SEQ ID NO: 245016 - protein, 54 aa, Zea mays
  unsure (1)..(54): unsure at all Xaa locations
  Clone ID: MRT4577_155043C.1.pep
YSIALLPLTXSTTFTHTSXGCRXQPPTSVHIPTPTHLTTSIHMPTTLHLPPSTT

SEQ ID NO: 245017 - protein, 114 aa, Zea mays
  unsure (1)..(114): unsure at all Xaa locations
  Clone ID: MRT4577_155044C.1.pep
KKPEDIVPLSHNCDIPHVNRTEYQPIDISEDGXASPLTSDGNTXDDLRLPTEXTFVAQNNECVGSGNDLDVTVQAWMGEEQICALKDIGPKKLLGFGDGPLLYLNLNRTRSVSP

SEQ ID NO: 245018 - protein, 98 aa, Zea mays
  Clone ID: MRT4577_155045C.1.pep
LNLHAYVSILRSCPRQKSTMMPPWSSPAVKPSRGCRRRGPAARMSGSSGLEARLGHPLAHGRGVGRSSVARAPWFYCGPHQRGSSNAWWSCLCWVGVV

SEQ ID NO: 245019 - protein, 134 aa, Zea mays
  Clone ID: MRT4577_155046C.1.pep
MSSRRPSHPSHRNPRRFPSACYLLVLTLALLVVSAAAKSSRRPISDNEIRQKKEACYTDVENGLWGWVCRYSPTEKENCVLRCLSPECYDLIYGGDPLEEGELDYVRSQEYKYCMHKSSLGESLDGVKGSFSYS

SEQ ID NO: 245020 - protein, 54 aa, Zea mays
  Clone ID: MRT4577_155047C.1.pep
SKTTNKKFGDQHFKSVFPFRRTPPGGCTRALYLTLKQGTYKLLTQLKSQTFTPR

SEQ ID NO: 245021 - protein, 124 aa, Zea mays
  Clone ID: MRT4577_155048C.1.pep
KINPKRTRFFTDIQSFFTYMFCNTSVKTAAAVSKPLYSLCRLLNRKEKEDQKTNWNADKSRCSSLFEAVTKQINLSGTENCSSLWPTFNAKIATYLAPLLCKLALPSVSLLALSVFHLWYVVFG

SEQ ID NO: 245022 - protein, 87 aa, Zea mays
  Clone ID: MRT4577_155049C.1.pep
MELLGLVPAEAIALRLYSLPAAAAAAGSLCAWLVAALAAAIGLWRIRADSVCNNNKRDAGVSALVDDNQEPLRPLLPTRGAGITDKP

SEQ ID NO: 245023 - protein, 92 aa, Zea mays
  Clone ID: MRT4577_15504C.1.pep
MSGHTQPEGPRQLDSKHAVNSCRKNVPGTSFVSDLRDHIHEFINASADEHRTCFTKTLKRMFDMSKTVTDRSSEAEEAGPESVLPLQTTVSR

SEQ ID NO: 245024 - protein, 59 aa, Zea mays
  Clone ID: MRT4577_155050C.1.pep
KDKEEAHRLQEERHLFHDRTGKKLLEMESAIARANAQLEKANTSARKPDVVNARLTLQI

SEQ ID NO: 245025 - protein, 77 aa, Zea mays
  unsure (1)..(77): unsure at all Xaa locations
  Clone ID: MRT4577_155051C.1.pep
ATPSRDFPQETAREPEEIREHASPPKEHKHKKIQEATGTKGTNGCTRNQPGIKTIKIQHKFASRLHTARXEKKTPPA

SEQ ID NO: 245026 - protein, 65 aa, Zea mays
  Clone ID: MRT4577_155052C.1.pep
PFAGEGFFFFTPTMPTSTRRRGPDQGAQPAHDKTSSLQRRPTDTCWYDHLLTRSQGLRGGSQQAP

SEQ ID NO: 245027 - protein, 84 aa, Zea mays
  unsure (1)..(84): unsure at all Xaa locations
  Clone ID: MRT4577_155053C.1.pep
SLSITVRDTLSGRGPAIXSKNIRTKKHDCKILTNSVVMDFGNNGEVVGDTLLNFKFYHMNMNRGKDMPIKDATETAPGDRPNTD

SEQ ID NO: 245028 - protein, 149 aa, Zea mays
  Clone ID: MRT4577_155054C.1.pep
MDSSQLTGDNTEECNSNESGWTMYLGSPVNSDDLKANGSKWSNNVGSGCSNGRSKNDNMDYDDGDYDSLASDASTGPAQVKVLNGKEKKIHEKRDNSIEEQDSDEQDEQAKLPNNCDKKAGKMKKEEKTTRRSHNKRRSSCSSRTSFFR

SEQ ID NO: 245029 - protein, 89 aa, Zea mays
  Clone ID: MRT4577_155055C.1.pep
LGVLRLLLGAPVRCRCPPVPAWRAGPLEPAPRRAPWRWRPSWPCWRRAVGRVACDDPVWYAWLVPLPSAVPSLPRVRARVSGRLVPTPG

SEQ ID NO: 245030 - protein, 549 aa, Zea mays
  unsure (1)..(549): unsure at all Xaa locations
  Clone ID: MRT4577_155056C.1.pep
APYKLRRRNSETLRAQYINTKELRVCVGTWNAGGKAPPNDLDIAEWLGTGGDAEPADIYVLGFQEVVPLNASNVFGAEDGRPARAWESVIRGALRQAQPPAPRYRCYSHPPSPSRFEPPIGAAEELLPGGTDTETDTDEDVPLGDPVAAATPTPRKLSRLNHFXSSWARTRTAHRSSTAXLDDGPDQPPQQLSLQQRALLRSLSRADRVGVLWPEQPLDLLPASSASASASASFRASKSFSRAAYRSSFRGSSRVAADVVDDLPMIPDLDLDGALRKKGRSPFVRIVSKQMVGIFLTVWVRRGLRKCVQSLKVSTVGVGAMGYIGNKGAVSVSMSVYQTMFCFVCSHLAAGEKPGDVHKRNADVHEIRRRTRFAAPGDLQLPRNIHDHDRIFWLGDLNYRLDASYERAHELISAGSWRELAETDQLKRELRKGRAFDGWTEGVLEFAPTYKYELGSRRYVGVGDHQGQSQSQRGGGRRTPAWCDRVLSYGKGLRLLGYRRSELALSDHRPVTATYAAEVEVFSSRKLQRALTLTDAEVEGGQVVPDLDF

SEQ ID NO: 245031 - protein, 168 aa, Zea mays
  unsure (1)..(168): unsure at all Xaa locations
  Clone ID: MRT4577_155057C.1.pep
RADHLLCKKKKKKKKKKKKKKKKKKKKKKKKKKKKKKKKKKKKKKKKKKKKKKKKKKKKKKKKKKRGETVVGGGKKGIKTRKKRALNXQKRPQKKKTKRXKGGGRPRVLKIFKKKKKKVFLKGGGWGVFSKKKKKFFEKPGEKKGVKREKKKTFFFKKKEKFVFAPPG

SEQ ID NO: 245032 - protein, 127 aa, Zea mays
  unsure (1)..(127): unsure at all Xaa locations
  Clone ID: MRT4577_155058C.1.pep
PAGTPPQNRDGSAAILSASPVTLISTDVWSRARRHKKPTEGAAHINLRVKGQDANEGIFPIKRXSQTXKLMNAYCXDRQSENIEXVVFLFDGRRLRGEETPDEMQMEDGCXIDAMLHQTGGSVPSTT

SEQ ID NO: 245033 - protein, 64 aa, Zea mays
  Clone ID: MRT4577_155059C.1.pep
ERSIHVGSLDSGYIYHSDMHAVLPGYILGGLDILPSILSVVCSRRCIELIYGRMDLVHCRTSFA

SEQ ID NO: 245034 - protein, 92 aa, Zea mays
  Clone ID: MRT4577_15505C.1.pep
YLTVFYGRGVIFFCYKHNQKSFFKSPAYCTKTNRNRGRAHAIPKDRDPGQPGHPKQSLGTPAGPNGPGSRTPRRLIDPGEGTFPAIVDHPGA

SEQ ID NO: 245035 - protein, 186 aa, Zea mays
  unsure (1)..(186): unsure at all Xaa locations
  Clone ID: MRT4577_155060C.1.pep
PGRQGKRRDAGGTSTTSRSXPRPQQRSRRRTPKKRRRGRAPTSPICRPGRRCRARGRRAARXPVRRAAARGXPPSRGRSAPRRARRRRVRRRAAGPPARRGPRDRRRXGFKRFLSFGRKXTGGGRSLSSTARRRPCPRRSTTPAAGGSPLMGQSSAGWAPLMLPLMIQNMAIRCLHKQRRALCKAL

SEQ ID NO: 245036 - protein, 137 aa, Zea mays
  Clone ID: MRT4577_155061C.1.pep
MADSKAAAAVTLRTRKFMTNRLLSRKQFVLEVIHPGRPNVSKAELKERLAKIYEVKDPNCIFVFKFRTNFGGGKSTGFGLIYDNLEAAKKFEPKYRLIRNGLATKVEKSRKQMKERKNRAKKIRGVKKTKAGDAKKK

SEQ ID NO: 245037 - protein, 56 aa, Zea mays
  Clone ID: MRT4577_155062C.1.pep
RSTCRGPGVRRPTVSLPSDLKPWNGATPVADEPIITVGAMASWLAGWLVCVPASSA

SEQ ID NO: 245038 - protein, 100 aa, Zea mays
  Clone ID: MRT4577_155063C.1.pep
RAALSKKKKKKKEKKKKKKKKKKKKKKKKKKKKKKKKKKKKKKKKKKKKKKGGPPIRELVNPEINSGPVPAGVPIFPKGGRLKAGRKKGKSCSRGKIVIR

SEQ ID NO: 245039 - protein, 90 aa, Zea mays
  Clone ID: MRT4577_155064C.1.pep
QYMEGFNDELEAFKERVRGRAKLRIEKAMKEYEEEERKKRLGPGGLDPVEELQKCFDVKDVQMLQDAISKMDPTDAKYHMQRCIDSGFWV

SEQ ID NO: 245040 - protein, 68 aa, Zea mays
  Clone ID: MRT4577_155065C.1.pep
VSQSPLLDLKRLMTMAFLAWGCVTPAENRDLGNQNCYKLFQPLLPLARKKRKKKKKSPIKKGKKKKKN

SEQ ID NO: 245041 - protein, 53 aa, Zea mays
  Clone ID: MRT4577_155066C.1.pep
YISMISSSFFRRRFRSVCSQLPPEVLEITHQFEMIRGPTTDIERTADPMLTVA

SEQ ID NO: 245042 - protein, 84 aa, Zea mays
  Clone ID: MRT4577_155067C.1.pep
PCIFWQDNDKLQYGGHSWTKAGGLSKNMHLIFTEAAMKAVDSGYQYSLFLKAHVLSSPAMTGLIQCYYRWIKTLPQTAVYPRVK

SEQ ID NO: 245043 - protein, 79 aa, Zea mays
  Clone ID: MRT4577_155068C.1.pep
PSRVRPRVSGSFRWSVRIACGGAWRRTIQPLGSLSGLVRRGGSQDRGSGLLCAFLGWRVRVRGLCVGPPGLRVRRLSST

SEQ ID NO: 245044 - protein, 132 aa, Zea mays
  unsure (1)..(132): unsure at all Xaa locations
  Clone ID: MRT4577_155069C.1.pep
MCCLHHDELKVVFHVSKRIRKAVQLAREFHFNYTTPDRSRQDLLLNRTPLPTEHWPFLRYSCIFIFSTDSADLVTLISSNNIACPLXNGKDVHVSTPRTPRAPKHAARLSRLKLVDVKPITAVLXPESSTPF

SEQ ID NO: 245045 - protein, 144 aa, Zea mays
  Clone ID: MRT4577_15506C.1.pep
PIEFTQLYEDETKHIPLCATGMVRAHRAWATRCRSAVVVTTYEPRPAGRSIRPHTPSRRRSRRRPSRLRPPAGRSSPSRSGNPRRWLLRRLQGTSTTGYCTHSSSTLHRLHGLARRGTSGDHGRLGVNSLNSVVAGRYGAVGHA

SEQ ID NO: 245046 - protein, 47 aa, Zea mays
  Clone ID: MRT4577_155070C.1.pep
IGSTVCIQLNGYSIRVCASANYQRESFALFTAIDDGLAAHRCQHRAG

SEQ ID NO: 245047 - protein, 79 aa, Zea mays
  Clone ID: MRT4577_155071C.1.pep
HQSVCDPLLLASDSIRYGINVSRSSCTIDPQGGAKATYRVAPPTMAVTIRPKPDTSQKLEAVDMTHTLTARSNMDQATS

SEQ ID NO: 245048 - protein, 212 aa, Zea mays
  Clone ID: MRT4577_155072C.1.pep
PPEDAATVAPTSVPSSAASAIDFLTLCHRLKTTKRKGWINHSIKGPESIADHMYRMALMALIAGDLPAVDRERCIKIAIVHDIAEAIVGDITPSDGIPKAEKSRREQAALDEMCQVLGGGPAADEIKELWEEYENNSSIEANLVKDFDKVEMILQALEYEKEHGKVLDEFFLSTAGKFQTEIGKSWAAEVNSRRKEGCGKQEPSSNFHGNVL

SEQ ID NO: 245049 - protein, 95 aa, Zea mays
  Clone ID: MRT4577_155073C.1.pep
KWAGKMRRANTIALSLFTELKKEEVSHSRWIPGYNETLHSFTYPLVFEQLRTFQLTRLKSSVHSITLLLLFRKAEQPCQSVNCHQPTAEVGSRAT

SEQ ID NO: 245050 - protein, 90 aa, Zea mays
  Clone ID: MRT4577_155074C.1.pep
TTKRKGWINHSIKGPESIADHMYRMALMALIAGDLPAVDRERCIKIAIVHDIAEGRSRSCVPCSTQIVGVLYVQCTYLIMKTTLHLRILY

SEQ ID NO: 245051 - protein, 68 aa, Zea mays
  unsure (1)..(68): unsure at all Xaa locations
  Clone ID: MRT4577_155075C.1.pep
LEGGPXFFYYLFIYFYFIFLFLFFFFIFFFFFFFFFFFFFFFFFFFFFGQKKRVKIQKKGRKVKRKGG

SEQ ID NO: 245052 - protein, 72 aa, Zea mays
  unsure (1)..(72): unsure at all Xaa locations
  Clone ID: MRT4577_155076C.1.pep
LVRCVLRAWVFPLLRALVXGGAFVSSASFLRXGVAVFFSPPFFPLRFLLFFPPALPAASVPVNRVKTVECPP

SEQ ID NO: 245053 - protein, 124 aa, Zea mays
  Clone ID: MRT4577_155077C.1.pep
EKNFFPFNQLFTLTPAVFLHHHLFPFSRVVLAYFKKKKFFPFNQWAALTPAVFLHQQILLPFRGLVAPSGASFLTQQQLLPFYKRFGATPPPLLQLHQLWPFGPLVLTNPAAPSQQPILGGAPF
